United States Patent Application Publication US 2026/0242817 A1 - sequence listing, part 2

SEQ ID NO: 4099 - protein, 820 aa, Zea mays
  VARIANT 210: note = Ancestral polymorphism is C, Derived polymorphism is Y
  VARIANT 219..820: note = Derived polymorphism lacks residues 219 to 820
  VARIANT 292..820: note = Derived polymorphism lacks residues 292 to 820
  VARIANT 334..820: note = Derived polymorphism lacks residues 334 to 820
  VARIANT 346..820: note = Derived polymorphism lacks residues 346 to 820
  VARIANT 390..820: note = Derived polymorphism lacks residues 390 to 820
MAFHVACPITCRRVCDCELGFGASASRKGGGGALAAVWAGTAAALEDFLADPWLLRPAGAVDADAATVQVEVPPLEPAPEDGEDEARRAAAQRGAAAAEDLARRFESGAYGSPEAEGDEDEWDREDQGNAAVKTFSTGAHGSVLLAAVVRLVVFLFPAIIMNFYPSVKFGLFILVLVLCLNLHLDSIYHFCYMVCRRPGDPNKLMFCKRCDDPYHCYCQQPSHKNVTHGPYLCPKHTRCHSCGSGVPGSGHSTRWFLGYTCCDACGRLFVKGNYCPVCLKVYRDSEVIPMVCCDVCEKWVHIECDGISEEKYQQFQADQNLQYTCAACRGECSQIRDTEDAIRELWKRRDVADHELMITLRAAAKLPSLEDVSPLYPNSDDEKLGAYVLKSESRNTLKFSLKSNSSKPPPDTPEQEKVVFKSSGSNKKPSKKKGGQGNKTNDGHDEIFLERRHDVKSSNSRLGDQSIDGNHDMSPFKNDDNAYISSSTRSSEKNLKSPSMKAVTNNADMIPKVKIKGSKVSSLHYKDGEENTSKADTGKATKLVIHLGSRHKTRSGSPKSELSNYQREQDLGSIHGRKLDVTSQLKGSRSEVKERSVMKLVRETGVQQRNSLLGDLGTSKKHATGKRSNALISGMENGNETGTRNRPFAQKQSHSSQVDENQGTADSPDNLKPSLLKLKFKRPHYEQLNTQASQPEEPTSWVSQQEDQFNVAKGQRSKRKRPSMEKADGLDGTTPAKRHHQSTDDEVMDANWILRKLGKDAIGKRIEVHLTSDGKWHQGMVSNVMGGTLCIQLDNGRSENVELGKQAIRLIASRSKGRKR

SEQ ID NO: 4100 - protein, 501 aa, Zea mays
  VARIANT 442: note = Ancestral polymorphism is G, Derived polymorphism is E
  VARIANT 325: note = Ancestral polymorphism is A, Derived polymorphism is G
  VARIANT 187: note = Ancestral polymorphism is P, Derived polymorphism is L
  VARIANT 141: note = Ancestral polymorphism is A, Derived polymorphism is S
MLARRLAAPDGGRLFSAASSASARGGHAGGDTLGKRLLKLIYPKRSAVVVLQRWADEGRTVQKYQLNRVVRELRKYGRFKHALEICEWMRTQPEMRLLPGDHAVHLDLVAKVRGLASATKFFEDMPERAKGPSTCNALLHAYVQNGAREKAEAMLAEMARVGYLTCALPFNHMMSLYMATGELERVPEMIKELRRYTLPDLVTYNIWLTYCSKKDSVKSAEKVFGLMKDDCVVPDWMTFSLLGSIYINAGLHVEGRNALVEMEKRASRKERAAYSSLLTLYASLSDRGNLDRVWNKMRGTFRKFSDTEYKCMLTSLLRFDDIAAAESIFSEWESTSGTRDSRIPNTILSYYIKNGMIKKAESFLDHIVEKGVKPSYSTWEAFVWGYLGDKTDKVLECMKKALSCLEKWEPNHELATAIFSQIEKTGDIEAAEKLLVIFRDAEYVTTEMYNSVLRTYAEAKLMPLIVDERMEQDKVAMDVETKRLLRLTSKYPIGEVSVSMS

SEQ ID NO: 4101 - protein, 47 aa, Zea mays
  VARIANT 29: note = Ancestral polymorphism is G, Derived polymorphism is R
MQELDVSNGIVRGKLDQLRRCFEVQFAAGRDLTPDQLNNMIEILSDW

SEQ ID NO: 4102 - protein, 493 aa, Zea mays
  VARIANT 3: note = Ancestral polymorphism is G, Derived polymorphism is E
MMGPLPLRRRVGVLLFLALVLLGGGGGADAGTTSSYRRKLEATVEMPLDADVFRVPPGYNAPQQVHITLGDQEGTAMIVSWVTASEPGNSTVAYGEDPARMERRADGAHTRYDYFNYTSGFIHHCTLRNLKVHLFVCPQPFFHLLCILLMAAVDGLLQHATKYYYAMGFGHTVRTFWFTTPPKPGPDVPFKFGLIGDLGQTFDSNITLSHYESNGGDAVLYVGDLSYADNHPLHDNNRWDTWARFVERSVAYQPWVWTAGNHELDFAPELGETTPFKPFAHRYPTPYRAAGSTEPFWYSVKVASAHVVVLASYSAYGKYTPQWAWLQAELARVDRKTTPWLVVLTHSPWYNSNNYHYMEGETMRVQFERWLVDAKVDLVLAGHVHSYERSHRVSNVAYDIVNGKSTPVRSADAPVYVTIGDGGNIEGIADNFTRPQPGYSAFREASFGHATLDIKNRTHAYYSWHRNHDGAKVVADGVWFTNRYWMPTDDDTN

SEQ ID NO: 4103 - protein, 381 aa, Zea mays
  VARIANT 19: note = Ancestral polymorphism is S, Derived polymorphism is C
  VARIANT 115: note = Ancestral polymorphism is W, Derived polymorphism is S
  VARIANT 229: note = Ancestral polymorphism is S, Derived polymorphism is F
MGEEAVHFSVVDAKDCKQSAFEVGDKTYVICRSDDDLKTSAVKIHDKLTQTWLSPTILGEQPLLTKSQSVIPVSDEKILVIEKGVPLNESIWFLEIDTPFVKQQRKIKETEVVSWSKGVIGVGQKPVVISGPSGVGKGTLIAKLMKDYPSKFGFSVSHTTRSPREKEIDGVHYHFTERIKIEKDISEGKFLEFAHVHGNVYGTSIEAVESVTDEGKRCILDIDVQGARSVRASSLEAIFIFVCPPSFEELEKRLRARGTETEEQIQKRLRNAQAELDQSNEPGLFHHLLVNDDLETCYENLKKLLSLDDDQEDSDDFFNKEDKETASYSIVSKTDSEILLQSETNEGKNGAIHLLALDLSSLSGGAPGRTRGLKIGSVNSF

SEQ ID NO: 4104 - protein, 215 aa, Zea mays
  VARIANT 8..215: note = Derived polymorphism lacks residues 8 to 215
  VARIANT 14: note = Ancestral polymorphism is D, Derived polymorphism is N
  VARIANT 16: note = Ancestral polymorphism is G, Derived polymorphism is R
  VARIANT 36: note = Ancestral polymorphism is S, Derived polymorphism is Y
  VARIANT 52: note = Ancestral polymorphism is I, Derived polymorphism is T
  VARIANT 186: note = Ancestral polymorphism is L, Derived polymorphism is P
MLMSEWPWQIRELDSGKFLVRFPPHKKMADIKNHPSFNLRKEGVKVEVLEWIVSGFGMMSEVDWSTLFKSFYEKVRLKIFFRDPSRIPHERLFEMEKKPFLISLEVEDETKGQDGQQPENNTSNTLVQNEKRPSLFKGKENSYKGGKSVEGDMVFVQAKQLVAGMSENPELLTTPIGEKSESVEFLEKICRGLSANEVEYVLLEQGVLFWDKRKN

SEQ ID NO: 4105 - protein, 903 aa, Zea mays
  VARIANT 357..903: note = Derived polymorphism lacks residues 357 to 903
  VARIANT 412..903: note = Derived polymorphism lacks residues 412 to 903
MAEGLILVVLQKIATTLGGAALSVIKSKLGKGANILLEAENSMKEIESEFEIMQAYISQADPYSESNKILKPWLKNVRKIASEVEDIIDEYAFLLGKLDNAGYLAKKFHHSRYITAWSDISSQLKQVQARLQNLTVLKDRYGITVVGPGGGSSSHNNSRKNYLSESSYLNDDGDGVMVGNEDEVKKLTECIDGAGADRAVISIWGMGGSGKTILARGIYRKREVRKNFQCCAWITVSLNYQVEDLLNKLIKELHIQDVPDATDSTHLVARIQNHLKDKRYLVVLDDMWNRESWLFFDRVFVKNLYGSRVIVTTRTEAVASIAELNHTIRIGLLSQGESWKLFGRKAFSKIGKEEPTCPQGLVQWANKILERCQGLPLAIVAIGSLLSYREMEEQEWRLFYNQLNWQLTNNPELNFVSSVLKLSLNDLPSHLRNCFLYCGLFPKDYQIRRKCLIRLWVAEGFVEDRGTEITLEEVAEEYLKELTRRSLFQVMERNEFSRPRRFQVHDLVREMTLAISRNERFGHVSDQPDVTDIGDVGKRVSVHSGGQIYQPGPSSQHLRSFLLFDKHVPLSWISIASSDFKLLRVLCLRYSLLEDIPDAMTCLFNLHHLDCSRTKVRKVPRSVARLKKLETLHLRFARVRELPSEITMLTNLRHLSVSDDLYGTSICGTIRSLKHLQTLREVKVNKDLAKSLGYLTQLRSLGITGVIQSHNADLWASIRKMTVLNKLAVATPGESNEVLSFEELRPLKNLEKFYLTGKLAEGKLFPVSNGFQKLKVLTMRWSKLTHDPLSSLCQMENLVYLNLYCAYDGECLIFSSGWFPKLKQLYLGKLERLRSIQISDGAIENLTYLELHELWNLKSVPEGLVYLRSLQHLYARKMPADFVEELEGSCQGFVRHIANIECM

SEQ ID NO: 4106 - protein, 139 aa, Zea mays
  VARIANT 100: note = Ancestral polymorphism is K, Derived polymorphism is E
  VARIANT 82: note = Ancestral polymorphism is L, Derived polymorphism is P
  VARIANT 73: note = Ancestral polymorphism is G, Derived polymorphism is R
  VARIANT 70: note = Ancestral polymorphism is E, Derived polymorphism is K
  VARIANT 65: note = Ancestral polymorphism is F, Derived polymorphism is Y
  VARIANT 64: note = Ancestral polymorphism is E, Derived polymorphism is K
  VARIANT 57: note = Ancestral polymorphism is K, Derived polymorphism is E
  VARIANT 52: note = Ancestral polymorphism is E, Derived polymorphism is K
  VARIANT 51: note = Ancestral polymorphism is P, Derived polymorphism is S
  VARIANT 48: note = Ancestral polymorphism is S, Derived polymorphism is T
  VARIANT 46: note = Ancestral polymorphism is F, Derived polymorphism is Y
  VARIANT 44: note = Ancestral polymorphism is K, Derived polymorphism is N
  VARIANT 40: note = Ancestral polymorphism is F, Derived polymorphism is L
  VARIANT 39: note = Ancestral polymorphism is H, Derived polymorphism is N
  VARIANT 38: note = Ancestral polymorphism is R, Derived polymorphism is C
  VARIANT 34: note = Ancestral polymorphism is L, Derived polymorphism is V
  VARIANT 28: note = Ancestral polymorphism is P, Derived polymorphism is H
  VARIANT 27: note = Ancestral polymorphism is L, Derived polymorphism is F
  VARIANT 26: note = Ancestral polymorphism is S, Derived polymorphism is Y
  VARIANT 18: note = Ancestral polymorphism is L, Derived polymorphism is I
  VARIANT 12: note = Ancestral polymorphism is H, Derived polymorphism is Y
  VARIANT 7: note = Ancestral polymorphism is V, Derived polymorphism is I
  VARIANT 6: note = Ancestral polymorphism is T, Derived polymorphism is I
MSLPNTVSRFYHLKFLDLKQWGRDRSLPKDISRLENLRHFIASKEFHTNVPEVGKMKFLQELKEFHVKKESVGFELGELGKLAELGGELNILGLEKVRTEQEAKDTKLMSKRNLVELRLVWNTKQESTVDDILEKFEND

SEQ ID NO: 4107 - protein, 490 aa, Zea mays
  VARIANT 5..490: note = Derived polymorphism lacks residues 5 to 490
  VARIANT 67: note = Ancestral polymorphism is K, Derived polymorphism is N
  VARIANT 237: note = Ancestral polymorphism is S, Derived polymorphism is N
MDIIYQDSSCLALEQALHDEGVGPIDLPFMLLRAITKDFSDTQLIGRGGFGEVYKGVLPNGMVVAVKKLLDKIDVLEANFQSEVACLIEVKHRNIVRCLGYSSETQHVRAPYEGRFVWADLRQRLFCFEYLSKGSLADYLTGASFALQWSVRYQIIKGICEGVGYLHQHNIIHMDLKPQNILLDDNMVPKIADFGLSRRLSENQSRIITKTIIGTPGYLAPEFLSSNAITFKADIYSLGVIITEILTGHKECTSVDKVLESWTDMFQTLGSHPLLEQVEVCAEIAINCMNDDPSNRPTIQDIISSIDETDARSVTSSSPGGQVITMAGSESSSSRSRSPCASCRMLRQQCTQECVFAPYFPAEEPHKFAIVHKVFGGSNVFKLLQELPAHQRGDAVSSMVYEANVRTRDPVYGCVGAISVLQQQISQLQMQFSMARAEILTLQQQMDVNDSLPSQNSFDRYGNGDLKPDSPPEILSSEDEVEEVSSPMSP

SEQ ID NO: 4108 - protein, 97 aa, Zea mays
  VARIANT 41..97: note = Derived polymorphism lacks residues 41 to 97
  VARIANT 43: note = Ancestral polymorphism is D, Derived polymorphism is G
  VARIANT 88..97: note = Derived polymorphism lacks residues 88 to 97
MMEKKDAIRKMVVDSKWYDLPDVKSKKGKEATTMVLSIPFWIGVSLCLKVFEPLVKLLRLVDGDVKSSMGFLYGELINAKKAIKEALGMLRQNTKKL

SEQ ID NO: 4109 - protein, 97 aa, Zea mays
  VARIANT 19: note = Ancestral polymorphism is A, Derived polymorphism is T
MRKPECPAANSSNAGAAAAKLRKGLWSPEEDERLVAYMLRSGQGSWSDVARNAGLQRCGKSCRLRWINYLRPDLKRGAFSPQEEELIVSLHAILGNR

SEQ ID NO: 4110 - protein, 1212 aa, Zea mays
  VARIANT 644..1212: note = Derived polymorphism lacks residues 644 to 1212
  VARIANT 83..1212: note = Derived polymorphism lacks residues 83 to 1212
  VARIANT 81..1212: note = Derived polymorphism lacks residues 81 to 1212
  VARIANT 41: note = Ancestral polymorphism is A, Derived polymorphism is T
  VARIANT 34: note = Ancestral polymorphism is R, Derived polymorphism is C
MADLALAGLRWAASPIVNELLTKASAYLSVDMVREIQRLEATVLPQFELVIQAAQKSPHRGILEAWLRRLKEAYYDAEDLLDEHEYNVLEGNAKSEKSLLLGEHGSSSTATTVMKPFHAAMSRARNLLPQNRRLISKMDELKAILTEAQQLRDLLGLPHGNTVEWPAAAPTSVPTTTSLPTSKVFGRDRDRDRIVDFLLGKTTTAEASSAKYSGLAIVGLGGMGKSTLAQYVYNDKRIEECFDIRMWVCISRKLDVHRHTREIIESAKKGECPRVDNLDTLQCKLRDILQESQKFLLVLDDVWFEKSHNETEWELFLAPLVSKQSGRKVLVTSRSKTLPAAICCEQEHVIHLKNMDDTEFLALFKHHAFSGAEIKDQLLRTKLEDTAVEIAKRLGQCPLAAKVLGSRLCRKKDIAEWKAALKIGDLSDPFTSLLWSYEKLDPRLQRCFLYCSLFPKGHRYDPNQLVHLWVAEGFVGSCNLSRRTLEEAGMDYFNDMVSGSFFQLVSQMYCDSYYVMHDILHDFAESLSREDCFRLEDDNVTEIPCTVRHLSVHVQSMQKHKQIICKLYHLRTIICIDPLMDGPSDIFDGMLRNQRKLRVLSLSFYSSSKLPESIGELKHLRYLNLIRTLVSELPTSLCTLYHLQLLWLNHMVENLPDKLCNLRKLRHLGAYVNDFAIEKPICQILNIGKLTSLQHIYVFSVQKKQGYELRQLKDLNELGGSLKVKNLENVIGKDEAVESKLYLKSRLKELAFEWSSENGMDAMDILEGLRPPPQLSKLTIEGYRSDTYPGWLLERSYFENLESFELSNCSLLEGLPPDTELLRNCSRLHINFVPNLKELSNLPAGLTDLSIDWCPLLMFITNNELGHYDLRENIIMKADDLASKLALMWEVDSGEEVRNVLWKDYSFLKQLMTLMMDDEISKHLQIIESGLEESEDKVWMKENIIKAWLFCHEQRIRFIYGRTMEMPLVLPITDEALAICLGGLTSLRTLRLEYNMALTTLPSEKVFEHLTKLDILVVMGCLCLKSLGGLRAAPSLSSFYCLDCPFLELARGAELMPLNLAADLNISGCILAVDSFSNGLPHLKHLSIYVCRSSPSLSIGHLTSLESLRLNGLPDLYFVEGLSSLHLKHLSLVDVANLTAKCILPFCVQESLTVSSSVLLNHMLMAEGFTAPPNLTLLDCKEPSVSFEESANLSSVKHLKFSCCKQSPCLEI

SEQ ID NO: 4111 - protein, 383 aa, Zea mays
  VARIANT 102..383: note = Derived polymorphism lacks residues 102 to 383
  VARIANT 118: note = Ancestral polymorphism is A, Derived polymorphism is P
  VARIANT 119: note = Ancestral polymorphism is S, Derived polymorphism is L
  VARIANT 178: note = Ancestral polymorphism is P, Derived polymorphism is L
  VARIANT 253: note = Ancestral polymorphism is V, Derived polymorphism is M
  VARIANT 273: note = Ancestral polymorphism is L, Derived polymorphism is P
  VARIANT 287: note = Ancestral polymorphism is G, Derived polymorphism is R
  VARIANT 296: note = Ancestral polymorphism is G, Derived polymorphism is R
  VARIANT 317: note = Ancestral polymorphism is S, Derived polymorphism is L
MSPTEEAAGGGGDDYDRLSELKAFDDSKAGVKGLVDAGVTTIPAIFRGHLLQEGPKVSSSSSSSSTSLSIIPVIDLSAADAVAREEVVAQLKAAAETVGFFQLVNHGVPSELLCEMLPSVRRFNEEPHEVKRPYYTRDARRKVRFNSNFDLFQSPAANWRDTLFCEAAPEPPRAEELPVAVRHVMLEYGGAVREVAARVLGLLSEALGLSPGHLAGMGCAEGLSLVCNYYPPCPEPDLTLGCSRHSDPSFLTVLLQDSHAQGGLQALLASRWLDVPPVAGALLVNVGDLLQLVSNGRFKSVEHRVVANRSRDTARVSVACFCNADIARSTRLYGPIAELIAADDSDGAGRALYRNVTVPEFLAHYDKKGLDGRPALHRFQLLQ

SEQ ID NO: 4112 - protein, 300 aa, Zea mays
  VARIANT 144: note = Ancestral polymorphism is V, Derived polymorphism is A
  VARIANT 124: note = Ancestral polymorphism is W, Derived polymorphism is C
MARGGGDRSREDDPFSDGGTTETDSDESSPRGVGARGPGSTSNPILTRLAVSRNSSPLAAATAAPGVCLLRFAWESAAGSLVGAVVGYGKPTPPVFPLSLASPFEWNLNLVLGFMAHRWRGNVWLWRHFEDLRCGLGMMGLDSVRLRLCSPDSSVTICLISKGLVMMKGIKGSFADAASSAKIFAVLAGVQSLVACSLRKLRGKDDGINAGVAGCCTGLALSFPGAPQTLIQSCLTFGTFSYIIEKLNKQQPALALLPATGVMDPKAGQSVLPSFTLPPLDTMDEFSKFQNFLSSKFRGN

SEQ ID NO: 4113 - protein, 232 aa, Zea mays
  VARIANT 217..232: note = Derived polymorphism lacks residues 217 to 232
  VARIANT 195: note = Ancestral polymorphism is V, Derived polymorphism is I
  VARIANT 190: note = Ancestral polymorphism is G, Derived polymorphism is R
  VARIANT 167: note = Ancestral polymorphism is G, Derived polymorphism is R
  VARIANT 133..232: note = Derived polymorphism lacks residues 133 to 232
  VARIANT 132..232: note = Derived polymorphism lacks residues 132 to 232
  VARIANT 128: note = Ancestral polymorphism is P, Derived polymorphism is L
MPPPPSRPSDCRINPASIPTVRLPRSRHARSHPGYALPLPHLPPCAHRSPPAGPAPSHAGEAVLLAFASRLDRVENRDRNPHSKRGFCCCSSRTQDEKKRRDGGGRPGVQGATTGLGVATLYLAATFPVNVYCGLSWHSEQFVRRTLGCPPPHPCRFGSRPLIHCAGFDHAGAITDGPLNTASPICLLDGREAIVLSFLRSVHTIIQANLFACTLVELLRMNMFVVQIRCFV

SEQ ID NO: 4114 - protein, 489 aa, Zea mays
  VARIANT 34: note = Ancestral polymorphism is L, Derived polymorphism is P
  VARIANT 47: note = Ancestral polymorphism is G, Derived polymorphism is R
MKKDDDLESALLAAKEPAPAPAKGYAYALTCALLASLTSIIYGYNRGVMSGAQKFVQADLGVTDAQLEVLIGATSVYSLVGSLAAGWACDRAGRRRTIALSAALFLAGSAVTAAADGYAALMAGQFVAGVACGFGLVVAPVYIAEISPANARGFLSSIPEIAGNSGILLSYIADFALAGLPTPLNWRLMIGIGAVPPLFLAAAAALAMPETPRWLVLHGHRDEARRVLERTVGDADRRLQEILTSVQEATKQAGSGGGDAPSSASVRREILLRPTPAVRRVMLAILGLQVFQQACGVAAMVLYAPRVFSHVGITSERDVLGATVLLGAAKTVAIVVPLFLADSLGRRPMLLTSAGGMAASLLVLGLSIRATSAATCVAAAVAFMATFSLGFGPVIWMYGSEILPLRLRAQGTGVGTAVNRVMSAIVGMTFIPMYEAVGMAGTFYIFAAMSAAAWVFVYACLPETKGRSLEEMEALFDAGAAPSPRAALS

SEQ ID NO: 4115 - protein, 532 aa, Zea mays
  VARIANT 14..532: note = Derived polymorphism lacks residues 14 to 532
MNNHFFDHRTSWFRCNACSHVFLAHLQCVTLNLNDVVLAASIVSKSGKALVSRQFVDMSRIRIEGLLAAFPKLVGTGKQHTYVETENVRYVYQPIEGLYLLLITNKQSNILEDLDTLRLLSKLVPEYSPSLDEEGICKTAFEIIFAFDEAISLGNKENVTVQQVKQYCEMESHEEKAHKLMMQTKINETKDLMKKRANELDKMRMERGKLDKGGYSSISGPRVIEKTFSDMSISGSGLGGLSTDMDSFASKPKGKTQKTNQFLESLKAEGEVILEDVQPSAVSTRSSALPSDPVTVTIEEKLNVVVKRDGGINNFDVQGTLALQVLNDTDGFIQLQIESQDIPGLSFKTHPNINKDLFNSQQILGAKDPNRPFPSGQNETPLVKWRIQGMDESSLPLSVNCWPSVSGNETYVNIEYEASEMFDLHNVVISIPLPAVREAPSVRQIDGEWKLDSRNSVLEWSILLIDQSNRSGSMEFVVPPADPSSFFPISVGFSASSTFSDLKVTGILPLKEGNPPKFSQRARLLTANYQVV

SEQ ID NO: 4116 - protein, 680 aa, Zea mays
  VARIANT 26..680: note = Derived polymorphism lacks residues 26 to 680
MVICRQVQRLARKTAKIGLSAISSFKKKALHLMGCLCSKGAKEDANAASGRRTPPRRSEPATDAIAKDSSSSAALNNAKTKGNLYGAEKVVVSLDARISSGNNAEFKGLNAVSGWPSWLVNVAPKAVEGWLPRRADSFEKLAKIGQGTYSVVYKARDLESGKIVALKKVRFVNMDPESVRFMAREIHILRRLDHPNVIKLQGIVTSRVSQSLYLVFEYMEHDLAGLVATPGLKLTEPQIKCIVQQLLHGLDHCHRNGVLHRDIKGSNLLIDSNGTLKIGDFGLAISYDPSNPQPLTSRVVTLWYRPPELLLGATDYAAAVDMWSTGCIVAELFAGKPIMPGRTEVEQIHKIFKLCGSPSENYCKKSKVPETAMFKPQQQYRRCVTETFKDLPTPAVLLIDSLLSLEPEGRGTATSALQSEVIRFFFFFALSLPSLCFLYVCAYAINSLVFLEYMPQFFRAKPLACDPSSLPKLPPSKEYDVRLRQEEARRLRNAAALGGPGAESVKPGNESHVVASRAIDIAAQVKQPTHSTSKSTCEKFSAEDSVPGFRVEPRALPTSAQVPECGSTWNNTGDHHRSVLGRVCSSVRVARKKGPSNSNTPQYDAADLRNGGDRNQRADRPAVSSQKKDQQEQDRGRKYKRIHYSGPLMPPGGNIEDMLKEHERHIQEAVRKARLCKGSK

SEQ ID NO: 4117 - protein, 343 aa, Zea mays
  VARIANT 275: note = Ancestral polymorphism is P, Derived polymorphism is H
  VARIANT 260: note = Ancestral polymorphism is H, Derived polymorphism is D
  VARIANT 240: note = Ancestral polymorphism is P, Derived polymorphism is L
  VARIANT 226: note = Ancestral polymorphism is R, Derived polymorphism is C
  VARIANT 222..343: note = Derived polymorphism lacks residues 222 to 343
  VARIANT 217: note = Ancestral polymorphism is P, Derived polymorphism is T
  VARIANT 205: note = Ancestral polymorphism is T, Derived polymorphism is I
  VARIANT 201: note = Ancestral polymorphism is R, Derived polymorphism is I
  VARIANT 190: note = Ancestral polymorphism is A, Derived polymorphism is V
  VARIANT 189: note = Ancestral polymorphism is A, Derived polymorphism is V
  VARIANT 167: note = Ancestral polymorphism is T, Derived polymorphism is I
  VARIANT 101: note = Ancestral polymorphism is R, Derived polymorphism is C
  VARIANT 100: note = Ancestral polymorphism is R, Derived polymorphism is H
  VARIANT 72: note = Ancestral polymorphism is A, Derived polymorphism is V
MASSAAARRLLLLRHRHGNLLPKRHFSSSSAPDGLDDGGGRVKIFDRDLKRRHRDRAAWVMRETDGLVDAVAENLLDRLEDCRKAFPSALCLGGSAGAVRRLLRGRGGIERLIMMDMSADMVKKWRESENATGDGPETHFVIGDEEFLPIKESSQDLIMSCLGLHWTNDLPGAMIQCRLALQPDGLFLAAILGGETLKELRIACTVAQMEREGGISPRMSPLAQVRDAGNLLTRAGFTLPGVDVDQYTVRYNNALELVEHLRAMGETNALFQRNPVLKRDTALATAAIYQSMFGLEDGSIPATFQVIYMTGWREHPSQQKAKRRGSATISFGDIQKQFGPSEN

SEQ ID NO: 4118 - protein, 104 aa, Zea mays
  VARIANT 49: note = Ancestral polymorphism is A, Derived polymorphism is V
MKSIKRSKSLLKEQRKKSETIVPVVCSENYLCDANRSGELPNNLYLLVAQFFLVEVWALDTMVVNSLEKGVLFPFFFGRRNDYNKPLSWNSHFKMALGSARALE

SEQ ID NO: 4119 - protein, 309 aa, Zea mays
  VARIANT 168: note = Ancestral polymorphism is A, Derived polymorphism is G
MSSPTHVRKAIRFASLRAKIAQQGKTGLALRLLLAAALAGFLLVFAARTLVTPSPAPTSSSQAQEYHQDAAPECGKGNAGLPLAVAEALVHYTTSNVTPQQTADEIGVSLRVLQRRAPCNFLVFGLGLDSPMWAALNHGGRTVFLEEDASWIASVRSKHPGLESYHVAYDTVLTDADSLLGLRDHPACVAQPDLAAAAAASCRLALALKGLPPVFHELEWDLVMVDAPTGWTPQAPGRMAAIYTAGMAARARRPGDGPTDVFVHDVDRPVEDNFSKAFLCEGYLAEQVGRIRHFVIPSHREKDGTPFCP

SEQ ID NO: 4120 - protein, 216 aa, Zea mays
  VARIANT 118: note = Ancestral polymorphism is A, Derived polymorphism is T
MDWIIHLDTDELIHQAGAREYSLRRLLLDVPDNVDMVIFPNYESSIDRMTLRILLLRYNILPSSCALYSSQKCFLMVHSPAYNAFIIASTATEEEMGNWRESCFSYCCYILCPKTLQAIIRGLKEPDVFTNAVTSAKAQSKTKPSNMGLGNKEAMDPTERNCWSVHTGRWSREVTGNRKKDLGNGGRPGTGRSNAAEAVPWFARALGTRHCFVMTT

SEQ ID NO: 4121 - protein, 201 aa, Zea mays
  VARIANT 37: note = Ancestral polymorphism is P, Derived polymorphism is L
  VARIANT 157: note = Ancestral polymorphism is P, Derived polymorphism is L
MAAYAGTLVPPFLTVRLAVSHLRSITPGSYSLSHCLPRLAVARAASRGNGDGDGGPPAEGEKERRRSSLPALSEIRWGELLSPDPTNAVAVVLTGALVWAGASLLLQLALISAAIFAAAVKKKAVNSHEAFGWKIRAPSIRCIITFLRSIVSSLTAPTVLIGLADLICRGGTRGKQTLTLLSSEAEYTCIDMACFYIAIHL

SEQ ID NO: 4122 - protein, 220 aa, Zea mays
  VARIANT 48: note = Ancestral polymorphism is P, Derived polymorphism is L
  VARIANT 54: note = Ancestral polymorphism is S, Derived polymorphism is L
  VARIANT 64: note = Ancestral polymorphism is T, Derived polymorphism is I
  VARIANT 71: note = Ancestral polymorphism is T, Derived polymorphism is I
  VARIANT 90..220: note = Derived polymorphism lacks residues 90 to 220
  VARIANT 124: note = Ancestral polymorphism is K, Derived polymorphism is I
  VARIANT 151..220: note = Derived polymorphism lacks residues 151 to 220
  VARIANT 165..220: note = Derived polymorphism lacks residues 165 to 220
  VARIANT 193: note = Ancestral polymorphism is P, Derived polymorphism is T
  VARIANT 197..220: note = Derived polymorphism lacks residues 197 to 220
  VARIANT 207..220: note = Ancestral polymorphism lacks residues 207 to 220
MDYVPPLYRTAACGVGVVRQQDSSSRMMNNNSGDDVGGPGWGMGLGVPDVPLGSIIKSKGVTMTVLLAKAIAMALLQHPMVNLQLQGWKELHINSSINIAIAVAIDGGLITLALQDAGKKIISKNKMLLFHEGVIETKTVGTRVKESEAVLVEKEVELINEPQIQESPSAPALLDDEVPDRLLVDAILNEVVPKITWILRAEICLQYCDAIQNKLHRQSG

SEQ ID NO: 4123 - protein, 308 aa, Zea mays
  VARIANT 162..308: note = Derived polymorphism lacks residues 162 to 308
  VARIANT 130: note = Ancestral polymorphism is V, Derived polymorphism is I
MDGGAGFPGTPVPRSPEDVFRDYRARQAGLIRALTTDVEKFYVMCDPEKDNLCLYGLPNETWEVNLPAEEVPPELPEPALGINFARDGMNEKDWLSLVAVHSDSWLMSVAFYFGARFGFDKESRACIVRVLGFISRLKTMFLLPTNTWTYNYKILVQVDARWWQLSAILGVVSLLRKRLFTMINNLPSIYEVVTGTAKKESKEKTPKSSNKTNKSGSKPSRQVEPNSRVPKMPPPKDEESEGEEGEPQEDHESALCGACGLGYDDFWICCDLCETWFHGKCVKITPNKAEHIKQYKCPSCTGSKRAKA

SEQ ID NO: 4124 - protein, 1256 aa, Zea mays
  VARIANT 932..1256: note = Derived polymorphism lacks residues 932 to 1256
  VARIANT 41: note = Ancestral polymorphism is A, Derived polymorphism is T
  VARIANT 38: note = Ancestral polymorphism is Q, Derived polymorphism is R
  VARIANT 34: note = Ancestral polymorphism is R, Derived polymorphism is C
MADLALAGLRWAASPIVNELLTKASAYLSVDMVREIQRLEATVLPQFELVIQAAQKSPHRGILEAWLRRLKEAYYDAEDLLDEHEYNILEGKAKSGKSLLLGEHGSSSTATTVTKPFHAAMSRARNLLPQNRRLISKMNELKAILTEAQQLRDLLEECFDIRMWVCISRKLDVHRHTREIMESAKKGECPRVDNLDTLQCKLRDILQESQKFLLVLDDVWFETSHNETEWELFLAPLVSKQSGSKVLVTSRSKTLPAAICCEQEHVIHLQNMDDTEFLALFKHHAFSGAEIKDQLLRTKLEDTAEEIAKRLGQCPLAAKVLGSRLCRKKDIAEWKAALRLGDLSDPFTSLLWSYEKLDPCLQRCFLYCSLFPKGHGYRPEELVHLWVAEGFVGSCNLSRRTLEEVGMDYFNDMVSVSFFQLVSQMYCDSYYVIHDILHDFAESLSREDCFRLEDDNVTEIPCTVRHPEHMSVGQAHSQIALFSLVVLGSLAFPALYSHCIRQKVCVREVVLQGLHLVPRLTPQAREELEDVLTIVNNTSLADRPDTRHCFLADHTGNFQTSTLYNLLKGSLGHGDVSTTFIWGNKAPPRAQFFCWLLMQGKIQCKWNLKKKGIVDDDCCEICNQDSETPSHIIFHCPFARQFWSSIGFSVADDLGTQDLPNISRPDRLPGAEFNSFVLLCCWQLWKRRNGVVFRQDHATLAATLHSCASEAKAWAYRHNRKEAQKKQGYELRQLKDLNELGGSLRVENLENVIGKDEAVESKLYLKSRLKELALEWSSENGMDAMDILEGLRPPPQLSKLTIKGYRSDTYPGWLLERSYFENLESFELSNCSLLEGLPPDTELLRNCSRLRINFVPNLKELSNLPAGLTDLSIDWCPLLMFITNNELGQHDVRENIIMKADDLASKLALMWEVDSGEEVRSVLSKDYSSLKQLMTLMMDDDVSKHLQIIESGLEEREDKVWMKENIIKAWLFFHEQRIRFIYGRTMEMPLVLPSGLCELSLSSCSITDEALAICLGGLTSLRNLRLKYYMALTTLPSEKVFEHLTKLVWLVVRVDSFINGLPHLKRLSIDVCRSSPSLSIGHLTSLQSLDLKGLPDLYFVEGLSSLHLKHLRLVDVANLTAKCISQFRVQESLTVSSSVLLNHMLMAEGFTVPLNLVLSYCKEPSISFEESANLSSVKRLEFWCCKTESLPRNLKSLSSLESLSIGCCPNIVSLPDLPSSLQRISISDCPVLKKNCQEPDGESWPKISHLRWKHIY

SEQ ID NO: 4125 - protein, 217 aa, Zea mays
  VARIANT 158: note = Ancestral polymorphism is D, Derived polymorphism is G
  VARIANT 126: note = Ancestral polymorphism is D, Derived polymorphism is G
  VARIANT 123: note = Ancestral polymorphism is A, Derived polymorphism is V
  VARIANT 90: note = Ancestral polymorphism is A, Derived polymorphism is V
  VARIANT 51: note = Ancestral polymorphism is T, Derived polymorphism is N
MKKNLRKVPYDFMDVAGEIAAELQGTPDFIIGNYSDGNLMASLLSYKMGITHCNIAHALEKTKYPDSDIFWKNFDEKYHFSCQFTTDIVAMNNADFIITSTYQEIAGSGHLDDRSKPILFSMARLDRVKDITGLVEAFAKCAKLRELVNLVVVAGYNDVKKSKDREEIVEIEKMHELIKTHKLFGQFRWISAQTNRARNGELYRYIAHTHGAFVQAM

SEQ ID NO: 4126 - protein, 213 aa, Zea mays
  VARIANT 132: note = Ancestral polymorphism is T, Derived polymorphism is I
  VARIANT 124: note = Ancestral polymorphism is S, Derived polymorphism is R
MAASKPILYSAWISSCSFRVRIALNLKGVDYEYRAVTRNDLDYEKINPIKYVPALVDGDFVVSDSLAIILYLEDKYPQHPLLPQDLKKKAINLQIANIVCSSIQPLQCYAVIGLLDGTLGSNQSLQIVRNYTDKGFKAIEKLLEGCDSKYATGDEVQLADVFLAPQMYAGVTRFGIDMSKYPLLERFYKAYMEIPAFQVAVPEKQPDAPASPY

SEQ ID NO: 4127 - protein, 375 aa, Zea mays
  VARIANT 259: note = Ancestral polymorphism is A, Derived polymorphism is S
  VARIANT 216: note = Ancestral polymorphism is D, Derived polymorphism is H
  VARIANT 189: note = Ancestral polymorphism is V, Derived polymorphism is F
  VARIANT 125: note = Ancestral polymorphism is W, Derived polymorphism is R
  VARIANT 94: note = Ancestral polymorphism is V, Derived polymorphism is D
  VARIANT 66: note = Ancestral polymorphism is R, Derived polymorphism is C
MLQQTRVPVVVAYYERWMARWPTVRSLAAATQEEVNEMWAGLGYYRRARFLLEGAKQIIEKGLFPCTALALREVRGIGDYTAGAIASIAFNEVVPVVDGNVIRVISRLYTIADNPKESSTVKRFWDLVGQMVDPLRPGDFNQAMMELGATLCSKTKPGCSQCPVSSHCQALALSREKSSVQVTDFPRVVPKAKPRSDFAAVCVVQIAQGLEEEAADPKGNDHLFLLIKRPEEGLLAGLWEFPLVLVDQGKTDLLNRRKAMDKYLSKLLSIDMVRKPDVILREDVGEHVHIFSHIRLTMHVELMVINLKDGVDRLCKKGADSTKLKLVNESCVESMGLTSGIRKVYNMVRAFKEKSLAVSEIGHVPTRKRTRRLKR

SEQ ID NO: 4128 - protein, 490 aa, Zea mays
  VARIANT 197: note = Ancestral polymorphism is S, Derived polymorphism is F
  VARIANT 168: note = Ancestral polymorphism is D, Derived polymorphism is H
  VARIANT 159: note = Ancestral polymorphism is Y, Derived polymorphism is C
  VARIANT 47: note = Ancestral polymorphism is A, Derived polymorphism is T
MDDTEFLALFKHHAFSGAEIKDQLLRTKLEDTAEEIAKRLGQCPLAAKVMGSRLCRKKDIAEWKAALKLGDLSDPFTSLLWSYEKLDPRLQRCFLYCSLFRKGQGYKPKELVHLWVGEGFVGSCNFSRRTLEEVGMDYFNDMVSVSFFQLVSQMHCDSYYVMHDILHDFAESLSRDGCFRLEDDNVTEIPCTVRHLFVHVQSMQKHKQIICKLYHLRTIICIDLLMDGPSDIFDGMLRNQRKLHVLSLSFYNSSKLPKSIGELKHLRYLNLIRTLVSELPTSLCTLYHLQLLWLNHMVDNLPDKLCNLRKLRHLGAYYESAHDFINKKPISQILNIGKLTSLQHIYVFSVQKKQGYELRQHDLRENIIMKADDLASKLALMWEVDSGKEVRIVLWIDYSSLKQLMTLMMDDDISKHLQIIESGLLEREDKVWMKENIIKAWLFCHEQRIRFIYGRTMEMSLVLPSGLCELSLSSCSITDEALAICLGGLT

SEQ ID NO: 4129 - protein, 349 aa, Zea mays
  VARIANT 19: note = Ancestral polymorphism is G, Derived polymorphism is V
  VARIANT 24: note = Ancestral polymorphism is D, Derived polymorphism is N
  VARIANT 26: note = Ancestral polymorphism is I, Derived polymorphism is T
  VARIANT 44..349: note = Derived polymorphism lacks residues 44 to 349
MATTSALLALVLLASLLAGTVFSDDIVPIHIPLLDRFQAWQAEYNRTYATPEEFQQRFMVYSENVKFIETMNQPGSSYELGENQFADLTEEEFKDTYLMKLDNVASSPEAMALTVDTMNRAGTSGGSNTNEAPNSVDWRTKGAVTPVKSQQHCGSCWAFAAVASIEGVHKIKTGRLVSLSEQEIVDCDRGGNNHGCHGGHSSSAMEWVTRNGGLTTESDYPYVGRQGQCMSDKLGHHAAKIRGRQAVQGKNEGALQHAVAGRPVAVSINASRAFQFYKRGIFSGPCNTTRNHAVTVVGYGANASGHKYWIVKNSWGERWGEKGYVRMQRGVRAREGVCGIAIAPFYAVM

SEQ ID NO: 4130 - protein, 1491 aa, Zea mays
  VARIANT 962..1491: note = Derived polymorphism lacks residues 962 to 1491
  VARIANT 633..1491: note = Derived polymorphism lacks residues 633 to 1491
  VARIANT 498..1491: note = Derived polymorphism lacks residues 498 to 1491
  VARIANT 446..1491: note = Derived polymorphism lacks residues 446 to 1491
MLLCFFFRITIDPNTAESVPVSRATQKLPLSLSMLTPSPQQLPIFPTLLPFPASSQQHHRSPPRQKTDILSSGINQQSCVACPTELLPSLLHCTAAASRLLSIPAPCAHDLLYLCFLESVAVFISCLPSAEEKKNSLVTTSHRSSIHFFFLVHKVRGSTNYSNFMADLALVGLRWAASPIVKELLTKASAYLSVDMVREIERLQDTVLPQFELVIQAAQKSPHRGKLESWLRRLKKAFYDAEDLLDEHEYNVLKAKAKSGKGPLLREDESSSTATTVMKPFNSAINMARNLLPGNKRLITKMNELKNILEDAKQLRELLGLPHGNIAEWPTAAPTGVATTTSLPNSKVFGRDGDRDRIVDFLLGKTTTAEASSAKYSGLAIVGLGGMGKSTLAQYVYNDKRIEECFDIRMWVCISRKLDVHRHTREIMESAKKGECPRVDNLDTLQCKLRDILQESQKFLLVLDDVWFEKSHNETEWELFLAPLVSKQSGSKVLVTSRSETLPAAICCEQEHVIQLQNMDDTEFLALFKHHAFSGAEIKDQLLRTKLEDTAEEIAKRLGQCPLAAKVLGSRLCRKKDIAEWKAALKLGDLSDPFTSLLWSYEKLDPRLQRCFLYCSLFPKGHRYESNELVHLWVAEGFVDSCNLSRRTLEEVGMDYFNDMVSGSFFQLVSQMYRGSYYVMHDILHDFAESLSREDCFRLEDDNVTEIPCTVRHLSVHVQSMQKHKQIICKLYHLRTIICLDPLMDGLSDIFDGMLRNQRKLRVLSLSFYNSSKLPESIGELKHLRYLNLIRTLVSELPTSLCTLYHLQLLWLNHMVENLPDKLCNLRNLRHLGAYSSDAYDFVNERPICQILNIGKLTSLQHIYVFSVQKKQGYELRQLKDLNELGGSLRVKNLENVIGKDEAVESKLYLKSRLKELALEWSSENGMDAMDILEGLRPPPQLSKLTIEGYRSDTYPGWLLERSYFENLESFELSNCSLLEGLPPDTELLRNCSRLRINSVPNLKELSNLPVGLTDLSIDCCPLLMFITNNELGQHDLRENIIMKADDLASKLALMWEVDSGVIRRVLSKDYSSLKQLVTLMMDDDISKHLQIIESGLEESEDKVWMKENIIKAWLFCHEQRIRFIYGRTMEIPLVLPSGLCELSLSSCSITDEALAICLGGLTSLRTLQLEYNMALTTLPSEKVFEHLTKLDRLVVIGCLCLKSLGGLRAAPSLSCFNCWGCPSLELARGAELMPLNLDMELSILGCILAADSFINGLPHLNHLSIYVCRSSPSLSIGHLTSLESLCLNGLPDLCFVEGLSSLHLKHLSLVDVANLTAKCISQFRVQESLTVSSSVFLNHMLMAEGFTAPPYLTLSDCKEPSVSFEEPANLSSVKHLNFSWCKTESLPRNLKSVSSLESLSIEHCPNITSLPDLPSSLQRITILYCPVLMKNCQEPDGESWPKISHVRWKSFLPRPHHFEINEKQRVRTGVKAILTEQATINIDIHLFLQC

SEQ ID NO: 4131 - protein, 169 aa, Zea mays
  VARIANT 8: note = Ancestral polymorphism is P, Derived polymorphism is L
MGLLGLSPLVPAASCGEFAGSQVALLSVGVGPSIRDEEHQFQECEGDHNGKRPSSLLSSHISASVQIRMPFRLLQATGEFWRLRRGASVTLDESQSKCSRKDALMRRLLLLVAGSTLASRLRASSKCATSSPPELKGAPVPTPTPFVPTTAAATAVDLPLGGLDLPTNT

SEQ ID NO: 4132 - protein, 100 aa, Zea mays
  VARIANT 1: note = Ancestral polymorphism is M, Derived polymorphism is V
  VARIANT 18: note = Ancestral polymorphism is Q, Derived polymorphism is K
  VARIANT 22: note = Ancestral polymorphism is P, Derived polymorphism is L
  VARIANT 56: note = Ancestral polymorphism is R, Derived polymorphism is C
  VARIANT 71: note = Ancestral polymorphism is C, Derived polymorphism is Y
MDLEPGTMDSVRSGPFGQIFRLDNFVFGQSGTSNNWAKGHYTEGAELIDSVLDVVCKEAESCDCLQGFQVCHSLGGGTPPKGMTAWAPPPKPSDDGSRAK

SEQ ID NO: 4133 - protein, 269 aa, Zea mays
  VARIANT 186..269: note = Derived polymorphism lacks residues 186 to 269
  VARIANT 172..269: note = Ancestral polymorphism lacks residues 172 to 269
  VARIANT 139..269: note = Derived polymorphism lacks residues 139 to 269
  VARIANT 123..269: note = Derived polymorphism lacks residues 123 to 269
  VARIANT 99..269: note = Derived polymorphism lacks residues 99 to 269
  VARIANT 70..269: note = Derived polymorphism lacks residues 70 to 269
  VARIANT 69: note = Ancestral polymorphism is N, Derived polymorphism is Y
  VARIANT 24..269: note = Derived polymorphism lacks residues 24 to 269
MSKAPKDSMEVDLVQKTDKVKVTGELSSEEVETARQTSQVEAADSTFIGEVDRLEKAGNIDVELIVHVNQIGEGAEAASVSEESSQQVGNIEHAYTQKEASVSDLPTKIETLHFDAIIKELPQKAPDNMQTDIAMTPKQSHNPEDNAVFEAVTEVPSTAQDHSEDDVGVKFQKSTLYLLCYKVKSQEIQNNVPGDMEESSEQHEGDGAPAVDQPNNTSEMLPETGEQFPDSGNSPDINLEAASLGNVDQGARYRLPPLDKGRFQVADLV

SEQ ID NO: 4134 - protein, 1526 aa, Zea mays
  VARIANT 1400..1526: note = Derived polymorphism lacks residues 1400 to 1526
  VARIANT 1276: note = Ancestral polymorphism is K, Derived polymorphism is N
  VARIANT 1271: note = Ancestral polymorphism is G, Derived polymorphism is R
  VARIANT 1231..1526: note = Derived polymorphism lacks residues 1231 to 1526
  VARIANT 1187..1526: note = Derived polymorphism lacks residues 1187 to 1526
  VARIANT 1032..1526: note = Derived polymorphism lacks residues 1032 to 1526
  VARIANT 1011..1526: note = Derived polymorphism lacks residues 1011 to 1526
MADLALAGLRWAASPIVNELLTKASAYLSVDMVREIQRLEATVLPQFELVIQAAQKSPHRGILEAWLRRLKEAYYDAKDLLDEHEYNVLEGKAKSGKSLLLGEHGSSSTATTVMKPFHAAMSRARNLLPQNRRLISKMNELKAILTEAQQLRDLLGLPHGNTVEWPAAAPTSVPTTTSLPTSKVFGRHRDRYRIVKFLLGKTTTAEASSTKYSGLAIVGLGGTGKSTLAQYVYNDKRIKECFDVRMWICISRKLDVHRHTREIIESAKKGECPRVDNLDTLRCKLRDILQESQKFLLVLDDVWFEKSHNETEWELFLAPLVSKQSGSKVLVTSRSETLPAAICCVQQHVIHLENMYDTEFLALFKHHAFSGAEIKDQLLRTKLEDTAEEIAKRLGQCPLAAKVLGSRLCRKKDIAEWKAALKIGDLSDPFTSLLWSYEKLDPRLQRCFLYCSLFPKGHRYKPHQLVHLWVAEGFVGSCNLSRRTLEEVGMDYFNDMVSGSFFQRYCSLPDSGSGCYYVMHDILHDLAESLSREDCFRLAAVSDPSASSIGMIGQKSAPVTNCAALQLGAGPSNIASDKGKGVAVDMDDYPVVKETSSKQPYCYRCLTKGHATKGCTAKLFCDICRADAHNTERCPKFRGDKPSALTCGYAVDGLGFYYIPFVPQQRNKTVSLLASVIREMAVVLTPKASMLVAVPESLLGNAVSKRSKRKANLSTGDSIERATKMKAARNLDKSFTEVPSDTNVIDRAIAKEEKEFYEEKELEKFMLSSLCSDILEEVMDTTKIPCTVRHLSVHVQSMQKHKQIICKLYHLRTFICIDPLMDGPSDIFDGMLRNQRKLRVLSLSFYNSSKLPESIGELKHLRYLNLIRTLVSELPTSLCTLYHLQLLWLNHMVENLPDKLCNLRKLRHLGAYVNDFATEKPICQILNIGKLTSLQHIYVFYVQKKQGYELRQLKDLNELGGSLKVKNLENVIGKDEAVESKLYLKSRLKELAFEWSSENGMDAMDILEGLRPPPQLSKLRIKGYRSDTYPGWLLERSYFENLESFELSNCSLLEGLPPDTELLRNCSRLRINFVPNLKELSNLPAGLTDLSIDWCPLLMFINELGQHDLRENIIIKADDLASKLTLMWEVDSGKKVRSILSKDYSSLKQLMTLMMDDDISKHLQIIESGLEEREDKVWMNENIIKAWLFCHEQRIRFIYGRTMEMPLVLPSGLCELSLSSCSITDEALAICLGGLISLRNLKLKYNMALTTLPSEKVFEHLTKLVRLVVIGCLCLKSLGGLHAAPSLSYLHCLDCPSLELARGSELMPLNLASDLRICGCILAVDSFINGLPHLKRLYINVCRSSPSLSIGHLTSLESLCLNGLPDLCFVEGLSSLHLKHLSLVDVANLTAKCISQFRVQESLTVSSSVLLNHMLMAKGFIVPLNLDLSYCKEPSVSFEEPANLSSVKCLEFWYCKTESLPRNLKSLSSLESLSIGCCPNIASLPDLPSSLKRITIRYCPVLKKNCQEPDGESWPKISHLRWKHIY

SEQ ID NO: 4135 - protein, 131 aa, Zea mays
  VARIANT 10: note = Ancestral polymorphism is S, Derived polymorphism is F
  VARIANT 39: note = Ancestral polymorphism is G, Derived polymorphism is R
MAGEAKKLFFASEVYDVTKFLEDHPGGEDVLLHASGTSGDATEAFEEVGHSTSAVSMMDSYLIGSIKDYVRPSASKATDPWSADVLPNSRTMQGNKVTPNPNTFLDFLLPLFVLGLAFAAWYYLTFISKNH

SEQ ID NO: 4136 - protein, 389 aa, Zea mays
  VARIANT 136..389: note = Ancestral polymorphism lacks residues 136 to 389
  VARIANT 307: note = Ancestral polymorphism is C, Derived polymorphism is Y
  VARIANT 354: note = Ancestral polymorphism is S, Derived polymorphism is F
MRDLSSFVETRQQLLSLKPNHRMNWIGFAVAHHLNSDSSKAVEVLEAYEGTLEDDYPPENERYEHNDMLLYKYDRHFAAKYELGKEMTTTISIEDVRREVKILKALSGHSNPVKFYDACEDALNVYIIMEYVFLPSLCIILIYVKTVNIACAVYLETTCMIVLKSRIVYLRVDVLLQHINIIYGSRPFWAQTESGIFRLVLRAHPNFDDSPWQSVSPEAKDFVKRLLNKDYRKRMTAAQALLVGRGDLCMSPVEFEPSVSDDLVLEKKSGNGQHDVRGTHHHRTSMKPEKPIDLLRKVDGNNMCANCGASEPDWASLNPGALLCIECSGVHRNLGVHISKVRSLTLDVRVWEPSVINLFQSLSNMFVNSIWEETLPDDNSSNSMSIALQ

SEQ ID NO: 4137 - protein, 490 aa, Zea mays
  VARIANT 197..490: note = Derived polymorphism lacks residues 197 to 490
  VARIANT 63..490: note = Derived polymorphism lacks residues 63 to 490
  VARIANT 40..490: note = Derived polymorphism lacks residues 40 to 490
MPQMEGSTDQIAAGWFAKEPASERPVGLPRTGSSSRLNAQAPEFVPRGPPPPAPAVVLPPPPQVIRMFAAPPPPPRGGFFSAPQPRPFEYYAPIGERSGFAAKEQQAPELEAEMLPPAAVKTEPVVDGLDDEVVHKITKQVEYYFSDINLATTEHLMRFITKDSEGFVPISVIAGFKKVKTSVRNNVMLAAALRTSSKLVVSDDGKRVKRQQPFTESDLQELQSRIVVAENLPGDPSYQNLKKIFSAVGSLISIRTCYPQTPNGTGPATNRSSKLDMLFANKLHAFVEYETPEDAAKAILELNDEKNWRNGLRVRLLNTCTVKGAGKGKNGMNETDGNSEEDVSTLNHSNEKQFEQSSQLLDVLPEHLFDENFNKEVPKRGKGRGRGGRGHGRGNHQYNNHHHNNQHHQNNQPQYNNHGNNHLGGNRGSLHSVGTTPHNLITKLEPHPQLPIGANKLPPGPRMPDGTRGFTMGRGKPQAVLPGLCAVGVE

SEQ ID NO: 4138 - protein, 78 aa, Zea mays
  VARIANT 74..78: note = Derived polymorphism lacks residues 74 to 78
  VARIANT 18: note = Ancestral polymorphism is K, Derived polymorphism is N
MIHLPNLPLALLGCSFQNTFRVLTILDQLSMMRSFLHLTLLLVLVRSLELLLLILMIMQKLLPTKYISSIVSSQQFYL

SEQ ID NO: 4139 - protein, 159 aa, Zea mays
  VARIANT 11: note = Ancestral polymorphism is K, Derived polymorphism is N
MNSIESSELRKVFQMFDKNGDGQITKKELGESLKNLGIHISDDELDATMDKIDANGDGCVDVEEFGKLYRSIVGEGQVDKHDEEEDMREAFNVFDQNGDGFITVEELRSVLSSLGLKQGRTAEDCRKMISKVDADGDGRVDFTEFKQMMRGGGFDALGT

SEQ ID NO: 4140 - protein, 1278 aa, Zea mays
  VARIANT 467..1278: note = Derived polymorphism lacks residues 467 to 1278
  VARIANT 346..1278: note = Derived polymorphism lacks residues 346 to 1278
  VARIANT 83..1278: note = Derived polymorphism lacks residues 83 to 1278
  VARIANT 65: note = Ancestral polymorphism is A, Derived polymorphism is G
MADLALAGLRWTASPIVNELLTKASAYLSVDMVREIQRLEATVLPQFELVIQAAQKSPHRGILEGWLRRLKEAYYDAEDLLDEHEYNVLEGKAKSGKSLLLGEHGSSSTATTVMKPFHAALSRARNLLPQNRRLLSKMNELKAILTEAQQLRDLLGLPHGNTVEWPAAAPTSVPTTTSLPTSKVFGRDRDRDHIVDFLLDKTTTAQASSAKYSGLAIVGVGGMGKSTLAQYVYNDKRIEECFDVRMWVCISRKLDVHRHTREIMESAKKGECPHVDNLDTLQCKLRDILQESHKFLLVLDDVWFEKSDTETEWELLLAPLVSKQSGSKVLVTTRCETLPAAVCCEQVVHLKNLDDTEFLALFKHHAFSGAEIKDKLLHTKLEHTTEEIAKRLGQCPLAAKVLGSRLCRKKDIAEWKAALKLGDLSDPFTSLLWSYEKLDPRLQRCFLYCSLFPKGHRYEPNELVHLWVAEGFVGSCNLSRRTLEEAGMDYFNDMVSGSFFQLVSKRHYSYYIMHDILHDLAESLSREDCFRLEDDNVTEIPCTVRYLSVRVESMQKHKEIIYKLHHLRTVICIDSLMDNASIIFDQMLWNLKKLRVLSLSFYNSNKLPKSVGELKHLRYLDLTRTSVFELPRSLCALWHLQLLQLNGMVERLPNKVCNLSKLRYLRGYKDQIPNIGKLTSLQQIYVFSVQKKQGYELRQLKDLNELGGSLHVQNLENVIGKDEALASKLYLKSRLKELTLEWSSENGMDAMNILHLDVLEGLRPPPQLSKLTIKGYKSDTYPGWLLERSYFKNLERFELNNCSLLEGLPPDTELLQHCSRLLLLDVPKLKTLPCLPPSLTKLSICGLPLLTFVTKNQLEQHDSRENIMMANHLASKLSLMWEVDSGSSVRSVLSKDYSSLKQLMTLMIDDDISKHLQIIESGLEEGDKVWMKENIIKAWLFCHEQRIRFTYGRAMELQVVLPLGLCKLSLSSCNIIDEALAICLEGLTSLATLELEYNMALTTLPSEEVFQHLTNLDMLILSGCWCLKSLGGLRVASSLSILHCWDCPSLELARGAELMPLNLASNLSIRGCILAADSFINGLPHLKHLSIDVCRSSPSLSIGHLTSLELLDLNGLPDLCFVEGLSSLHLKHLSLVDVANLTAKCISQFRVQESLTVSSSVLLNHMLMAEGFTAPPNLTLLDCKEPSFSFEEPANLSSVKRLDFSLCEMESLPRNLKSLSSLESLHIGRCPNVASLPDLPSSLQRIAIWCCPVLKKNCQEPDGESWPKISHLRWKHIY

SEQ ID NO: 4141 - protein, 161 aa, Zea mays
  VARIANT 34: note = Ancestral polymorphism is L, Derived polymorphism is V
  VARIANT 32: note = Ancestral polymorphism is R, Derived polymorphism is S
  VARIANT 25..161: note = Derived polymorphism lacks residues 25 to 161
  VARIANT 20..161: note = Derived polymorphism lacks residues 20 to 161
  VARIANT 19: note = Ancestral polymorphism is V, Derived polymorphism is F
  VARIANT 16: note = Ancestral polymorphism is V, Derived polymorphism is A
MKPFMFCTVAKGSKVVTVVWNISDWERIGYKRLLGKPISTLSVSLDGKYLALESRDIKAFSILLDFKFEAKVADFGLAKFTTNNNTHISTRVMGTFGYLAPEYAASGKLTEKSDVFSFGVMLLELITGWRPIDTTQLALLPISTYVLPFACCIILIPIAKL

SEQ ID NO: 4142 - protein, 566 aa, Zea mays
  VARIANT 479..566: note = Derived polymorphism lacks residues 479 to 566
MAPLLAAAMNHAAAHPGLRSHLVGPNNESFSRHHLPSSSPQSSKRRCNLSFTTRSARVGSQNGVQMLSPSEIPQRDWFPSDFTFGAATSAYQIEGAWNEDGKGESNWDHFCHNHPERILDGSNSDIGANSYHMYKTDVRLLKEMGMDAYRFSISWPRILPKGTKEGGINPDGIKYYRNLINLLLENGIEPYVTIFHWDVPQALEEKYGGFLDKSHKSIVEDYTYFAKVCFDNFGDKVKNWLTFNEPQTFTSFSYGTGVFAPGRCSPGLDCAYPTGNSLVEPYTAGHNILLAHAEAVDLYNKHYKRDDTRIGLAFDVMGRVPYGTSFLDKQAEERSWDINLGWFLEPVVRGDYPFSMRSLARERLPFFKDEQKEKLAGSYNMLGLNYYTSRFSKNIDISPNYSPVLNTDDAYASQEVNGPDGKPIGPPMGNPWIYMYPEGLKDLLMIMKNKYGNPPIYITENGIGDVDTKETPLPMEAALNDYKRLDYIQRHIATLKESIDLGSNVQGYFAWSLLDNFEWFAGFTERYGIVYVDRNNNCTRYMKESAKWLKEFNTAKKPSKKILTPA

SEQ ID NO: 4143 - protein, 572 aa, Zea mays
  VARIANT 452: note = Ancestral polymorphism is M, Derived polymorphism is I
  VARIANT 450: note = Ancestral polymorphism is M, Derived polymorphism is I
MAPLVAAATNHTAHRSHIVGPNNENFPRHQPCSSQNRNKRLRLRSRAQRISSQLLASRKLMPWQIPKRDWFPPSFIFGAATAAYQIEGAWNEDGKGPSNWDHFCHNYPDWILDGSNGDTGANSYHMYPADVRLLKEIGMDAYRFSISWSRILPNLLDFGYGSKKVLILEGTLEGGINQAGIKYYKKLINLLIENGIEPFVTIFHWDVPQALEDKYGGFLGDRIVKDYTDFAKVCFENFGDKVKNWLTFNEPQTFTTFSYGTGVFAPGRCSPGEKCAQPIANSLTEPYIAGHNILRAHAMTVDLYNKNYKGTDGRIGLAFDVMGRVPYGNTFLDEQAQERSLDQNLGWFLEPVVRGDYPFSMRSLARKRLPFFTDNEQAMLAGSYDILGINYYTSRFSKHVDFSEDYSPKLNADDAYATAEIFGPDGNSIGPPMGNPWIYMYPKGLKDLLMIMKNKYGNPPIYITENGIGDVDTKDNPLSMQDALEDYKRLDYLQRHISVIKESIDLGADVRGHFTWSLLDNFEWSSGYTERYGIIYVDRDDGYRRYLKRSAKWLREFNGAAKKAEKKVLTPA

SEQ ID NO: 4144 - protein, 230 aa, Zea mays
  VARIANT 41: note = Ancestral polymorphism is T, Derived polymorphism is I
  VARIANT 63..230: note = Derived polymorphism lacks residues 63 to 230
  VARIANT 79: note = Ancestral polymorphism is S, Derived polymorphism is L
  VARIANT 110: note = Ancestral polymorphism is E, Derived polymorphism is G
  VARIANT 131..230: note = Derived polymorphism lacks residues 131 to 230
MASAGSRSTGGGFDEGVKYSDGQILEAPNLRTFTFIELKTTTKNLSSDSVLGEGGFGRVYKGWVDEKTMAPSRNGTGMSEINFLGRLSHPNLVKLLGYCWEDKELLLVYEFMAKGSLENHLFRRGCAPLSWELRLKIAIGAARGLAFLHASEKQVIYHDFKASNILLDVNYNAKLPGFGLDKLGPTSSNSHITTRVMGTYGYAAPEYVATGTCPHSSHVTSLYDNTLLPL

SEQ ID NO: 4145 - protein, 125 aa, Zea mays
  VARIANT 102: note = Ancestral polymorphism is V, Derived polymorphism is M
  VARIANT 97: note = Ancestral polymorphism is R, Derived polymorphism is I
  VARIANT 90: note = Ancestral polymorphism is K, Derived polymorphism is N
  VARIANT 81: note = Ancestral polymorphism is F, Derived polymorphism is L
  VARIANT 67: note = Ancestral polymorphism is P, Derived polymorphism is H
  VARIANT 46: note = Ancestral polymorphism is S, Derived polymorphism is L
MAAPASLLLSLFCSDPCLWSFIPLPASSAGAQASSSSFRGAPDSCSPSFFQPRRRLAARPSARHFVPGHQGIIYKLVALRFLLRMCGLEKEEPTLERLEQLVDIGCQWVILGHSERNILLVKMMR

SEQ ID NO: 4146 - protein, 413 aa, Zea mays
  VARIANT 22..413: note = Derived polymorphism lacks residues 22 to 413
  VARIANT 61..413: note = Derived polymorphism lacks residues 61 to 413
  VARIANT 95: note = Ancestral polymorphism is A, Derived polymorphism is V
  VARIANT 308: note = Ancestral polymorphism is G, Derived polymorphism is R
  VARIANT 359..413: note = Derived polymorphism lacks residues 359 to 413
MCGGVYRLKQHIAQEGKNAKKCQGMKTTKEKLLEAQEKCKKALDEAKRKREEKIVRELELREEVHVSRVGGSEEVTCVGSSEPHKLGPMDKWTIAIDPTATKSESLIQQRLNKELWKERLHEQYHSMHVTNDEFKQMCEAIGQFGPGIEPPTMFDLRGRLLEEEYARTKSLLQEREAEKMKNGCSIITDAWSDKKRRSIMNVCTNCADGTSFISSKEMSDVSHTSEVIFELEDKAIEDIGPNDVVQVVTDNASNNMGAKKLLHVKRPRIFWTSCASHTINLMLQGIGNMPQFKKVIDQAKAFTIFVYGHTRTLECMRYFTEGKEIVRPGVTRFASNYLTLDGIQEKKDQLRKMVVHSRWNSLKDVKSKKGKNATTTILNPSFWKDVKLTLEGCRHQREKITDVLLSSDTTEAQ

SEQ ID NO: 4147 - protein, 197 aa, Zea mays
  VARIANT 55: note = Ancestral polymorphism is R, Derived polymorphism is H
  VARIANT 104: note = Ancestral polymorphism is C, Derived polymorphism is Y
MSDSSSSPPPEQELLLPTDQSSSSSSSDDDGGLISIPIATYRQAYGEEGVERRRRAIVAMPPAPALFVPWIALGGGGEAPAPAASIEAVPTVEVSESGETCAICKEDLPLAAAARRLPCRHLYHSPCIVPWLELRNSCPICRCRLPSEHAEPAGEVATPTPAPEQDPLPAAPADLQLPDWAAVGGAEVEETIVLPSV

SEQ ID NO: 4148 - protein, 286 aa, Zea mays
  VARIANT 23: note = Ancestral polymorphism is R, Derived polymorphism is G
  VARIANT 28: note = Ancestral polymorphism is D, Derived polymorphism is G
  VARIANT 67: note = Ancestral polymorphism is L, Derived polymorphism is P
  VARIANT 129: note = Ancestral polymorphism is R, Derived polymorphism is K
MNILESSTRSGCQVVLNEIEHQGALMRDLYDLILPTLDPCSRQEKLVQQIFQDISSSSGKVLSFLELGDNSKKQANLIKHRRKRGKNSGVESHMLGEEAKEIGNKRRKNAQHTGSIVTQAPHFDGYKWRKYGQKWISKAKHSRSYYRCANSKDQGCLATKTVQQKESDGSGTVSLFDVEYYGHHICKKDVVNHPCVVDTAHYYSVPIANQNQSSSSPTFVHNDVYGIQDESFENLFMVPSIPEYLTDFTDIEMAGALEVTSEMISENIWAYEMISENICRQPLIAP

SEQ ID NO: 4149 - protein, 348 aa, Zea mays
  VARIANT 220..348: note = Derived polymorphism lacks residues 220 to 348
  VARIANT 243..348: note = Derived polymorphism lacks residues 243 to 348
MQCALDPCRAQVVGWPPVRNYRKNTLAAATASRSKAPTEEAASGAGPMYVKVSMDGAPYLRKVDIKMYSSYEDLSLALEKMFSCFIAGQSGLHKSSSKDRLTNGSKVDALKDQEYVLTYEDKDADWMLVGDLPWDYFTSICRKLKIMRGSDAATAVIIRIVSFLGLLLLFYYKYSQHGRERSRGQAWTHCQNRKFGSVPSINTSSCGRPSTKEEINEVHQEKQKFVEGAKKEVRDRCARRMQQDVQPRTGGGYQLQAHRRHSDRRARAPQYPLASALAEELSSSPKCDNYLCDANRSGELPNNLYLLVAQFFLVEVWALDTMVVNSLEKGVLFPFFFGRRSGLEPESP

SEQ ID NO: 4150 - protein, 392 aa, Zea mays
  VARIANT 64: note = Ancestral polymorphism is S, Derived polymorphism is L
  VARIANT 193: note = Ancestral polymorphism is N, Derived polymorphism is K
MIATHKDYEGFTDEELDKFESAFGWGSTFLSDPQVLCMDSSDPQNPPRIGRQNYEPLTAQEFFSLRHNWQQLLDGKKTYLRPPKNNRVAKHSYANCTFVTPEPLEKALQCQEPLSDFGRKYAENSIVQQKFKILSEHYAHVRQMRMDGSSFYRAFLFSYLENLGKMQASHAEVTRLMECVARSREKFCRLHWNDAYFSNPEAFFSSVVSEFEQLVNSVANGLNADELYKRSLHEITSSRILCLFRLLTEVHIRTHHADYPEFSQETEALMFCLASVRPFEAGANILQMSALSSALGIPLHLACTDVTTSDDEIVTVKCFDLFPQSESGASTTSGATSSIRSYSLSSTTDKHPEQGRDDNNSTMPAGNLFSSDRMPLVILLSRKGQYGILYRK

SEQ ID NO: 4151 - protein, 483 aa, Zea mays
  VARIANT 4..483: note = Derived polymorphism lacks residues 4 to 483
  VARIANT 214: note = Ancestral polymorphism is R, Derived polymorphism is G
MVQQQRSPRRDRSPLLRRHGHRRLPNRLRTSRRRCGAGAGRGRGGAAREEAEAARRDRNSLICRRRFHGRSPVTRLFFMRLDVCLVDDEKPDEFEKENGWGSLFMSDPQVLSMHDPQNLPRYIGRQKCDPISTQEFFALRHDWLQLLDGKKTYLRGTADSNYADSNFVTPKPLTVAVLCQESLSYLVLRGARKPITQQKFKILNEHYVCFRPMRTDGSQFYRAFLFSYLENLGKMQGSQAEVTRLMECVARSKVNFCRLEWNKAYFSNPKAFFSSVVSEFEHLVNSVANGLNADELYKISVQENSSSRSEDMMLFTMCLFICSLCNISIWLVLCLLRLLTEVHIRTHEVDYNRELSQNRKEKIKALLHCKKSVRPFDADADLLEMKALSQALGIPLHLAAVDDNPLPDRTVQVKWIDFIPRPGPLGSIREYYLGPLGSIRQYYLPSATDKHPVLPAENFLLSGRMPLVTILRTVRATAILYRK

SEQ ID NO: 4152 - protein, 306 aa, Zea mays
  VARIANT 128: note = Ancestral polymorphism is C, Derived polymorphism is R
MAALRHLAAGPTCHHHHHHGVAAATASLRLHRLPLPFRPLRSRSGSFTRVYAISSNDIRVGTNVEVDGAPWKVLGDKTAFLSLPSFIRRLFIHPRLLKDMQHCTSISFMDTTHLVFIEKQKLRRCAKCTSLLCKICRLTSLHPTTEFLHVKPGKGAAFVRTKLRNYVTGNTVEKTFRAGSTLQEPSLSKETKQFTYKDGSQFVFMDLTTFEESRLNEADVGDKQKWLKEGMDCNLLYWNGKIIDFDLPITVRLTVTDTDPGASDSAQGGTKPATLETGAVVTVPSFVNVGDDILVDSRTGQYMNRA

SEQ ID NO: 4153 - protein, 87 aa, Zea mays
  VARIANT 38: note = Ancestral polymorphism is Q, Derived polymorphism is R
  VARIANT 33: note = Ancestral polymorphism is C, Derived polymorphism is R
  VARIANT 24: note = Ancestral polymorphism is D, Derived polymorphism is Y
MVVLLIHAASLVVLGEKTTLMSPDVLVARGVPRCRLLQYPREFVVTFPRAYHIGFSHGISNGGVDMTTDTEHPPTIDNYQTSNNGSE

SEQ ID NO: 4154 - protein, 293 aa, Zea mays
  VARIANT 7: note = Ancestral polymorphism is R, Derived polymorphism is I
  VARIANT 14: note = Ancestral polymorphism is G, Derived polymorphism is W
  VARIANT 30: note = Ancestral polymorphism is V, Derived polymorphism is A
  VARIANT 38: note = Ancestral polymorphism is P, Derived polymorphism is L
  VARIANT 39..293: note = Derived polymorphism lacks residues 39 to 293
  VARIANT 51: note = Ancestral polymorphism is W, Derived polymorphism is R
  VARIANT 53: note = Ancestral polymorphism is R, Derived polymorphism is Q
  VARIANT 67: note = Ancestral polymorphism is G, Derived polymorphism is V
  VARIANT 150: note = Ancestral polymorphism is G, Derived polymorphism is V
  VARIANT 221: note = Ancestral polymorphism is R, Derived polymorphism is W
  VARIANT 241: note = Ancestral polymorphism is L, Derived polymorphism is H
  VARIANT 267: note = Ancestral polymorphism is Y, Derived polymorphism is C
MEPLDRRWHVLGLGYDVDIDDRLIESAAVVHYNGNMKPWLKLAIRRYKYIWERFSFKDFVSKDNATGSMKGYCIDVFTQALALLPYPVTYRFIPFGNDTENPHYSQLVQMVADNDFDAAIGDIVITMSRTKAVDFTQPFIESGLSFLVVGVVIWILEHRINDDFRGSPRQQIITIVWFSFSTLFLHILDTSIRGLDDLKNSDYPIGFQVGSFVEEYMIKERNISQSRLKALGSPDEYAENLKLGPKKGGVMAIVDERPYVELFLSTYCKIAVAGSDFTSGGWGFFKLCKARSV

SEQ ID NO: 4155 - protein, 261 aa, Zea mays
  VARIANT 81..261: note = Derived polymorphism lacks residues 81 to 261
  VARIANT 55: note = Ancestral polymorphism is P, Derived polymorphism is L
  VARIANT 39: note = Ancestral polymorphism is A, Derived polymorphism is T
MAAGFGPAPPAEAQPLPPIHHLPPDALHNVLLRLQLRDAVVCRPVSRLFHETLSPQLLALAAPHPAPPPPPPPTPRRRRLQAEETRELRTINKWGEMMYEKIKKLDKELARYVHNNIFFSFAVDSDFEDISKDHKPYCQNGSSRSTKVSSPDVITKPDANHGKSAEVVDSKSEEAQLADREQATYASANNDLKGTKAYQEADVSGLHNLAMAIVDYRGHRVVAQSIIPGILQGDKSNSLLYGSVDNGKKISWNETFNSKVS

SEQ ID NO: 4156 - protein, 227 aa, Zea mays
  VARIANT 83: note = Ancestral polymorphism is N, Derived polymorphism is I
  VARIANT 183: note = Ancestral polymorphism is G, Derived polymorphism is E
MAGGGGAGAGSSSGGGGGGGREGDWDCGSCGNRNYAFRSLCNRCKHPRLLVDPNTPRDSKWLPRAGDWICTGCSNNNYASRKNCKKCGLPKEEAAMPALQMAGMAMPAYATYIARLQSLAASASAYNMNFGMAANSPLQQQLLANANWPYGMAGRYGMQSSGWPFGNGNPNQFLGVPKDWRNGDWFCSCGSHNYSSRTQCKECGAPVPSSIPSTTMKATSDASSSVV

SEQ ID NO: 4157 - protein, 610 aa, Zea mays
  VARIANT 310..610: note = Derived polymorphism lacks residues 310 to 610
MRGDPAESSASKSLPPSLSNRNCSESLATAARVPLLAFTVCIEVLPLPPFSPQQMKGKGESSGPRPDGSGHARRSSRRIAGKFSYKYSRRIADPYSCWIGGGSLIKKELESGLKNIVEAAVVANIVGRFAEACAEQKKKTNVGIVSPYAAQVISLQERVQIYKKHDFLSIEVCIVDSCQSAEKDINPFNSTACGSLDMNSTWYDLVKDAKDRECFFKARDDDFFARTMDQFRLMQNSQVTDNVSRWNIECQCAPDAQLTCDNHATIPDKAPDAQLTGDNRATIPDKAQVVEPAHAEQVPMQSERAAEKTWQLCLNQLSHIPSFAPGEQLTDEKVVEPAHAKQVHLAQLSPSPSRERARLSQFAQGAQLTDEEAAALEEEDHPQIDLLDGLRRGGRLRGSGAARLAEVRRRRRSGVLTSMASLSSKHHVLIQVLLARGPLSERDFHAFIDGAFGKNTALGTKRLASEDLANDWDNKRLNPGNDNYPLSTGAANNLFLGIEQGAGSSNGQSAFPKFDNGSSVALPSGQGMSGLMGKGYNFNLNRRYFRQNGVTGTGCATTATITTMHLVRFATGAKLRKNLQFTLVCYSLLLDYFVPGYVAACSSSFLKAAV

SEQ ID NO: 4158 - protein, 257 aa, Zea mays
  VARIANT 212..257: note = Derived polymorphism lacks residues 212 to 257
  VARIANT 202..257: note = Derived polymorphism lacks residues 202 to 257
  VARIANT 170: note = Ancestral polymorphism is R, Derived polymorphism is H
  VARIANT 64: note = Ancestral polymorphism is A, Derived polymorphism is T
  VARIANT 46: note = Ancestral polymorphism is A, Derived polymorphism is V
  VARIANT 43: note = Ancestral polymorphism is A, Derived polymorphism is V
  VARIANT 36: note = Ancestral polymorphism is A, Derived polymorphism is P
  VARIANT 26: note = Ancestral polymorphism is A, Derived polymorphism is T
  VARIANT 14: note = Ancestral polymorphism is S, Derived polymorphism is F
MKKQLLSLRSNDLSGPLPTDLLRLPALAGLHRHRNAFSGALPVALAALTALQVLDLSFNAFDCAVPVVLANLTRLVTLDLSNNLLSGRVPVLGLPALRFLNLSNNRLDGTQQGGRDDETAGGGAATGKGGEKKGRESPESKAFIGKAGDGNRMVFFEAPSLAFDLEDLLRVFAEVLGKGAFGTVYRAVLEDATTVIVKRLKEVNAGRRDFEQQMELLGRIRHDNVVELCAYYYSKDEKLLVYDYYSRGSVSNMLHEW

SEQ ID NO: 4159 - protein, 175 aa, Zea mays
  VARIANT 140: note = Ancestral polymorphism is N, Derived polymorphism is K
  VARIANT 112: note = Ancestral polymorphism is P, Derived polymorphism is L
  VARIANT 78: note = Ancestral polymorphism is N, Derived polymorphism is K
MSRDPLVVGSIVGDVVDYFSASALLRVMYGGREMTCGSELRPSQVASEPTVHITGGRDGRPVLYTLVMLDPDAPSPSNPSKREYLHWLVTDIPEGAGANHGNEVVAYESPRPSAGIHRFVFIVFRQAVRQAIYAPGWRANFNTRDFAACYSLGPPVAATYFNCQREGGCGGRRYR

SEQ ID NO: 4160 - protein, 186 aa, Zea mays
  VARIANT 43..186: note = Derived polymorphism lacks residues 43 to 186
  VARIANT 52: note = Ancestral polymorphism is K, Derived polymorphism is N
  VARIANT 55: note = Ancestral polymorphism is R, Derived polymorphism is C
  VARIANT 159: note = Ancestral polymorphism is P, Derived polymorphism is S
  VARIANT 169..186: note = Derived polymorphism lacks residues 169 to 186
  VARIANT 178: note = Ancestral polymorphism is I, Derived polymorphism is N
MADENSTFGQQKLGEPQDSGISLQTILELGPTIPIFGVCMGLQCIGEAFGGKIIRAPSRVMHGKSSPVYYDEELGKALFNGLSNLWYVLLSKAFRVDAALAPFASMDNPFTAVRYHNLVIEQETFPHDALEATAWTEDGLIMAARHKKYKHIQGVQFHPESIITPEGKKIVLNFVRFIEELEKQRS

SEQ ID NO: 4161 - protein, 246 aa, Zea mays
  VARIANT 119: note = Ancestral polymorphism is P, Derived polymorphism is L
MAGSGNRRFGRDMVSSSTHFSQWQMVWVGDHVPGGRVDLQCGANKGTRHQNEGNQESKRPRESQSTRRGTRELGIVKRARGDELLRFMDGASKEPLRKVQPYSVQLNLMISYYCSTVGPVTIPLSILHDIRDLKVAKEEQDIGFYAGFVGATYFLGRAISAMPWGMFADKYGRKPCIVISILSVIVFNTLFGLSTTYWMAIVTRGLLGLLCGILGPIKVTSSRAIALVIGPAIGGFLAQVKIMEFR

SEQ ID NO: 4162 - protein, 224 aa, Zea mays
  VARIANT 12: note = Ancestral polymorphism is H, Derived polymorphism is Q
MNTEYLRVKKLQQEAARCLSLHKTMELQPELSLGPVWPGFAAGDLAAKSSSSESDGTSRKKRKHYTASWEEPQQPPASLELQLNDPLPLDWEQCLDLQSGRMYYLNRKTLKKSWVRPQVQSVNLDLNISTAAAIDNCAANGAAAAASDDEDEPRKPAGTLFSGGSMVAVPCANCHLLVMLCKSSPSCPNCKFVQPLAPAVPPAAVAHWRIDAAVKPLETLSLLH

SEQ ID NO: 4163 - protein, 140 aa, Zea mays
  VARIANT 30: note = Ancestral polymorphism is A, Derived polymorphism is P
MAARSSSSQPQLVAAAAVLAAALLLLAAGAGTASAAVSCGEVTSSVAPCLGYAMGSAASPSAACCSGVRSLNSRASSTADRQATCNCLKSMTGRLGGGVSMANAANIPSKCGVSVGVPISPTVDCTKYVGPAVPAPCMSS

SEQ ID NO: 4164 - protein, 217 aa, Zea mays
  VARIANT 192: note = Ancestral polymorphism is I, Derived polymorphism is T
  VARIANT 186: note = Ancestral polymorphism is G, Derived polymorphism is R
  VARIANT 176: note = Ancestral polymorphism is A, Derived polymorphism is T
  VARIANT 168..217: note = Derived polymorphism lacks residues 168 to 217
  VARIANT 165: note = Ancestral polymorphism is D, Derived polymorphism is H
  VARIANT 63: note = Ancestral polymorphism is A, Derived polymorphism is V
MAHHASPPVFGALASPSFSPRRRYWLPPPTTPPSSSSLVPTAGSTARSLILAFVDARRWPATAVFVHMTPPLALHLSLLGSTALWKPTWPDVLAAPRMPHPTSCSATVEHQHPLPLGETESRASSGRGRDPEAGCGAQEGRGAPIEGVIKPGVVPRFVQFLTREDLSQLQFEAAWALTNIASGTSRNTKVVIDHVIVPTFVKLLASGSDENGFSSAL

SEQ ID NO: 4165 - protein, 144 aa, Zea mays
  VARIANT 54: note = Ancestral polymorphism is R, Derived polymorphism is M
MGCTGTQTQQQRLRLRRPPRGRGSSYSFVFVLRALTLILLILLAVFAQPASSRRPLPLVDDHHNNGVVKAAAAAAATDVILLLPPLHADAEKAMVVAAPSSVLPPVEEDEDRRRHWLAGGRHQWLLNKKPRGKAPPSAPSKRTN

SEQ ID NO: 4166 - protein, 227 aa, Zea mays
  VARIANT 11: note = Ancestral polymorphism is P, Derived polymorphism is L
MPRLPGSQPAPERRLAVLLSHFHPCCEPPRTIACVASVECLRTAAEEEAEMQLSLSTSPCAGGEKGGSSGGGHCVFCNIVAGTAQAFKLYEDDMCLCILDAKPLTSGHSLIIPKSHYPSVQTTPPTVLAAICSKLPLLGTAIMKATQCDAFNVLINNGEKAGQVIFHTHVHIIPRSKDDNLWSSETYSRSHISHGQETTHLVSSIKEIISSSPEDYSTVMSSTPKEL

SEQ ID NO: 4167 - protein, 362 aa, Zea mays
  VARIANT 198: note = Ancestral polymorphism is R, Derived polymorphism is G
MPRRPGAHIILGLKALVQLLNFPYDPDRVASADEAVASELDSVAALQCLCSSRRGIGPLVDDRWSLVQRLEAEARGRDADIAALGRELRRLQHDNARLSRRVVRSRNDDERRRTRLLLSVPKELATPAALVSRFVAASRSVGEFAGLLHGAGTCASSSDDAVAEQARSWRRYAIEAHLWRAMLLAGTGGGDAGSSFHGIMKPRDALDALMQFPRSGLSAFCRAAYLAAVQPEAEAAACRNLDHRAFVSRGGHPRTRLYRAFAAAARSVWALRVLMAGCSESEQSGGGGDGVRMFYASRGSLYRAEFMESVPALGAEEDRRVETGEEKLSVAFTVTPGVKVGDTVVPCRVLLCRRREGFVRIR

SEQ ID NO: 4168 - protein, 141 aa, Zea mays
  VARIANT 51: note = Ancestral polymorphism is R, Derived polymorphism is M
  VARIANT 30: note = Ancestral polymorphism is P, Derived polymorphism is R
MGCTGTQTQQQRLRLRPPRGRGSSFVFVLRALTLILLILLAVFAQPASSRRPLPLVDDHHNNGVVKAAAAAAATDVILLLPPLHADAEKAMVVAAPSSVLPPVEEDEDRRRHWLAGGRHQWLLNKKPRGKAPPSAPSKRTN

SEQ ID NO: 4169 - protein, 122 aa, Zea mays
  VARIANT 108..122: note = Derived polymorphism lacks residues 108 to 122
  VARIANT 99: note = Ancestral polymorphism is A, Derived polymorphism is V
  VARIANT 77..122: note = Derived polymorphism lacks residues 77 to 122
  VARIANT 76..122: note = Derived polymorphism lacks residues 76 to 122
  VARIANT 72..122: note = Derived polymorphism lacks residues 72 to 122
  VARIANT 66: note = Ancestral polymorphism is I, Derived polymorphism is T
  VARIANT 45..122: note = Derived polymorphism lacks residues 45 to 122
MGACHEMYPLAFTPPVPPEESPAVGSPTWSSRRSASPNATCRYAWGGETHHSVGKIIDIESDGLLTIDIPNWATPWQADPSDMEKIENSNVSNWIRVKAIVPSPKYGWENVTRNSIVIVHSL

SEQ ID NO: 4170 - protein, 352 aa, Zea mays
  VARIANT 17: note = Ancestral polymorphism is L, Derived polymorphism is H
MLCCAGHQASLLLFALLSVSSLLLVDGSHQDQEFGEAVGSRILQTNPDAHEVHCSRERSRAAWEAIDEYLMPFVEKEKYELPSKCRLRPDNDMFREQEQHKIHFDINEWHCGFCKKAFRAEKFIDQHFENRHKNLVDNSEGRCMADLCGALHCDLMMQFKKPKSKCNAAAATRNRHLCESLADSCFPINQGLAASRLHEFFLRQFCDAHTCSKGTKPFPKGGRGNEERYPRSKTVFENWAEEKAILVSNSHNVLELMEPRMSWIRNVVCSVKCFYGQGRNFPHFQDGNNVRRSRNAGFDLFFSFSFFFVSTCRCKLREASMCGLCEITAIFYIVNHNRSPIDNLRIFGRPQA

SEQ ID NO: 4171 - protein, 563 aa, Zea mays
  VARIANT 434: note = Ancestral polymorphism is P, Derived polymorphism is S
  VARIANT 219: note = Ancestral polymorphism is Y, Derived polymorphism is N
MAPLLAAAMNHAAHPVLRSHLGPNNESFSRHHLSSSPQSSKRRFNLSFTPRSARVGNQNGVQLLSPSEIPRRDWFPSDFIFGAATSAYQIEGAWNEDGKGESNWDHFCHNFPERIMDGSNADIGANSYHMYKTDVRLLKEMGMDAYRFSISWPRILPKGTVEGGINQDGIDYYKRLINLLLENGIEPYVTIFHWDVPQALEEKYGGFLDKTHKRIVNDYKNFAKVCFDNFGDKVKNWLTFNEPQTFTSFSYGTGVFAPGRCSPGLDCAIPTGNSLVEPYIAGHNILLAHAEAVDLYNKYYKGENGRIGLAFDVMGRVPYGTSFLDEQAKERSMDINLGWFLEPVVRGDYPFSMRSLARERLPFFSDKQQEKLVGSYNMLGINYYTSIFSKHIDISPKYSPVLNTDDAYASQETYGPDGKPIGPPMGNPWIYLYPEGLKDILMIMKNKYGNPPIYITENGIGDVDTKEKPLPMEAALNDYKRLDYIQRHISTLKESIDLGANVHGYFAWSLLDNFEWYAGYTERYGIVYVDRKNNYTRYMKESAKWLKEFNTAKKPSKKIITPA

SEQ ID NO: 4172 - protein, 78 aa, Zea mays
  VARIANT 32: note = Ancestral polymorphism is A, Derived polymorphism is S
  VARIANT 25: note = Ancestral polymorphism is E, Derived polymorphism is K
  VARIANT 14: note = Ancestral polymorphism is A, Derived polymorphism is E
  VARIANT 5: note = Ancestral polymorphism is H, Derived polymorphism is Y
MEDEHISVVFQVIANGVGLLDPGAESNYGVLALRAPLEKYGLDEEKACNELLSFSDYSGSPQLKFSKMDEDELILWLD

SEQ ID NO: 4173 - protein, 249 aa, Zea mays
  VARIANT 188: note = Ancestral polymorphism is L, Derived polymorphism is P
  VARIANT 186: note = Ancestral polymorphism is R, Derived polymorphism is C
  VARIANT 176: note = Ancestral polymorphism is R, Derived polymorphism is W
  VARIANT 165: note = Ancestral polymorphism is G, Derived polymorphism is R
  VARIANT 140: note = Ancestral polymorphism is R, Derived polymorphism is G
  VARIANT 135: note = Ancestral polymorphism is W, Derived polymorphism is S
  VARIANT 96..249: note = Derived polymorphism lacks residues 96 to 249
MARADPVSFRQHRANSGVSFCHQQKVPRILGKQERGRGGQGHNREAKLIQSGPFCRPHLDGFTVPPPHRDHGEGAGWLALGSPQPATRRDKVSHPQPPPLPYSRPISPPSGGFVCGLQAGGATLFCWPSTPAPQWGQLRRIYNRPAPLADLAVGTDHVAAYDASGKVVLWWRGGGRFPARADGAFRSLVSGDDFSCAVQANASAAIRCWGPQGSAVQAVPGGINLERMPLPGHQPINGACCIASTSGLV

SEQ ID NO: 4174 - protein, 67 aa, Zea mays
  VARIANT 26: note = Ancestral polymorphism is R, Derived polymorphism is S
  VARIANT 53: note = Ancestral polymorphism is L, Derived polymorphism is F
MLIRMVQEKIPRNTTFLMPSDRLLSRPFLSQVLEFLSRHSITVPLVFNYLIRLPNGTIVPSSHPPLG

SEQ ID NO: 4175 - protein, 344 aa, Zea mays
  VARIANT 32..344: note = Derived polymorphism lacks residues 32 to 344
MTSSLPQTANATRGASYDLTERSQDSALRSVEALGPGAKRTSWKQRIQWCSIGSEQLAMIPPYGTPPPYVMYPPGVYAHPSMPPGAHPFTPYAITSPNGNADATGTTVAAGNTDGKPSEGKDKSPTKRSKGSLGSLNMLTGKNPSEHGKSSGASGNGVTSQSGESGSDSSSEGSEGNSHNDSHHKESGQEHDGDVRSSRNGVSRLQSEGKLNQAMAILPIPSSGPATDPTTNLNIGMDYWANTASSAPAIHGKATSTTVPGAVVPAEQWTQAECEELAQRADVLKQENASLRDEVNRIRKEYEELLSRNNSLKEKLEGKQHKTDEAGLNNKLQHSGDDSQKKGN

SEQ ID NO: 4176 - protein, 433 aa, Zea mays
  VARIANT 269: note = Ancestral polymorphism is R, Derived polymorphism is G
MESPAPARSARAPATPTCTVPGLLVGLTKLLSLTKACAAPTPAADDGGREAAAAAATKPGHDPGPDPRLVLVRLFDAVSALKSGYVKLQRAHFPYDPDRVASADEAVASELDSVAALQCLCSSRRGIGPLVDDRWSLVQRLEAEARGRDADIAALGRELRRLQHDNARLSRRVVRSRNDDERRRTRLLLSVPKELTTPAALVSRFVAASRSVGDFAGLLHGAGTCASSSDDAVAEQARSWRRYAIEAHLWRAMLLVGTGGGDAGSSFHGIMKPRDALDALMQFPRSGLSAFCRAAYLAAVSPEAEAAACRNLDHRAFVSRGGHPRTRLYRAFAAAARSVWALRVLMAGCSESEQSGGGGDGVRMFYASRGSLYRAEFMESVPALGAEEDRRVETGEEKLSVAFTVTPGVKVGDTVVPCRVLLCRRREGFVRIR

SEQ ID NO: 4177 - protein, 63 aa, Zea mays
  VARIANT 11..63: note = Derived polymorphism lacks residues 11 to 63
MGSSGADTPSKEQQPPATSGAAIPPVYPDWSSFQAYPPIPPHGFFPSPVASSPQGHPFMWGAQ

SEQ ID NO: 4178 - protein, 298 aa, Zea mays
  VARIANT 186: note = Ancestral polymorphism is R, Derived polymorphism is H
MADKADWCDANVTYLINICKKEIEDDNRPMGVFTRIGWKNLVTKYEEKTGLKLTKKQLKNKLDNMKKEYIWFMEFKNATTGLGWNEAKQTVDCSKDWWDEHLARCNNPDKGIKCNHVRSRKQGPKHLDDLHMLFDKIHVSGTSASCPGDISSDDSSDDVVEMERTPENDEVKVTVSKRSKPVKRKRKASCTDAEEKEEKSPFFRLYKNTCLKIETTAEKISTSVEASSTHPTSQVPSIAETRKMVKDCGVKEKTALMHTTTFFIVKPEFREVFCMLETNEGRFDLLEREHAKEMMRHM

SEQ ID NO: 4179 - protein, 110 aa, Zea mays
  VARIANT 104: note = Ancestral polymorphism is L, Derived polymorphism is R
  VARIANT 69: note = Ancestral polymorphism is P, Derived polymorphism is H
  VARIANT 66: note = Ancestral polymorphism is T, Derived polymorphism is I
  VARIANT 62: note = Ancestral polymorphism is P, Derived polymorphism is S
  VARIANT 60: note = Ancestral polymorphism is L, Derived polymorphism is I
  VARIANT 10: note = Ancestral polymorphism is C, Derived polymorphism is Y
MLTILYSIKCKIVLIIRTRGGRGDDLVLRGSGPISKKWTALGYCHHLHAPLVTQGDAFVLKPILMTVVPAILDRVRDGVRKNVMLFVTVSSYFAFCGLSCSCKLLYLFHA

SEQ ID NO: 4180 - protein, 903 aa, Zea mays
  VARIANT 158..903: note = Derived polymorphism lacks residues 158 to 903
MVLGLRTKTRKDSAFHVDFNILIQEISPWPPSESLKSLRSVVLFWENGERNSGKTSTVAPSIGSGSTAGKIEFNEFINLQAIFQKEGSSKSGKWQKNLLELNLYEPRREKLKGQHLGSATLDLAEHAMFHEDTSVPVPLSSKRSFKNNAQPMVYLRIQPLDGDNSSVSSRDALSQEASVDKDSKEFVSATVSEEYTEDTEFASFTDEEEATPYLYRSGVTALTGSNRSHESLKGKDIRLTNNEGTSSSLDSQHEATVSCMKVRNEEVEKFPIQVQKQNGHPENLSLSSDLPREQSPSLPPHNAFRSGRKMSFAYGMTESNQRQFGERTYSTLTTDRARNARFSMRVPDVNGSIINKKVDSQDIAITHENKASVDDGLQVQEPIRISNNRNDNKVRELELKIELLEAELREAAAAEIGLYSIIAEHGSSVNKVHTPARRLSRHFVHALKNCSRDKMGSAARNTTSGLVLVAKACGYDIARLSFWLSNCVVLRAIVTETSRQSGTVNSSNYGDYNSKTTYRKNSASMWESLNRKKGKLLSPEFDNWEDVDTFIAALKKIESWIFSRIVETLWWQTFTPHMQSADITGGLRSTPNPKKGYGKIPVVGNQQQATISMDIWKKAFKEASERLCPVRAAGHECGCLPMLTKLVMEQCIARLDVAMFNAILRESDDEIPTDPLSDPITDPKVLPIPSGKFSFGAGVQLKNAIGSWSRCLTDLFGMDMDDYQELDNEGGENGFGESVKPFYHLNALSDLLMLPKDVLMDTSSRKELCPTFSSSIIKNILDVFLPDEFCPDPIQGSLLQALELEDHLEVNKGIRSIPCSASPILYNAPVSGAILSVIGDPRKSGSAILHKSNTSDDELDELSSPLTFISNTSSDPLAKLKRISNSTTARYRLLHEVWKLDDQ

SEQ ID NO: 4181 - protein, 429 aa, Zea mays
  VARIANT 1: note = Ancestral polymorphism is M, Derived polymorphism is I
  VARIANT 9: note = Ancestral polymorphism is A, Derived polymorphism is V
  VARIANT 11: note = Ancestral polymorphism is G, Derived polymorphism is R
  VARIANT 23..429: note = Derived polymorphism lacks residues 23 to 429
  VARIANT 27: note = Ancestral polymorphism is I, Derived polymorphism is T
  VARIANT 39: note = Ancestral polymorphism is G, Derived polymorphism is E
  VARIANT 41: note = Ancestral polymorphism is S, Derived polymorphism is L
  VARIANT 73: note = Ancestral polymorphism is Y, Derived polymorphism is N
  VARIANT 92: note = Ancestral polymorphism is G, Derived polymorphism is D
  VARIANT 107: note = Ancestral polymorphism is I, Derived polymorphism is N
  VARIANT 110: note = Ancestral polymorphism is L, Derived polymorphism is P
  VARIANT 184..429: note = Derived polymorphism lacks residues 184 to 429
  VARIANT 201..429: note = Derived polymorphism lacks residues 201 to 429
  VARIANT 253..429: note = Derived polymorphism lacks residues 253 to 429
  VARIANT 353: note = Ancestral polymorphism is I, Derived polymorphism is T
  VARIANT 361: note = Ancestral polymorphism is V, Derived polymorphism is A
  VARIANT 378: note = Ancestral polymorphism is T, Derived polymorphism is M
MGKLLGKGAFGKVHYARDLESNQGVAIKIMDKDRVLKAGLSEQVKREITTMRLVEHKNIVRLHEVMATRNKIYIIMEYAKGGELLDKVKRSGRLTEADTHRYFQQLIGALDHCHSRGVYHRDLKRENLLLDENGDLKVSDFGLSAFSESRRTDGLLHTVCGTPVYIAPEVIKKTGYDGAKSDIWSCGVVLFVLAAGYLPFQGPNMMEIYRKIHDSDFRCPSWFSHKLKRLLYKILNPNPSMRPSIQEIKESTWFRKGPREISAVKEKVLSENATATNAAPVLAARRKEIAHEDKTLVATKLNAFEIIAFSAGLDLSGLFIKECRKETRFTSDKPALAIISKLEDVAKALNLRIRKKDNNTVIIQGRKHGGNGVLQFDTQIFEITPSCHLVQMKQTSGDLLEYQKLLEEGIRPGLKDVVWAWHGDDLQQK

SEQ ID NO: 4182 - protein, 241 aa, Zea mays
  VARIANT 94: note = Ancestral polymorphism is G, Derived polymorphism is V
MAANLEDVPSLDLMHELLRRMKCSSKPDKRLIVIGPPGSGKGTQSPIIKDEYCLCHLATGDMLRAAVAAKTPLGIKAKEAMDKGELVSDDMVVGIIDEAMKKPSCQKGFILDGFPRTVTQAQKLDEMLAKQGANVDKVLNFAIDDAILEERITGRWIHSASGRTYHSKFAPPKSPGVDDVTGEPLIQRRDDTAEILKSRLEAFHRQTEPVIEYYSKRGLVVNLPAEKPPKEVTAEVLKALS

SEQ ID NO: 4183 - protein, 245 aa, Zea mays
  VARIANT 6: note = Ancestral polymorphism is G, Derived polymorphism is E
  VARIANT 7..245: note = Derived polymorphism lacks residues 7 to 245
  VARIANT 64: note = Ancestral polymorphism is L, Derived polymorphism is F
  VARIANT 106: note = Ancestral polymorphism is R, Derived polymorphism is P
  VARIANT 173..245: note = Derived polymorphism lacks residues 173 to 245
  VARIANT 176: note = Ancestral polymorphism is F, Derived polymorphism is S
MKETEGWSGPENLNHVSEAIKKERRAPMNEFEVFHDKGTNRWTVVGAGIQCFVQMTNWQYSDSLKRFQHALEACGMNRALTKEGVKEGDTVIIGEVYSLCLYVQSRSYRAHEVILGLPYDQRIDIWSLGCILSELYTGEVLFPNEPVSVMLAQMIGITGPIDMEILELGQETQKYFTDDYDHFTENEETDQLEYLFLEKSSLQQHIQCPDSEFVDFLSYLLQINPRKRPTADEALQHPWLSFSYY

SEQ ID NO: 4184 - protein, 543 aa, Zea mays
  VARIANT 8: note = Ancestral polymorphism is L, Derived polymorphism is V
MEMVLRALHAFPQSRVGKEKEEELNKLMEALHVADLPNRVMTFCYSELTTEEKSCLQYLAAFRLETSISRTSLVRRIAAERLVKEDKEHQLSMEQSAERCFEELLFRGFISADATGAAGKVKCCRFRSESVKQFIVDMCKAENFVGGGLPVHLRIQNDIRSAALEGKQQHDDPVNKMLRELDLLPKSYRLNVMDLGGSMGILKKSHLANICKLRTLKYLSLRYTDVRSLPSQLQELRLLETLDIRHTNIPRGSRNTQALLPPSLKHLLAGNVDSQGDAPNATVRMPDSIQEMPCLEILAHVKVCRRRELRKVENLPKLRKLGVVFVPGNEDGMMKDLIRAVGRLSGCLHSLSVRMEGAPLNGWRSTLDGEMSSPVPSNLVSLRIDGLRSSGIPTWVERLYKLQKITLCNTTLTDEKLGALSELPVLVCLRLRHKSYNGRELAFRKPGGFPSLKFLRIEDVLVVTELSFQPNSMPKLQEIVWSLADHSSNDALVAAITVSVAGVENLPNLKNVVLKGLREQHPSTLTKDIAKHPNRPVFSRHGH

SEQ ID NO: 4185 - protein, 106 aa, Zea mays
  VARIANT 46: note = Ancestral polymorphism is G, Derived polymorphism is R
  VARIANT 45: note = Ancestral polymorphism is T, Derived polymorphism is N
  VARIANT 26..106: note = Derived polymorphism lacks residues 26 to 106
  VARIANT 17: note = Ancestral polymorphism is P, Derived polymorphism is T
MDEMVKAIASRVTEVMPKAASFTSSQIATSSNGFDSSVMSTAATTRSSGSTVTDLGVVGTGVKRASIKPISAEPAAKKPALDSPSLQGDSSINSEVVPATQTDESS

SEQ ID NO: 4186 - protein, 355 aa, Zea mays
  VARIANT 100..355: note = Derived polymorphism lacks residues 100 to 355
MFWFDIYKNIDKIGLVNCPVLVIHGTSDDVVDCSHGKQLWEHCKLYPDYIKHLKKFVSSVSKKTSSKPDPKETTSKDDTTSKETEEAYPEKPQEAKKCPQISRKSLDSRFGKSKTVDVPDKPRMSSDDIDKFRRSRCLAGNSNTIVALAGNKADLLDKGGILFLMPLQLLKSWKASETQNSGMLSKVSLHQTAMALPPSGWLSTAVMRSGGSRCLHNKTRKQLQHKRDCANQILKAAMAINSNTLAEMEVAEPYLDSLPKNGRSTLGDIIYRYITSDQFSPECLLDCLDLSTEYQALEVANRVEASVYVWRRRVAAKPVNGLGRSSSARSSWGMVKDMMVDSEKRELLLAEQADL

SEQ ID NO: 4187 - protein, 430 aa, Zea mays
  VARIANT 11: note = Ancestral polymorphism is G, Derived polymorphism is R
  VARIANT 23..430: note = Derived polymorphism lacks residues 23 to 430
  VARIANT 50: note = Ancestral polymorphism is T, Derived polymorphism is M
  VARIANT 92: note = Ancestral polymorphism is G, Derived polymorphism is D
  VARIANT 107: note = Ancestral polymorphism is I, Derived polymorphism is N
  VARIANT 121..430: note = Derived polymorphism lacks residues 121 to 430
  VARIANT 147..430: note = Derived polymorphism lacks residues 147 to 430
  VARIANT 168: note = Ancestral polymorphism is P, Derived polymorphism is L
  VARIANT 253..430: note = Derived polymorphism lacks residues 253 to 430
MGKLLGKGAFGKVHYARDLESNQGVAIKIMDKERVLKAGLSEQVKREITTMRLVEHKNIVRLHEVMATRNKIYIIMEYAKGGELLDKVKRSGRLTEADTHRYFQQLIGALDHCHSRGVYHRDLKPENLLLNENGDLKVTDFGLSAFSESRRTDGLLHTVCGTPVYIAPEVIKKTGYDGAKSDIWSCGVVLFVLAAGYLPFQGPNLMEIYRKINDSDFRCPGWFSHKLKRLLYKILNPNPSMRPSIQEIKESTWFRKGPREISAVKEKVLSENATATNAAPVLAARRKEIAHEDMKPLVATKLNAFEIIAFSAGLDLSGLFIKECRKETRFTSDKPALAIISKLEDVAKALNLRIRKKDNNTVIIQGRKHGGNGVLQFDTQIFEITPSCHLVQMKQTSGDLIEYQKLLEEGIRPGLKDVVWAWHGDDLQQK

SEQ ID NO: 4188 - protein, 430 aa, Zea mays
  VARIANT 90: note = Ancestral polymorphism is R, Derived polymorphism is G
MTGGSGVVVIDNGGGLLKAGFGGDNDPIAVVPNCMAKPPGGNASSKKWLVADQLQAEDVDVTGMTLKRPIDRGYLINTEVQRDVWERVLRNLLQVDPTNSSLLLVEPMFNPPAIQHATDELVFEEFGFNSLYVADGPSLVHLYEASRQPMMFRAQCSLVVDCGFSFTHASPVLQNFTLNYGVRRMDLGGKALTNYLKELVSYRSLNVMDETLLIDDAKEKLCFVSLDVPGDLHLARLSFKDNPFRCSYILPDGITYKKGFVKDMDEALRYRTLPQVSDSKDHGMDTNKSEDRKKAELSQNEFVLTNERFLVPEMLFHPIDLGINQAGLAECIVRAVQACHPYLQPVLFESIILTGGSTLFPRFTERLERELRPLVPDDYKVKITRQENPIFGVWRGGSILASSPDFESMCITKSEYEEMGSARCRRRFFH

SEQ ID NO: 4189 - protein, 233 aa, Zea mays
  VARIANT 226: note = Ancestral polymorphism is H, Derived polymorphism is Y
  VARIANT 196..233: note = Derived polymorphism lacks residues 196 to 233
  VARIANT 177: note = Ancestral polymorphism is S, Derived polymorphism is L
  VARIANT 175: note = Ancestral polymorphism is A, Derived polymorphism is V
  VARIANT 168: note = Ancestral polymorphism is P, Derived polymorphism is L
  VARIANT 165..233: note = Derived polymorphism lacks residues 165 to 233
  VARIANT 158..233: note = Derived polymorphism lacks residues 158 to 233
  VARIANT 146: note = Ancestral polymorphism is E, Derived polymorphism is Q
  VARIANT 140: note = Ancestral polymorphism is A, Derived polymorphism is T
  VARIANT 99..233: note = Derived polymorphism lacks residues 99 to 233
  VARIANT 96: note = Ancestral polymorphism is P, Derived polymorphism is S
  VARIANT 94: note = Ancestral polymorphism is P, Derived polymorphism is L
  VARIANT 75..233: note = Derived polymorphism lacks residues 75 to 233
MIGIFFLQRKSKTLKARRDMMIFQIWECQGFANFERFTTNKAGYAFIKYQTKNQALATIEALKGKYKIEPVAASRRQPPEMQILVSQTHPTTCPGPRRRPKFSPSKGSSICCFEKKELASLVALTDQVSFFQYDSLLAIAEETLAEFLSKATGTAVDWVQMVEMKPGPDSIGIIAVSHNCSGVAAQPDQGLVPELQGYVVYLVRVRRGGRKRPLPKYIIYGKPKHHGITQLKF

SEQ ID NO: 4190 - protein, 174 aa, Zea mays
  VARIANT 18: note = Ancestral polymorphism is R, Derived polymorphism is W
  VARIANT 20: note = Ancestral polymorphism is V, Derived polymorphism is M
  VARIANT 36: note = Ancestral polymorphism is P, Derived polymorphism is L
  VARIANT 48: note = Ancestral polymorphism is L, Derived polymorphism is S
  VARIANT 49: note = Ancestral polymorphism is L, Derived polymorphism is F
  VARIANT 56: note = Ancestral polymorphism is A, Derived polymorphism is T
  VARIANT 122: note = Ancestral polymorphism is I, Derived polymorphism is T
MEKSRVLVVGGTGYIGRRLVRASLAQGHPTLVLLRPEIGLDIDKLQMLLSFKAQGARVVEASLEDHAASSPPLIIMLSLLESPYARKMPRKVVSGPDYDDDYDEYDDEYDETRYGNNTPVMTGKGILPNLLALFISSVKRGKWSLELLYTLSHTIGKVPVFFTTTVQLLRSMSV

SEQ ID NO: 4191 - protein, 98 aa, Zea mays
  VARIANT 1: note = Ancestral polymorphism is M, Derived polymorphism is I
  VARIANT 7: note = Ancestral polymorphism is V, Derived polymorphism is G
  VARIANT 10: note = Ancestral polymorphism is V, Derived polymorphism is A
  VARIANT 12: note = Ancestral polymorphism is D, Derived polymorphism is N
  VARIANT 18: note = Ancestral polymorphism is A, Derived polymorphism is D
  VARIANT 37: note = Ancestral polymorphism is R, Derived polymorphism is H
  VARIANT 41: note = Ancestral polymorphism is W, Derived polymorphism is L
  VARIANT 42: note = Ancestral polymorphism is S, Derived polymorphism is F
  VARIANT 43: note = Ancestral polymorphism is G, Derived polymorphism is S
  VARIANT 49: note = Ancestral polymorphism is G, Derived polymorphism is E
  VARIANT 56..98: note = Derived polymorphism lacks residues 56 to 98
  VARIANT 57: note = Ancestral polymorphism is D, Derived polymorphism is N
  VARIANT 59: note = Ancestral polymorphism is V, Derived polymorphism is E
  VARIANT 64: note = Ancestral polymorphism is D, Derived polymorphism is G
MGRLVLVNSVRDSQLIYAINAPQIARGTLAEVDHRRRWFFWSGIESVSGTQCLVAWDKVCNTRGNGSLGVKDLDTLSACLLLEVAPPPTHYLNSSWAL

SEQ ID NO: 4192 - protein, 458 aa, Zea mays
  VARIANT 142..458: note = Derived polymorphism lacks residues 142 to 458
  VARIANT 306: note = Ancestral polymorphism is R, Derived polymorphism is W
  VARIANT 365..458: note = Derived polymorphism lacks residues 365 to 458
  VARIANT 378: note = Ancestral polymorphism is W, Derived polymorphism is C
  VARIANT 391: note = Ancestral polymorphism is S, Derived polymorphism is F
MARSGLDAAVRTGALSRWWESQWIRALASSPVVDLTDDPDFARGQPPALSAATVDRCLRLHTELGAPLDMFRVALVCPSDLDGQDVIGWIATGLRRGARAVEVDLAPPPPEEEDEEEEGEEEEDPHAGHEAPLLELPADLFQARNSLERLALGSFSLHAVPLPAVGLAGLRSLSLSHVDVTDEALRGLVANCPALERLSLRRCSRLAMVSVASETLRVLELVGCQALKQLCVDAPALESFALHCNIFVTNPDAPCEWDWDTPVEVDLLGPPALRDVYLSHIGCDTRLDTEHNALYPSLCLDVVLARILTICSIGLLLLLTGAELHPQLHIDHEPEGEGSSSAAVWSVENDDSKDMAPKEEIVLDQLTFIKFVNFSGTWCQLRLLSFFLDKSPVLQQLVLVTPEGEGALGDDRLKVIHERVAALEKASSEASITVCRPKEDDTPNHPHTRYFHEEYETM

SEQ ID NO: 4193 - protein, 640 aa, Zea mays
  VARIANT 148..640: note = Derived polymorphism lacks residues 148 to 640
  VARIANT 149: note = Ancestral polymorphism is C, Derived polymorphism is F
  VARIANT 257..640: note = Derived polymorphism lacks residues 257 to 640
  VARIANT 439: note = Ancestral polymorphism is P, Derived polymorphism is L
MAIVDEGGKGEAQPPGLDPRTRRSAVTRATGDMDGGGRGEEWEGPPGYVLSLPAAALPLPVAVSCLDATVRRKGRSHIRHRGHPSGWWAFSLPVPAPEEAKGPVPPSSTANNPTEEGPSSNTRGKNLAVSRDQGAVQMSTIIVSVDLECSRCRAKIEKVLNRIQESQPLSRYKPGDWIEGVGGAKAGHFVLPEVTTLLLVGPRGSGKSTLVNRITRVFDKDDDPFAPDRAQVSCNSKSNGTMFLREYPIPRNSSALQNIKSEIADVSANPQGLLLEALHSVGYSGALAKPLMASESAVNRLDVSSLEEFVAEHYTAPRMVLAASRVDHDALISVVEPLLSDLPCVKRPEEPKSVYVGGDCRCQADSPNTHIALAFEVPGGWNQEKTAMVVTVLQLGEAVKELEEDGKRVGAVLVTSPTYHGVCSNVQGIVSVCHPRGIPVIVDEAHGAHFRFHDSLPSTAIEQGADLAVQSTHKVMCSLTQSSMLHMSGDVDVDKVSQCLQLLQSSSPSYLLLSSLDAARDQLSQNRNIFDEPLVIASETKDLLARIPGISVLDLPCSASYFPAIDPLRITLSASNLQLSGYEADDILYEGHQIVSELVGTRAVTFAVNLGTRVQDAEKLVQSAKHLSEKHFFATGHLAK

SEQ ID NO: 4194 - protein, 126 aa, Zea mays
  VARIANT 23: note = Ancestral polymorphism is C, Derived polymorphism is S
  VARIANT 25: note = Ancestral polymorphism is R, Derived polymorphism is G
  VARIANT 73: note = Ancestral polymorphism is S, Derived polymorphism is P
MSLPTPPPDVGAGVLWVEVLQESLGSAVDLSSAQVAATTDNRPPAHCFTFGDESTTGQLPPPKVSSIIPIRISRPTTAECYLTITMQPQYLVHSRAVYDRYVQYPQMMDKNNAYGLKMENSLFLND

SEQ ID NO: 4195 - protein, 432 aa, Zea mays
  VARIANT 7: note = Ancestral polymorphism is K, Derived polymorphism is T
  VARIANT 8: note = Ancestral polymorphism is G, Derived polymorphism is D
  VARIANT 9: note = Ancestral polymorphism is A, Derived polymorphism is V
  VARIANT 16: note = Ancestral polymorphism is A, Derived polymorphism is G
  VARIANT 23..432: note = Derived polymorphism lacks residues 23 to 432
  VARIANT 27: note = Ancestral polymorphism is I, Derived polymorphism is T
  VARIANT 39: note = Ancestral polymorphism is G, Derived polymorphism is R
  VARIANT 49: note = Ancestral polymorphism is T, Derived polymorphism is M
  VARIANT 92: note = Ancestral polymorphism is G, Derived polymorphism is D
  VARIANT 168: note = Ancestral polymorphism is P, Derived polymorphism is S
  VARIANT 172: note = Ancestral polymorphism is S, Derived polymorphism is R
  VARIANT 255..432: note = Derived polymorphism lacks residues 255 to 432
MGKLLGTGAFGKVHYARDLESNQGVAIKIMDKDRVLKAGLSEQVKREITTMRLVEHKNIVRLHEVMATRNKIYIIMEYAKGGELMDKIKRSGRLTEADAHRYFEQLIDALDHCHSRGVYHRDLKPENLLLDENGDLKVSDFGLSAFSESRRTDGLLHTVCGTPIYIAPEVVRKTGYDGAKSDIWSCGVVLFVLAAGYLPFQGPNLMEIYRKIHNSDFRCPSSFSHKLKRLLYKILKPNPSMRPSIQEIKESTWFRKGPREISAVNEKVLSENATTTNAAPVLPSRRKEIAHEDMKSLVATNLNAFEIIALSAGLDMSGLFINECRKETRFTSDKPALAIISKLEDVAKALNLRIRKKDNNTVSIQGRKEGGNGVLQFDMQIFEITPSCHLVQMKQTSGDLLEYQKLLEEGIQPGLKDVVRVWHGDDLQQKPE

SEQ ID NO: 4196 - protein, 90 aa, Zea mays
  VARIANT 47: note = Ancestral polymorphism is L, Derived polymorphism is M
MCPLRVILIFLSATVAGFFLVRGLNAEPDQFDADADADESGSPRAPLPLHSKVGSAVKAGFWTMVDMASGRYLWRTLVAQPANSESEKVR

SEQ ID NO: 4197 - protein, 505 aa, Zea mays
  VARIANT 291: note = Ancestral polymorphism is L, Derived polymorphism is I
  VARIANT 251: note = Ancestral polymorphism is T, Derived polymorphism is K
  VARIANT 248: note = Ancestral polymorphism is G, Derived polymorphism is E
  VARIANT 27: note = Ancestral polymorphism is G, Derived polymorphism is S
MVLLELLIVGSTLVLSLYVRFWRSRNGPLRPVDWPIVGVLPALISMLHNLHHEVTVILAASGCNFKAQGPVGSGMRFFFTADPANVRHIFTSNHANYPKGEELAEIFDIVSGSILTVDGEACRQQRGMFQTVLSNQRVLELMFRCCRHKVVHDLLPFLARMESSGTPFDMQDLMTRLIFDLTATPIFGVDPGCLSTMMPSMHVSAAMDTVMEVGLLRHTVPTSCWKVMRQLNIGPERKLAVAHTLLHEFITEMMVKSKARCSDPAGEIAAMDIISGDPAYSSDAAMLRKILINYMIAGRDTVGTTLPWVFYNLAKDPRVVSGIREELAHIASLKASGTKNMVFFEPEETKDLVYLQAALFETLRLYPPGPFERKMVLADDVLPSGHRLCSGETILISIYSMGRMEALWGKDCDEYRPERWFTEDGAKLRYVPSHKFMAFNSGPRMCLGKDIAITQMKTIVAAVVWNFHLEMLEGQSIHPKLSCILQMKNGLKMKVKKRQEKRDLQ

SEQ ID NO: 4198 - protein, 107 aa, Zea mays
  VARIANT 2: note = Ancestral polymorphism is A, Derived polymorphism is T
  VARIANT 17: note = Ancestral polymorphism is W, Derived polymorphism is S
  VARIANT 19: note = Ancestral polymorphism is A, Derived polymorphism is V
MAIYTPSITCVVVLYISCAATNPGDPCIFDSTKNLKLDKNEKHSYVNSDQGINHGGRPLSETFGTADNSEKLSSMLERNDSPSWPRFSGIISLVCLPFSCLCKRCLH

SEQ ID NO: 4199 - protein, 287 aa, Zea mays
  VARIANT 203: note = Ancestral polymorphism is V, Derived polymorphism is D
  VARIANT 201: note = Ancestral polymorphism is G, Derived polymorphism is V
MMRPTSTLAMVVPSLAVAILCILVRSASAEFWLDEFTTDGDVRRDYDRSGRQVASLVLDQRSGAGFNSTRKYLFGEFSVEMKLVGGNSAGTVTSFYLTSGEGDEIDMEFMGNSSGSPTVLNTNVWANGDGKKEHQFYLWFDPAADFHKYKIVWNDKNIIFQVDDVTVRVFKRYDDLPYPDAKPMAVHATLWDGSYWATRKGEVKIDWSSAPFVVSYRDYTANACAVHGRNGGGSSSCPAGANEWMDRQSDDTDRLTVAWARRNCLQYNYCDDGWRFPQGFPGECARN

SEQ ID NO: 4200 - protein, 288 aa, Zea mays
  VARIANT 15..288: note = Derived polymorphism lacks residues 15 to 288
  VARIANT 52: note = Ancestral polymorphism is G, Derived polymorphism is C
  VARIANT 81..288: note = Derived polymorphism lacks residues 81 to 288
  VARIANT 245: note = Ancestral polymorphism is C, Derived polymorphism is F
  VARIANT 248: note = Ancestral polymorphism is T, Derived polymorphism is I
  VARIANT 249: note = Ancestral polymorphism is G, Derived polymorphism is C
  VARIANT 252: note = Ancestral polymorphism is T, Derived polymorphism is P
MQVDATPNHTVNLAQSTPIFSTGDFPALPTVEDQNGFNKGNVDVLGMFNVRGSSEMPTGAGHFVSAVCKFASQNSGQWKFKKGPEYGNGVSALSVPKQYSSGTKQSSGNKFQSISSARVAPWLQTRDAVASMYSESRKEARDFARVRNACFEQARQAYLVGNKAVAKELSMKGQTYNVQMKAAHEKAREAIYRQRNLVSSQRGGDRLIDLHGLHVNEAIHILKGELTALKSTARAVGKRMQVMVCVGTGHHTRGSRTARLPLVVEQFLQDEGLQYTQPHPGLLQVMLY

SEQ ID NO: 4201 - protein, 83 aa, Zea mays
  VARIANT 1: note = Ancestral polymorphism is M, Derived polymorphism is I
  VARIANT 11: note = Ancestral polymorphism is M, Derived polymorphism is I
  VARIANT 48: note = Ancestral polymorphism is G, Derived polymorphism is W
MEGREKAREAMGAATTVRRREPAKRPGRVSSPREMAPSSRSGSTTKNGTGGLRRDGSKVGLRRRRWRPRSSTGGSRGGGLPRE

SEQ ID NO: 4202 - protein, 239 aa, Zea mays
  VARIANT 232: note = Ancestral polymorphism is G, Derived polymorphism is E
  VARIANT 202: note = Ancestral polymorphism is G, Derived polymorphism is S
  VARIANT 168: note = Ancestral polymorphism is E, Derived polymorphism is Q
  VARIANT 54: note = Ancestral polymorphism is K, Derived polymorphism is N
  VARIANT 37: note = Ancestral polymorphism is A, Derived polymorphism is V
  VARIANT 33: note = Ancestral polymorphism is P, Derived polymorphism is L
MGSKASFRVTLLLLLLAAAWGPAAQADDAAELPDHIAITLKEQVSSTKIPVRLKSGSPLCSACENFTGKAVSYISEKQTQDKVMGFLHDACSQSFSFEQKCDELMDSYATLLFAKITEIKPEAFCKQYGLCRGTALFSGVTSDSTCVFCHHLLDEVMSKLKDPDAEFEIIQILIKECNKIEGHVQQCKRLVLQYIPLILVNGEKFLEKNDVCALVQACPATHKKTFSSVLKGALLLSDA

SEQ ID NO: 4203 - protein, 551 aa, Zea mays
  VARIANT 39..551: note = Derived polymorphism lacks residues 39 to 551
  VARIANT 113..551: note = Derived polymorphism lacks residues 113 to 551
  VARIANT 154..551: note = Derived polymorphism lacks residues 154 to 551
MSKEDVLKVQTCVLKVNIHCDGCEKKVKKILHKIDGVYQSSIDAEQGKVTVSGLMDPATVIKKLNKAGKPAQLWGAKPGVVSQLQKLQLGGGGGGGGGKDKQPKGGDGGGKGQQPKGGDGGGKGQQTKGGGGGGGGGGKGGKDANMVLPQPTPQQMQQLMQMKGMKLPPELLMGMGGSKMPPFPSPAPAPGPPPPAAKDPKPAKFSYPEDDEFGDEGSEFDDEFDDFDDEDDFEDDGFDDDDLYGDPKMMAKPVAMPPAAGKKGGNGGKKGGGGGNEIPVQVKGNAHNGGGKKDSGAKQNQGGGKNGGGGGGSQAPQNGKGGGNGNQQGKKGGGGGGGGPPAGSGAPMMGSMAMPAPRPPLPQQQQPGPGMMMRPPNMMGGAGFPGGGMGPGMGQMGGAPMGHPHHPHPHPHQHMGAGGNGMQMQPGGGGGGAVHGMPAGAMPGHAAGFYQGGGGAAGGGMPSGPEMLQAAGNPMAMAAQQQQYMAMMQQQQMMNGHGAGGAGGYPAMGYGYGRPAMQYPPPPPYYYHPMPQRHPHDNMFSDENPNSCTVM

SEQ ID NO: 4204 - protein, 654 aa, Zea mays
  VARIANT 173..654: note = Derived polymorphism lacks residues 173 to 654
MGKRKPMPSAAAARGPKNRPKRPKSVKQGAELREQNLQLPEHDYENIDTESGAAETVHRDKKANGIFQDTSQSDEEEIEDEYDAPSNDTPGDATNNGNGCFDETEISCSFHRHVSHVITNEEVKMLMKKNYKFKWEMPAVGIPRSKWVGTGEKVQEACDDHLHDVKGKLRDHWQHTLSDHLNSRMSFYSLCNSYRDIMHCNKKPFYLKSNGPDSSTMDAYLMHALNHVHRTRDVVIRNDAKLRNDTDRDITDDKTYLDQGFTRPKVLFLLPLKSFARRIVKRLIQLSPLPQKDSAMGQFKKEFGESDDEGIPEHSTKPADFDLLFAGDIDDHFVFGVKLTKKSIKLYSNFYSSDIIVASPLALKRKIDGGGHDKKDFDFLSSIEIVVVDHADVMSMQNWDHLEAVFEQLNQLPSKEHGTNVMRIRPWYLDQHAQYYRQTILLSSYLTPEINALFNGLCLNYEGKIKMVTEYAGVLPKIQLEVRQVYERFDASSIAEADGARFDYFCNKVYPKIQDLDEGGLLLFVSSYFEYIRISNFLKSKEASFCRIGEATSQQDISRARLWFFEGKKKILLYSERSHFYHRYKIRGTKHLLVYSLPGRKEFYPELVNMLGESENRKCNVLFSRLDLLKLERIVGKSSARRLISSEKGMFVFC

SEQ ID NO: 4205 - protein, 260 aa, Zea mays
  VARIANT 172: note = Ancestral polymorphism is I, Derived polymorphism is T
  VARIANT 152: note = Ancestral polymorphism is R, Derived polymorphism is T
  VARIANT 135: note = Ancestral polymorphism is I, Derived polymorphism is L
  VARIANT 126: note = Ancestral polymorphism is V, Derived polymorphism is D
  VARIANT 65..260: note = Derived polymorphism lacks residues 65 to 260
MRPDRRNEAVAFAAKNTKRKRRSSPNESKDLLLVVSEEAASGSGGSAGTSLETNGEDVATDDEVSGAPRSAVLQACALTSGLLLAGGLLLREASHLASINGWPIADPTDVSFSFETWHLELVAGLVIVISSARYILLQTWPDFRDSSESANRQILASLEPLDYIVVACLPGISEELLFRGAMMPTLGLNWISALIIGTVFGVLHLGNGRKYSFAIWATFVGFAYGMGTIASSSIVVPIASHSINNIIGGLLWRLTKNSQK

SEQ ID NO: 4206 - protein, 278 aa, Zea mays
  VARIANT 252..278: note = Derived polymorphism lacks residues 252 to 278
  VARIANT 168: note = Ancestral polymorphism is C, Derived polymorphism is Y
  VARIANT 156..278: note = Derived polymorphism lacks residues 156 to 278
  VARIANT 61..278: note = Derived polymorphism lacks residues 61 to 278
MLSMEGVCDARVIPKPRSVSMEGSSTSAPGSASQPSSALDPRPRSPLGLHGKGQYSARAAQSVALVAYRCLSGSPKNRLDMSAVVQALEPLIDLDDDVPVAPLGHANPVVLFVTAAAKEKNERAPRKDVLGHRRRPMSPKASPRKHSSVGTKEEFWVWHLPADQKTLCYYSEIRCRVSPPLVSGSCGSSSADPYGVPEFGWRDIRRYKQFRSVETNISAGNDSALGQRLNWHGLGSMPSAEAMRLFVKILEEEDPGWYSRAPEFNPEPVVDIQMHVGV

SEQ ID NO: 4207 - protein, 238 aa, Zea mays
  VARIANT 41: note = Ancestral polymorphism is S, Derived polymorphism is A
  VARIANT 29: note = Ancestral polymorphism is K, Derived polymorphism is Q
MLAVFSGQVVEVPAELVAAGSRTPSPKTKASQLVGRFLAASEPAVSVQLGDHGHLAYSHTNQALLRPRSFAAKDEVFCLFEGVLDNLGRLSQQHGLSSKGANEVLLVIEAYKTLRDRAPYPASFMLAQLTGSYAFVLFDKSTNSLLVASDPEGRVPLFWGITADGCVAFSDDIDMLKGSCGKSLAPFPQGCFYSNALGGLKCYENPKHKVTAVPADEEEICGATFKVVEGSTVLTALH

SEQ ID NO: 4208 - protein, 487 aa, Zea mays
  VARIANT 157..487: note = Derived polymorphism lacks residues 157 to 487
MLLGSPVKRLLRRAAKRRLEKAELAWLAAAALLLLLLLLLGAASLRCSAAALVAAHGRLWAGGVSIAASADADADHRPVSAPRAAAAGSGGGGEAAAAADDEEEEECDLFDGEWVWAGAGAGGGYPLYHSSDCPFLDVGFRCAENGRPDASYTKWRWQPSRCHLPRFDAKGMLEKLRNKRVVFVGDSIGRNQWESLLCMLSSAVHNKSSIYEVNGSPITKHMGFLIFNFSDYNCTVEYYRSPFIVLQGRAPAGAPEIVRYSIRVDAMDWMSDRGKWKDADVLIFNTGHWWNNEKTIRGGAYFQVGDEVKMGMNVADAYRRSIQTLSDWLRKEVNPSKTHVIYRTYAPVHFRGGDWKTGGSCHLETLPDVMPVKSLDEWADLLQPVDDFLGSNLRSKLAGLDLLNVTRMTAQRKDGHLSVYLSPSGPVPRYKQDCSHWCLPGVPDAWNELLYALVMRRHKKMGQNASLAGARTPNTEEGDGDVFSRPS

SEQ ID NO: 4209 - protein, 207 aa, Zea mays
  VARIANT 70: note = Ancestral polymorphism is R, Derived polymorphism is W
MPETLSSSTPEWEKPNSSSGMMLRSNLCALLSPLTPFPSTIDTKTKADLEEVVVAEADIMNLQQKVSDLRGQLNNQVQLSSTSLCESCNNKRSINADKLVEGEQNAALSPQIASVEAPPIVGSYSVPDMFWATNQMVQKMLYSKGEIAKDGQDGSLTSRWNFAQRPHSNSPVVSRVQGSDAYSSTKTEESGGAPSSALAKLTYVSFK

SEQ ID NO: 4210 - protein, 131 aa, Zea mays
  VARIANT 71..131: note = Derived polymorphism lacks residues 71 to 131
  VARIANT 29: note = Ancestral polymorphism is C, Derived polymorphism is S
  VARIANT 27: note = Ancestral polymorphism is F, Derived polymorphism is I
MRRRGSNSSPLAAAALPLLLLLVAGCFHCMAAAARHLPSPGAPVQALDHQAENGVKAASAGADGAGGLVLQEGGTGNNGDDLSSKTLLETTTTTMGAEACEEGNDKDECVQRRLLVDAHLDYIYTQHKGKP

SEQ ID NO: 4211 - protein, 112 aa, Zea mays
  VARIANT 92: note = Ancestral polymorphism is Q, Derived polymorphism is L
MMIRRGSSKISSPLALLCLLLLLLLLVIVCSSSNCAAAARLLPGAGPLPPLRAAAPSGGDEHSAASEVTTQDTTKGAAEACEEGNENDECVQRRLLLDAHLDYIYTQHKGKP

SEQ ID NO: 4212 - protein, 353 aa, Zea mays
  VARIANT 162: note = Ancestral polymorphism is P, Derived polymorphism is L
  VARIANT 83: note = Ancestral polymorphism is W, Derived polymorphism is S
  VARIANT 12: note = Ancestral polymorphism is C, Derived polymorphism is R
MEYRRVKDQELCLSIKSRKGSFLYKNASRSRRAVSNISSVPKEIYDDLSQKDVESLSGRTLSSANTTAIGPASAGGAKANSSWKLKSVVTLALTLLTSSQAILIVWSKRAGKYEYSVTTANFSVEALKCLLSLAALFRTWNCHGVTDDNRLTTSFDEVGVYPIPAVLYMVKNLLQYYIFVYVDAPAYQILKNLNIISTGVLYRIILKKNFPPVPFRLSEIQWAAFVLLCAGCTTAQLNPSSDHVLQTPIQGWMMAIVMALLSGFAGVYTEAIIKKRPSRNINVQNFWLYIFGVIFNLVAICVQDYDAVMNKGFFHGYSFITVLMILNHALSGIAVSMVMKYADNIVKACGTSM

SEQ ID NO: 4213 - protein, 573 aa, Zea mays
  VARIANT 464..573: note = Derived polymorphism lacks residues 464 to 573
  VARIANT 233: note = Ancestral polymorphism is I, Derived polymorphism is T
  VARIANT 156: note = Ancestral polymorphism is G, Derived polymorphism is V
MPSSSSGPPSNDVRLIPYLDECDAPRRKRRHSASAIYNPPNITATQARATRRHLLNQSRIARKASYPNRSYYGTPDYECSYCHAVFWYAERVRSNQHDSSIRYNNCCKGGKISIPPFKPRPEPLASLARFDGDATSRKFIRNIRQYNCLFAFTSMGAQIDNSVNDGRGPPLFKICGQVHHRIGTLLPDDGSPPRFIQLYIYDTTNEVQNRINALDSGDRTQDNFDPVIIRNLIKMLDDHNPFVKKFRMARDRLADNPNEEFTIRLIGAKEGDPIQYNLPTTDELAMLVVGDFTLDTFKRDIIIETQNKELKRISSLHPTYMALQYPLLFPFGERGFQNLRMESIQGITDAVSRGCISGEQIGKTIILPASHTRGRRYMIQNYHDGIAICRVHGPPDFFLTFTCNPNWQEILESLSQPGQTPLERSDIIVRVYHMKLNDLLHHIRNGSIFGPCTAVLYTNEFQKRGLPHSHIIFWVSTDTTQPTPALIDSFINVEIPDPLVDPLAYCLVAEHMIHGPCGSLNPHSPCMKNGKCSRNYPKQFCEITTLDNQGFVTYKRPNNGRYIIKSCNKLDNR

SEQ ID NO: 4214 - protein, 556 aa, Zea mays
  VARIANT 50: note = Ancestral polymorphism is L, Derived polymorphism is Q
MRKLSAPRGGGEKLGVLGFEVAALMSRAAGLWRALDDHHLARLRGEAIRLEGVRRLVADDDAALLALALAEMAAACRDLSRAVARLSARCADPLLRRFDALFAALLKRRAADPHGLRYAARAKMDRKARKMQRLVAATAHLCHELDVLADLEQQQQQQAGTGAGTSNSRAERARRVARQRQEVERIRAASLWPRTFDYAVRLLARSLFTIVARIIEVFDLDYAVDDDEEEEEETASSRASRLSWGSSFVSGSMHMVYPSDVVVAGADAPRTALRRARSGKTAAAATGSKSHMSRSKSLRQQLRWPAAAGKHLIGCVVVTGSSRPQGRDGWIPQSFSYVSDSDDHSSGAGIMSFHSLGDGRQPPPPPPPTTTTSVFDASRDALAHPPEASLGGAGLALHYANLIMFIDRLAAAPHHIRADERDALYGMLTGSLRASVGARLRPSFAAAAPRADPALWADTVRRTLAWLAPLARNTARWQAERSFGQRSVAPCGSGGGGAAAVLLLQTLHFADRGKTEAAVTDLLVGLNYVWRDGAAELDAKLGLGSESAAGRRRRLR

SEQ ID NO: 4215 - protein, 1472 aa, Zea mays
  VARIANT 1208..1472: note = Derived polymorphism lacks residues 1208 to 1472
MRIAIAMDHRQDAGDGEEERQQQLGDLETDKEPVQKQGQLSPSSSWRAAAAASIRESLSRSLSSLSHQQEEKDDDEVELRWAAVGRLPTMDRLHTSLQLHAGQRQVVDVRRLGAAERRMVVDALVANIHRDNLRLLRKQRQRMDRVGVRPPTVEVRWRDVRVEAECQVVHGKPLPTIWNAVVSGLSSVSTMVGLNRQREARVRILHGVSGVAKPSRLTLLLGPPGCGKTTLLKALAGKLRATGLKVTGEIEYNGVELNNGFVPEKTAAYIDQYDLHVPEMTVRETIDFSARFQGVGNRAEIMKEVIRREKEAGITPDPDVDTYMKAISVEGLERSMQTDYIMKIMGLDICADIMVGDAMRRGISGGEKKRLTTGEMIVGPSKALFMDEISTGLDSSTTFQIVSCLQQLAHISESTILVSLLQPTPETYELFDDIILMDEGKIVYHGPKSCIMGFFESCGFKCPDRKGAADFLQEVLSKKDQQQYWSHSEETYNFVTIDQLCDKFRVSQIGQNLAKEISKPCDKSEGLKNALSCSIYSLSKWELLKACSARELLLMKRNAFIYIGKSVQLALVAAITGTVFLRTHMGVDIVLANYYMGSLFYALLLLMVNGFPELSMAVIRLPVFYKQRDYYFYPAWAYAVPAFILKVPISLVESIVWTSLSYFLIGYTPEASRFFRHLLILFLIHTGALSMFRCVASYCQTMVASIVGGTMALLLILLFGGFIIPRSSMPNWLEWGFWLSPLSYAEIGLAETEFLAPRWLKLTASGVTLGRRVLLDRGLNFSVNFYWISIGALIGFIFLCNIGFAIGLTIKKPPGTSRAIISYDKLSRLNRRDQCVLVDTKDGINKQQENSSARSGTGRVVLPFVPLAVSFKDVNYYVDTPAEMREKGYMEKKLQLLHNITGAFQPGVLSALMGVTGAGKTTLLDVLAGRKTGGVIEGDIRVGGYPKVQETFARISGYCEQTDIHSPQITVGESVAYSAWLRLPTEIDSKTRDEFVNQVLETIELTEIRDALVGMPGINGLSTEQRKRLTIAVELVSNPSVIFMDEPTSGLDARAAAIVMRAVKNVANTGRTVVCTIHQPSIEIFEAFDELMLMKRGGQLIYAGPLGYRSSILIKYFQAIPGVPKIKDNYNPSTWMLEVTSTSLEAQLGLDFAQVYMDSSMYKEKDELVSRLSIPTLGSSNLHFPTRYPQKFREQFKACIWKQFLSYWRTPSYNLVRIVFILVASIAYGALYWQQGNINNIHEQQSLFNILGCMYGTTIFSGINNCQSVMPFVSIERSVVYRERFAGMYSPWAYSLAQVTMEIPYVLVQIVLFMLIAYPMIGYAWEAAKFFWLLYTMFCTLLYFLYLGMLMVSVTPNIQVASILTSLFYTIQNLMSGFIVPGPQIPKWWLWLYYTSPMSWTLNVFFTTQFGYEDQKKIDVFGETKSVAAFLKDYFGFKRELLPLSAIVLAAFPIFFAALFGYSISKLNFQRR

SEQ ID NO: 4216 - protein, 60 aa, Zea mays
  VARIANT 36: note = Ancestral polymorphism is A, Derived polymorphism is S
  VARIANT 31: note = Ancestral polymorphism is P, Derived polymorphism is S
  VARIANT 28: note = Ancestral polymorphism is A, Derived polymorphism is S
  VARIANT 26..60: note = Derived polymorphism lacks residues 26 to 60
MRHSSDTSDQILLEEPESWKISCLTRNAYHPNVIYAKISCWDFTIALGYCYKEITSQHPV

SEQ ID NO: 4217 - protein, 224 aa, Zea mays
  VARIANT 77: note = Ancestral polymorphism is G, Derived polymorphism is S
MALTTLALELESAAGDYSHSHSRRERMFEKVVTPSDVGKLNRLVVPKQFAERHLPLRGAAARSRGTVLCFHDDARGGEAWRFRYSYWSSSQSYVITKGWSRYVRDKRLATRDIVAFCRDGARLFIDCQRRRRTTTRRSGSEGAVVLPAPAIGAAVPPMCQLQMTVVFPDGQHQQAAVAMKKETAAAQEEDDKEAQRRCGRCLRLFGVNLLDELRTEPLLLDLQL

SEQ ID NO: 4218 - protein, 158 aa, Zea mays
  VARIANT 34..158: note = Derived polymorphism lacks residues 34 to 158
MNCFWCPVHLKMKKSTTVLAISILVLSLASQFSWCAEAAEGSAGISTEPDLQVQEQVHGDMKNRLEMQGRNRKLGHEVTTVELKHHRRITSGHKGGSAGGGAGAGAAGAGTGGHNVGGGGAVTRPHSSKNGAAALPVPVSSVLTLALACGVVLSVMSY

SEQ ID NO: 4219 - protein, 185 aa, Zea mays
  VARIANT 160: note = Ancestral polymorphism is S, Derived polymorphism is G
MDPTNQRSSGAGHRSSVVAAMGHGGACGHGQQHVSAPTSLCLPSSPESQQAQSVMPPNPPWSSVLWYMNIYPPNGFVNLINQSYMPISSQPLGENFHFVGLTQNFNTSLPPPPSAKRTQKPSKLAKETIQIDGDGDAATEESKVVKKRYWTHDEEVRLVSAWLNSSNDLIHGNDKKGETLWKEIA

SEQ ID NO: 4220 - protein, 268 aa, Zea mays
  VARIANT 3: note = Ancestral polymorphism is V, Derived polymorphism is M
  VARIANT 8: note = Ancestral polymorphism is P, Derived polymorphism is L
  VARIANT 22: note = Ancestral polymorphism is L, Derived polymorphism is S
  VARIANT 29: note = Ancestral polymorphism is T, Derived polymorphism is M
  VARIANT 34: note = Ancestral polymorphism is P, Derived polymorphism is L
  VARIANT 55: note = Ancestral polymorphism is R, Derived polymorphism is C
  VARIANT 65..268: note = Derived polymorphism lacks residues 65 to 268
  VARIANT 89: note = Ancestral polymorphism is Q, Derived polymorphism is E
  VARIANT 91: note = Ancestral polymorphism is P, Derived polymorphism is L
  VARIANT 92: note = Ancestral polymorphism is A, Derived polymorphism is S
  VARIANT 129: note = Ancestral polymorphism is S, Derived polymorphism is L
  VARIANT 179: note = Ancestral polymorphism is K, Derived polymorphism is N
  VARIANT 247: note = Ancestral polymorphism is G, Derived polymorphism is D
  VARIANT 259: note = Ancestral polymorphism is T, Derived polymorphism is K
MPVMVANPKICVVKAVDAFVELAEASKYTMEAMPSSKGPGVGDTTMVPRHVLGRREHDLLCRHRRARRCLPLLVALAQKGMGGGVLGSQGPACSLSSRMVFPLPYTPHCGIRVLALPGRGGGDGEQPLSRIAMERVVDDAAHQALVALYLYPFLNTVYKTREYEFLRLTSLGVIGAPVKGMIILNHEMDDDRIECLSHHLKKVVLKGYRGQKHQTQLDIFLVSYVGFYMFSTDSPCPVIVGFVYSFGYHGIQPQLLKRTRFSPLCYFH

SEQ ID NO: 4221 - protein, 135 aa, Zea mays
  VARIANT 17: note = Ancestral polymorphism is A, Derived polymorphism is P
  VARIANT 19: note = Ancestral polymorphism is A, Derived polymorphism is V
  VARIANT 37: note = Ancestral polymorphism is D, Derived polymorphism is Y
  VARIANT 80: note = Ancestral polymorphism is R, Derived polymorphism is Q
  VARIANT 83: note = Ancestral polymorphism is S, Derived polymorphism is L
  VARIANT 106: note = Ancestral polymorphism is L, Derived polymorphism is H
  VARIANT 117: note = Ancestral polymorphism is L, Derived polymorphism is R
  VARIANT 121..135: note = Derived polymorphism lacks residues 121 to 135
MRYVSGHIEDWDQINLARAEGRLFNKLKWPNDLKLKYLIKRLYSLLTIKESAAIVPKNLEARRRLHFFTNSLFMEMPVARPVSEMVSFSVFTPYYSEIVLYNMAELQKKNEDGITTLFYLQKIYPGLGFTSFYFP

SEQ ID NO: 4222 - protein, 1343 aa, Zea mays
  VARIANT 1081..1343: note = Derived polymorphism lacks residues 1081 to 1343
MAELAAGAVGSLLGVIRNEMSLLGSVRGDVQFIKEEMESMNSFLLHLARTAPPGGEHDEQVRTWMNRVRMLAQDCNNCLDLYLYRGNPDIHRARGGVRRYLWCWWVPWFLQKLVGQHRAAVQLGLLKLRARDVGERRLRYGVEIPGKSSPPVAGAAAATPPPLPSSSSWDSVQAAAPAPDGYDDEEDGDPQLAVAAMATADRNAFIEACTLVDYFQAKLVEWVESLQIDASETFSISVLVPEREPQHMMADAIALAQEALIFPSAGGFLDNLGYNRAVLIDIPAVHLDMLPLGPNEALYYILRQLKLESQSHPQDKSGQGEDVNDGLDSWQVYCRKLGIYHEKKLMLREIKEKIKEMKIDDKLDKIKSAIRDRRSKGAHLQQLLQLELQQKKDVEQLDLDLLLHLLLQSQSASSAQDQRKDDEGMDKLPEWDDKVIAKIARKLKKHMEATGEEEAKELNKEQQTGTEEEQEGNRQVARQQQHIAPICLPEDQYKQILLEVFPKAGSSEQQRDRPAVKQEATEATALTTVGNHAVTTSELGPNGKAVFETTVDQKMAKIKQKLKERLKSYALATKIKEHLNYVCPLIILIVNEKMDGSTWTETRNALSLLACGTDAMIVTTTRSAQWAKEYCYPQREPIEYSLAGRYYSTVLQLARYQKDEDGDKLRTIHKILEECEPDELCMKIFTRALYAKPSRSNEELTKLHTTLQEASRKSSASIAKKMFKFSYNDLPKEYKSCLLYLAIFPLGHEIRRSTLVGRWVVEGLITKEDWPSSVREANRCFDVLISRCLVYPVDTSATGKVKSCMAGAPVHQIITKIARNQHILETRLSHHLARYFSIFNDLRLRGSETISTFFQDLSKSSQVSLLKVLDLEGCGCFGGRDEHYFVVVCRKMLLLKYLSLRRTNLQKLPSEINNLHELEVLDLRQTSVPASATKHVLLHKLKRLLGGSTSSATSSSVLIPHKIEKMTNMEVLSNVRALASHDLTDIGRLCQLRKLGVVIGDKENHLKELLRSISDLQESLQSLSITLPTTVCEGTPAKELPDGIQSLLKYPPKLLESLSISGTTQMGRLLPLFSQHRGGAKLAKVTLSNTCLNQDDLKLLADLPRLLCIKLQHVECTPSILTFSVEKFTTLKHLSVEGSNLTEITFEYGAVSELEKIVLTSTNIGSICRSWNLVKLDEVELDKSSSRLVPSFDAHKLTLRGALLEQGDLETMANCRNMRSLVLKSCGISQNKITFKKDGFPKLNLLAVDCPTVTDIVFTGGSAPKLEKIIWSSPTSLSGIHELPRLKEVEFSGDTFPGAVKEAIEKHRNNPTRRHIKPEIQVPAEEGKREDSNGAARFSFCWK

SEQ ID NO: 4223 - protein, 516 aa, Zea mays
  VARIANT 64: note = Ancestral polymorphism is V, Derived polymorphism is E
  VARIANT 108..516: note = Derived polymorphism lacks residues 108 to 516
  VARIANT 157: note = Ancestral polymorphism is K, Derived polymorphism is N
  VARIANT 175: note = Ancestral polymorphism is D, Derived polymorphism is Y
  VARIANT 264: note = Ancestral polymorphism is S, Derived polymorphism is L
MRQGKGDPAIAALAIAIAVVLLCVASSAVLAIDGAKAEEELPTQLLNGFAATHAAGSAATFEPVLYATSAVFALGFLRVGPASLDLAVVHLPSSFPVWRATPARLGDWSRPATLAFDDGTLVLAGPDGAVLWRTLNTVGDTVALLNSSNLVVQRYENPQPAWQSFDHPADTLVVDQNFTASSSPLVSANRRFTLQLGRTYMAMHMQFDAGQAQAATAPVYWKHTALEAHLENATAPPVYGRLDALGFFGLYLDGGGGQRVDVLSFDTFALNLTGVFRRMTLDDDGNLRAYYWTTGDSSAWTSDYKAIAERCELPTSCGAYGVCVPGNAQCQCLDSNGTSTAPPCHGEDTADLCSTASSNGARQLGFDVVRRTRVSVAYKEELPFRTNTTADGCELACAGNCTCRGALYNGASGYCYLIDFPVETLVYQADDRMLGYFKIRKAATANSARRGMSPGVTAATVALSLVLAGLAAAGAYWGYRTWERRKRKRAGMEQELVPGPYRDLKSMASSNNSFKA

SEQ ID NO: 4224 - protein, 107 aa, Zea mays
  VARIANT 31: note = Ancestral polymorphism is G, Derived polymorphism is R
MGEVKHLCLAKFKDGVVVDDVLKGMTDLAAGMDTVKSFEWGQDVLNQEMLTQGFTHVFSLTFASAADLAAYMAHDSHTAFAATFMAAIDKVLVVDFPVVVAKPPPPA

SEQ ID NO: 4225 - protein, 137 aa, Zea mays
  VARIANT 112: note = Ancestral polymorphism is S, Derived polymorphism is N
  VARIANT 83: note = Ancestral polymorphism is G, Derived polymorphism is V
  VARIANT 60: note = Ancestral polymorphism is R, Derived polymorphism is S
  VARIANT 59: note = Ancestral polymorphism is Y, Derived polymorphism is S
  VARIANT 58: note = Ancestral polymorphism is I, Derived polymorphism is S
  VARIANT 38..137: note = Derived polymorphism lacks residues 38 to 137
  VARIANT 29: note = Ancestral polymorphism is A, Derived polymorphism is V
  VARIANT 10..137: note = Derived polymorphism lacks residues 10 to 137
MPPVGCVPSQRTLGGGLATRACEPKRNEAALLYNARAQELIAAFNNNNSDVLVVFLDIYRILDDLMERGEEYGFSETTRGCCGTGTIEVTGLCDSRFVSVCDDVSQHVFFDSYHPTERAYRIIVNDIFLNYGHVLFS

SEQ ID NO: 4226 - protein, 513 aa, Zea mays
  VARIANT 158: note = Ancestral polymorphism is D, Derived polymorphism is Y
  VARIANT 173..513: note = Derived polymorphism lacks residues 173 to 513
  VARIANT 183: note = Ancestral polymorphism is R, Derived polymorphism is W
  VARIANT 197: note = Ancestral polymorphism is R, Derived polymorphism is H
  VARIANT 232: note = Ancestral polymorphism is R, Derived polymorphism is S
  VARIANT 325: note = Ancestral polymorphism is T, Derived polymorphism is M
MRTPAAGGWRLHPRGSSSSKLTRRIISNVKITLLCAFVTLLVLRGTVGVNRRLVYIAGSPDNRADSATATATGSARPVEDVERILREIRADSDDDPDAGPDDNDEAPTSTSSSAATGHHYDRGAAWTTTNYRLQPRVTRWNAKRRRWLHQNPGFPSRDARGGPRVLLVTASPQGPCGSSDGDRFLLRATKNRLDYCRLHGVEMVHATARLEDPELRSAGDGNGWAKLALLRRLMLAHPEVEWLWWLDAGALVTDMGFELPLARYEGAHLVVRGDSYQLFQRRAWDAASTASFLLRNCQWSLDLLDAWTVMAPRGRARYDAGALLTATLAGRRAGEADDQSALVHLLVTEKERWMDRVYLENQYYLHGVWTALVGKYEEAMEKHHPGYGDDRWPFVTNFAGCNPCDDGKNCSDEYPLDRCASGMERAFNFADNQVLRLYGFRHESLASAEVRRVANRSTDPLEAKEEALAFLKKPNEPDLWSNDVRKNRKRKGKGDLDSVLARILRRLGWRSKC

SEQ ID NO: 4227 - protein, 456 aa, Zea mays
  VARIANT 396: note = Ancestral polymorphism is P, Derived polymorphism is L
  VARIANT 389..456: note = Derived polymorphism lacks residues 389 to 456
  VARIANT 386: note = Ancestral polymorphism is C, Derived polymorphism is Y
  VARIANT 138: note = Ancestral polymorphism is W, Derived polymorphism is R
MGVAAGGGARLRASSAKKQRQRTLNNIKITLLCGFITVLVLRGTAGFNLLVSSGDLDGAAADAKVVEDVERILAEIRSDSEADDVVVVVEGGSSSSSSPRNATAASFGNFSASATLVKVREYSLGPPVRGWDAQRREWMAQHPEFPRLHPRGRPRVLLVTGSPPGPCDNPAGDHYLLKATKNKIDYCRLHGIDVVHNMAHLDPELTGYWSKLPLVRRLMLAHPEVEWIWWVDSDAIFTDMAFELPLSRYDGRNLVIHGYPDLLFEKRSWISLNAGIFLLRNCQWSLDLLDAWVPMGPRGPSRVEAGKLLTASLTGRPPFDADDQSALIHLLLVQKERWMDKVHVETEFYLHGFWTGLVDRYEQMMEDNHPGLGDDRWPFITHFVGCKTCGRYEDYPLDRCIRGMERAFNFADNQVLRLYGFRHRSLTTAKVRRVTDPTTNPLEAKEAALNMDAKFT

SEQ ID NO: 4228 - protein, 364 aa, Zea mays
  VARIANT 15: note = Ancestral polymorphism is E, Derived polymorphism is K
MEASSRLELQQAHTELWNLTFSYLKSMALECVVQLNIPNVIHNFGGNATLPSILSAIQVPEHRKPYLPRLMRFLVVSGILSFDSPTLGEEGTYHLTPLSRLLVDDTHINGYGSLGPFVLSQTTKYHVSSATYLSEWFKGEDGAGPMAAEMPFKMAHGTGPWGALGHDQQFNRVFNAGLGSNSRLVLDFVVAEYGDVFDGVSSLLDVGGGDGSTARTIRKAFPHIKCSVLDLPNVIIDIQPGDGMVDYIAGDMFSSIPPTDAIMLKYVLHDWNDDDCVKILQQCKKAICSCKPAGGKVLIIDVVVGSPLKEMFEAQVTSDLLMMVIAGGKERDKKEWHKIFVESGFKDYKISPVLGYLSIIELYS

SEQ ID NO: 4229 - protein, 509 aa, Zea mays
  VARIANT 267: note = Ancestral polymorphism is R, Derived polymorphism is C
  VARIANT 250: note = Ancestral polymorphism is R, Derived polymorphism is G
  VARIANT 137: note = Ancestral polymorphism is M, Derived polymorphism is T
  VARIANT 134..509: note = Derived polymorphism lacks residues 134 to 509
  VARIANT 37: note = Ancestral polymorphism is R, Derived polymorphism is C
  VARIANT 12: note = Ancestral polymorphism is A, Derived polymorphism is V
MEAAADALPWAAQCAGMALLASSLCVVALALVLLLLRRWPWCSCHVCRAYLTGSWARDFTNLGDWYAHLLRESPTGTVHVHVLGCTVTANPANVEYMLKTNFDNFPKGKTFAALLGDLLGRGIFNVDGHAWRHQRKMASLELGSVTVRSYAFGIIAQEVEARLLPLLAGAADSGAVVDLQDVFRRFAFDTICKISFGLDPGCLEPEMPVSELADAFDTATRLSATRGAAAAPLLWRAKRLLNVGSERELRAAIKLVDELAATVIRERRKLGVAPSGHDLLSRFMASAGADDDDRYLRDIVVSFLLAGRDTVSSALTTLFMLLSENPGVAAAMRAEAGDGDGGPAPPLTYEHLKRLHYTHAVLYENMRLFPPVQFDSKFCAGPDVLPDGTYVPGGTRVMYHPYAMGRMPRIWGADHGAFRPGRWLTGAGGSFVPESLYRYPVFQAGLRVCLGKELAVTEMKAVAVAVVRAFDVHVVGDSSSAACKPKFVSGLTASISGGLPVRISRRVRS

SEQ ID NO: 4230 - protein, 345 aa, Zea mays
  VARIANT 304: note = Ancestral polymorphism is E, Derived polymorphism is K
  VARIANT 76: note = Ancestral polymorphism is S, Derived polymorphism is F
MAGGNASCSVRPDHGGNGDVVATLERIGRKLARKQADNQAVVDLIRELQAVPMTYEALEATMIGRTVNGLRKTAPSALARLLADTLYRQWKALAHEWHASSKTPTPMLPEADNGIKEPSYSSPPPPKVDDDKDTKKRSSSPPPPQPLDAQQSAGPEADREMGALPTTASVRKPNILRFRMVTVTEPEKPDQRRVRLIPLATPHPAPPSNDAMQNDSGNKQQACCSATAASHHQGTNADNACVGSTDVAPLTTVVKPSTALSNHIASSGACKRKEEVSTDFDEERLAKARARLHEGYEEASAAREKRKTKLIDVIDVPEKAKRRPAGHRTRKKQPPIRSLNLSQDA

SEQ ID NO: 4231 - protein, 633 aa, Zea mays
  VARIANT 314..633: note = Derived polymorphism lacks residues 314 to 633
  VARIANT 387: note = Ancestral polymorphism is H, Derived polymorphism is D
  VARIANT 388: note = Ancestral polymorphism is L, Derived polymorphism is F
  VARIANT 389: note = Ancestral polymorphism is T, Derived polymorphism is I
  VARIANT 403..633: note = Derived polymorphism lacks residues 403 to 633
MTEGQSETASAPEGVSGLRRNSDDLGWEYGVLVDINNKDKEGKNAKKCQGMKTTKEKLLEAQEKCKKALDEAKRKREEKTVPISFNACDNDEFKQMCEAIGQFRPRIEPPTMFDLRGRLLEEDYARTMSLLQECEAEKMKNGCSNMTDAWSDKKRRSIMNVCTNCADGTSFISSKEMSDVSHTSEVIFELVDKAIEDISPDDVVQVVTDNASNNMGAKKLLQFKKVIDQAKAFTIFDYGHTRTLECMRYFSEGKEIVRPGVTRFASNYLTLDSIQEKKDQLRNMVVHSRWDSLKDVKSKKGKNATATIMNPSFWKDVKLTLAVFAPLFKVLRLVDGDVKPSMGFVYGELLKAKRHVKEALGNVENRFMDVVAVIEKKMAGRLDSPLHLTAYLLNPHYSYVDPSIFDVPKITEGFINCVETFYYHDDEMQEQAANIELQKFQNREGPFSKKLARTFENFDYNLASWWRLYGTETPAVQKMATKTLSLTASSSGCERNWSGFDGVHTKKRNRLTTDRLNKLVYIQFNNRRINKRAKIKSKKITDVLLSSDTTEAQGFLQENGDDCALVSFRDDEDEEEVMEGTGIPWSVLGDAVGAEEQLELRRSARVRELNAEEFESKEEEFDEDEDEYEMDEP

SEQ ID NO: 4232 - protein, 229 aa, Zea mays
  VARIANT 7: note = Ancestral polymorphism is T, Derived polymorphism is I
MAAIKKTKIVLAQPAVGAQPSRPPFFSRAPGSVRGAGDEAAYRASLRYRALHQDYQDLIKEIQAKKKRLHMKRLKKQRLLAEVKFLRKRYKSMSENPSQTIVCRVRNPAMSSASWTAGSAGDTWHQSVRAAGSSSRSQLVQRTHGGSPRASPVIDLNEACEPGYEEMEIEGQHGYMSPLGVNKSKRYPMEGAAASPSQMRMHVFWDVQNPAGRSGKRKISWQDQLALRV

SEQ ID NO: 4233 - protein, 264 aa, Zea mays
  VARIANT 240..264: note = Derived polymorphism lacks residues 240 to 264
  VARIANT 257: note = Ancestral polymorphism is G, Derived polymorphism is S
  VARIANT 258..264: note = Derived polymorphism lacks residues 258 to 264
MAEITSPQAPKKRGAGDEERIREDEPMRKGGAGEEIGPRKETTRNKGGRRGGWGGRGGGRFLRLPALLMLALAFSLLPRAACEGESSSDPWVKWARRGFSIIAIIEGLRKIARRRTSVLFYVELQGVLEEQATLGGKEGGKHEGLHGHELDEDVEGRAGGVLQGVTDGVTDHSGLVAVRPLGAKGPRVLQMLQMLPPNQGQAGKKKQGQGSRSRTRLQMLPPHRAKAAADSRLIVSWAPQAAVLRHPAVGAFVTHSGWALSVRY

SEQ ID NO: 4234 - protein, 203 aa, Zea mays
  VARIANT 54: note = Ancestral polymorphism is H, Derived polymorphism is Y
MRGYYDIDDILMEDEPISVVFQVTANGVGLLDPGAENNCVEKGAKVDLPFWLAHGLLSLEQAVSINPPPCFTQKTRKEIQADASCVDLRARCPYFYELGCKIVPLVSDKSIGLFLRYAFTSRYKEVLSKSHSSSMMTVPKFVPRLTKEETRVFESARESMAGFKKWRVGGVRLQKASILGRKRKTKLPDEWLMVEVMCDVLIC

SEQ ID NO: 4235 - protein, 447 aa, Zea mays
  VARIANT 15: note = Ancestral polymorphism is L, Derived polymorphism is Q
  VARIANT 17: note = Ancestral polymorphism is A, Derived polymorphism is E
  VARIANT 284..447: note = Derived polymorphism lacks residues 284 to 447
MATAALALALLVLALPASLAVTSTYVRPPPRATLSSLLEDDAGADGQTPQQVHISLVGPDKVRVSWITAADAPATVDYGTDPGQYPFSATGNTTAYSYVLYQSGSIHDAVIGPLQPSTNYYYRCSGSSSRELSFRTPPAALPFRFVVVGDLGQTGWTESTLKHVAAADYDALLLPGDLSYADLVQPRWDSYGRLVEPLASARPWMVTQGNHEVERLPLLEPRPFKAYNARWRMPYDYAAADSVAAAPPSDDNLFYSFDVAGGAVHVLMLGSYADYAAGSAQLRWLRADLAALRRRGTPPAFVLALVHVPWYSSNEAHQGEGDAMRDAMEALLYHGARVDAVFAGHVHAYERFHRVYAGKEDPCGPVYVTIGDGGNREGLANKFIDPQPSISAFREASFGHGRLEVVNATHALWTWHRNDDNQPVVADQVWINSLAANPTCNRSIKMM

SEQ ID NO: 4236 - protein, 626 aa, Zea mays
  VARIANT 213..626: note = Derived polymorphism lacks residues 213 to 626
MPSRLLQQPLPPAAPPPPPLLAHSQHRRHALLTATIASAVAAVALLLLLVVLLRRRRLRIPTLPCSPLLDSGRPLRRYSRRTLRRATGGFHPSRLLGSGAASPVYLATFPDASLAAVKTCASAHELHLLASLPESPRLVSLHGYSPGPGSGGGAAERPLLLVFEYMPQGSLQGALFGGGDAAARDGQFLDWQKRLAIIRDVARALAFLHVECQPPVVHGDLKPSNVLLDANFRAKVADFGLARFKTPDAIAASGAAGDDFMSQELGEAGDHLSTTASAAGGAKTDTKDDSGPAGAWGKEWWWKQDGSGELDSRDYVAEWIGSQICPERNPDWVNENEDAANERKNSPSGTHENAVSASPPEDKNNTDCNGNVDVARKEGTKMREWWKEEFFEEMSKKGGSFEKRRSGGKPWIRSISMNTGHGDTNGGESNSVDLSFRRSRKRSRRRGRSVGSDVHSGCGGDFLSRELSSTTSMRGTVCYVAPECGGGPFEHGSDLLEKADVYSFGVLVLVILSGRRPLHILSSPMKLEKANLVSWCRQLARAGNVLELMDERLAGGYDKDQATKCVQLALLCLQRQPELRPDSKDIVKILDGDMELPPAPVEFSPSPRLRPFPRSSRRPAQPDAAE

SEQ ID NO: 4237 - protein, 281 aa, Zea mays
  VARIANT 98: note = Ancestral polymorphism is K, Derived polymorphism is N
  VARIANT 19: note = Ancestral polymorphism is V, Derived polymorphism is M
  VARIANT 15: note = Ancestral polymorphism is R, Derived polymorphism is Q
  VARIANT 9: note = Ancestral polymorphism is R, Derived polymorphism is C
  VARIANT 7: note = Ancestral polymorphism is S, Derived polymorphism is C
MWPAGLSPRLVLRRRGMAVAVRPSPPPTTRRRSATCSTRSGSGPAPAAGTRSTTPATARSSTSASAAPRMADPTCPTPSGAGSRCAAISPVGANGSGKSNFFHAIRFVLSDMFQNLRTEDRGALLHEGAGHSVVSAFVEIVFDNLDNRIPEQMVAEKERELEEGEAQKSPSKIVADSLSQISRSSTFLPNIGVPTTSKTGRSTSLAAQARMQAQFEEKLQAEREEATRKQEELQAQLQAQQAALEENQSLLRQTQEEVKGMHTKFEETNALQRAVLKLQKD

SEQ ID NO: 4238 - protein, 74 aa, Zea mays
  VARIANT 13: note = Ancestral polymorphism is A, Derived polymorphism is S
  VARIANT 14: note = Ancestral polymorphism is R, Derived polymorphism is Q
  VARIANT 18: note = Ancestral polymorphism is Q, Derived polymorphism is H
MERAENERLRRVARQLDQGNTSLCLENLLIMQENDRLRRKAQQLDQENKALLAELKQREQGTSASASTNLKQPK

SEQ ID NO: 4239 - protein, 96 aa, Zea mays
  VARIANT 7: note = Ancestral polymorphism is V, Derived polymorphism is I
  VARIANT 26: note = Ancestral polymorphism is G, Derived polymorphism is R
  VARIANT 32: note = Ancestral polymorphism is I, Derived polymorphism is V
  VARIANT 33: note = Ancestral polymorphism is G, Derived polymorphism is S
  VARIANT 35: note = Ancestral polymorphism is L, Derived polymorphism is V
  VARIANT 50: note = Ancestral polymorphism is G, Derived polymorphism is S
  VARIANT 67: note = Ancestral polymorphism is V, Derived polymorphism is I
  VARIANT 91: note = Ancestral polymorphism is T, Derived polymorphism is I
  VARIANT 92: note = Ancestral polymorphism is P, Derived polymorphism is H
MRVLVEVEGHVHQNSLQTLNGNQSSGSLPDEIGYLMNFNRLQIKDNNISGPYLNSFANLIRIKHLLVDNNNLFGPLPPELVDTRSLLAILTPIAAK

SEQ ID NO: 4240 - protein, 80 aa, Zea mays
  VARIANT 19: note = Ancestral polymorphism is N, Derived polymorphism is K
  VARIANT 21: note = Ancestral polymorphism is E, Derived polymorphism is K
MAFNYYRSTWCGSAAANKNNEEIEACAVLVATLRKKRRWGGSVVGHKMKNRDRIGGDIQLNNDYFIERSLFNPEQFRRSP

SEQ ID NO: 4241 - protein, 288 aa, Zea mays
  VARIANT 66: note = Ancestral polymorphism is T, Derived polymorphism is M
  VARIANT 30: note = Ancestral polymorphism is A, Derived polymorphism is V
MSGADTSCSDVLTTVARIDRRLAHEKGNDAVVELIREQQAVDMTYEVLEATKIGHTVSALRKSAPTALAHLLADTLYRQWKETGKPDWCRLMIISSEASDPTPVSNDTTQNGGDSRPQANCTATTSHHPTNAHNKDVCPTGNAPLTRTVKSPTALSNPVSSSGACKKGKGEAPTDFDEERPAKATVRLHEGNKEASVAKEKRKTKQVNVKEPGKPDQCRLTLIPLVALDPAPPLNDTTQNDGDSRHQAYCTATASHQTINADNKGVCPTGDASLMTTVKTPTALPPIF

SEQ ID NO: 4242 - protein, 175 aa, Zea mays
  VARIANT 25: note = Ancestral polymorphism is A, Derived polymorphism is V
  VARIANT 26: note = Ancestral polymorphism is E, Derived polymorphism is K
  VARIANT 28: note = Ancestral polymorphism is L, Derived polymorphism is V
  VARIANT 29: note = Ancestral polymorphism is D, Derived polymorphism is G
  VARIANT 32: note = Ancestral polymorphism is P, Derived polymorphism is T
  VARIANT 37: note = Ancestral polymorphism is V, Derived polymorphism is I
  VARIANT 38: note = Ancestral polymorphism is V, Derived polymorphism is I
  VARIANT 41: note = Ancestral polymorphism is H, Derived polymorphism is R
  VARIANT 57: note = Ancestral polymorphism is P, Derived polymorphism is T
  VARIANT 72: note = Ancestral polymorphism is P, Derived polymorphism is L
  VARIANT 84..175: note = Derived polymorphism lacks residues 84 to 175
  VARIANT 90: note = Ancestral polymorphism is V, Derived polymorphism is G
  VARIANT 102: note = Ancestral polymorphism is A, Derived polymorphism is T
  VARIANT 113..175: note = Derived polymorphism lacks residues 113 to 175
  VARIANT 123..175: note = Derived polymorphism lacks residues 123 to 175
  VARIANT 137: note = Ancestral polymorphism is G, Derived polymorphism is S
  VARIANT 149..175: note = Derived polymorphism lacks residues 149 to 175
  VARIANT 161..175: note = Derived polymorphism lacks residues 161 to 175
MYLGKVSPTVKEQLTYLAKLEAVCAEDLDIDTDEVLVVISRFCFKNLMDESVTVDRPNPRDTVLKNIANMRPEVFIHDILNGSYNGAFFVSRFHEALKYFAAMFDAMDTIMPQENQNRLLAEQWLAMCVMNIVACEGVDRVSRPHSYKQWQVRSKRAGLRQLPLDSNIVQMFKTR

SEQ ID NO: 4243 - protein, 466 aa, Zea mays
  VARIANT 287..466: note = Derived polymorphism lacks residues 287 to 466
MQTPTMSTSMATTAPAKPPAPPRQCCRYLLLPSTGHRRSVAAWSAKKKNPWLDPFDDGPDEEFDYQGMFSGGKQEEDPRPPEDPENPYGFLRFPQGYNPELDSLASKVRGDVRRACCVVSGGVYENVLFFPVVQMLKDRYPGVLVDVVASARGKQVYEMCKNVRYANVYDPDDDWPEPAEYTHMLGVLKNRYYDLIISTRLAGIGHALFLFMSSARDKVGYVYPNVNSVGAGLFLNEMFKAPTNNLADGGYHMYKDMLEWIGRPAKNVPQQPTQPLRVSISKKLRAYVEDKYSRAGVEKGKYVVIHGIASDSVANMKSRGDDDCLLPLGHWAQIAKEISSGDRGLKPLFVIPHEKHRDEIEEEVGDDTSILFITTPGQLTCLINDSAGVVATNTAAVQLANARDKPCVALFSSAEKARLFLPYVEGKSSCTVISSATGNLIDIDLNAVKNVVKDLEPAPSFALAQK

SEQ ID NO: 4244 - protein, 161 aa, Zea mays
  VARIANT 54: note = Ancestral polymorphism is D, Derived polymorphism is N
  VARIANT 52: note = Ancestral polymorphism is L, Derived polymorphism is Q
  VARIANT 38: note = Ancestral polymorphism is A, Derived polymorphism is T
  VARIANT 36..161: note = Derived polymorphism lacks residues 36 to 161
MAYPVASLSICSAASFPASVIIEAPGRHRSVTMSWRAAVLLLACLVAVTAALVDGALLPELASAPGSCSSNLQPCRRSSSSILFCARTLLPSSVHARPIPPALGPRPRCRCSPTAAVLLPAALALVAAVEFFGVCAPSPSSPKSPLAAHSVLVDAVPLPML

SEQ ID NO: 4245 - protein, 74 aa, Zea mays
  VARIANT 58: note = Ancestral polymorphism is R, Derived polymorphism is H
  VARIANT 53: note = Ancestral polymorphism is A, Derived polymorphism is V
  VARIANT 18: note = Ancestral polymorphism is Q, Derived polymorphism is H
MERAENERLRRVAQQLDQGNTSLCLENLLIMQENDRLRRKAQQLDQENKALLAELKQREQGTSASASTNLKQPK

SEQ ID NO: 4246 - protein, 369 aa, Zea mays
  VARIANT 276..369: note = Derived polymorphism lacks residues 276 to 369
  VARIANT 181..369: note = Derived polymorphism lacks residues 181 to 369
  VARIANT 94..369: note = Derived polymorphism lacks residues 94 to 369
  VARIANT 22: note = Ancestral polymorphism is P, Derived polymorphism is T
  VARIANT 15: note = Ancestral polymorphism is A, Derived polymorphism is E
MATAALALLVLALPASLAVTSTYVRPPPRATLSLLQDAGSDGQTPQQVHISLVGPDKVRVSWITAADAPATVDYGTASGQYPFSATGNTTSYSYVLYHSGSIHDAVIGPLQPSTTYYYRCSGSASRDLSFRTPPAVLPFRFVVVGDLGQTGWTESTLKHVAAADYDALLLPGDLSYADFVQPRWDSYGRLVEPLASARPWMVTQGNHEVERLPLLEPRPFKAYNARWRMPYDYAADGTPPSDDNLFYSFDVAGGAVHVLMLGSYADYAAGSAQLRWLRADLAALRRRGTPPAFVLALVHAPWYSSNKVHQGEGDAMRDAMEALLYHGASTRCSRATSTRTSGSTASTPARRIPAAPSTSPSATAATGRG

SEQ ID NO: 4247 - protein, 453 aa, Zea mays
  VARIANT 31: note = Ancestral polymorphism is R, Derived polymorphism is H
  VARIANT 280..453: note = Derived polymorphism lacks residues 280 to 453
  VARIANT 424..453: note = Derived polymorphism lacks residues 424 to 453
MEMDPPPPPPLHADRRLRFRDYLLALEEERRKIQVFQRELPLCLDLVTQTIEGMRSHMDSVVVGSEETVSDHGGPVLEEFMPLKPTTLSSSSSQPQSQDDHDSAHYLEHRRAAAATANDVVDADKDDEALGDPETAAASSSRPLPHPETKKAMPDWLQSVQLWSNQQQPSVSPPQHQDELLLPCRPVALNACRKSGGAFQPFEKEKKKEDKEEKQRAELELPLPAAASSAVVGDSCDRAGATDTDTDTAENNKASSTKGGKDKEAQLSSQAPSRKARRCWAPELHRRFLQALQQLGGSHVATPKQIRELMNVDGLTNDEVKSHLQKYRLHTRRPNSAAAAVQSGGTSVVAPPAAPQFVVVGGIWVPPPEYAAAAAAQPQQVHVHLAGDASGTTTTAADKVYAPVATTLTPAPRPRPRPGPERQSSSCSGARRNGDACSGSPAVSSSSSQTASA

SEQ ID NO: 4248 - protein, 342 aa, Zea mays
  VARIANT 76: note = Ancestral polymorphism is S, Derived polymorphism is F
  VARIANT 97..342: note = Derived polymorphism lacks residues 97 to 342
MAGGNASCSVRPDHGGNGDVVATVERISRRLARKQADNQAVVDLIRELEALPMTYEALEATMIGRTVNGLRKTAPSALARLLADTLYRQWKALAHEWHASSKTQPQTAPPEADNGIKKRPSLSSPPPKVDDDKDTRKRSSSPPPPQPVDAQQSAAPEADREMGAPPSTTRAASVIRKPNILRFRMVTVTEPEKPHQRRVRLIPLATPDPAPSSNDAMQNDADNKQQATCCPATAASHQSTSADNEHVGTTDATPLTTVVKPSTALPNSVSSSEACKRKEEAPTDFEEERLAKARARLLEGYEEASAAREKRKTKLIDVIDVPEKARQRPATHRTWKKQPPVP

SEQ ID NO: 4249 - protein, 196 aa, Zea mays
  VARIANT 15: note = Ancestral polymorphism is D, Derived polymorphism is G
  VARIANT 29..196: note = Derived polymorphism lacks residues 29 to 196
  VARIANT 50..196: note = Derived polymorphism lacks residues 50 to 196
  VARIANT 163: note = Ancestral polymorphism is T, Derived polymorphism is I
MTTNNLPQSNLQPNDKQNNQESKNGTCYWCTTDRTELNSRIIIWELGSSWLQQLQKKDSPGSENVKRNATKAYKESAVKGLGKHFEQLKKIKKKECNIDGSSSEKEECNSNCSSMNGMQVSDKISVDETNKGADVSKLMSEDAFFRLKSLGAGLHEKSLEELTKMAHNFYDETALTKLVSLVLAILLIFFKILSHL

SEQ ID NO: 4250 - protein, 152 aa, Zea mays
  VARIANT 72: note = Ancestral polymorphism is I, Derived polymorphism is T
  VARIANT 98: note = Ancestral polymorphism is T, Derived polymorphism is A
  VARIANT 99: note = Ancestral polymorphism is R, Derived polymorphism is Q
  VARIANT 105..152: note = Derived polymorphism lacks residues 105 to 152
  VARIANT 125: note = Ancestral polymorphism is L, Derived polymorphism is M
  VARIANT 146: note = Ancestral polymorphism is C, Derived polymorphism is S
MPCKESFAWAMIPLFEGNHAGGLSDAAYPSSPLATSLPGSTSQDSIVDPILKLTLDGKVNHYSSGSSVIVETSNLNKVKESYIVDSLQFEAFDFRMLTRSEPFSQLFHCLYVYPLTVSLSRKRNLFVRVELRKDDSDIRKPPLEVSLLNFLS

SEQ ID NO: 4251 - protein, 491 aa, Zea mays
  VARIANT 2: note = Ancestral polymorphism is A, Derived polymorphism is V
  VARIANT 25..491: note = Derived polymorphism lacks residues 25 to 491
  VARIANT 118..491: note = Derived polymorphism lacks residues 118 to 491
  VARIANT 151: note = Ancestral polymorphism is L, Derived polymorphism is V
  VARIANT 251: note = Ancestral polymorphism is R, Derived polymorphism is C
  VARIANT 393..491: note = Derived polymorphism lacks residues 393 to 491
MALLASSLCVVALALVLLLLRRWPWCSCHVCRAYLTGSWARDFTNLGDWYAHLLRESATGTVHVHVLGCTVTANPANVEYMLKTNFDNFPKGKTFAALLGDLLGRGIFNVDGHAWRHQRKMASLELGSVTVRSYAFGIIAQEVEARLLPLVASAADAGAVVDLQDVFRRFAFDTICKISFGLDPGCLEPEMPMSELADALDTATRLSATRGAAAAPLLWRAKRLLNVGSERELRAAIKLVDELAAAVIRERRKLGVAASGHDLLSRFMASAGADDDDRYLRDIVVSFLLAGRDTVSSALTTLFMLLSENPGVAAAMRAEAGDGGPAPPLTYEHLKRMHYTHAVLYENMRLFPPVQFDSKFCVGPDVLPDGTYVPGGTRVTYHPYAMGRMPRIWGADHGAFRPGRWLTGAGGSFVPESLYKYPVFQAGLRVCLGKELAVTEMKAVAVAVVRAFDVHVVGDSGSAACKPKFVSGLTASISGGLPVRISRRVRS

SEQ ID NO: 4252 - protein, 302 aa, Zea mays
  VARIANT 17: note = Ancestral polymorphism is P, Derived polymorphism is L
  VARIANT 18: note = Ancestral polymorphism is P, Derived polymorphism is L
  VARIANT 19: note = Ancestral polymorphism is G, Derived polymorphism is V
  VARIANT 31: note = Ancestral polymorphism is P, Derived polymorphism is S
  VARIANT 127: note = Ancestral polymorphism is D, Derived polymorphism is Y
  VARIANT 221: note = Ancestral polymorphism is T, Derived polymorphism is R
MAMELSAASAAARQQAPPGFFTFVKHGAVLPAQNSALFVPLLVLTAALAAALLLGNALSVQPLAAAVLLDADAISRIDPASAAYRELVRAFQSDLRRLLLAGDGCLLGAVVAGARRGQGQLLGPHTDRRVRVHPGAGLRAAIVALAVLAVVLLDYSLLLLFLDALLALLASLFLVYLTVVCSIAVAVFAAEPGRRGAGAVGRAWRLMRGQGAQAAVYVVATCALGAAVSPVYTLMLSCWPRSAISGVAAGVVYVLLLGAVEVFSMVAVTAYYLECRECVEEVEEIMAGHRNGVSLRSSDIKE

SEQ ID NO: 4253 - protein, 156 aa, Zea mays
  VARIANT 19..156: note = Derived polymorphism lacks residues 19 to 156
  VARIANT 45: note = Ancestral polymorphism is P, Derived polymorphism is L
  VARIANT 68..156: note = Ancestral polymorphism lacks residues 68 to 156
  VARIANT 70: note = Ancestral polymorphism is Q, Derived polymorphism is L
MLAFEDNGSSKIGVRLDKQIPDGNDLGGLCEEDHGFFCSAESLRPDFSASEEVERLAMTELIEKKEVRKLRGRIRTQRKEVKRGESIKVHQSQVPAHLQNLQAATMRIGVQGSPDHSRDQREQGRKRRASQGPSTEAVKARRKARYASLNSSGSKE

SEQ ID NO: 4254 - protein, 321 aa, Zea mays
  VARIANT 245..321: note = Derived polymorphism lacks residues 245 to 321
MVEIEEVPREKVNFSEELLRSTSFARQLADQMTLAKAYVILAKEHGNLQLAWELSSQIVFSIFLSFSLAAMYGVDVAALGMLSTIATGLAIDAYGPISDNAGGIAEMAGMSHRIHERTNALDAVGNTTAAIGKGFAIGSAALVSLALFGAFVSRAAISTVDVLTPKVFIGLIVGAMLPYWFSAMTMKNLNGCIHQGDDPPSALVMLTPLIIGILFGVETLSGVLAGALVSGVQIAISASNTGGAWDNAKKYIEAGASEHARTLGPKGYDPHKAAVIGYTIGDPLKDMSGPSLNILIKLMAVESLVFAPFFAAHGGIIFKWL

SEQ ID NO: 4255 - protein, 456 aa, Zea mays
  VARIANT 138..456: note = Derived polymorphism lacks residues 138 to 456
  VARIANT 386: note = Ancestral polymorphism is C, Derived polymorphism is Y
  VARIANT 389..456: note = Derived polymorphism lacks residues 389 to 456
  VARIANT 396: note = Ancestral polymorphism is P, Derived polymorphism is L
MGVAAGGGVRLRASSAKKQRQRTLNNIKITLLCGFITVLVLRGTAGFNLLVSSGDLDGAAADAKVVEDVERILAEIRSDSEADDVVVVVEGGSSSSSSPRNATAASFGNFSASATLVKVREYSLGPPVRGWDAQRRDWMAQHPEFPRLHPRGRPRVLLVTGSPPGPCDNPAGDHYLLKATKNKIDYCRLHGIDVVHNMAHLDPELTGYWSKLPLVRRLMLAHPEVEWIWWVDSDAIFTDMAFELPLSRYDGSNLVIHGYPDLLFEKRSWISLNAGIFLLRNCQWSLDLLDAWVPMGPRGPSRVEAGKLLTASLTGRPPFDADDQSALIHLLLVQKERWMDKVHVETEFYLHGFWTGLVDRYEQMMEDNHPGLGDDRWPFITHFVGCKTCGRYEDYPLDRCIRGMERAFNFADNQVLRLYGFRHRSLTTAKVRRVTDPATNPLEAKEAALNMDAKFT

SEQ ID NO: 4256 - protein, 1031 aa, Zea mays
  VARIANT 816..1031: note = Derived polymorphism lacks residues 816 to 1031
  VARIANT 756: note = Ancestral polymorphism is P, Derived polymorphism is Q
  VARIANT 693..1031: note = Derived polymorphism lacks residues 693 to 1031
  VARIANT 691..1031: note = Derived polymorphism lacks residues 691 to 1031
  VARIANT 684: note = Ancestral polymorphism is R, Derived polymorphism is W
  VARIANT 341..1031: note = Derived polymorphism lacks residues 341 to 1031
  VARIANT 94..1031: note = Derived polymorphism lacks residues 94 to 1031
MAGADTSGSDVLATVARIDRRLAREKDNDVVVELIRELQAVDMTYEVLEATKIGHTVNALRKSAPTALARLLADTLYRQWKVLANEWITISTTQQQQPSPPPNTDTDSNKRSSSSPPPKAVDDKATNKPSSSPRPASPVDAEQSARPEPDHEKSAPTTISAAPVRKNILRFRMVTVKEPGKLDRCRLMIIPSEAPDPAPASNYATQNGGDNRQQAYCTATTSHQATNADNKGVYPSDNVPLTRTVKSPTALPNPVASTGTCNKRKGEPSTNFDEEKLAKARVRHHEGYKAASVAKEKRKTKVVNVKELEKPDQHRLTIIPLEASDLAPASNDATQNGGDSRQQAYCAATASHQTTNADNKDVYPTDDSPLTMVVKPPTALVNHVASSGACKKHKGKAPADFDEERPAKTRVRLHEGYKEASVANEKRKTKHVNIQESGKPDQRRLTIISSEAPDPAPASNDATQNGGDSTQQAYCAATASHQTTNAGNKGVCPTDDSPLTMAVKPPTASANPVASPGACKKHKSEAPTDFDEERLAKAMQQQADEADHQQRQDHPLLCAFVTLLVLRGTVGVNRRLVYIAGSPDNRADPATATGSARPVEDVERILREIRADSDDDPDAGPNNDEAPTSTSSSAATGDHYDRGAAWTTTTYRLQPRVTRWNAKRRRWLHQNPGFPSRDARGGPRVLLVTASPQGPCGSPDGDRFLLRATKNRLDYCRLHGVEMVHTTARLEDPELRSPGDGWAKLALLRRLMLSHPEVEWLWWLDAGALVTDMGFELPLARYEGAHLVVRGDSYQLFQRRAWDAASTASFLLRNCQWALDLLDAWAVMAPRGRARHDAGALLTATLAGRPAGEADDQSALVHLLITEKERWMDRVYLENQYYLHGVWTALVGKYEKAMEKHHPGYGDDRWPFVTNFAGCNPCDDGKNRSDEYPLDRCASGMERAFNFADNQVLRLYGFRHESLASTEVRRVANRSTDPLEAKEEALAFLKKPNEPDLWSNDVRKNRKRKGKGDLDSVLARILRRLGWRSQC

SEQ ID NO: 4257 - protein, 142 aa, Zea mays
  VARIANT 31: note = Ancestral polymorphism is D, Derived polymorphism is E
MAAKAAAAVTTIAHVVVDEDELFELDIALLDGRDHDHRRGGGGRRSSPAAGADADADAGHALLANCLLPLRSVSNAVPVVATSGRLSSSPFFGHYSSSSRRLFTPRSSRRFLFLGRSAGSSSARLCFSSRGFEAMGSYFQRY

SEQ ID NO: 4258 - protein, 173 aa, Zea mays
  VARIANT 140: note = Ancestral polymorphism is D, Derived polymorphism is E
  VARIANT 129: note = Ancestral polymorphism is G, Derived polymorphism is S
  VARIANT 28: note = Ancestral polymorphism is I, Derived polymorphism is M
  VARIANT 23: note = Ancestral polymorphism is P, Derived polymorphism is L
MSRSVEPLIVGRVIGEVLDSFNPCVKMIVTYNSNKLVFNGHEIYPSAVVSKPRVAVQGGDLRSFFTLVMTDPDVPGPSDPYLREHLHWIVTDIPGTTDASFGRQIISYESPRPSIGIHRFIFVLFKQQGRQNVTVPSFRDHFNTRQFAEENDLGLPVAAVYFNAQRETAARRR

SEQ ID NO: 4259 - protein, 87 aa, Zea mays
  VARIANT 1: note = Ancestral polymorphism is M, Derived polymorphism is L
  VARIANT 6: note = Ancestral polymorphism is F, Derived polymorphism is L
  VARIANT 7: note = Ancestral polymorphism is L, Derived polymorphism is F
  VARIANT 9: note = Ancestral polymorphism is E, Derived polymorphism is K
  VARIANT 10: note = Ancestral polymorphism is A, Derived polymorphism is V
  VARIANT 39..87: note = Ancestral polymorphism lacks residues 39 to 87
  VARIANT 52: note = Ancestral polymorphism is A, Derived polymorphism is T
MRFLGFLVEAFKKSLWFSISGGAKLARVVEPGSCSNQWRAPIIAPLVDGQMAMFLGCCHKLLPDTSAKRSRPTEPFVPEHAGEMSGK

SEQ ID NO: 4260 - protein, 424 aa, Zea mays
  VARIANT 398: note = Ancestral polymorphism is G, Derived polymorphism is A
  VARIANT 244: note = Ancestral polymorphism is A, Derived polymorphism is V
  VARIANT 214: note = Ancestral polymorphism is W, Derived polymorphism is R
MELYPGYLQDHFNIHKLSRLQPLPTSGAPARYVTSGPVGAMGIYERQRHLVPTGVWGEPFRLDADAVAMPLPLAAFPSVTVATPAPLDVVEPEAEEIKLGKRLLQAQQDDVPRMQEAPPSSDSFSHDDDDARPRDKVQRRLAQNREAARKSRLRKKAYIRNLETSRVKLAQLEQELIMARRQQHGAYGVGGGVAPPAAPVDPRVAAFELEYAHWVEEQSRQATELRAALQSHAPDVQLRVLVDAALAHYGALFQAKARAARSDAFFVLSGVWRSPAERFFLWIAGFRPSDLLKVLEPQLSPLMDHQASEVRKLQNTARQLEDALSQGMSKLQQTLVDTLMTVDVSPDGAGGGYAGQQMACAVGKLADLVDFVDKADHLRQQTLRNMHKILTPRQAARGLLALADYGQRLRALSSLWAARPREPA

SEQ ID NO: 4261 - protein, 119 aa, Zea mays
  VARIANT 6: note = Ancestral polymorphism is R, Derived polymorphism is S
  VARIANT 20: note = Ancestral polymorphism is G, Derived polymorphism is R
  VARIANT 39: note = Ancestral polymorphism is D, Derived polymorphism is E
  VARIANT 48: note = Ancestral polymorphism is K, Derived polymorphism is N
  VARIANT 82..119: note = Derived polymorphism lacks residues 82 to 119
MMREYRAQLDAERPQKLANGRNHSRSNSKSSSSKKERKDKDAKKRSKNRRKHKSSSESSSSSSSESSSSDDEDRGSRKSRSQSRSKRTRKEKKSLSRSKRRGGESEEEGPVRLSKFFGK

SEQ ID NO: 4262 - protein, 285 aa, Zea mays
  VARIANT 186: note = Ancestral polymorphism is A, Derived polymorphism is S
MALAASHHRLLPVAPTPAATRTPSRGHLRFRAARPLPRSRRICCQSINSTNVLGASSKTSDEAIPVPVVQIDQDSDRDATIVQLSFGDRLGALLDTMKALKDLGLDVSKGSVATDSAVTQTKFHIMRFGRKVEDPDMLERIRLTIINNLLQYHPESSEKLAMGEFFGIKPPVKKASIISDAVLHCAIWVDIDIATHIVVEDDGPKRSMLYIETADRPGLLLEIIKIIADTNIDVESAEIDTEGLVAKDKFHVSYRGAKLNSSSSQVLINCLRYYLRRPETDEDSY

SEQ ID NO: 4263 - protein, 310 aa, Zea mays
  VARIANT 233: note = Ancestral polymorphism is A, Derived polymorphism is S
  VARIANT 161: note = Ancestral polymorphism is P, Derived polymorphism is A
  VARIANT 148: note = Ancestral polymorphism is P, Derived polymorphism is A
MATLGQWRLKHFLTIRRLAQNREAARKSRLRKKAYIQQLESSKLKLAQMERDMQRAHSQPQGVFLGGAPGANASSGAAMIDAEYARWLDDQGQRKAELQGALQAHLPDGDLQAIVDDTLTHHDELFRLKASAAKSDVFHVITGAWTTPAERCFLWMGGFRPSDLVKTLLPQLDPLTEQQQLVGICNLKQSSQQAEEALSQGLDQLHQSLADTMANGSLIDDTSMSFMGQMALALGKLSSLEVFVIQADNLRQQTLHQMRRILTVRQAARCFLAIAGYQNRLRALSSLWVSRPREILVADEGDCGEMSAAA

SEQ ID NO: 4264 - protein, 200 aa, Zea mays
  VARIANT 123: note = Ancestral polymorphism is R, Derived polymorphism is M
  VARIANT 113: note = Ancestral polymorphism is R, Derived polymorphism is W
  VARIANT 108: note = Ancestral polymorphism is V, Derived polymorphism is L
MHAPRRFKKAFMAQLLLSLRAAGQASKSMGLRERRDAVRLSSDVAMALASARARAAPRSTVWARALIARHAAEQRNEALMRRIMGGAGYEMAAAAVRARKEARCRRIVRRSRRVCSGVGRKRRSLLAAEGGGGIRCSAMAAARRMVKARLQVLRSLVPGGEAMGGLSLLTETLDYVVCLKAQVELMQRLCKGSCSQSQLG

SEQ ID NO: 4265 - protein, 319 aa, Zea mays
  VARIANT 5..319: note = Derived polymorphism lacks residues 5 to 319
MPQWQHCWTPSRSTALCSSALGALVRSRRSSSRRLSLAYQRDSWSGQGVEYSSAALKHMAFEVEEDDAHLRGRSNATVTDEQGDCHRKGKRVTRRASSDVAGMSTMPENTVEVVTQNGRIRRQNNDIKLYVEQEVRESNKGLGTLSKARIPLDEEGQIHMALKESLREYDEERIIGCSSGSRSASCSANQQTRLDRFYRSPSVSQGPFDIDLAHSRAQAQPQVDIMLRGGSREKLGKALAKWFHTNDISGRKANCPYFRLAIKLAQECGQGVHIPIGKEFDGKYLDMNYEDMDAHKAKFKDNRKEYGVVVMCDSWTGKT

SEQ ID NO: 4266 - protein, 199 aa, Zea mays
  VARIANT 36..199: note = Derived polymorphism lacks residues 36 to 199
  VARIANT 40: note = Ancestral polymorphism is S, Derived polymorphism is L
  VARIANT 51..199: note = Derived polymorphism lacks residues 51 to 199
  VARIANT 87: note = Ancestral polymorphism is R, Derived polymorphism is S
  VARIANT 91: note = Ancestral polymorphism is K, Derived polymorphism is N
  VARIANT 116: note = Ancestral polymorphism is A, Derived polymorphism is S
MQGLQEMQVFKDTELDPYSVMIDDAMYDEGNPITDWLCNLRSESPPILDEYDDNELDSPIPSRVLMDELGMDGEVTALKRKLDFNTRDGKKKRKAGLVDIEEEMRTMLSQILQKVAQYMLNYVIAVQMVAQCNLYGLKVGDEFGDEWEFGGPSGGGACDVGASDDGSRDGAMHEQAAPNPPFRPRSTRLKKVLVKELYK

SEQ ID NO: 4267 - protein, 306 aa, Zea mays
  VARIANT 191: note = Ancestral polymorphism is Q, Derived polymorphism is K
  VARIANT 90..306: note = Derived polymorphism lacks residues 90 to 306
MASPSRLLPPTPPSAAQPRGPRDRLALPRLRCLAAAAASASPTDGAVLLERGGSAAVAVREFVTLDELRAAVRLRVRTFHEYADDSVGTEDHRKALADREFEALQDRISGKMINFRRVSCINGTVPLSPSLMSAEELCSMCKFVEDGKERLVVGSLDLNQCLWLPDELTGKRPGVRPLFPLSTLLQNTYDQNIFLIVVIGIFELALVNEDIQTRAYLSNVCVAKELQKKGLGYTLVDKSKKLALEWGITDLYVHVAINNVAGQKLYKKCGFVYEGEEPAWKGRFLGRPRRLLLWLDMSKVLVRSCM

SEQ ID NO: 4268 - protein, 271 aa, Zea mays
  VARIANT 129: note = Ancestral polymorphism is V, Derived polymorphism is A
  VARIANT 155: note = Ancestral polymorphism is S, Derived polymorphism is T
  VARIANT 156: note = Ancestral polymorphism is V, Derived polymorphism is L
  VARIANT 166: note = Ancestral polymorphism is R, Derived polymorphism is H
MANASLQSFLLPHDHSFAGAGGSRDGSASAVHKLSTNTSGSISFRLYTKTSPSVTAASATNSSAPTPVAPASAPAAGDEEEEEGPSLDLLRRQLAAGDYRQADETTRALIIDLAGEPARRRGYVFFSEVQFIPAEDLAAIDGLWKEHSGGRFGYSVQRRLWEKSRRDFTRFFIRVGWMRKLDTEVEQYNYRAFPDEFLWELTDDTPEGHLPLTNALRGTQLLANILTHPAFQEEDQGDGAAAAEESANTKDDNKGRERPRSMRDFKPDYSF

SEQ ID NO: 4269 - protein, 704 aa, Zea mays
  VARIANT 550..704: note = Derived polymorphism lacks residues 550 to 704
  VARIANT 492..704: note = Derived polymorphism lacks residues 492 to 704
  VARIANT 477..704: note = Derived polymorphism lacks residues 477 to 704
MAKQSLSSGPLGGYPDDPELERFLDLERLHRMNECLVASTSKTGPVVHGVENFHGGCFLALANNSDSDSDVEQTNVLPKTRQLHGSMLTGLGQQLAPPVSSVVPQYFPVGSVLSLVLSTASGHRSVGSFSLPMLESAQKRNDRRPWQGRIPAPRVSPCLTMGDAISRARIIQKKANSWPRSGITKIHSSLDQRQPSTVIRKEFQNSSNGRILRRNAGCVDGPASSVSRTMKLDPRMPYRPTAGLVSLFARTGTNIGASRAPIAREHSVNKSSVAPLSFAASYAQVAARSMEGGIAKERLGGEVHRKATVVALLARGSSWGVMGTRGRSVLSMAIVAASIRLGEADPIPIWLGFLLSQFSWEDKGKGVSDEHLVVKPPGTEKPAAKEGKAPYCYRCLTKGHVMKVCTTKLYCDICRSEAHNTERCLQFRGDKPSALACGYAVDGLGFFYIPFVHQQIQKVEAQAASVRVSDGTLSEAQIISELERLVSSKWNWEVVKVGPNLFRTFFPSHDDLAHMLEWGAVHTRYNAVMKIEEASGKSLAKSELKKVWVQFIGIPPDMLQFKLIWAVGSVLGVTKAVDMSFTNKYNVGRLQVCVLDPSIIPQFVDVVIGDFLYELQFRVEEKMLEDNPVPMDMDDYDSGENNVNSSNNSAPDNHKGGAAPNVIGSASNIEGEPKNKDVNTKKVGLLGVQETEVLMDSEMEGSIL

SEQ ID NO: 4270 - protein, 371 aa, Zea mays
  VARIANT 267: note = Ancestral polymorphism is P, Derived polymorphism is Q
MVVPSTTPVVRQQTTPPQSSHAGGIPTVDLSAHGGRGALSRQVVRACAEHGFFRAVNHGVPPGPAARLDAAARTFFALAPRDKQRAGPPSPLGYGCRSIGFNGDAGELEYLLLHANNPAAVAHRARAIDAEEPSRFSNVVNEYVGAMRQLACEILDLLGEGLGLEDPRSFSKLITDTDSDSLLRINHYPTACNAHNLDHDSQCKMKSSVRTKTTSNGVKPSAGGRVGFGEHSDPQILSLLRANDVDGLQVLLNADGKEVWVQVPADQSAFFVNVGDLLQALTNGKLVSVRHRVIASSSRARLSTIYFAAPPLHARILALAETITANAPSQYRPFTWAEYKKTMYSLRLSHSRLNLFHIDHDGHSNVGEGEE

SEQ ID NO: 4271 - protein, 90 aa, Zea mays
  VARIANT 52: note = Ancestral polymorphism is G, Derived polymorphism is R
  VARIANT 67..90: note = Derived polymorphism lacks residues 67 to 90
MREAEASLSRERALGRHGRGSPVRGTKKRRLREETGGEATSVKATRGTRARGSSAAPELEQERTGEEQQQGERSPSASHGWTSRDERREG

SEQ ID NO: 4272 - protein, 74 aa, Zea mays
  VARIANT 22: note = Ancestral polymorphism is A, Derived polymorphism is V
  VARIANT 48: note = Ancestral polymorphism is A, Derived polymorphism is V
MDDLMAQGMRYANQALLTGCSVGGVSTILHCDEFHRLFPSNTRVKCLADAGMFLTRMLTQLYIGVNWSFNHLQC

SEQ ID NO: 4273 - protein, 298 aa, Zea mays
  VARIANT 91: note = Ancestral polymorphism is A, Derived polymorphism is E
  VARIANT 95: note = Ancestral polymorphism is R, Derived polymorphism is C
  VARIANT 131: note = Ancestral polymorphism is P, Derived polymorphism is T
  VARIANT 142: note = Ancestral polymorphism is T, Derived polymorphism is I
MLVNDSLLAWVCHNSTLQLEMAEECLLQAKDLSGLLLLYSSLGDAEGIEKLASLAKEHGKNNVAFLCLFMLGKVEDCIQLLVDSNRIPEAALLARSYLPSKVPEIVAIWRDDLSKINPKAAESLADPSEYPNLFEDWQVALTVEKSVASQMYTVMFHLSSISCTYVQDGAIGSSTKWDAKVQSISDNPYAIMLLSNVLWKIPDRAVSHDTSPLTIYATSSISYCERCTYWLTAMTDPILFERGGLPAPGWILGFGGSTVSLFAQVEIMMSCLEIHSALLSIDYGAVISSNRSTLCRVQ

SEQ ID NO: 4274 - protein, 169 aa, Zea mays
  VARIANT 2: note = Ancestral polymorphism is R, Derived polymorphism is Q
  VARIANT 6: note = Ancestral polymorphism is T, Derived polymorphism is I
  VARIANT 7: note = Ancestral polymorphism is V, Derived polymorphism is I
  VARIANT 11: note = Ancestral polymorphism is D, Derived polymorphism is N
  VARIANT 16: note = Ancestral polymorphism is R, Derived polymorphism is H
  VARIANT 30: note = Ancestral polymorphism is D, Derived polymorphism is N
  VARIANT 32: note = Ancestral polymorphism is V, Derived polymorphism is M
  VARIANT 40: note = Ancestral polymorphism is E, Derived polymorphism is K
  VARIANT 53: note = Ancestral polymorphism is E, Derived polymorphism is K
  VARIANT 60: note = Ancestral polymorphism is G, Derived polymorphism is D
  VARIANT 80..169: note = Derived polymorphism lacks residues 80 to 169
  VARIANT 85: note = Ancestral polymorphism is S, Derived polymorphism is F
  VARIANT 95: note = Ancestral polymorphism is L, Derived polymorphism is P
  VARIANT 98: note = Ancestral polymorphism is V, Derived polymorphism is L
  VARIANT 116: note = Ancestral polymorphism is T, Derived polymorphism is I
  VARIANT 121: note = Ancestral polymorphism is T, Derived polymorphism is I
  VARIANT 154: note = Ancestral polymorphism is R, Derived polymorphism is M
  VARIANT 157: note = Ancestral polymorphism is G, Derived polymorphism is D
MRSCLTVLRPDGPISRRFMAVLPTVLVVGDSVFVHGGLLEANVEYGLERINAEVSEWIRGEGGDNARAPEYVRGWDIVVWLRRFSDGFDCDCKRLEGVLGMIPGAKRMVMGHTIQTVGINTVGRGTSVKGFGLATKTSNTKLILNGGQRVTFARPDGYFALYPTKDALP

SEQ ID NO: 4275 - protein, 488 aa, Zea mays
  VARIANT 223..488: note = Derived polymorphism lacks residues 223 to 488
  VARIANT 255: note = Ancestral polymorphism is P, Derived polymorphism is S
MASASMLARSLLRTPDPTQTSHPNRRSAAVVSFPRRHRRLSVRASVSTASPSPPPQPAAAAAGVPKHCFRRGADGYLYCEGVRVEDAMTAAERSPFYLYSKPQILRNFAAYRDALQGLRSIIGYAVKANNNLPVLRVLRELGCGAVLVSGNELRLALQAGFDPARCIFNGNGKTLEHLKLAAESGVFVNVDSEFDLENIVRAARATGKKVPVLLRINPDVDPQVHPYVATGNKTSKFGIRNEKLQWFLDSIKSYPNEIKLVGVHCHLGSTITKVDIFRDAAVLMLNYVDEIRAQGFKLEYLNIGGGLGIDYHHTDAVLPTPMDLINTVRELVLSQDLTLIIEPGRSLIANTCCFVNRVTGVKSNGTKNFIVVDGSMAELIRPSLYGAYQHIELVSPPTPGAEAATFDIVGPVCESADFLGKDRELPTPDEGAGLVVHDAGAYCMSMASTYNLKLRPPEYWVEADGSIVKIRHGEKLDDYMKFFDGLPA

SEQ ID NO: 4276 - protein, 364 aa, Zea mays
  VARIANT 14: note = Ancestral polymorphism is P, Derived polymorphism is L
  VARIANT 279: note = Ancestral polymorphism is S, Derived polymorphism is C
MHLALLISRIRLLPTAMPSTRSASASRLLVRADNSPVAREIKRESSVSLDTPKPEATVSVKRRRVKRELEVNGQHHKKQVPDIEDFIYEKAKTLTSSSKATTSLVKVEKKVGVSSVIKVGAPDNWEAVLGGIKSMRLSGEAPVDTKGCEKAGSLLPPKERRFAVLISTMMSSQTKDEVTHAAVERLSENGLLDPDAIVRTDETTLANLIKPVGFYQRKAQFIKEASKICLERFGGDIPDSLNELLALRGVGPKMAHLVMSIAWKNTQGICVDTHVHRISNRLGWVFREGTRQKTTTPEQTRISLEKWLPKDEWEPINPLLVGFGQTICTPLRPKCDKCGINNICPSAFKESSSPIPKQKKTRSP

SEQ ID NO: 4277 - protein, 196 aa, Zea mays
  VARIANT 30: note = Ancestral polymorphism is R, Derived polymorphism is P
  VARIANT 51: note = Ancestral polymorphism is G, Derived polymorphism is R
  VARIANT 64: note = Ancestral polymorphism is S, Derived polymorphism is L
  VARIANT 70: note = Ancestral polymorphism is Y, Derived polymorphism is D
MSSLEEPLGLGDLPKLSINRLGRFVTLGARRPPVDDDDHSTGNDLELERHGLKLLPRSPSSFMSCLDSRYLLLGPDAELNYSKISKFSRKDAVAYPSDVKGVDEAKAELEEIVHYLRDPKDALEEILYQFEEKLQVEREEAARKQEELQAQLQAQQAAVQENQSLLRQAQEEVKGMHTKFEETNALLRAVLKLQED

SEQ ID NO: 4278 - protein, 498 aa, Zea mays
  VARIANT 322: note = Ancestral polymorphism is T, Derived polymorphism is M
  VARIANT 50: note = Ancestral polymorphism is A, Derived polymorphism is T
  VARIANT 5..498: note = Derived polymorphism lacks residues 5 to 498
MDQECTPPMAKRARRSPPQAGAEDRLGALDDATLHAILVRLPLRDAAATAVLSRRWPRVFATLPRLVLRPATFNRRGFPDEDRCEDPPRWLRALRCVLDRRAAPVVAFEVDCGFMCVYGEWFGWVFREVCGSGGLLELSIANTDYKECYALPDAVYTCKTLTSLDLYNCRLQVPIRAAAVTLRALQTLRLRNVVARDSDIRLIVCRCTAIERLEIHGIHMARNIVIRAPCLKRLDIYSYRPLCISLKKAKAQPLNMVRLSLSYGYPEHYWSLHDTKDTKREYSVHEIEEMLDYKKMAEREHRQTDEIKNMETFLTALSCTKTLQLHLSTEYSEVLDMVKASTLTSLPKKKYLHGLKSLSLTLDHNHAVLATLVSCLLNSSPNLKDLRIIELRHPGSPVPLAAEFWEKKITADGFLYHLASVTFYTDSLLEGHPCEGICKFLVMNARVLKRMSIVYHHSQVRPEHAAKLEAARRELRVWPRASADVLLELTPVHRFPWF

SEQ ID NO: 4279 - protein, 279 aa, Zea mays
  VARIANT 2..279: note = Derived polymorphism lacks residues 2 to 279
  VARIANT 11: note = Ancestral polymorphism is G, Derived polymorphism is E
MWSVATLQFYGHLVLLVIVGSVAYATVLSRANRPPSGYNVVGKEVQMERMRIADDVTVHNVEIDPATITDQMEVKRRVQSGNVQKAIEKINDLNPTILARRDSNFKCSIIFDKNARAFDHLYIHTIMMVLASVVTTSFVILLLFSLLSCLHLRATPFSVEDVGAGASSPYSSDTSPDTDSRSGYCTFTGTFHIMHTPLFSPSSDVPFVFPVFALFFLPNLLSSPTVAAASQPKLVDAGTGRVGHAPSLSPCVPSRRTWWRLSRLGYLSDEESRPEILDN

SEQ ID NO: 4280 - protein, 479 aa, Zea mays
  VARIANT 433..479: note = Derived polymorphism lacks residues 433 to 479
  VARIANT 342..479: note = Derived polymorphism lacks residues 342 to 479
  VARIANT 291..479: note = Derived polymorphism lacks residues 291 to 479
  VARIANT 231..479: note = Derived polymorphism lacks residues 231 to 479
  VARIANT 205..479: note = Derived polymorphism lacks residues 205 to 479
  VARIANT 175: note = Ancestral polymorphism is R, Derived polymorphism is M
  VARIANT 141..479: note = Derived polymorphism lacks residues 141 to 479
  VARIANT 139: note = Ancestral polymorphism is T, Derived polymorphism is M
  VARIANT 117: note = Ancestral polymorphism is E, Derived polymorphism is K
  VARIANT 103: note = Ancestral polymorphism is E, Derived polymorphism is K
  VARIANT 98: note = Ancestral polymorphism is N, Derived polymorphism is T
  VARIANT 90: note = Ancestral polymorphism is Y, Derived polymorphism is S
  VARIANT 86..479: note = Derived polymorphism lacks residues 86 to 479
  VARIANT 79: note = Ancestral polymorphism is R, Derived polymorphism is L
  VARIANT 72: note = Ancestral polymorphism is S, Derived polymorphism is A
  VARIANT 65: note = Ancestral polymorphism is P, Derived polymorphism is S
  VARIANT 44: note = Ancestral polymorphism is I, Derived polymorphism is M
  VARIANT 42: note = Ancestral polymorphism is G, Derived polymorphism is R
  VARIANT 41: note = Ancestral polymorphism is A, Derived polymorphism is T
  VARIANT 36: note = Ancestral polymorphism is Q, Derived polymorphism is K
  VARIANT 29: note = Ancestral polymorphism is A, Derived polymorphism is T
  VARIANT 17: note = Ancestral polymorphism is E, Derived polymorphism is K
MNIYDVVKAYLDRLLIEVLNDSLLNMIYARSLGMSQMMQLAGNILVLEQACDMYLLHSAQLCGIPKRVAERSHSGLTARAVLKASQNVVYNALINLTNFKVDEFMVLLEEVNWIAEEALDNANDYMNEVLIYLETLVSTAQEILPMEALYKVVSGAMSHISDSIMTTLLNDGVKRFTVNAMLGIDINLKTLEAFADDKFDSTGLSDLGKETTFRDCLVEIRQLTNLLLSSQPENLMNPVIRQRNYGSLDYKKLAIICEKYKDFADSLFGSLSNRNTPQQSAHLTVSCGTLQVMYDAFGVRLHAGKQAEGSANDAKQSDLYTMLNKQSSRGQNGSGVTGSSSQGFMAYVQTDSGKTTTFYFPITGIIMQPTRMQQRGGSMGMRTAYPSALILPPRESSPCRSFSRLIACFYISCFFLSFYIVLEDALKVPCMWWLVGNITLFFFTLQIHEEARKLSYQTGVRVVVAYGGVSITQQAIGSL

SEQ ID NO: 4281 - protein, 138 aa, Zea mays
  VARIANT 41: note = Ancestral polymorphism is S, Derived polymorphism is L
  VARIANT 51: note = Ancestral polymorphism is S, Derived polymorphism is N
  VARIANT 54: note = Ancestral polymorphism is V, Derived polymorphism is A
  VARIANT 60: note = Ancestral polymorphism is S, Derived polymorphism is N
  VARIANT 77: note = Ancestral polymorphism is A, Derived polymorphism is D
MEFMNAINLANGSDKDKSTYPATIEDSAIEESKSDMESEPSIKPLLAKGKNRIVFHLTSSMAEAHILLMNENGDRLATLSQNNLSIDIKVFTSSFSIKAALGNPKISDDSLLSSHPYFWVCDMRNPVGRSFVEVFHAV

SEQ ID NO: 4282 - protein, 82 aa, Zea mays
  VARIANT 70: note = Ancestral polymorphism is S, Derived polymorphism is F
  VARIANT 69: note = Ancestral polymorphism is E, Derived polymorphism is K
  VARIANT 67: note = Ancestral polymorphism is R, Derived polymorphism is H
  VARIANT 61: note = Ancestral polymorphism is V, Derived polymorphism is I
  VARIANT 7: note = Ancestral polymorphism is D, Derived polymorphism is Y
MDYAFLDFISCQILTLLLSPARLLLILQVKTSMVLCLSTFQDDKLTYVTNFMDHLISWHTVTLRMMRAKSFVNLGEPNILEA

SEQ ID NO: 4283 - protein, 1042 aa, Zea mays
  VARIANT 328..1042: note = Derived polymorphism lacks residues 328 to 1042
MERARRHASRALLRRLLAAAAASPAASPATSSRGISTLSPPPPAAGKQQRRCCPPPRGAHQHAQARAVSVSALQPSDTFPRRHNSATPAEQEAMASACGFGGVDALVDATVPPAIRAPPMRFPGRFDAGFTESQMLDHMRRLASMNRDFKSFIGMGYYGTHVPAVVLRNLMENPAWYTQYTPYQAEIAQGRLESLLNYQTMVADLTGLPMSNASLLDEATAAAEAMAMCSAILRGKKRTFLIASNCHPQTIDVCRTRSDGFGIRVVVADAKDLDYGGGDVCGVLVQYPGTEGEVLDYAEFVRDAHAHGVKVVMATDLLALTALRPPGEIGADIAVGSAQRFGVPMGYGGPHAAFLATSQEYKRLMPGRIIGVSVDSTGRPALRMAMQTREQHIRRDKATSNICTAQALLANMAAMYAVYHGPAGLKAIADRVHGLAGTFAHGLKKLGTVTVQDLPFFDTVRVTCSDARAIAKEAVKNEMNLRVVDANTITVAFDETSTLEDVDKLFKVFNNGKSASFTAESIAPEVSSSIPSSLARESPYLTHPVFNMYHTEHELLRYLHKLQSKDLSLCHSMIPLGSCTMKLNATVEMIPVTFPNFANLHPFAPTDQAAGYHEMFDDLGNLLCTITGFDSFSLQPNAGAAGEYAGLMVIRAYHNSRGDHHRDVCIIPVSAHGTNPASAAMVGMKIVAVGTDAKGNINIEELRKAAEANKDNLAALMVTYPSTHGVYEEGIDEICKIIHENGGQVYMDGANMNAQVGLTSPGFIGADVCHLNLHKTFCIPHGGGGPGMGPIGVKKHLAPFLPSHPVIPTGGFPLPEKTDPLGTISAAPWGSALILPISYTYIAMMGSQGLTDASKIAILNANYMAKRLEKHYPVLFRGVNGTVAHEFIIDLRAFKTTAGIEPEDVAKRLMDYGFHAPTMSWPVPGTLMIEPTESESKAELDRFCDALISIREEIAEIESGKADVLNNVLKGAPHPPQLLMGDTWSKPYSREYAAFPAAWLRGAKFWPTTGRVDNVYGDRNLICTLQQATQVAEEAAAATATA

SEQ ID NO: 4284 - protein, 297 aa, Zea mays
  VARIANT 192: note = Ancestral polymorphism is G, Derived polymorphism is R
MAALVPEWATKEPCLMGIDEAGRGPVLGPMVYGCVYCACSYNNTLATLKFADSKTLKEEQREELFESLKANSSIGWEVDVICPKDLSAKMLKRSKVNLNEISHNSAMGLVRKVLDMGVLLAEVYVDTVGDPEKYRTKLTEKFPGVKFVVAKKADSLYPVVSGASIAAKVTRDRALRNWVFDETALSLHMRTGSGYPGDPDTKQWLEDHKHPVFGFPTLVRFSWGTCKPFFKDAVDVTWESDEVDEEGTDNGGAKRQVKLSSLGFTGFKRKTEDIESSGKGRCKFFQARKLELVRKFQ

SEQ ID NO: 4285 - protein, 169 aa, Zea mays
  VARIANT 8: note = Ancestral polymorphism is R, Derived polymorphism is S
MDRIMMSRPPLPAPTHAAAGADGDFLELDVLWPASPSAVGLGLLAALPEDEGKKKKRAAAGVGVGVGVGAPARSAARPVPETVAASAMARSAPVRIPSDPARRGRWAHAGAGAGGSAEDAGEALVPPHEIVARRAAAHSSVLEGAGRTLKGRDLRRVRNAVLRRTGFLD

SEQ ID NO: 4286 - protein, 548 aa, Zea mays
  VARIANT 361..548: note = Derived polymorphism lacks residues 361 to 548
  VARIANT 288..548: note = Derived polymorphism lacks residues 288 to 548
  VARIANT 138: note = Ancestral polymorphism is H, Derived polymorphism is L
  VARIANT 50: note = Ancestral polymorphism is E, Derived polymorphism is K
MAAPTLTADGPRLGQQEMKKMSPSFHPTLWGDFFLSYEAPTEAQEAQMREKAAVLKEEVRNMIKGSHDVPEIVDLIITLQRLNLDYHYEDEINEKLTVVYKSNYDGGNLDLVSRRFYLLRKCGYDVSSDVFLKFKDQLGNFVEADTRSLLSLYNAAFLRIHGETVLDEAISFTMRVLQDRLEHLESPLAEEVSSALDTPLFRRVGTLEMKDYIPIYEKDAKQNKSILEFAKLNFNLLQLRYSSELKECTTWWKELRVESNLSFVRDRIVEVYFWMSGGCYDPQYSHSRIILTKIVAFITILDDTLDSHATSCESMQLAEAIERWDESAVSLLPEYMKDFYMYLLKTFSSFENELGPDKSYRVFYLKEAVKELVREYTKEIKWRDEDYVPKTLKEHLKVSLISIGGTLVLCSAFVGMGDVVTKKIMKWVMSDAELVKSFGIFVRLSNDIVSTKREQREKHCVSTVQCYMKQHEITMDEACEQIKELTEDSWKFMIEQGLALKEYPIIVPRTVLEFARTVDYMYKEADKYTVSHTIKDMLTSLYVKPVLM

SEQ ID NO: 4287 - protein, 252 aa, Zea mays
  VARIANT 138..252: note = Derived polymorphism lacks residues 138 to 252
MDADLGDGGTDADHQWGAGAIICAGWGWGGDCDGTGADDSSPARRRRAPGGGGGAWQPAMAERWCALAQLHAVVVKVDLTVHLAYARQVFDRVPTRSTLSGTAPCSAATHGGADTGPGARDVAAKVDDDLLNSSFLASISRARVVWEWQQQIYGVVADPSSSSLSSSISSEDAVMYVAAASADASETEARAAHVDPEGAPRRAGDGDSEDGGELAALRMEARSRPLRRRGRGRGGALRRERGMVSRGRQCLS

SEQ ID NO: 4288 - protein, 187 aa, Zea mays
  VARIANT 86: note = Ancestral polymorphism is S, Derived polymorphism is R
  VARIANT 112: note = Ancestral polymorphism is R, Derived polymorphism is P
MSGGSGDDGQQRQCRRGVAVAADVELGAALALADMAAGSGASAVVAAQNHAAEEMTDDEETAASTRLSLRLGRVGVGVVQSPSCSSSSGAAAAHPRHIMLTEAEKEAKRLRRVLANRESARQTILRRQAVRDELARKVADLSSQNATMKKEKDVVMKEYLSLKETNEQLKAAEQAHHHHHLRLSSLF

SEQ ID NO: 4289 - protein, 47 aa, Zea mays
  VARIANT 12: note = Ancestral polymorphism is D, Derived polymorphism is Y
  VARIANT 14: note = Ancestral polymorphism is A, Derived polymorphism is V
  VARIANT 15: note = Ancestral polymorphism is V, Derived polymorphism is I
  VARIANT 20: note = Ancestral polymorphism is D, Derived polymorphism is E
  VARIANT 25: note = Ancestral polymorphism is V, Derived polymorphism is I
MDKQTNTSDMLDLAVDYIKDLQMQVKVLKETQANCTCPASKSQQHSC

SEQ ID NO: 4290 - protein, 494 aa, Zea mays
  VARIANT 303..494: note = Derived polymorphism lacks residues 303 to 494
  VARIANT 246: note = Ancestral polymorphism is S, Derived polymorphism is N
  VARIANT 61: note = Ancestral polymorphism is N, Derived polymorphism is S
  VARIANT 58: note = Ancestral polymorphism is E, Derived polymorphism is K
MAAQTLTADGPRLGQQEMKKMSPSFHPTLWGDFFLSYEAPTEAQEAEMRERAGVLREKVRSMIKGSHDVPEIVDLIITLQRLNLDYHYEDEINEKLTVVYNSNYDGGNLVLVSRRFYLLRKCGYHVSSDTRTLLSLYNAAYLRIHGETMLDEAISFTTRCLQDRLEHLESPIAEEVSSALDTPLFRRVGTLEMKDYIPIYEKDAKQNKSILEFAKLNFNLLQLLYSSELKECTAWWKELCVESNLSFVRDRIVEVYFWMSGGCYDPQYSHSRIILTKIVAFITILDDTLDSLANSYESMQLAEAVERIHEGFLHVKELVREYTKEIKWRDEDYVPKTLKEHLKVSLISIGGTLVLCSAFVGMGDVVTKKIMEWVMSDAELVKSFGIFVRLSNDIVSTKREQREKHCVSTVQCYMKQHELTMDEACEQIKELTEDSWKFMIEQGLALKEYPIIVPRTVLEFARTVDYMYKEADKYTVSHTIKDMLTSLYVKPVLM

SEQ ID NO: 4291 - protein, 548 aa, Zea mays
  VARIANT 427..548: note = Derived polymorphism lacks residues 427 to 548
  VARIANT 319..548: note = Derived polymorphism lacks residues 319 to 548
  VARIANT 190..548: note = Derived polymorphism lacks residues 190 to 548
  VARIANT 123: note = Ancestral polymorphism is G, Derived polymorphism is A
  VARIANT 74: note = Ancestral polymorphism is D, Derived polymorphism is V
MAAPTLTTDGPRLGQQEMKKMSPSFHPTLWGDFFLSYEAPTEAQEAEMRQRAEVLREEVRNMIKGSHDVPEIVDLIITLQRLNLDYHYEDEINEKLAVVYNSNYDGGNLDLVSRRFYLLRKCGYHVSSDVFLNFKDQYGNFIEVDTRSLLSLYNAAYLRIHGETVLDEAISFTTRCLQDRLEHLESPIAEEVSSALDTPLFRRVGTLEMKDYIPIYEKDAKQNKSILEFAKLNFNLLQLLYSSELKECTTWWKELRVESNLSFVRDRIVEVYFWMSGGCYDPQYSHSRIILTKIVAFITILDDTLDSHANSYESMQLAEAVERWDESAVSLLPEYMKDFYMYLLKTFSSFENELGPDKSYRVFYLKEAVKELVREYTKEIKWRDEDYVPKTLKEHLKVSLISIGGTLVLCSAFVGMGDVVTKKIMEWVMSDAELVKSFGIFVRLSNDIVSTKREQREKHCVSTVQCYMKQHELTMDEACEQIKELTEDSWKFMIEQGLALKEYPIIVPRTVLEFARTVDYMYKEADKYTVSHTIKDMLTSLYVKPVLM

SEQ ID NO: 4292 - protein, 549 aa, Zea mays
  VARIANT 163..549: note = Derived polymorphism lacks residues 163 to 549
  VARIANT 250: note = Ancestral polymorphism is T, Derived polymorphism is K
MAALTQTTDGPRLGEQEMKKMSPASFHPTLWGDFFLSYEAPTETQEAQMREKAGVLKEEVRNMIKGSHDMPEIVDLIITLQRLNLDYHYEDEITEKLTVVYNSNYDGGNLDLVSRQFYLLRKCGYHVSSDVFLNFKDQYGNFIGADTRSLLSLYNAAYLRIHGETVLDEAISFTTRCLQDRLEHLESPIAEEVSSALDTPLFRRVGTLEIKDYIPIYEKDAKQNKSILEFAKLNFNLLQLLYSSELKECTSWWKELRVESNLSFVRDRIVEVYFWMSGGCYDPQYSHSRIILTKIVAFITILDDTLDSHANSYESMQLAKAVERWDETAVSLLPEYMKDFYMYLLKTFSSFENELGPDKSYRVFYLKEAVKELVREYTKEIKWRDEDYVPKTLKEHLKVSLISIGGTLVLCSAFVGMGDVVTKKIMEWVMSDAELVKSFGIFVQLSNDIVSTKREQREKHCVSTVQCYMKQHELTMDEACEQIKELIEDSWKFMIEQGLALKEYPIIVPRTVLEFARTVDYMYKEADKYTVSHTIKDMLTSLYVKPVLM

SEQ ID NO: 4293 - protein, 500 aa, Zea mays
  VARIANT 101..500: note = Derived polymorphism lacks residues 101 to 500
  VARIANT 45: note = Ancestral polymorphism is P, Derived polymorphism is L
  VARIANT 44: note = Ancestral polymorphism is C, Derived polymorphism is G
MEGEAETVVGSCSKPCGPLEDYYIPDYILKPGAQQVLVDHAAPCPVVVFINSRSGGQLGSSLIKTYRELLNEAQVFDLSKEAPDKVLHRLYANLERLKMEGDILAVQIWRTLRLIVAGGDGTASWLLGVVSDLKLSHPPPVATVPLGTGNNLPFSFGWGKKNPSTDQEAVKSFLGLVKHAKEIKIDSWHIILRMRVPEEGPCDPIAPLDLPHSLHAFHRVSSSDSLNMEGYHTFRGGFWNYFSMGMDAEVSYAFHSERKKNPEKFKNQLTNQGTYAKLGLKQGWFCASLSQPSSRNLAQIAKVKIMKRAGSLWEELHIHHSIRSIVCLNLPSFSGGLNPWGTPGTRRAEDREFTAPFVDDGLLEVVGFRDAWHGLVLLAPNGHGTRIAQAHRIRFEFHKGAAEHTFMRVDGEPWKQPLPKDDDTVVVEISHLGQVTMLANEPCRSKSVNDQSSLSPAHDSHGDYNDIAEEDEDEWEDGRRKFGAADTFKIPDEIDIAHFS

SEQ ID NO: 4294 - protein, 368 aa, Zea mays
  VARIANT 99: note = Ancestral polymorphism is S, Derived polymorphism is R
  VARIANT 107: note = Ancestral polymorphism is P, Derived polymorphism is L
MPPPPQANGGKVTPNLAMDAEATRMLNLTVLQRLDPAVEDILITAAHVTLYDFNIDLNQWSRKDVEGSLFVVKRNSQPRFQFIVMNRRNTDNLVEDLLSDFEYELQPPYLLYRNASQEVNGIWFYNQHDCEAVASLFGRILNAYAKVPPKPKVPTTKSEFEELEAVPTSAAIDGPLEPPLSSTAVVSNAPDESLVNYFNGAASIGSVPSAQMAGRAHPSNDTVTPSHVPLIVPSATPTHQMSHPLGGSSAPPLPLHDTNPHASQSANLLTPAFFAPPPPSSTSVTPPASSMMPTAPPLHPTSTAAQHPSYGTPLLQPFPAPSPPPSLTPAHNDGLVISRDKVKDTLQRLVQNDEFIDLIYRELQSVHM

SEQ ID NO: 4295 - protein, 95 aa, Zea mays
  VARIANT 65: note = Ancestral polymorphism is M, Derived polymorphism is I
  VARIANT 78: note = Ancestral polymorphism is R, Derived polymorphism is K
  VARIANT 95: note = Ancestral polymorphism is H, Derived polymorphism is L
MVFGFLTRSLISAMLPHQSRVLSRGHSTGSNSPKDDFTMSFLSGDEGASGSGIVLEQAKRSLSMMLERPVHTVRIYWRKFDDRFMRPIFGGPRSH

SEQ ID NO: 4296 - protein, 283 aa, Zea mays
  VARIANT 36: note = Ancestral polymorphism is E, Derived polymorphism is Q
  VARIANT 89: note = Ancestral polymorphism is A, Derived polymorphism is G
MATHHLAQGHPQAWPWGMAMYTNLHYHHHQQQQYYEREHLFEKPLTPSDVGKLNRLVIPKQHAERHFPLGGGDGNGNEKGLLLEFDDEAGRPWRFRYSYWVSSQSYVLTKGWSRYVKEKRLDAGDVVRFDRVRGAGVGAADRLFICCRRRGESAAAASAAATPTPPPVAPALNAGEQQQQQPWSPTVCYSTSGSSYPPSPASPYAYHIDTPHAGAGEADAKSSGGTPTTGTAPTRKLRLFGVNLDCGPEPETETPTAPMYGYGYVHQSPYAAVPAVPSYWGSS

SEQ ID NO: 4297 - protein, 385 aa, Zea mays
  VARIANT 103: note = Ancestral polymorphism is P, Derived polymorphism is H
  VARIANT 68: note = Ancestral polymorphism is M, Derived polymorphism is R
  VARIANT 24: note = Ancestral polymorphism is Q, Derived polymorphism is L
  VARIANT 15: note = Ancestral polymorphism is G, Derived polymorphism is E
MSFRSIVSWNTMIAGYTCNGDGLQALKLFSKMHQEGTQMSEFTLSSTLCACAAECATIECRQLHAIAMKLALDSNSFVGTAVLDVYAKCNMINDACLVFEKIPEKTAVTWSTLFVGLMQNGLHEDALRLFQGSQREGIQLTEFTLSAILSTCASLALMIEGMQLHADVIKYGFNNNLFVASSLVDVYARCGQIEKAYLVFADMKHKNVVLWNAMITSFTRHGKSLEAMILFEKMQQSGISPNEVTYVSMMSVCGHAGLVEEARCYFDLLVTDQTVKPNIVHYSCMVDVLGRSGKTDEAWELIQQMPFEPTPSMWGSLLGSCRKYRNVGIARLAAEQLFKLEPENGGNHALLSDVYAASGSWENAVLARKYLNDTGARKDTASSWM

SEQ ID NO: 4298 - protein, 196 aa, Zea mays
  VARIANT 1: note = Ancestral polymorphism is M, Derived polymorphism is I
  VARIANT 64: note = Ancestral polymorphism is R, Derived polymorphism is H
  VARIANT 71: note = Ancestral polymorphism is Y, Derived polymorphism is C
  VARIANT 115: note = Ancestral polymorphism is W, Derived polymorphism is S
  VARIANT 159: note = Ancestral polymorphism is A, Derived polymorphism is G
  VARIANT 169: note = Ancestral polymorphism is V, Derived polymorphism is A
  VARIANT 170: note = Ancestral polymorphism is R, Derived polymorphism is C
MAASSEGMLLPSLVNEEDVHRRSARSPDEALSHPHGALAGSPLCPPPPPRSSPTPYPASKVDIRCFHFDDYVTFLASTTGKPGVLNSCAIKRFNIGEDCPMFDSFFISLLPVLYWGSIDAAINLNHVDANITVNWAASLHRAKKSEASRFCYVNNIVLAVLELLMFHRARMLIYLLLLTFNIWTLVFIFGGASLLY

SEQ ID NO: 4299 - protein, 456 aa, Zea mays
  VARIANT 320: note = Ancestral polymorphism is R, Derived polymorphism is C
  VARIANT 265: note = Ancestral polymorphism is P, Derived polymorphism is L
  VARIANT 88: note = Ancestral polymorphism is S, Derived polymorphism is L
  VARIANT 86: note = Ancestral polymorphism is P, Derived polymorphism is L
  VARIANT 66: note = Ancestral polymorphism is H, Derived polymorphism is Y
  VARIANT 36: note = Ancestral polymorphism is Q, Derived polymorphism is K
MRQAVGDAPAPELAGAELAAIFRVMADLLGDPAWPQLHPRLCTDTPRSGLQCELAPDDARVLRATYLHLGPDVATSAYRPGARLDPASLRGLPHLRMLSIFGCFGVAQAPVELPPALFPGGDTPASELAGAELAAIFRVMADLLGDPAWSQLHPRLCTDTPRSALQCELAPDDARVLRATRLHLGPDVTTLACRPGARFDPASLRGLPHFRTLSIFGCFDAAHAPIEPPPVLFPGGDAPAPELAGAELTAFFRVMADLLGDPAWLQLNLRLCTDTPRPGLQCELAPDDARVLRATRLHLGPDVATLPCRPGARLYLASLRGLPHLQTLSIFGCFGAAQAPIELPLALFPGGDAPALELAAIFQCELAPDAARVLRATRLHLGPDIATPPCRPGARLDPTSLCGLPHLRTLSIFGCFGAAQAPVEVPPSLFTSSSSLEHIVLKSNPSLTSHIPATLV

SEQ ID NO: 4300 - protein, 235 aa, Zea mays
  VARIANT 182: note = Ancestral polymorphism is C, Derived polymorphism is Y
  VARIANT 187: note = Ancestral polymorphism is G, Derived polymorphism is R
  VARIANT 190: note = Ancestral polymorphism is L, Derived polymorphism is V
  VARIANT 191: note = Ancestral polymorphism is Q, Derived polymorphism is R
  VARIANT 192..235: note = Derived polymorphism lacks residues 192 to 235
  VARIANT 214..235: note = Derived polymorphism lacks residues 214 to 235
MPSSRTRPFPVHALPTPHQPPASSAGWLPPPVPDAVRQRRPDPGVYGGAGRAAHQAPRVPLVRRVRRPPRPPRVPHGGADRDASPPRRSEAVVPGREVAPLGGAAAVRRAGEAGHGGADAVVLCYDSANRWTLSVAWGFMRMGSKPLQICASRFSLDDIYVQGIGGRWYIYGGHTLQYSKLCRILDGLFLQYPIATRYGNWQLPSYLIFKSETRLQYIGLLAVFMSYLFAGARIR

SEQ ID NO: 4301 - protein, 322 aa, Zea mays
  VARIANT 169: note = Ancestral polymorphism is T, Derived polymorphism is A
  VARIANT 29: note = Ancestral polymorphism is S, Derived polymorphism is F
METAERGITVCVTGAGGFVASWLVKLLLSTGRYTVRGTVRHLGDGKNAHLKTLEDAEERLQLVKADMLDYGSVASAVAGCQGVFHVASPVPSGKSSNPEEDVIAPAVTGTLNVLKACYEAKAKRVVVVSSVAAVFNNPDWPKGEAFTEDSWSDGEYCRKNEEWYFLSKTLAEHEAFAYAAKTGLDIVTICPSLVIGPLLQPAVNTSVKVFLSYIKGDQEIVKDGPKNLVDVRDVAGALLLAYENLQASGRYLCSSPAIRVSDIVNILKTEYPTYTYPQKFVEAEGSNTYNTEKLRKLGWTSRPMEDTLRDSIECYRAMGILN

SEQ ID NO: 4302 - protein, 463 aa, Zea mays
  VARIANT 352..463: note = Derived polymorphism lacks residues 352 to 463
  VARIANT 267..463: note = Derived polymorphism lacks residues 267 to 463
MAADEARSVSRLHSEEDMHGKHHSTLWGDFFLHHVPCRPGQVYTIDNKRITKLDEISFLQYLIMKDNVEIMKEEVKKMLLDVGSSDLSHKLDCIDTLERLGLDYHYTKEIDELMCNVFEARDQDLDLTTTSQLFYLLRKHGYHISSDVFLKFRDDKGDIVTNDARWWKEFQAQANTTIYARDRMVEMHFWMMGVFFEPQYSYSRKMLTQLFMIVSVLDDLYDSHCTTEEGNAFTAALQRWDEEGVEQCPTYLRTLYTNIRATIKAIEEDLNFQNNKHAKLVKGLIIDMAMCYNAETEWRDKKYVPATVDEHLKISARSSGCMHLVSQGFISMGDVATSEALEWASTYPKIVRAVCIIARLANDIMSYKREASNNTMVSTVQTCAKEYGTTTVEQAIEKIRELIEEAWMDITHECLRQPQPKALLERAVNLARTMDFLYKDADGYTDSRSIKGILDSLYVHLID

SEQ ID NO: 4303 - protein, 93 aa, Zea mays
  VARIANT 31: note = Ancestral polymorphism is G, Derived polymorphism is R
  VARIANT 73..93: note = Derived polymorphism lacks residues 73 to 93
MAYKMKGVFKGLKVISQIFDLDEPRDISPFGIFPESGGQETARRYPDIPKPPRKSRRKKSKNNSPRASSRSRSRSSSSSTADSFGVKDMQAEI

SEQ ID NO: 4304 - protein, 440 aa, Zea mays
  VARIANT 143..440: note = Derived polymorphism lacks residues 143 to 440
  VARIANT 267: note = Ancestral polymorphism is R, Derived polymorphism is I
  VARIANT 334..440: note = Derived polymorphism lacks residues 334 to 440
  VARIANT 338..440: note = Derived polymorphism lacks residues 338 to 440
  VARIANT 363..440: note = Derived polymorphism lacks residues 363 to 440
MRRIYLADRYEAHLSIQLYTAKAQSLSQLHSRGIHHHGLHFSESVPLRAHNPRRAHPHSRCVRPNADSPRPSPDRAKEEQYGQPLQAEFSSPSPDSGGGSCVTTESDEDASSPSPDVVRRSLALAPQERAVLLEREHSLPPSQAVDGDDDDDLDATWNAIMQKTRPSVAVARIGGADSGGGGYNYLRVYSVELRGTSTAIRSRAPSFHPPPFSKPSLVLQKSEFSLGDVMNAVVSQTMSLLRERDLQLIRDIPDEIKDASAYGDQFRIQQVLADFLLSMAQSAPSENGWVEIQVRPNVKQNYDRTNTELFIFRFACPGEGLPADIVQDMFSNSQWSTQEGVGLSTCRKILKLMGGEVQYIRESERSFFLIVLELPQPRLAAGHAIKKCLKRSKLHIHQYIIVIANLQLELSLEENYSEQFGGELFRTMLSIDGGLDVEIF

SEQ ID NO: 4305 - protein, 118 aa, Zea mays
  VARIANT 93: note = Ancestral polymorphism is A, Derived polymorphism is S
  VARIANT 105: note = Ancestral polymorphism is L, Derived polymorphism is F
  VARIANT 107: note = Ancestral polymorphism is M, Derived polymorphism is I
MYMYPFILESAERRQAEANRIREKYPDRIPVIVEKAERSDIPDIDKKKYLVPADLTVGQFVYVVRKRIKLSAEKAIFIFVKNTLPPTAALMSAIYEENKDEDGFLYMTYSGENTFGLF

SEQ ID NO: 4306 - protein, 152 aa, Zea mays
  VARIANT 116: note = Ancestral polymorphism is P, Derived polymorphism is L
MQQIISACKLPHTQRAAAFLPPRPSLRRLPVPAGGAPPPRRLVVRRRCQEENKQQQEAEEGSGADEQEQQKRTFLSLEEAGLVEMSGLSTHERFLCRLTISSLNLLRVISEQEGVPIEELNAGRVCDWFLKDKLKREQNVGTAVLQWDDPGF

SEQ ID NO: 4307 - protein, 331 aa, Zea mays
  VARIANT 100: note = Ancestral polymorphism is T, Derived polymorphism is M
MSAWAPAAYTLVLLLYLLAGAVVTAKTNNGVDPGPRQQEPSMPVDSSGDEALSALTWMATGSEASKAAEAVVDWHKHDSKRMLHAVYRVGDLDRTIKYYTECFGMKLLRKRDVPDEKYTNAFLGFGPENTNFAVELTYNYGVDKYDIGTGFGHFAIANDDVYKLAENIKSKGGKITREPGPVKGGSTVIAFAQDPDGYMFELIQRADTPEPLCQVMLRVGDLERSIKFYEKYTIAMLGYADEDKTTVLELTYNYGVTEYSKGNAYAQVAIGTNDVYKSAEAVDLATKELGGKILRQPGPLPGINTKIASFVDPDGWKVVLVDNTDFLKELH

SEQ ID NO: 4308 - protein, 600 aa, Zea mays
  VARIANT 170: note = Ancestral polymorphism is G, Derived polymorphism is S
  VARIANT 202..600: note = Derived polymorphism lacks residues 202 to 600
MESAAIGSQSPLSFPSSLCKGKVSSSLSIYNVKIKSNCRLEVVCHGMLATRKFMQRKKKEEVFKDGADETEQMNWRRMMREIEQEGSAVPILKTQRNRKEPLPRDVILGTLIRFKQLKKWNIVSEILEWLRTQHWWDFSEMDFLMLVTAYGKLGDFSRAERVLKYMNKKGYQPSVISQTGLMEAYGRGKQYRKAEAVFRRMQTSGPQPSPVTYQIILKSLVEGDKYKEAEAIFEDLLNEKRTSFKPDQKMFHMMIYMYKKAGDYAQARKLFAQMSERGIPLSTVTFNSLMSFETEYKEVSNIYDQMQRAGLKPDVVSYSLLIKAYGKARREEEALAVFEEMLDAGVRPTRKSYNILLDAFAISGLVEEANTVFRAMRRHRVEPDLCSYTTMVLAYVNASEMNGAEKFFRRIKEDGLKPNVVVYGTLMKGYSKLNNLEKVMRVYERMRIQGVEPNQTIYTTIMDAQGRNSDFGNAVIWFKEMEARGYPPDQKAKNILLSLAKTPEEEQEANDLVGNGPVQLEVKPDGEVDGDDGHEVIQTDAENHRLLDDTRARNHVNGRIRAGDDYNFDEEDDDDDYEEEEDEEFDLVSFKDKRKLNFAS

SEQ ID NO: 4309 - protein, 85 aa, Zea mays
  VARIANT 52: note = Ancestral polymorphism is V, Derived polymorphism is A
MEVAPSKLPSTMARCARLPRNLDTIAEDDDDKEAAAMESTRELPLRNASRGAQVVVVDAPVHCADKLACYLAPMAKTTECLKIKA

SEQ ID NO: 4310 - protein, 264 aa, Zea mays
  VARIANT 15: note = Ancestral polymorphism is D, Derived polymorphism is N
MEAGPPCEPAPTVANGRDWSELSLDALVLVFGRLGPVEILMGSGLVCRSWLQAAKEPELWASLDMASHRAVEEMGGDVLRGMARVAVGRSRGRLEVFSGKHFVTDDLLNYISGRSACLRSLSLVSCPEVTNKGFTDLVTNAPKLEDLSLELCPNVGGRHVLECAGRACPRLARFRLRRECFRFSLNYSRRTAEALGIAAMTGLRSLTLVSSNISNDELVAVLDGCPRLESLCLRDCYKVIADGSLRARCAGIRALTLPVPDRVW

SEQ ID NO: 4311 - protein, 81 aa, Zea mays
  VARIANT 14..81: note = Derived polymorphism lacks residues 14 to 81
  VARIANT 10: note = Ancestral polymorphism is D, Derived polymorphism is G
MPYYDMTGYGHRRQVFSTHMGLSDQDIVALFGGHTLVGGIGRVFLFVWQLESWCLCTVVSSYREDATRTGLGLRELGRPTL

SEQ ID NO: 4312 - protein, 249 aa, Zea mays
  VARIANT 217: note = Ancestral polymorphism is R, Derived polymorphism is H
  VARIANT 200: note = Ancestral polymorphism is R, Derived polymorphism is I
  VARIANT 174: note = Ancestral polymorphism is Y, Derived polymorphism is D
  VARIANT 128..249: note = Derived polymorphism lacks residues 128 to 249
  VARIANT 116: note = Ancestral polymorphism is G, Derived polymorphism is R
  VARIANT 85: note = Ancestral polymorphism is G, Derived polymorphism is R
  VARIANT 77: note = Ancestral polymorphism is R, Derived polymorphism is L
  VARIANT 14: note = Ancestral polymorphism is H, Derived polymorphism is Y
  VARIANT 11..249: note = Derived polymorphism lacks residues 11 to 249
  VARIANT 7: note = Ancestral polymorphism is R, Derived polymorphism is W
MFFSRFRFKFQVLHGGGVACCESMPNLIERPSPIDFCVPRDRGGDGTVLGDLLENCVTEVLLRLDPLEICQMARLSRMFRGATSGDGVWESKLLTNYARLLAVAEAGDGEAGQATGSAPEAEPLPKKELYARLCRRNRFDGGKKEFWLDKGGGGLCMSISSRALSITGIDDRRYWNFIPSDESRFRTVAYLSQIWWFEVRGEVEFFFPKSTYNLFYRIHLGRPFKRNQRSSGRDHQVAHRCPWANTHSQ

SEQ ID NO: 4313 - protein, 156 aa, Zea mays
  VARIANT 31: note = Ancestral polymorphism is G, Derived polymorphism is D
  VARIANT 41: note = Ancestral polymorphism is S, Derived polymorphism is F
MEVGADRRRICLGTHGLTGALQGGGSRARVGATTVAARCHSESRRRVRSGSRRSERDGGGGAGENGAEYGKGRRWGRAPRGWGALAMTARKGGAEEDGARGGPVEEDDTRVWGALAFTARGGGAEDDGARGGPVEEDGTRGWASLGHKQMGLPGKM

SEQ ID NO: 4314 - protein, 321 aa, Zea mays
  VARIANT 284: note = Ancestral polymorphism is K, Derived polymorphism is M
MASTIGNNDRLTQLKAFDDTKAGVKGLVDEGVTIVPPIFHHLPDPHDATSNAHAAIPVIDLAAFSATNNDEAHAHQQLVAQVKAAAETVGFFQVVNHGVPAELLPRMLASVKSFNEEPADERRPYYTRDQARRARGLAAQLLALLSEALGLHAGYLQRDAGCLDGPSLAFACHYYPPCPEPWLTLGTTRHSDPSFLTVLLQDAVGGLQVLLGGRWVDVPSLPGALVVNIGDFLQLMSNDRFKSVEHRVVAVPPGAAARVSVACFFRPSGAATSKEYGPVPDLVKPPEAPRYRSVTGVEFLDYYRQKGLDGRSALDHFRLLV

SEQ ID NO: 4315 - protein, 117 aa, Zea mays
  VARIANT 94: note = Ancestral polymorphism is G, Derived polymorphism is D
  VARIANT 92: note = Ancestral polymorphism is A, Derived polymorphism is T
  VARIANT 84: note = Ancestral polymorphism is A, Derived polymorphism is E
  VARIANT 82: note = Ancestral polymorphism is G, Derived polymorphism is R
  VARIANT 79: note = Ancestral polymorphism is R, Derived polymorphism is W
  VARIANT 76: note = Ancestral polymorphism is G, Derived polymorphism is E
  VARIANT 70: note = Ancestral polymorphism is V, Derived polymorphism is G
  VARIANT 66: note = Ancestral polymorphism is A, Derived polymorphism is V
  VARIANT 65: note = Ancestral polymorphism is P, Derived polymorphism is S
  VARIANT 61: note = Ancestral polymorphism is G, Derived polymorphism is R
  VARIANT 60: note = Ancestral polymorphism is A, Derived polymorphism is T
  VARIANT 51..117: note = Derived polymorphism lacks residues 51 to 117
  VARIANT 3..117: note = Derived polymorphism lacks residues 3 to 117
MESTSGEDASKRNLLPSVLVSNLQPVLAARRPSAAVVSTAATASEAEALAQEAEASDAPAGDGTPARPIVLLTCAGGIWSAGLAALVDALVAADRCNVHMCAPRIGQASMWPFNYHP

SEQ ID NO: 4316 - protein, 300 aa, Zea mays
  VARIANT 97: note = Ancestral polymorphism is D, Derived polymorphism is G
MDASEETRDWAELPRDALLAVFHSLQHADVLMRAGQVCRPWRRAAREEPELWRRIDLRRRAALSTSILYHLDVMARTAVTCSAGQCEAFWAEDFVDDTFIFFLSHRATGLRSLRLISCNISKQAALNEAITRFSMLEELELSLCSGATTASGHYNLADTCTAAAKACRNLKCLRLNKYRFHRRSGYDGDSEAMEIAKMRGLRCLQLFGNSLGNAGLAAILAGCAHLESLDIRHCFNVEVNDETRVMCARLQTLKLPDDSMDGYDLSFGNPEMNAGIPGLDFPHNAEMNFGFRGDILWDSW

SEQ ID NO: 4317 - protein, 111 aa, Zea mays
  VARIANT 24: note = Ancestral polymorphism is G, Derived polymorphism is D
  VARIANT 42: note = Ancestral polymorphism is L, Derived polymorphism is S
  VARIANT 45: note = Ancestral polymorphism is G, Derived polymorphism is R
  VARIANT 49: note = Ancestral polymorphism is M, Derived polymorphism is T
  VARIANT 87: note = Ancestral polymorphism is R, Derived polymorphism is S
MSAAHRRSFNTLDTWHDEFLNQADPSDPQRFPFILVGNKIDSDGGSKRMVPEKKAREWCASKGDIPYFETSAKEDHNVDTAFLCIASLALEHEHDQDMLPNPGDSQIDLQF

SEQ ID NO: 4318 - protein, 115 aa, Zea mays
  VARIANT 33: note = Ancestral polymorphism is D, Derived polymorphism is A
  VARIANT 9: note = Ancestral polymorphism is G, Derived polymorphism is R
MRNGSGYPRDPDTKRWLEDHKHLVFGFFKDAVAVTCGRRRPPRRRRPPPPSGRERERERERNKEADEVTVELRAVGFDKEVVLKQRRRMRRRRRLGEEERAAILLMALSSGVVYA

SEQ ID NO: 4319 - protein, 478 aa, Zea mays
  VARIANT 254: note = Ancestral polymorphism is R, Derived polymorphism is W
  VARIANT 281..478: note = Derived polymorphism lacks residues 281 to 478
  VARIANT 298..478: note = Derived polymorphism lacks residues 298 to 478
  VARIANT 317: note = Ancestral polymorphism is W, Derived polymorphism is R
  VARIANT 336: note = Ancestral polymorphism is T, Derived polymorphism is M
MAKPPPPTSTSDPALPTTATTTSSAPKSSSRPSPRPRGLLDPLAASARSLLASARRSPVTTLAAAFFLLALVMYGEDARTIAELSIDDYLYPDADLYNVSGLPPLALPPLTCDLSSGRWVFDNVSVPAYREKDCTFLTKQVSCLANGRPDDMWQYWRWQPNECSLPTFDARRFMEAMRGKRLMFVGDSLNRNQWESLVCLVQSILSKGRKKIVKRGSFNTFYAKEYRATLEFYWAPFLVESNSDNPNFHSIKERIISPERIEAHAKHWKDADYLVFNTYIWWMNNADIKVRRPNSRYWSDNDEVPRIEAYGRVFKTWSDWLNDNIDPARTSIFFMTISPPHLSPQNWGNPDGIKCVRETLPYQNYSQHLDLYHDMRLYDLVVNVASSMEKVPVTVINITRMSDYRKDAHTSLYTIRQGKLLTPKQKADPEKFADCIHWCLPGVPDVWNQILYTRILSKSSWHSNFSPPPSQSLPLPPQ

SEQ ID NO: 4320 - protein, 469 aa, Zea mays
  VARIANT 352: note = Ancestral polymorphism is P, Derived polymorphism is T
  VARIANT 301: note = Ancestral polymorphism is T, Derived polymorphism is I
  VARIANT 272..469: note = Derived polymorphism lacks residues 272 to 469
  VARIANT 246: note = Ancestral polymorphism is P, Derived polymorphism is L
  VARIANT 232..469: note = Derived polymorphism lacks residues 232 to 469
  VARIANT 52: note = Ancestral polymorphism is P, Derived polymorphism is S
MGNSQASPASASSSRFVMASRAFPKQELDGLRELFASLAAQSRTGGRAISRPVFLEYYQVRGRLGDRLFQLVAKESGGSDGVTFEDLIISKATYGRGTRDEVDEFIYQLCDVTGDGALTRSDLESVLASVHETVFAIKKEAVEVSNNRPFEEFLNSAVFSKDVEGVSGKSMSLSDFRNWCTLLPSLRKFLGNLLMPPDSGLSYSCNSLYAYISSIFISIGAVLMEYNVHDISCHAFDDFISFVGRPGFEVPLLHYPENICTDTLLLNKEYAWHIGGGFSQHEVQEWKLLYHSSLHGQSFNTFLGKVTNGDAQTVLIVKDTEGSIYGGYASQPWERHSDFYGDMKTFLFKCYPQASIFRPTGANKNLQWCAVNFSSENIPNGIGFGGQPHHFGLFLSANFDQGHSFTCSTFTSPPLSKTNRFRPEVIECWGIQMRGAQDEKLELVKGTVLERFKEDRNMLKMVGLANASD

SEQ ID NO: 4321 - protein, 632 aa, Zea mays
  VARIANT 4..632: note = Derived polymorphism lacks residues 4 to 632
  VARIANT 130..632: note = Derived polymorphism lacks residues 130 to 632
MRQQTGKRPSQHREYEREERKDQHKRPFPRAQESSNNDGLVLYRILCPDSLIGSVIGKHGNVINAIRHQTSAKVKVVDPYPGADKRVILVYCYVKHRDLDAEGDDNEPVCAAQDALLRVHNAIVDALQTLHKNHKDSDKKSTEEANILVPASQASNVIGKSGAVIKHLRSTSRAFIKVSPKDPSDPTHSCAMSFDNFVQITGGAEAVKKALFGVSTIIYKHPSKENIPLETSIPDPTPSIIIPSELPVYPASNFYSAPDAAIPSVHPSMSVLGSTRHVPELAVPADDHGRLPIYQSILPVIPTYSAPKCSGELEFRVLCPGGKIGLVIGRGGATIKNIRQESGARIDVDDAKNDKEESIITIISTESTDDVKSAAVEAVLLLQAKINDSEDDRMNLRLLVPNKVIGCLIGRGGSIVNDMRKKTKANILISKGDKPRRASSSDELVEVSGEADKLRDALVQIILRLREAVLKESVESQNSDRDGQLTVAASDSLYGSSLPLPALLPHNQQIAPLGYDRRGEPERALEVFPRTSSYGYSSMQVTDDGYGGLPSYASKAYEEHVPRLEMTVPASGISKVMGKHGTNLDNIRKISGAHIEIIEPKSSRHEHIAYISGTSEQRHSAENLIKAFIMST

SEQ ID NO: 4322 - protein, 146 aa, Zea mays
  VARIANT 144: note = Ancestral polymorphism is K, Derived polymorphism is E
MSRGSSNGGVRSAARLEELQLDLSPPPVGMEVDGAGGVHGDSDSSSSSPPSSCVSSDGRSSSGGGGSSPGGSKSPMVIGACTRCLMYCMVAKKDYPTCVNCKQPCLVDLLHGEAGRVGGGARQAAAAAAADDDDDKKKQVHRRKRR

SEQ ID NO: 4323 - protein, 823 aa, Zea mays
  VARIANT 164: note = Ancestral polymorphism is T, Derived polymorphism is N
MILSRWLKCTAEWFRHSKDLSREVPSCNYSVLASVHHDDSSGDERLNYASDNEPIQKQQKSLSSYSVVQALRCLRRKPAVAFAYFKDIHSLGFNHDFSTYSEIIQILSHSFQGKMLVSLFCEILSGTANGDPEILTLIGHLSKTCATSHILSYAVNCLIKAYTNSHDVQETVEMFCHLCRLGFVPTLWACSFLIKFVSQSGDSDMVVRAYDQMKCFQLMLDTQSLNIVIRSFFEVNKAEESFQVWVRMIEMGMKPDAHGYSSFIIGLCDCGKYDLAYNMVSKYTVLHEITQERVAIESIAYNMVIDGLCKEMKLEEAEKVLDIKTRHGSTPDLYGYSYLIRSYCKMGNLEKVWHYIEAMVSHGIEINCYIVGYLLQCLKKLGMISEVIVHFQKFRDLGLHLDGVLYNIAMDAYCKLGNMNEAVKLLTEMMAGGLVPDKIHYTCLINGYCLKGEMENAWQVFEQMLKENVKPDVVTYNILASGYSRNGTVIKVYDLLEHMMNQGLEPNSLTYGVAITSFCRGGNLSEAEVLFNIVEEKGIDNIELLYSSMVCGYLHSGWTDHAHALFLRVAKQGNMVDQFSCSKLINGLCIDEKVEEASTVCSMMLEKNVIPDVISYSKLISAYCQNRDMHNAHLWFLDMDERGLSDVIVYTILMNGYCKVGRLQEACDLFVQMINLGIKPDVVAYTVLLDGHLKETLHQGWQGIAKERRIFFLRTKHKTLLSYMKDMEIEPDVTCYTVLIDGQCKAEYLDEARELFDEMLAKGLTPDVYAYTALINGYCSQGEIAKAEDLLQEMTDKGMKPDVLTFSVLHQRTLRHRKAHSYS

SEQ ID NO: 4324 - protein, 424 aa, Zea mays
  VARIANT 205: note = Ancestral polymorphism is R, Derived polymorphism is H
  VARIANT 274: note = Ancestral polymorphism is V, Derived polymorphism is L
MAATTPLLAVAGHGVSYKPANAKDSYYCFKFASSARTRVTLPQIIHWRCRSSHSSTGTTTMAVPVLKRREKQDEEQEWMGYLAPEKLEVLAHLEPWAEAHVLPLLKPAEEAWQPSDMLPDPAALGDEGFHDACRELRARAASVPDAHLVCLVGNMITEEALPTYQSVPNRFEAVRDLTGADSTAWARWIRGWSAEENRHGDALSHYMYLSGRVDMRQVDRTVHRLIASGMAMNAARSPYHGFIYVAFQERATAISHGNMARHVGAHGDHVLARVCGAIMADEKRHETAYTRIVAKLFEVDPDAAVRALGYMMRHRITMPAALMTDGRDAHLYAHYAAAAQQTGVYTASDYRSILEHLIRQWRVEELAAGLSGEGRRARDYVCGLPHKIRRMEEKAHDRAAQTQKKPTSVPFSWIFDRSVNVVIP

SEQ ID NO: 4325 - protein, 852 aa, Zea mays
  VARIANT 551: note = Ancestral polymorphism is T, Derived polymorphism is I
MENKSDDLQHEHGMPDQTSRPFTSLLLSATSVAQAAQQDTGSDIKSLSLLHGSSLLPPDDGYIWKARAQNIVPGCEYPTMYYKCAQDNCNTNKLVVCSADGHQVLETVLSGCHNHPRQQDCDLPIPKVSKTDTSMPVSREGDDEQLSSSSDSDEDDVDQARVEGDGSVTRHVPHPAERITAQTGTANSHRQMDQDLDPGNRLSRMVQVFTRCAGRRRPKSKVWEEFSAVLRDDKIQWAECKHCKMSLGGTSTGRTTHLRRHLKICPALPATDRMQKQRSSPHPGSTIESIWKFDQDRSLELLIKVLVSNLFSSPLTSSTTFRQLWAGICPTNDVLSDAAIEEKFLSIFENEKLKLKEEIALAPGGVFLTAASSSLETKNFIFLTVHFIDKEWNLNRKIIRCCFTGCEDFDAEYFVSMFPNLQSCHNFINGNVRAAEEEIVKEAVQNWRLEWKLLGISSRKSLADAAVLALEKNLTEQNYLLAKCKLLNLPCIIDALNDLFGYEINEYVLSTSKMWFQYMTCTPLRRDKYKEILSRLQINRPSFGSQRWYLTFHSLEAALQFNNELPDPQQIDSRYYPAKPSFAQLKAAENFCDLVRAIYHAVKVVSRTCNGALNSQFHAIWNLKMALLRSSTKENIDQVFNIEQMKLKFDQLWRKWYLWLSLAVVLDPRYKFRFLLVCFKEAFGSHAKRYIFEVRGKLYELFLQYSCHVDQQNSDSFDQRTNDLQLDTHGSTPVHATSQNFIEQAAHEELGEVIRYLEAELIPQNANFDILKWWKENALTYPALARLACDILAIPGSAVSAESAFDETDERVGLFNLKLSPELVEALVCTQDWIKSSEIISDEVGGNINMPA

SEQ ID NO: 4326 - protein, 328 aa, Zea mays
  VARIANT 27: note = Ancestral polymorphism is E, Derived polymorphism is V
MMETEEEQQQRSTRRWQRLQRAASVEELVVPAGADAAAGGGDDDDLEVTRDPTVVRGWRRLKAVSMVVFSGGARPNTTTTTTTTTEMEPLYPAHEPRSDTDIRLRSPQRKAREVSTQVQQPSLPPQQPDEVGTKNSAAEVVMDVISPKTTQVGVVHGNPVDDDKEQRARYLKYSQKALGFAVCTFVGYASNASSTGSAAFKMAAAPFFVAIIADLLTLKTKAKHGCALIYLSSFHLILMTYLIFIAFDMAHAYAVLFLPLVASASHLQQKLWPPPPRDDGSADDRSKAVSKDLDSILELSSLILNWSSFVSAIMTVVRHFHHCCWQGQ

SEQ ID NO: 4327 - protein, 500 aa, Zea mays
  VARIANT 34: note = Ancestral polymorphism is R, Derived polymorphism is T
MSSSPSFGLLALAAVLLALNLAQHGSLAATVGPRVIVVGAGMSGISAAKRLSEAGITDLLILEATDHIGGRMHKTNFAGINVELGANWVEGVNGGKMNPIWPIVNSTLKLRNFRSDFDYLAQNVYKEDGGVYDEDYVQKRIELADSVEEMGEKLSATLHASGRDDMSILAMQRLNEHQPNGPATPVDMVVDYYKFDYEFAEPPRVTSLQNTVPLATFSDFGDDVYFVADQRGYEAVVYYLAGQYLKTDDKSGKIVDPRLQLNKVVREIKYSPGGVTVKTEDNSVYSADYVMVSASLGVLQSDLIQFKPKLPTWKVRAIYQFDMAVYTKIFLKFPRKFWPEGKGREFFLYASSRRGYYGVWQEFEKQYPDANVLLVTVTDEESRRIEQQSDEQTKAEIMQVLRKMFPGKDVPDATDILVPRWWSDRFYKGTFSNWPVGVNRYEYDQLRAPVGRVYFTGEHTSEHYNGYVHGAYLSGIDSAEILINCAQKKMCKYHVQGKYD

SEQ ID NO: 4328 - protein, 213 aa, Zea mays
  VARIANT 154..213: note = Derived polymorphism lacks residues 154 to 213
  VARIANT 110..213: note = Derived polymorphism lacks residues 110 to 213
  VARIANT 6: note = Ancestral polymorphism is R, Derived polymorphism is H
  VARIANT 2: note = Ancestral polymorphism is W, Derived polymorphism is C
MWHVLRGAIVALVTVVLLSMLGPGSNDRVVEVEGSSSSSMADVYKGELTPLKRHIAFFDCNKDDAIYPSETYQGIDVIIYAIQDNIVRPNLNIGMDLWTDSPVKAETSGQGEINAATHSHHGSTLSMMDERELKRERRKQSNRESARRSRLRKQQECEELAQKVTDLTVVNGMLRSELDELKKACEDMEAVTSMVIKTALVAMGSGRLTQGSS

SEQ ID NO: 4329 - protein, 1060 aa, Zea mays
  VARIANT 192..1060: note = Derived polymorphism lacks residues 192 to 1060
MNLLTGRRQSDARRKRTQRTPLLRTNEGASEMDMAGRSRCRCSSHGRLLWLLLACSWVAAARGQQTARTDPAEAAALSTILGRWGLKASPGWNISGELCSGVAVDDTDVDNSPTINPSIKCDCSYDDNTVCHITKLRVYGLNVVGQIPAELENLTYLSNLNLMQNYLTGPVPSFIGKFPMQYLSLAINPLSGTLPKELGNLTDLISLGISLNNFTGELPPELGNLSKLEQIYFDSSGFSGPFPSTFSKLKNLKILWASDNDFTGKIPDFIGNLTQLEVLRFQGNSFEGPIPKSLSNLTKLTTLRIGDVVNGSSSLSFISNLTSLDVLILRNCRISDTLATVNFSNLAGLTLLDLSFNNLTGQIPQSILNLDNLGFLFLGNNSLSGSLPDIKSPSLNNLDFSYNQLSGSFPSWATQNNLQLNLVANNFILGSSNNSILPSGLNCLQQDIPCFRGSPEYSSIAVDCGSNKSFRGLDNTFYEMDPTNIGAASYYVTGQTRWGVSNVGKFNEAPNGSYTIDSSEQFQNALDSQLFQTARMSPSSLRYYGIGLENGNYTVELQFAEFAYPESPTWQSTGRRVFDIYIQGGLKEKNFDIRKTAGGKSYVAVYKKYNATVSKNFLEIHLFWAGKGTCCIPTQGYYGPMISALSVTPNFTPTVRNGVPKKKSKAGAIVGIVIGASVLGLAALAGIFMLVQKRRRAAQQQEELYNMVGRPNIFSNAELKLATDNFSSQNILGEGGYGPVYKGKLPDERVIAVKQLSQTSHQGKSQFVTEVATISAVQHRNLVKLYGCCIDSSTPLLVYEYHENGSLDRALFGDSGTILDWPTRFEIILGIARGLTYLHEESSVRIVHRDIKASNVLLDTDLTPKISDFGLAKLFDEKKTHVSTKIAGTFGYLAPEYAMRGHLTEKADVFAFGVLAMETVAGRPNTDNSLEEHRIYLFEWAWELYERDQALGILDARIEESDGEEAVIRVINVALLCTQGSPHQRPPMSRVVKMLTGDIEVPEVVTKPSYITEWQRRGGNSSYVTSGYSGDTTGEFSVQRETTAPLTPSPAMTGVIDDGR

SEQ ID NO: 4330 - protein, 274 aa, Zea mays
  VARIANT 75..274: note = Derived polymorphism lacks residues 75 to 274
MAAAQPKPAKRLGGMAEALAIAADLGFPASTTQEDQTSSDKSDDLVKVLRELTVVQRNIANLQVELQGRKVIFMKFCLPQDDKNIAHLTHVSEMEKKCESLARMTAILKDVIQNKDRIIARLQQPYSLDCIPVEAEYQKQFSELLLKAASDYGALTASVGDFQWSQNFRESPAVWGEMLRPIPAALASCTRFFEAMSAMRESFSTLQKLRVGHSSLSITPSDSSDDSKFLTPPQWRDGSILDSWKQMDDINLESSGIDAMNQRRLSWPSIKRDP

SEQ ID NO: 4331 - protein, 183 aa, Zea mays
  VARIANT 47: note = Ancestral polymorphism is R, Derived polymorphism is H
  VARIANT 36..183: note = Derived polymorphism lacks residues 36 to 183
MRLHGVGTRSLDGAAQVSVADNEGERCSSSGCERCWSSFEQVHTKRHNKLLHDRMKDLVFVKFNSRLKQKKDDMDKDPIEKRVHYVVLEDEDNKWITGIEPTKGDEEQEEETETSSQGVAAASQREIEERTKRVNWQKLRSRKRNRLIPSFPTFEEEESSPSSDEEDENDIDMLSRSDSEAEP

SEQ ID NO: 4332 - protein, 395 aa, Zea mays
  VARIANT 25: note = Ancestral polymorphism is N, Derived polymorphism is I
MAAAGDVLRVADLPGRGRGLVAARNVREGEVLLSEPPVLLYPSTLSSLRSYCSACFRSLPPAATIPCVSCRAAAFCSPACAAASHPHLLCAALSHGGGAGLAAAAPTEAIQEPLLFLLSAYSLPESTMRSMLSLSSAPPPPPGAQDAAGLHAAVAALAPPHMLPQGLSPDLTAALLAKDRGNSFAIMEPYRHGMSLELLKARAYAVYPRASLFNHDCLPNACHFDYPDRPGPGNTDIVVRALHDIPEGREVCISYFAANWRYADRQRRLLEDYGFRCECDRCQVESQWKDDDDNNGDDGDDTMEEEGEDDVGDRGDDGIEEEEGDGATNGGDDDFPHAYFFVRYLCDNEGCWGMLAPLPPSPNGDLSHVFECNLCGKLRKEEDVIPDEGTSGMVH

SEQ ID NO: 4333 - protein, 141 aa, Zea mays
  VARIANT 35: note = Ancestral polymorphism is P, Derived polymorphism is R
  VARIANT 32: note = Ancestral polymorphism is C, Derived polymorphism is Y
  VARIANT 17: note = Ancestral polymorphism is A, Derived polymorphism is V
MAWVDVPDCFCFHLWNVWEDAGTGEVVVVGSCMTRADSIFNDADDGRQLQSVLTEIRLDTRTGALTRRAVLPTSAQVNLEVNRNMLGRRTRYAYLAVAEPWPKVSGFVKVDLGATTLARQSGHVAWSGSHAPTQSAWNRCP

SEQ ID NO: 4334 - protein, 639 aa, Zea mays
  VARIANT 526: note = Ancestral polymorphism is F, Derived polymorphism is S
MPLYLFSSPAAAKLATGPHASLHRRRQFLFRVPHRPSRRAPLLTSAAERPAGRTMATADTGASTVTDSRLRATGVKQALISLSDKTDLANLGNGLQRLGFSIISTGGTASSLEASGVNVTKVEEITQFPEMLDGRVKTLHPSIHGGILARRDQEHHLKALKEHGIGTFDVVVVNLYPFYDKVTSGAISFEDGIENIDIGGPTLIRAAAKNHKDVLVVVDHKDYPALLEYLEGKQDDPDFRRTLAWKAFQHVASYDSAISEWLWKQSNKADSFPPSFTVPLTMKSTLRYGENPHQKAAFYGDRSLSLVNAGGIATAIQHHGKEMSYNNYLDADAAWNCVSEFESPTCVVVKHTNPCGVASRHDILEAYRLAVRADPVSAFGGIVAFNTTVDEDLAREIREFRRPTDGETRMFYEIVVAPGYTAEGLEVLKGKSKTLRILEAKRRRSGKGTLLSLRQVGGGWLAQEPDDVTPEDVAFTNVSERAPDARELSDAKFACLCVKHVKSNAIVIAKVGQHVLPLDDLSVIQFGLSILSLCVLMECTAGLVSLQNSCMLGMGSGQPNRLESLRIAFRKAGEEAKGAALASDAFFPFAWNDAVEEACQRGVAVIAEPGGSIRDQDAVECCNKYGVALVFTGVRHFRH

SEQ ID NO: 4335 - protein, 493 aa, Zea mays
  VARIANT 137: note = Ancestral polymorphism is K, Derived polymorphism is N
  VARIANT 378: note = Ancestral polymorphism is R, Derived polymorphism is I
  VARIANT 381: note = Ancestral polymorphism is S, Derived polymorphism is L
MTEMVVAARTPAPAAGRWGAAPPQELLERLKDYGQEGAFAFWDELAPEERDRLIRDIESLDLPRIDRIVRCSLRSQGAPIPTFEPVPESSVSTVDDRTPEDKERWWRRGLRAISEGKLAVVLLAGGQGTRLGSSDPKGCFSIGLPSRKSLFQLQAERILCIQKLAAQCTDAPGSTVQIHWYIMTSPFTDEVTRKFFETHRYFGLEPNQVTFFQQGTIPCVSHDGRFIMETPYKVAKAPDGNGGVYAALKSKRLLDDMAAKGVKYVDCYGVDNVLVRVADPTFLGYFIDRGVSAAAKVVRKAYPQEKVGVFVQRGKGGPLSVVEYSEMDAAMTTEINQTTGRLRYCWSNICLHMFTLDFLNQVTNSLEKDSIYHLAEKRIPSVHGYTSGLKLEQFIFDVFNYSPSTALFEVLREEEFAPVKNANGATYDTPDSARLMLLRLHSRWVVAAGGFLTHSVPLYMTGVEVSPLCSYAGENLEAICSGRTFHAPSEISF

SEQ ID NO: 4336 - protein, 339 aa, Zea mays
  VARIANT 187: note = Ancestral polymorphism is P, Derived polymorphism is L
MSAKTIVAAAAAAFLFYTHLYFPTAAHLYSSTTPLAGTLFDLTMPPPLYPLSADSTSIHHQYGCRYNPLCDDFPPDFPPADTPALSIFCVDPNGCCDFTTVQAAVNAVPNHSSKRNVVWINRGIYFEKVTVPASKPNITFQGQGFHLTAIAWNDTAKSANGTFYSASVSVFASGFIGKNISFINVAPIPRPGAVDAQAVAIRINDPVPSGQRSITGSVTAHARESEDDNTGYSFVNCSIGGTGSIWLGRAWRPYSRVIFAYTSMSDIIASEGWNDWNDQTRDQTVFYGEYKCTGDGANLADRVPYAQKLSDVQVLPYLNTSFIDGDQWLKPYCDSLISA

SEQ ID NO: 4337 - protein, 119 aa, Zea mays
  VARIANT 80: note = Ancestral polymorphism is Y, Derived polymorphism is C
  VARIANT 70..119: note = Derived polymorphism lacks residues 70 to 119
  VARIANT 56: note = Ancestral polymorphism is T, Derived polymorphism is M
  VARIANT 11: note = Ancestral polymorphism is L, Derived polymorphism is V
  VARIANT 6: note = Ancestral polymorphism is E, Derived polymorphism is G
MQKRQERAPHVFILLSHPPFLAPTHCHCTCVVLCCVLQEEEEEEEQVLRSLPARVTTSIYGGDHQAFAKQKLPKMAYDYYASGAEDEWTLQENREAFSRILFALDAQAIEGRFLIVTMY

SEQ ID NO: 4338 - protein, 455 aa, Zea mays
  VARIANT 349: note = Ancestral polymorphism is A, Derived polymorphism is P
  VARIANT 339: note = Ancestral polymorphism is S, Derived polymorphism is W
  VARIANT 124: note = Ancestral polymorphism is D, Derived polymorphism is N
MVVEANSGSTLAAVGVAGTGSSMAVHGHQLSTVVPSSVTGEEVNYELADADLLHKLHYVRAVHVFRAPTGVAAPPLTIRELKEPMFPWLDMYFPVSGRLRRRQAAEGEEAAAAAVGRPYVRCNDCGVRIVEVTCGATVEQWLEAEAERGGLCKALAYDKVTSFKCGGMALGFTWAHLIGDIPSAVASFRKWAQVLGGNKAPAPTLRDPLAVPPSAPPTSVTVPPSVKATAAPVGDHWVVPTTHDMVSFSFHVTEQQLQGLQLSATKGHHRREVVGPFELVSALMWRALAAIRGPEEEEATRMVTVVKTGPAPTSGGGPRPALTNEHRIGHVVFATGGSSPATADVAKLAALLAGAHLEEASAVAAAAFAGADDADVVVYGANLTFVEAEGLEVYELELAGRRPAHVEYAVDGVGDGGAAVVHRDAGGRGRTVAAVLRRGEAGRLRAAIRDALRVA

SEQ ID NO: 4339 - protein, 267 aa, Zea mays
  VARIANT 6: note = Ancestral polymorphism is T, Derived polymorphism is R
  VARIANT 20: note = Ancestral polymorphism is T, Derived polymorphism is S
  VARIANT 30: note = Ancestral polymorphism is L, Derived polymorphism is V
  VARIANT 31: note = Ancestral polymorphism is L, Derived polymorphism is F
MDPKMTEVTQMFARFKAAYTRNDLDACVTLLSQLKVHLTKFPSLPPSFEQTPKAVEELKLARDIYEHAVVLSVKLEDQDAFERDFCQLKPYYMDTCGIIPPSPEEYPILGLNLLRLLVQNRIAEFHTELELLPVKALEHPCIKHAVELEQSFMEGAYNRVLSARQAVPHETYVYFMDLLAKTVRDEIAGCSEKGYDSLSVSDAKQMLMFSSDQDLHEYITEEHPEWELKNGAVFFQKAKESQPYKEIPSLQLINQTLSYARELERIV

SEQ ID NO: 4340 - protein, 455 aa, Zea mays
  VARIANT 111..455: note = Derived polymorphism lacks residues 111 to 455
  VARIANT 106..455: note = Derived polymorphism lacks residues 106 to 455
  VARIANT 63..455: note = Derived polymorphism lacks residues 63 to 455
  VARIANT 12: note = Ancestral polymorphism is A, Derived polymorphism is S
MAAAAGDGAGEARARALLQQHRPFATPPGEYHHFGAPSAAADEMVEAVVLRTPLKRKHNDRTENEAAESNDWMSPGYANAGSSPVPTPPSGKGLKASTKPKATKGQKSGPQTPLGFGSPGNPSTPVGGCRYDSSLGLLTKKFLNLLKGAPGGIVDLNNAAETLEVQKRRIYDITNVLEGIGLIEKKLKNNIRWKGVDDSRPGEVSDDMSILQADIDALTLQERNLDERISEMRDRLRGLTEDENNQKWLYVTEEDIKSLPCFQNQTLIAIKAPHGTTLEVPDPDEVNDYPQRRYRIVLRSTMECTSPTCLPNIVLLVDHSQFEEMSGMETPPRPTQTISMDSLENPRTPLAADCNKVTGMESNIHGGLILPSDAPSSSQDISGMMKIVPSELDADTDYWLLSDNTGVSMTNMWETGPDEWDGIEKFNAEDFLEVGTPQQQDKPADVVDDDPSCII

SEQ ID NO: 4341 - protein, 225 aa, Zea mays
  VARIANT 181: note = Ancestral polymorphism is Y, Derived polymorphism is N
  VARIANT 89: note = Ancestral polymorphism is R, Derived polymorphism is I
MAEATAYEEQRRRQVEANKRKLEELQLHYLSAAVREAAAAAKPSPVKKRKARVPLDAADSVMEPLRRSGRLANLPDKSVHREEVPTFWRKIRRTYGSVRKDLENRVYATDEARSYAICKAEEVEQELDSSFPVFIKPMTQSHVTGGFWLGLPNHFCRKYLPKRDETITLLDEDDNESYTLYLALKRGLSAGWRGFAIQHKLVDGDCLVFQLTERTKFKVSDTCFG

SEQ ID NO: 4342 - protein, 439 aa, Zea mays
  VARIANT 270: note = Ancestral polymorphism is H, Derived polymorphism is Y
  VARIANT 158..439: note = Derived polymorphism lacks residues 158 to 439
MDRPINIRTSPRTPLSLSEQQTIKEFWRKKQEEIEAIEDFGEHTIPVTCLKKVICAKKGKMMMTSDTPTFMTKACKIFVQELSLSAWMCANSHNRSIVLDSDIAESIASIESYGFLNDVLCAHLEKYKSDTHLQSIKNPHHNRAINQSPTYLQPLSHQYQMTQFIPQSTRYCPFIHIPPTLPQTNDIHMHLPLPLPPITYMTKDLVFFEKGISNNDDAIDLVTPPQLLPEALSNIPNKCYMCNIASTDTYCVGSAKTCNFIAEDGDMVFHFPYVPSKPFQLSTSLPMTNGGCSIYTDITELNHIKLKVTHIEKSTYGINPEATFNVIDGQQHAGDETTAANHMHTEHGELDAEFVTTTNANADDNNINWDEVDMASDSMLMEFWRDVMMKEDPTSLPDTISTNDTILDPSDMLELEGCCDDSYLLDDVMSNTSNDVRHG

SEQ ID NO: 4343 - protein, 253 aa, Zea mays
  VARIANT 119: note = Ancestral polymorphism is V, Derived polymorphism is I
MGSGSNSKEGEERVLSHGDVVLIRSDLAILRGPCFINDRIIAFYFAHLSASLQDDDLLLLPPSIPYLLSNLPDSAAVAAVAEPLRLASRRLVLLPVNDNPDASIAEGGSHWTLLILDNITSPSVPRFVHHDSIAGAPNLPIAARLADALRPLLSGSNSKRDTVPLIEGPTPRQTNGYDCGVYVMAIARALCAWWKSGQDQRGGDWFQAVRSGVDAHSVEAMRTDLLQLISTLIQEKANANSTPMGDTDPGSLE

SEQ ID NO: 4344 - protein, 221 aa, Zea mays
  VARIANT 35: note = Ancestral polymorphism is S, Derived polymorphism is Y
MSYCYGYKFMNCPLFSGSGKMQPHEKVAVLKPVASRPFSSFWPFPKFLHDFNATCSPTITFPQETELIRPKATRLASLPGDLPTQIAATTDAGSDTMSEEVEGYAKHHTYRDHATACQAARRNGERSRLSLDGYSWRKYGQKKVKGSEFPRSYYKCTHPSCPVKRKVETTPDGQVAEIVYSGEHNHLKPGKPCPPRKPLLSTSTDAVMCDTHGIDDMTPPE

SEQ ID NO: 4345 - protein, 332 aa, Zea mays
  VARIANT 300: note = Ancestral polymorphism is T, Derived polymorphism is A
MIGGGRAADSHPASCSSSSSSSSSPSGPSTGGSRLHRSKRRPDILNMLMSAACLSSSSSDTGKGQSKFSSNKVTHGFHLVEGRSGHDMEDYHVAEYRYENDHELGLFAIYDGHLGDSVASYLKANLFDNILKEPLFWSDPQEAIKNAYSSTNKYILENTRQLGPGGSTAVTAIVVDGTDMWIANIGDSRAVLSETGTASQVTVDHEPHTTNERKRIEEKGGFVSTFPGKHLLLIGDVPRVNGQLAVARAFGDQSLKAHLSSEPDVKHIKINSSTEFVILASDGLWKVMKNQEAVDLVKSTKDPQTAAKRLTSEALGRMSKDDISCIVIRFRC

SEQ ID NO: 4346 - protein, 251 aa, Zea mays
  VARIANT 152..251: note = Derived polymorphism lacks residues 152 to 251
  VARIANT 71: note = Ancestral polymorphism is E, Derived polymorphism is K
  VARIANT 3: note = Ancestral polymorphism is E, Derived polymorphism is K
MAEAECRASDSADDFEFCILLSDGIVPAGESAGTDMCVADEVFCQGKLLPLRASSVAAADGASVATLPRSESVASTVGLVSRSGSRSTSLSSSGSSSGCVSRSQSSKSASSDHGAGAPPPRRSLLSILFFAHPSPSPRLRSARPRRSTGSAQPAAAAWGLFRFHLGVVGAPDVYPPPPRPAVDAKVTAAARGGGSRSARFEQVAAAVDRIGAGQLGERGAWGGGMDRGSRCSREAWACFGVGCYVVASDGR

SEQ ID NO: 4347 - protein, 217 aa, Zea mays
  VARIANT 19: note = Ancestral polymorphism is V, Derived polymorphism is A
  VARIANT 36..217: note = Derived polymorphism lacks residues 36 to 217
  VARIANT 50: note = Ancestral polymorphism is M, Derived polymorphism is I
  VARIANT 52: note = Ancestral polymorphism is R, Derived polymorphism is K
  VARIANT 152..217: note = Derived polymorphism lacks residues 152 to 217
  VARIANT 156: note = Ancestral polymorphism is R, Derived polymorphism is Q
  VARIANT 200: note = Ancestral polymorphism is G, Derived polymorphism is D
MTHLEDLRTVAAAGTLPQAVRQRAARQKLTASAPARTVDKGSYEVVFKAMGRAINKTVMVVELIKRRIVGLHQNTTTGSTDMWEPLEECLLLLETTRHVSMITITLSKKEVDTSSIGYQSPLPADEVKPLVKCDTDEDAHSPGGRGRGRSGRGRGQGRGRGGRGNGFNEFADAGWEDDHAPAYMGNGYARGRGRSFRGRGRRGGYNNQPEYQQDGGY

SEQ ID NO: 4348 - protein, 171 aa, Zea mays
  VARIANT 13: note = Ancestral polymorphism is A, Derived polymorphism is P
  VARIANT 14..171: note = Ancestral polymorphism lacks residues 14 to 171
  VARIANT 127: note = Ancestral polymorphism is V, Derived polymorphism is A
MLRISRVPIRIAASTWAKHWTRSIYRCRFLPVVCSKNYMLLPLARPGSSARTASSEVTVHFWAPTFKWGISIANIADFAKPPEKISYPQQVGTAKLPNQFKLYPCISDNMDITVACTGIIWSRYSLVITPKNWNLFSVNVAMAGTGLYQLSRKIRQDYLSGEKDAAPQLQE

SEQ ID NO: 4349 - protein, 95 aa, Zea mays
  VARIANT 91: note = Ancestral polymorphism is C, Derived polymorphism is Y
  VARIANT 76: note = Ancestral polymorphism is S, Derived polymorphism is L
MLQRLMTFQRARAMSMEGGALGSTAVTDSAMAKAGAVDPDLALALQMSVQDANMSSDTDMSKVFEDITFVSSILNSLPGVDPNDPSVKGLCIVMQ

SEQ ID NO: 4350 - protein, 423 aa, Zea mays
  VARIANT 203: note = Ancestral polymorphism is I, Derived polymorphism is T
MAQGINFPDFIGAVGGHDGGVDFGGNFCDMAFYQKLGEGTNMSVDSLNSMQTSMHGGSIAMSVDNNSSVGSNSDSRTGMLGHPGLKGPAIVGSYSVGHSIFRPGRVSHALSEDALAHALMDNKFPTETLKDYEEWTIDLGKLHLGMPFAQGAFGKLYRGTYNGMDVAIKLLERPEADPEKAQLLEQQFVQEVMMLATLRHPNIVKFIGACRKPLVWCIVTEYAKGGSLKNFLSKRQNRSVPLKLAVKQALDVARGMAYVHGLGFIHRDLKSDNLLISGDKSIKIADFGVARIEVKTEGMTPETGTYRWMAPEMIQHRPYNQKVDVYSFAIVLWELVTGNVPFANMSAVQAAFAVVNKGVRPAIPHDCLPALAEIMTMCWDTNPEVRPPFAEIVRMLEQVEVEVLTTVRKARFRCCIAQPMTLD

SEQ ID NO: 4351 - protein, 592 aa, Zea mays
  VARIANT 186..592: note = Derived polymorphism lacks residues 186 to 592
MAAAPHQAQGPADSVIPLQSEPALDNNPSKSANARDQILSGTENVTTGNARGGSSLKSQKGPPEKASSVGKPGEQPFPYHQNVYAPQPQPLYPGGYMNPSGQWEEYPHYVSMEGLHSVSPGIYNDNQSLMLSPGYANNPQMMYGAYSPVSTVGDGQQYLPMHFPFSSPYYQPPASPSMGYSSSATGISQGDPMLQQEYFLPDGLLYSPTQGYHQPFSSFDRAPTQLNNAPGLFGQGNLPLASGMHHGSMYGPGSYKGRQQGSKFGGSTTSWSSAGRRFGTIDLSGNQQRGSMPFGSHNGSLEFMNEQNRGPRATKPKIQGTENTSGDERSEKIVPLIDSELYNRSDFITEYKDAKFFVIKSYTEDHVHRSIKYKVWASTASGNRKLDSAYHAAKEKEEHCPIFLFFSVNGSGQFCGVAEMIGPVDFDRSVDYWQQDKWSGQFPVKWHIIKDVPNNLLRHIILENNDSKPVTNSRDTQEVKLEQGLQMLTIFKNHEAETTIVEDFDFYEQREKALQENRRQQQPPTTYPQKLVDTNAQGPVADISDAFAKAVQLKDTANSGTTPKAEGASAENGSAATAKVEGSANLNTGPVE

SEQ ID NO: 4352 - protein, 178 aa, Zea mays
  VARIANT 105: note = Ancestral polymorphism is T, Derived polymorphism is M
  VARIANT 104: note = Ancestral polymorphism is V, Derived polymorphism is I
  VARIANT 79: note = Ancestral polymorphism is H, Derived polymorphism is Q
  VARIANT 64: note = Ancestral polymorphism is R, Derived polymorphism is W
  VARIANT 58..178: note = Derived polymorphism lacks residues 58 to 178
  VARIANT 56: note = Ancestral polymorphism is V, Derived polymorphism is G
  VARIANT 41: note = Ancestral polymorphism is L, Derived polymorphism is M
  VARIANT 22: note = Ancestral polymorphism is A, Derived polymorphism is V
MPPSYPIEPCVAVLTIGVTLPAATVTTILSRSPLPHPILSLPYLVSLAAWARTLGVQQESSPARKMYVVKRDERRETVQFDEITVRLKKLSYGLSQDHFNLMLVMQKGYYLADEPGVHFVWQPNQESSVLIMSRAFDDYYIEDCCVILASEVTQRRIDNSDQFVILATVRVAFVPTCL

SEQ ID NO: 4353 - protein, 425 aa, Zea mays
  VARIANT 255..425: note = Derived polymorphism lacks residues 255 to 425
MAIGLLAFESHQGLWNSGYYSQLFGIGGVLITLTILMLSTGYFGGIGAPFAPYFWPYLGQVPKKRERKRPVRVYMDGCFDLMHYGHANALRQAKLLGDQLVVGVVSDEEIVANKGPPVLSMEERLTLVSGLKWVDEVVPNAPYEITEEFMNTLFNKYSIDYIIHGDDPCLLPDGTDAYALAKKVGRYKQIKRTEGVSSTDIVGRILLTFRQKDADTDLSVVVAEKSGEKSNDEVKSQLSHFLPTSRRIMQFSNGQAPSPGARVVYVDGTFDLFHAGHVEFLRSARQLGDFLLVGIYDDESIRDRRGCRPIMHLHERTLGVLACRYVDEVIIGAPWEVSKDMITTFNISLVVHGTVAEGNSAGEIDPYAVPKSMGIFQTIRSPKSITTLSVATRIVDNHEAYKKRNLKKKASEDRYYTQKKFVSGD

SEQ ID NO: 4354 - protein, 160 aa, Zea mays
  VARIANT 127: note = Ancestral polymorphism is E, Derived polymorphism is G
MADLVAVGIKRRDAEVGSHGFPILLGPKRIKLEDEAEIPEPMEEEEPLADVDADAGAAAPVVVQAQPAVSVSMPSPSPLQPAQGHEEAAVLREPQPGLQQAAPMDVEEDFRQPQPQPGLHPRFWSGGRLWSVLMAGAPVCASVQQPKSGAPLFQAAFVTC

SEQ ID NO: 4355 - protein, 316 aa, Zea mays
  VARIANT 88..316: note = Derived polymorphism lacks residues 88 to 316
  VARIANT 65..316: note = Derived polymorphism lacks residues 65 to 316
  VARIANT 21..316: note = Derived polymorphism lacks residues 21 to 316
MTEGEGQSESASAPEGVSGLRRNSDDVGWEYGVLVDINNKDKVKCILCDKQMCGGVYRLKQHIAQEGNNAKKCQSMKTTKEKLLEAQEKCKKALDEAKRKREEKTIHELELREEVHVSRVGGSEEVTCVGSSEPHKLGPMDKWTKAIDPTATKSESLTQQRLNKELWKERLHDVHKYIARWAFNHAISFNACDNDEFKQMCEAIGQFGPGIEPPTMFDLRGRLLEEEYARTKSLLQEREAEKMKNGCSIMTDAWSDKKRRSIMNVCTNCGDGTSFISSKEMSDVSHTSEVIFELVDTSSTEGGYQDPIFNNKFFWL

SEQ ID NO: 4356 - protein, 141 aa, Zea mays
  VARIANT 134: note = Ancestral polymorphism is W, Derived polymorphism is C
  VARIANT 25: note = Ancestral polymorphism is R, Derived polymorphism is H
MPKPHHLHRRWEGEHCVQAVQAHLHRAVVHAVASAGQQDPKLGGLLQGRLHLQGSRAARESRQRRTARTETVKDGDNKDDEVMRCLPKEVNVDALLSGDVTGLKGLESALLLRLQHDLANRARDDVLTTAIDICLAIAFDL

SEQ ID NO: 4357 - protein, 359 aa, Zea mays
  VARIANT 260: note = Ancestral polymorphism is H, Derived polymorphism is Y
  VARIANT 247: note = Ancestral polymorphism is V, Derived polymorphism is I
MPLTVWADPIAGDARQQGAHMLEVIRYSTLHRRRGVGTGGRRCVESVGFTVGGYQWAILFYPDGDDAPGSSGYVSVSLALLTRPARVRASFNLGLVNRATGLPSFQPKDTTAVFDNAACCCRMYPIPTCRHERKRSCHGMPRLVKRCDLEAYLRDDAVTVACVVTAVTGTALTSRGAPEIRVPGGNLHLHIGELLVSKEGADVTFGVDGEAFAAHRIILAARSPVFEAELYSSTCTAETTDARTVVVGDMRPDTFRALLHFIYTDSLPAMSHMGMDETRELVQHLLAAADRYAIDRLKAMCEHILARTLHVDNAASTLVLADRHGCDTLKHASIYFIASSDNSEMGHDDVSVEALEKTV

SEQ ID NO: 4358 - protein, 142 aa, Zea mays
  VARIANT 73: note = Ancestral polymorphism is K, Derived polymorphism is T
  VARIANT 71: note = Ancestral polymorphism is G, Derived polymorphism is R
MAGGKRSKLLQGAPPPPPPPQWSDVRGLLHMRLTDAAAELNVSITYLRRLCRQNGFAQWPGKKIRYMNSTGKKVMLEADDALLDASPSAGLAGTSGLRQAMSAETRNEEEDDEPVANQELTTLNLIDKVGSSSSPSRSDGRS

SEQ ID NO: 4359 - protein, 353 aa, Zea mays
  VARIANT 25: note = Ancestral polymorphism is N, Derived polymorphism is K
  VARIANT 18: note = Ancestral polymorphism is Q, Derived polymorphism is E
MSSLTVSSFTPEIMYSAEVKFRVDKYNERKNLGYATFIRSPTFTVGGYEWTLNYYPDGRSEQTEGHVSVALELTGTENVWAILSLTFAGEVDRSAWAGWATAAFLNRNNNFLFSWPEVRSGVLEQMGLVRDDCLEIQCQICVHRPNQLLKPGSLPEVEVPASDTLQNLGRFLVDHVTADVTFKVQQETFLAHRIMLAACSPVFDRQLLSGEMREKDMGCVLVHDMQPVVFKALLHFVYTDSLVGIGDMVVVGDQIELIRHLLVAADRYCVDRLKSICEAILCKCVDMESLLTTVALADQCHCMKLLAACVEFLKYSAQTDMVESQWYKVLRDNHPDVADEICKGVKDVRKLIN

SEQ ID NO: 4360 - protein, 675 aa, Zea mays
  VARIANT 141: note = Ancestral polymorphism is G, Derived polymorphism is V
MDQTVSALHKRIETLSLQASALRDALQRSEENTDSAVAALDSFDHHISAIEASIRPAQVRAQAITMANENIDRTIETAEAILAQFEIIRRVRDCSRPPASTEAVIVRGPRADLKSFLEAMALLKGVIHFFSSNKKFKSCEGVLNQVNNLLTKSKLKIEEEFRQLMSTYSKASEPTHLFDCFPNPLLASEGNSRAVGEQLSKSFESATYRTPTLIPPRILPLLHDIAHQLVQDGNQQLCYRIYRDARSSALELSLQKLGIEKLTKRSMQPWLASGTWNQIMHVTVKVLLAGERKICNQIFDGITFNKDQCFAEVTGSSVMTLLSFGDVIAKSKRSHENLFVLLEMYGLMHGLRSEVEVTFQGKFCSGMREAALSLTKSLAQAVQETLVDFEVAVEKNNSKTTVQNGNLHPFTIEVINYVKGLFDYQSTLKILFQQSESDSETESELATVIMKVMQAFQNNLNGKAKQYKDPALYHIFLMNNLHYMVTSVSKSESKDILGGDWIQRHRKIVQQNANQYKRVAWAKVSASSAIGCRMHYEPRRRIQPQRLSSINWIQIFQTLSIQVSGGNSSSSPCDVSKTGVSRTMIKERFKSFNIQFEELHSKQSQWTIPDQELRDELRLAVAEILLPAYMSSLAVLGILFNVRRTLTSTSNTHKKNWINCWVSSSKDTKLVNRSS

SEQ ID NO: 4361 - protein, 285 aa, Zea mays
  VARIANT 120: note = Ancestral polymorphism is W, Derived polymorphism is R
  VARIANT 88..285: note = Derived polymorphism lacks residues 88 to 285
MEVQMGKAPPCLNPFLMVNPLLPPQHVSPWSSKSVPVFQFGMTNGHGALDLCEESKRARKVVHLEYLFSKVLTPSDVGKLNRLLIPRQCAEGFFPMISEVKSGGDDIFLNFEDTSTGLVWRFRFCLWNNSKTYVLTKGWSVFIKEKNLKKGDILSFYRDASKSIRTNHLFIHIKPHTGTMPLPHHVPSPVFSPSGMVIDDQVHDSLNIGKSHGIAPSWKPLSFGSGELMPSTNPTPQQTTFPESTSLANSIVMAEKHLRLFGVDIDIPTHRYGDESSDGFIKNIA

SEQ ID NO: 4362 - protein, 52 aa, Zea mays
  VARIANT 44: note = Ancestral polymorphism is R, Derived polymorphism is C
  VARIANT 42: note = Ancestral polymorphism is R, Derived polymorphism is I
MMEKERGNLLKALGTQVAEPLRAMVMGAPLEDAHHLAQRYDRMRQEAEAQVI

SEQ ID NO: 4363 - protein, 164 aa, Zea mays
  VARIANT 71: note = Ancestral polymorphism is A, Derived polymorphism is T
MARLLTQTLTLARPASSPSTTAASASLRGLATKVEIIEIDLAEEDAGSSSHGSPSSSPSVEAVGIRRLEEAIHGVMVRRAAPDWLPFVPGGSFWVPPLRRPHGVAELVGRIAAAGGTEGGAGAVGGAVEVLELDAPMTEEQAFCFSTTRGWPSASFFVEGESPS

SEQ ID NO: 4364 - protein, 472 aa, Zea mays
  VARIANT 159: note = Ancestral polymorphism is S, Derived polymorphism is P
  VARIANT 181: note = Ancestral polymorphism is I, Derived polymorphism is S
  VARIANT 202..472: note = Derived polymorphism lacks residues 202 to 472
  VARIANT 226: note = Ancestral polymorphism is L, Derived polymorphism is F
  VARIANT 279: note = Ancestral polymorphism is E, Derived polymorphism is V
  VARIANT 319..472: note = Derived polymorphism lacks residues 319 to 472
MATSGPVLLVSQAQQRKSRTYTPSPWGDFFLHHVPCTPSQLLSMKERAKVKEQQVRQIIHETIASSDLLHVFEKFRDESGAIVSGDDASCLLMLHDAAHARTHGEEILDGIVAWSKSRLQSLVVQKNLLEPELAEEVRCALETPRFRRVKRVEARRYIPVYEKKSTRDETILEFAKLDYNISQAIYCDELKELTIMVELHFWMLGVIHDPYCSRIMIVKIFVFISLFDDLMDNYSTTEESNVFTAAMERWDEQMAQQLPAGLKALLVRIFNATNKIEEELKLQGNMHAELIKKMVINSAKFYHAEVKWRDEHFVPTSLEEHLQKSIPTSACMQMANLALVSLGNVTTREDVEWVFTFPKIIRGACIVGRIANDIVSHEREQASSDHVASTVQTCMKQYNVTIKEANEKLRAVIEEAWMDIVQDSLEQERPRALLDIAINVARVADFMYKREDAYTLSFVIKDIIASMYIYSV

SEQ ID NO: 4365 - protein, 76 aa, Zea mays
  VARIANT 26: note = Ancestral polymorphism is R, Derived polymorphism is H
  VARIANT 24: note = Ancestral polymorphism is K, Derived polymorphism is I
MSCIGTIFLTCLDLLAGIGWKSWKKRWFILTRTSLVFFKSDPSTLPQRSGKVNLTLGGIDLKLPQRSGEVNLTFWE

SEQ ID NO: 4366 - protein, 106 aa, Zea mays
  VARIANT 58: note = Ancestral polymorphism is R, Derived polymorphism is C
  VARIANT 53: note = Ancestral polymorphism is A, Derived polymorphism is T
  VARIANT 48: note = Ancestral polymorphism is K, Derived polymorphism is E
  VARIANT 47: note = Ancestral polymorphism is R, Derived polymorphism is H
  VARIANT 23: note = Ancestral polymorphism is E, Derived polymorphism is K
  VARIANT 13: note = Ancestral polymorphism is P, Derived polymorphism is L
  VARIANT 8: note = Ancestral polymorphism is Q, Derived polymorphism is K
MEFQSSSQVLPSPYYWVKCKPDEPIPVSQPNQGSVRGRKEKKRIKQRKDFIMAEKKKRRAQYSAAVKRKEAERTERKMAAVARERAWVARLIELKQLEEEIKAVMA

SEQ ID NO: 4367 - protein, 102 aa, Zea mays
  VARIANT 53: note = Ancestral polymorphism is A, Derived polymorphism is G
  VARIANT 58: note = Ancestral polymorphism is T, Derived polymorphism is I
MLSGQSLSNTGTSYLEFISGPVLKQGQVAVVEPQHKGTYPLKPPSIGKNVSFASPIATVLGGHNSSVMCEERQNSVARVGSAASPNHDGGGWLKFVGQHCCS

SEQ ID NO: 4368 - protein, 496 aa, Zea mays
  VARIANT 160..496: note = Derived polymorphism lacks residues 160 to 496
  VARIANT 72: note = Ancestral polymorphism is D, Derived polymorphism is N
  VARIANT 41: note = Ancestral polymorphism is P, Derived polymorphism is S
MGCGGGERMEEDEAGTASSSSSPPIVQLGYDQVLSVLRLLPPEAVLSFAATCRVFRAWASSDALWEALCCRDWGSRATAALAERRRDRGGGLQAPWRRVYAEVARLGALSARRVPARGASPRPRASHSLNLVAGWLVLFGGGCEGACTFNALISFHPCCQCFLSLITDNGPDLGHHLDDTWVAYAGSGAGNRPPPILSWQQLASGTPGGRFSHSCLLVGDTLVLFGGITDQGQRLNDTWTGQIICEEPRRPRISWRLLEVGRLAPPPRGAHAACCVDDKFIVIHGGIGLYGSRLGDTWLLDLSNGLQSGSWHQIGNTWPLPQPRSGHSLTWIGSTCMVLFGGRGSEFEVLNDVWLFDISDQYPKWKELKYGLSSALGELPFPRVGHSAILVLGGKVLVYGGEDSQRRRKDDFWILDTPALLQYESGSKKMTRKMWKKLRIDGQCPNYRSFHGACVDASGCCVYIFGGMVDGLVHPSEALGMRFDGHLYQVELVLHL

SEQ ID NO: 4369 - protein, 237 aa, Zea mays
  VARIANT 132: note = Ancestral polymorphism is P, Derived polymorphism is L
MVHGSASTPTRDIVGSAPLIPTAPSHDRTWMPSPPDLAHALVLTQPHRHHHASALYLPRQSRIGARPSPAEVAYVQIPTIPSELLSSFVVSYQDALPIAPRSRPLDPGDSCTGFYAGAGPAREVWAPALFFLKYGAPVPWGTLPTILAVEFVAIAFAEHQRTMEKDPEKKNSKDTLKLQEYKLKEIKNGRLAMLAFVGFCIQSAYPGTGPLENLAAHLADPWHNNIGDIIIPRSISP

SEQ ID NO: 4370 - protein, 247 aa, Zea mays
  VARIANT 85: note = Ancestral polymorphism is E, Derived polymorphism is D
  VARIANT 154: note = Ancestral polymorphism is Y, Derived polymorphism is D
  VARIANT 184: note = Ancestral polymorphism is I, Derived polymorphism is M
  VARIANT 186: note = Ancestral polymorphism is I, Derived polymorphism is T
MSSAEAKAAAKAVPESVLRKRKREEQWAADKKEKALADRKEALDSRKIIFARAKQYAQEYDAQEKELVQLKREARLKGGFYVSPEAKLLFVVRIRGINAMHPKTRKILQLLRLRQIFNGVFLKVNKATINMLRRVEPYVAYGYPNLKSVRELIYKRGYGKLNKQRIPLSNNNVIEEGLGKHNIICIEDLVHEIMTVGPHFKEANNFLWPFKLKAPLGGLKKKRNHYVEGGDAGNRENYINELIKRMN

SEQ ID NO: 4371 - protein, 311 aa, Zea mays
  VARIANT 197: note = Ancestral polymorphism is K, Derived polymorphism is N
MAVDLMSCGGGAYEQLAFQEAAAAGLRSLELLASSLSPCGAGRAESPPLGQIADQAVSRFRRVINLLDRTGHARFRRAPAVAAVEPIETETPASQQAAAEPPHQAQNKALTLDFAKSVPPAANKKAPRAPAVSATSTSFLSSVTAGGEGSVSKGCSLAAVSSGKPPLPKRTSPCPAAAPPGAHHAESGAGGCHCSKKKRSRQGLSRRTVRLPAAAATPGSQPPGHVPASSDVPHDEYSWRKYGQKPIKGSPYPRGYYRCSSAKGCPARKHVERAADDPAVLVVTYEGDHRHDGDGDGDGGVGAGAARSRAA

SEQ ID NO: 4372 - protein, 287 aa, Zea mays
  VARIANT 4: note = Ancestral polymorphism is L, Derived polymorphism is H
  VARIANT 6: note = Ancestral polymorphism is P, Derived polymorphism is L
  VARIANT 9: note = Ancestral polymorphism is C, Derived polymorphism is S
  VARIANT 28: note = Ancestral polymorphism is A, Derived polymorphism is E
  VARIANT 32: note = Ancestral polymorphism is A, Derived polymorphism is G
  VARIANT 76: note = Ancestral polymorphism is Y, Derived polymorphism is N
  VARIANT 173: note = Ancestral polymorphism is G, Derived polymorphism is D
MAAHLPSFCSRHASMAVAAALMIVMATEAPAGVALLKDDIGFMWGPDHSFFYDDGNALALCLEKSHGSGFRSNAANLYARYDIDVKLVANDSAGTVTTVYLTTDDVRPGYHDEVDMEFLGNVTGEPYTLHTNIFVNSVGNREQQFRLWFDPTKEFHTYSVEWTPKNIIFLIDGTPIRVYKHEPSLGGTFPTQRHMRLDGSLWNADDWATQGGRVKTDWTRAPFYAYYRNFRVTPCAPSSPSGVASCSDEPPAPAVLQKVRAEHLLYDYCEDQNRFKDTGLPKECTAD

SEQ ID NO: 4373 - protein, 286 aa, Zea mays
  VARIANT 221: note = Ancestral polymorphism is S, Derived polymorphism is Y
  VARIANT 86: note = Ancestral polymorphism is S, Derived polymorphism is F
  VARIANT 58: note = Ancestral polymorphism is Q, Derived polymorphism is E
MSMDRMARRSVSLLLALALLAAAASADSWLYEKFTTEGNVRADYNAQGQQVTSLILTQQSGGAFSSRQKYLYGEFSIQMRLIPGNSAGTVTSFYLSSGDGPGHDEIDMEFMGNASGQPVVLNTNVWANGDGKKEHQFYLWFDPAADFHTYTIIWNDKNVIFKVDDLFVRCFKRYPDLAYPGGKPMSVHATLWDGSYWATQQGKVKVDWSAAPFAVSYRGYSADACVPDGDGRPLSCPAGTDRWMSRQLDAAEWGTVAWARQNYMHYNYCDDGWRFPQGFPAECSRN

SEQ ID NO: 4374 - protein, 281 aa, Zea mays
  VARIANT 218: note = Ancestral polymorphism is S, Derived polymorphism is R
MAPRSLLAVLAVAALAFLHAASAKSSWLDRRFTTDGTVRTGYDDSGQQVVMLRLDQHSGAAGFNSKEQYLYGEFSVEMKLIRGNSAGTVSCFYLSSGDGDGRDEIDMEFMGNSSGQPVVLNTNVWASGDGKKEHQFDLWFDPSADYHTYTIIWNPTNILFKVDDLFIRSFKRYADLPYPSSRPMTLHATLWDGSYWATEKGRVGIDWSDAPFVVSYRSYYASACVSGGACRAAGSGGWMNRQLDSAEWGTVRWAERNFMRYNYCQDGWRFPQGLPAECARH

SEQ ID NO: 4375 - protein, 165 aa, Zea mays
  VARIANT 145: note = Ancestral polymorphism is R, Derived polymorphism is H
MKRPRLRPGGAGGAQCPSCAVDGCKADLSKCRDYHRRHKVCETHSKTPIVVVTGREMRFCQQCSSWCFLMYFAEVPLSFARRPRACPVMHLIYLATIDSAEKHDPPKRAITFRGLLQSSYIRGESRFFDHGPVYNLFMAKVGSVHHRRSNLTLIMISSAEGTVID

SEQ ID NO: 4376 - protein, 280 aa, Zea mays
  VARIANT 239: note = Ancestral polymorphism is S, Derived polymorphism is R
  VARIANT 72: note = Ancestral polymorphism is E, Derived polymorphism is D
MARRSLALLLASSLALMAAAVASADSWLYDKFNTDGTVRTQYDASGQEVAMLSLDRSSGAGFNSKEQYLYGEFSVQMKLIPGNSAGTVSCFYLSSGDGDGHDEIDMEFMGNASGQPVVLNTNVWASGDGKKEHQFDLWFDPSADYHTYTIIWNPANILFKVDGDVIRCFKRYADLPYPSARPMALHATLWDGSYWATEKGKVPVDWSAAPFVVSYRGYSANACVSGGACGGGGDDGWMSKQPDDAEWGTIRWAESNYMRYNYCDDGWRFPQGLPPECSRS

SEQ ID NO: 4377 - protein, 149 aa, Zea mays
  VARIANT 61: note = Ancestral polymorphism is S, Derived polymorphism is L
  VARIANT 26: note = Ancestral polymorphism is A, Derived polymorphism is T
  VARIANT 23: note = Ancestral polymorphism is A, Derived polymorphism is V
MARGEMERETVAACRSAKTMWEAIAARLQERGYRRTAEQCKCNWKNLVNCYKLQKTLYFVSARMSGNRSIIYFFNQEGIKNWKFHVRFRLTLLLGWSGGGSIFKLWERNFCDEDLAIFCDGGRLGIEGVNGDACGFDQFNLGKRYCFLS

SEQ ID NO: 4378 - protein, 252 aa, Zea mays
  VARIANT 126: note = Ancestral polymorphism is E, Derived polymorphism is K
  VARIANT 119: note = Ancestral polymorphism is E, Derived polymorphism is K
MVKVVKSTKGRQRIEMKCIQGEEARQVCFSKRRPSLFKKASELSTLCGAEVAVVTFSPGGKCFSFGHPSTSSVTDRFLAVHTLDDGRAMASGSHGSRRGLTDTSHAMNQQLMELQRFMETEKRRKERAMEAMVRESGGPVMQLLSANVGALGIRELEELRKELCMVENMVKERAREVLRDAMQTRRLPPQSHVHMALPSQVPFGGQRAGTMYANFSSLSNNGPREGLHVNSMLHGFGLGGLGDYYLNGQFGG

SEQ ID NO: 4379 - protein, 315 aa, Zea mays
  VARIANT 80: note = Ancestral polymorphism is L, Derived polymorphism is Q
MHASHSIYTHRVPARSSLPTKAGAMWQLSRAYRMASFCLISLAAAAVSPATGDMADTVDMMWGNTQVLYDSSSGRQTVSLSLDRWTTSAFRSKSTYLFGRFDVDIKLVPRDSAGTVTTVYMVTEGPWQYHDEIDLEFLGNTTGEPYTLHTNIYARGKGDREMQYRLWFDPTEDFNTYSIIWNPHMILILVNGVPLRRMKNRMRDDTPFPLFQPMRLYASIWDADEWATQGGRIKTDWSHGPFTAFFRNYTANACVPYNRAWICGQGSGDSSWFNQELDEEGQQKLSEVNGRNKIYDYCTDSRRFPSGYPPECGSQ

SEQ ID NO: 4380 - protein, 383 aa, Zea mays
  VARIANT 326: note = Ancestral polymorphism is S, Derived polymorphism is I
MESLLASRSIRSSFSAVASTRGAASPRPSRVATLASAGAGARSRALRAGHTDSILEVLAQDDMLNAKELVQWENGLSFNDIAARQGIRIRRHCRPTASLKEIEEELGAPLNILEKIIWDKEIEVAEGHAKKPLEEVIQAATKAPPSRDFYGALEAAYKRNGVPALIAEVKKASPSRGVLRENFNPVEIAQAYEKNGAACLSILTDEKYFQGSFDNLEKVRSSGVKCPLLCKEFVIDKWQIYNARSKGADAILLIAAVLPDLDIRKFLQICEELGMTALIEVHDEREMERVLKINGVKLIGINNRSLETFVVDTSNTKMLLEKHGDIIREKGILVVGESGLFTPDDVAYVQNAGVSAVLVGESLVKQECPGRAIVGLFGKELLH

SEQ ID NO: 4381 - protein, 322 aa, Zea mays
  VARIANT 27: note = Ancestral polymorphism is V, Derived polymorphism is M
  VARIANT 33: note = Ancestral polymorphism is G, Derived polymorphism is R
  VARIANT 39: note = Ancestral polymorphism is R, Derived polymorphism is Q
  VARIANT 40: note = Ancestral polymorphism is R, Derived polymorphism is Q
  VARIANT 54: note = Ancestral polymorphism is E, Derived polymorphism is Q
  VARIANT 63: note = Ancestral polymorphism is Y, Derived polymorphism is H
  VARIANT 110: note = Ancestral polymorphism is S, Derived polymorphism is P
  VARIANT 125..322: note = Derived polymorphism lacks residues 125 to 322
  VARIANT 128..322: note = Derived polymorphism lacks residues 128 to 322
  VARIANT 135: note = Ancestral polymorphism is A, Derived polymorphism is S
  VARIANT 137: note = Ancestral polymorphism is L, Derived polymorphism is I
  VARIANT 140: note = Ancestral polymorphism is R, Derived polymorphism is M
  VARIANT 259: note = Ancestral polymorphism is G, Derived polymorphism is D
MATRQPVRLVLDASLLLDPSCTREAAVVALRPGVEELLRRLRYSNLTMAICYAEGMPTNEVLYLSTLLLHPSEVASSEVHIDNICFLLPYLPIMAHGVSILSCRLQRMASSNECSIEVPGVLIVQRLQQLLLTLATLIKRRCGSVTIAVYGDEDKPALITYPDVALNYMSCFQGFFFCPEVASLLLHNFCVYHINPQGHEMGAAPMSSDVLVPSVADLANQVADVLDFFGLVVDLQAATDLMLWHKVASVSGVATLGLGTYGAHMFRPKNPAYKEFGGLLTAGIVLFSGTCYTVAYLEDMKFSSPAPLGGFAFIAAWASLLF

SEQ ID NO: 4382 - protein, 363 aa, Zea mays
  VARIANT 317: note = Ancestral polymorphism is S, Derived polymorphism is L
  VARIANT 311..363: note = Derived polymorphism lacks residues 311 to 363
  VARIANT 293: note = Ancestral polymorphism is I, Derived polymorphism is T
  VARIANT 289: note = Ancestral polymorphism is P, Derived polymorphism is L
  VARIANT 255: note = Ancestral polymorphism is N, Derived polymorphism is S
  VARIANT 249: note = Ancestral polymorphism is F, Derived polymorphism is S
  VARIANT 237..363: note = Derived polymorphism lacks residues 237 to 363
  VARIANT 235: note = Ancestral polymorphism is S, Derived polymorphism is F
  VARIANT 193..363: note = Derived polymorphism lacks residues 193 to 363
  VARIANT 182: note = Ancestral polymorphism is H, Derived polymorphism is N
  VARIANT 175: note = Ancestral polymorphism is F, Derived polymorphism is Y
  VARIANT 158: note = Ancestral polymorphism is A, Derived polymorphism is T
  VARIANT 151: note = Ancestral polymorphism is E, Derived polymorphism is K
  VARIANT 59: note = Ancestral polymorphism is S, Derived polymorphism is Y
  VARIANT 47: note = Ancestral polymorphism is I, Derived polymorphism is N
  VARIANT 44: note = Ancestral polymorphism is S, Derived polymorphism is F
  VARIANT 42: note = Ancestral polymorphism is E, Derived polymorphism is G
  VARIANT 25: note = Ancestral polymorphism is G, Derived polymorphism is D
MKGSSCNIFLYDATGMLCQRGDSVGWSDTVKFRTAPAAGSDELSFVIYGDMGKAPLGPSVEHYIQPGSVSVAKAVAKEIQTGNVDSIFHIGDISYATGFLVEWDFFLHLITPLASQVPYMTAIGNHERDYVNSASVYVTPDSGGECGVAYESYFPMPAVSKDKPWYSIEQGTVHFIVMSTEHEWSEKSEQYNWMDEDLSSVDRSRTPWVIFIGHRPMYSSYGVILPNVDSNFVASVEPLLLNYQVDLVFFGHVHNYERTCAVYQGNCKGMPTSDKSGIDVYDNNNYTAPVHVIVGVGGFSLDNFPNKGEAWSLSRISEFGYGKVHATRTDMLVQFVNSSSMEIRDQFRIVKGAPANKSLSLII

SEQ ID NO: 4383 - protein, 144 aa, Zea mays
  VARIANT 123: note = Ancestral polymorphism is S, Derived polymorphism is I
  VARIANT 114: note = Ancestral polymorphism is R, Derived polymorphism is S
  VARIANT 106: note = Ancestral polymorphism is I, Derived polymorphism is T
  VARIANT 101: note = Ancestral polymorphism is P, Derived polymorphism is L
  VARIANT 52..144: note = Derived polymorphism lacks residues 52 to 144
  VARIANT 19: note = Ancestral polymorphism is D, Derived polymorphism is V
MDQQAMIDADFLEPTVLLDETHYQEGYRNGYNDGLASGKEEGRQVGLKMGFQVGEELGFFHGCLDVWTSAILIDQNAFTARVRKNIEQLAALVGSYPLSDPENEQIQDVMEKIRLKFRVITASLGVKLEYEGHPKSSKQDAEDL

SEQ ID NO: 4384 - protein, 132 aa, Zea mays
  VARIANT 35: note = Ancestral polymorphism is A, Derived polymorphism is D
  VARIANT 39: note = Ancestral polymorphism is A, Derived polymorphism is V
  VARIANT 45..132: note = Derived polymorphism lacks residues 45 to 132
  VARIANT 90: note = Ancestral polymorphism is D, Derived polymorphism is H
MIVKEKSQKITTMQNEVTSLEAKGSLAAEEQASKANALAIELEKQTEKLKKDITKQKIKKEALEARAGNADKKVQELNMKLEKLQRTSSDQKRRIQKTGHALKAAEDELMKAQLETTTKVKQLREVNIYSTL

SEQ ID NO: 4385 - protein, 1719 aa, Zea mays
  VARIANT 65: note = Ancestral polymorphism is P, Derived polymorphism is L
  VARIANT 117: note = Ancestral polymorphism is W, Derived polymorphism is S
  VARIANT 1106..1719: note = Derived polymorphism lacks residues 1106 to 1719
  VARIANT 1116..1719: note = Derived polymorphism lacks residues 1116 to 1719
  VARIANT 1384..1719: note = Derived polymorphism lacks residues 1384 to 1719
  VARIANT 1393..1719: note = Derived polymorphism lacks residues 1393 to 1719
MAAANAPIAMREALTLTSLGIAPQFVTFTHVTMESEKYICVRETSPQNSVVIIDMAMPMQPLRRPITADSALMNPDARILALKAQIPGTTQDHLQIFNIEAKTKIKSHQMPEQVVFWKWITPKLLGLVTQTSVYHWSIEGDSEPTKMFDRTANLANNQIINYRCDPAEKWLVLIGIAPGAPERPQLVKGNMQLFSVDQQRSQALEAHAASFATFKVVGNENPSTLICFASKTTNAGQITSKLHVIELGAQPDITIFLTDCLVVGKPGFSKKQADLFFPPDFQDDFPVAMQVSQKYGLIYVITKLGLLFVYDLETAAAVYRNRISPDPIFLTAESSSTGGFYAINRRGQVLHATVNDATVVPFVSGQLNNLELAVNLAKRANLPGAENLVVQRFQELFAQTKYKEAAELAAESPQGLLRTPETVAKFQSVPVQAGQTPPLLQYFGTLLTRGKLNAFESLELSRLVVNQNKKNLLENWLAEDKLECSEELGDLVKTVDNDLALKIYIKARATPKVVAAFAERREFDKILIYSKQVGYTPDYLFLLQTILRTDPQGAVNFALMMSQMEGGCPVDYNTITDLFLQRNMIREATAFLLDVLKPNLPDHAFLQTKVLEINLVTYPNVADAILANGMFSHYDRPRIAQLCEKAGLYLRALQHYSELPDIKRVIVNTHAIEPQALVEFFGTLSREWALECMKDLLLVNLRGNLQIVVQAAKEYSEQLGVDACIKLFEQFKSYEGLYFFLGSYLSSSEDPDIHFKYIEAAARTGQIKEVERVTRESNFYDAEKTKNFLMEAKLPDARPLINVCDRFGFVPDLTHYLYTNNMLRYIEGYVQKVNPGNAPLVVGQLLDDECPEDFIKGLILSVRSLLPVEPLVDECEKRNRLRLLTQFLEHLVSEGSQDVHVHNALGKIIIDSNNNPEHFLTTNPFYDSRVVGKYCEKRDPTLAVVAYRRGQCDDELINVTNKNSLFKLQARYVVERMDGDLWDKVLQPENEYRRQLIDQVVSTALPESKSPEQVSAAVKAFMTADLPHELIELLEKIVLQNSAFSGNFNLQNLLILTAIKADPSRVMDYVNRLDNFDGPAVGEVAVEAQLYEEAFAIFKKFNLNVQAVDVLLDNIRSIDRAEEFAFRVEEDAVWSQVAKAQLREGLVSEAIESFIRADDAAHFLDVIRAAEEANVYNDLVKYLLMVRQKAREPKVDGELIFAYAKIDRLSDIEEFILMPNVANLQNVGDRLYDEELYEAAKIIYAFISNWAKLAVTLVKLKQYQGAVDAARKANSAKTWKEVCFACVDAEEFRLAQICGLNIIVQVDDLEEVSEYYQNRGCFSELIALMESGLGLERAHMGIFTELGVLYARYRSEKLMEHIKLFSTRLNIPKLIRACDEQQHWKELTYLYIQYDEFDNAATTIMNHSPDAWDHMQFKDVCVKVANVELYYKAVHFYLQEHPDLINDMLNVLALRLDHTRVVDIMRKAGQLHLVKPYMVAVQSNNVSAVNEALNELYVEEEDYERLRESVDMHDNFDQIGLAQKLEKHELLEMRRIAAYIYKKAGRWKQSIALSKKDNMYKDCMETCSQSGDRELSEDLLVYFIEQGKKECFASCLFICYDLIRPDVALELAWMNNMVDFAFPYLLQFIREYTSKVDDLVKDKIESQKEERAKEKEEKDLVAQQNMYAQLLPLALPAPPMPGMGGPPPPMGGMGMPPMGGMGMPPMGPGPMPAFGMGGY

SEQ ID NO: 4386 - protein, 222 aa, Zea mays
  VARIANT 174..222: note = Derived polymorphism lacks residues 174 to 222
  VARIANT 139..222: note = Derived polymorphism lacks residues 139 to 222
  VARIANT 137: note = Ancestral polymorphism is A, Derived polymorphism is V
  VARIANT 129: note = Ancestral polymorphism is G, Derived polymorphism is C
  VARIANT 110: note = Ancestral polymorphism is H, Derived polymorphism is Y
  VARIANT 93: note = Ancestral polymorphism is R, Derived polymorphism is Q
  VARIANT 76: note = Ancestral polymorphism is K, Derived polymorphism is N
  VARIANT 65: note = Ancestral polymorphism is D, Derived polymorphism is N
  VARIANT 63: note = Ancestral polymorphism is L, Derived polymorphism is H
  VARIANT 62: note = Ancestral polymorphism is G, Derived polymorphism is R
  VARIANT 30: note = Ancestral polymorphism is A, Derived polymorphism is V
MDGPHVVEGKARHLAKACTHAGGVPKLLLAVVRAHGCSGGGDGPCLEPVYHFVEHLLHVLLGLADNLVLHPEVDAKCLVLAPGVPVELLDAGRVADGVLGAVHAEQRQLYLLESMLHLTADAEALEHHGRPRRSRCAARGGEHECPLPLHLEEALEDVAPREGDMPGGDDGGEQVLECPGRLDPRTDPTHGVIEHGSVPPQVPILEVEQQHVGVAKRLPKSQ

SEQ ID NO: 4387 - protein, 107 aa, Zea mays
  VARIANT 37: note = Ancestral polymorphism is D, Derived polymorphism is E
MAAWWRRKVVPCARRAWAALAARLRARKPGYHLDTVDHVPGSGGILKLNEDVQTCGYKDVQVMFDMLTSELEAAAQAQKPPTSPPRKGGALPPAWPGRSSSAITAAQ

SEQ ID NO: 4388 - protein, 559 aa, Zea mays
  VARIANT 128: note = Ancestral polymorphism is A, Derived polymorphism is T
  VARIANT 207: note = Ancestral polymorphism is A, Derived polymorphism is S
  VARIANT 451: note = Ancestral polymorphism is A, Derived polymorphism is E
MEDLSAMRHHLMCPISLQPMQDPVTAPTGITYDRRAIERWLAAGHATCPVTGQPLALADLTPNHTLRRLIQSWCAPRPSTPPEAAGANKPADGDDAVEHSQSQTDDDVVKKLLRAATSPPIDVLREAAAAAFESDAARRRMVDAGVLQRVLRGVAAIASEVKADDPRHHENESSSAIARAIEARLDLARALAVSSCDDDELRPQLVADSLVHGLLDAATDVLAALERAGAGGAGGDAARASAVRLLDSVTGAAGAAVLERLRPGLFRAVTAVKRNRSSDLDDNTTDTSRSVLRLKQTNVAASVPKSSAQSQREIDLDELPYDPADRKRITEYTKNPKKQDEIRRRYLTRGPYRPPPNFEYPYRDIGSDRRRFNPEWFKEYGGWLEYSDKVHKAFCLCCYLFRDCNEGQAGNDAFAINGWNGWNKKCRLDTHVGKGNASSFHNVALALALLAELCACADGRAAVAAHPAGVAVVARRLLRVSAAADACAVRVLAAVGGRAASPEVLREMARVGAVGKLCCVLQADCDAAVKDAARAVLRLHHGVWSGSPCVSAYLLSRYL

SEQ ID NO: 4389 - protein, 961 aa, Zea mays
  VARIANT 10: note = Ancestral polymorphism is R, Derived polymorphism is W
  VARIANT 322: note = Ancestral polymorphism is M, Derived polymorphism is T
MKGRRQSVVRRMYKALLFLVADLVLESAAGPPELRRRNLASNPVHVGLDLVGFSSWMLPVGDHWCAGSAAVTSHGVGYVGAGRKNCHRACLKNGVVCSFDDSGVRVSMLCSSLPSEDVSFSSKMSLVNSTGFAQKKKGSKVWRRSQGGKKLVRHRAPKHGLGKDRHGHRSSVKDDDTDAVLSGISKESSIEECNSALIRLEKLSDEKALKFFEWMKVSGKLKGNTHAYHLALKAIAWKEDWKMAELLLHEMVADSDCALDARAFNGLIYVCAKRRLDAWATKWFHMMLEREVQPNLSTVGMLMGLYQKTGKLSEAEFTFEKMRNCNIKCVNAYSAMITLYTRLGLFAKSEDTINLMNNDGLVPNMENWLVRLNVYCQQGKMEEAELVLQSIVDEGFTLNVIAYNTLITGYGKSSDMQKANKVFDSFGSAGLAPDETTYRSMVEGFGRANIYEETILYYRKLKGAGFRPNASNFYTMINLLARHDDNETAAEILQDMRAAGCQCSSIVTFLVRAYGAVGRMHKVLPILQSCFDKILLDATSCSILVTSLVQNSLLEEALYILREKKWKDSAFEDNLYHILICSCKEGGNYNDAVRIYNQMPKSETHPNPRISCTMIDVFSTMERFADAETILLELKASASVLDMIAYSVIVRMYIKARRLKDACSVLAEMEKQKEIIPDKYLFLDMLRTYQKCGLLEKLADTYYWIRKSQVKCDEAMYNCIINCCGRAIPVDELSRIFDEMLQQGHLANTVTFNVLLDIYGKAGLFNRAEKVFIMARKQGLADIISYNTIIAAYAKGGNFLSMNYFVQMMQDAGFPVSLEAYNCMLDAYGKAGRLEEFASVLQKMKRAKCKFDHYTYNIMINIYGRRGWIQDVSNVLAELKDRGVEPDLYSYNTLIKAYGIARMPEDAVKLMQEMRVKGISPDRVTYANLIAALQRNENFLEAVKWSLWMKQTGVAGCGART

SEQ ID NO: 4390 - protein, 294 aa, Zea mays
  VARIANT 229: note = Ancestral polymorphism is A, Derived polymorphism is V
  VARIANT 266: note = Ancestral polymorphism is G, Derived polymorphism is R
MGSHSHLGQALQAHHHHHHHHRGGECEPATAAAARSRWAPKPEQILILESIFNSGMVNPAKDETARIRRLLERFGAVRDANVFYWFQNRRSRSRRRARQLQQQQAGSGPQHPTAAAAAGHVHGANANDGVSLYAMHGHAGQQQQARAAGLPAVAPVVLPPAAVASSPRFFGDEIDTDGGDDLFAISRQMGLMSRGGEQHGCGYVANNDASQSHLLSYQPTGTATTAAAAYIQVSINGVVYEVPGAGALLDLAGTFGRDAMLVHSSGEILPVNENGVLMKSLQMGECYYLVGHQL

SEQ ID NO: 4391 - protein, 406 aa, Zea mays
  VARIANT 116: note = Ancestral polymorphism is R, Derived polymorphism is C
  VARIANT 92: note = Ancestral polymorphism is R, Derived polymorphism is C
  VARIANT 90..406: note = Derived polymorphism lacks residues 90 to 406
  VARIANT 73..406: note = Derived polymorphism lacks residues 73 to 406
  VARIANT 1: note = Ancestral polymorphism is M, Derived polymorphism is I
MAASTTRSPAAIDRHAVRLITRVSIAMAAVATLSLLYLLRHASIYCFPASHQPALTISLAPFPRSSCDAASRRVVPPDHRLAKLRASPRWRRRAASLAMSAFPPLRGLGILAAPSRVLCLAAGAGHAVDAFRASGTRDAIGVDLVEFPPLVRRADPHHLPFSDGAFDLVFSDDPSATSGALFPSHLAREAERTVRRGGGIALAFDQEIETVAVATLFKRLCVLDVKDVTLDGSQYRRQLDLERPYTKKKEARIVGGTGTDGTPIIAGIAKFMDILTTGLVTSPLSCNTKLHLKLVSYFQFLDAEFWNTGLERSEALKNDLEWFRQQGHTIPKPSAPGTTYASLLEDLSEEDPQAFICHFYNVYFAHTAGGRMIGKKSWSREEKDHCLEETEKSFSYSGGLLRHIFT

SEQ ID NO: 4392 - protein, 699 aa, Zea mays
  VARIANT 178..699: note = Derived polymorphism lacks residues 178 to 699
  VARIANT 555: note = Ancestral polymorphism is G, Derived polymorphism is D
MDSATSGAMELVAALLRGRVPPELGGEGAEGRAVVATLAAAVLGAALFVLRRRAAAGKKRKTEGAAATETTRAKARGVKVSAEEEEEKPADDGRKKVTVFFGTQTGTAEGFAKALAEEAKARYDKAIFKVVDLDDYAAEDEEYEEKLKKEKLALFFVATYGDGEPTDNAVRFYKWFTEGNERGVWLHDFEYAVFGLGNRQYEHFNKVAKVVDEILTEQGGKRLVPVGLGDDDKCIEDDFNTWKETLWPELDRLLGDGNDISTGTTYTAAIPEYRVEFMGPEEAAHLERNSSLANGHAVHDAQHPCQADVAVRRELHTPASDRSCTHLEFDIAGTGLTYETGDHVGVCTENCPEVVEEAERLLGYSPDTSFTIHADRDDGSPPPFPSPTTLRNALARYADLLNSPKKASLVALATYASDPAEADRLTFLASAAGKDEYAQWVVASQRSLLEVMAEFPSAKPPLGVFFAAVAPRLQPRYYSISSSPSMAPTRIHVTCALVHETTPAGRVHKGVCSTWIKNAVPSEGSEDCSSWAPIFVRQSNFKLPADPSVPIIMIGPGTGLAPFRGFLQERLARKESGAELGRSVFFFGCRNSNMDFIYEDELSNFLEQGALFELVLAFSRQGPTKEYVQHKMAQKASEIWDMISQGAYIYVCGDAKGMARDVHRVLHTIVQEQGSLDSSKAESFVKNLQMEGRYLRDVW

SEQ ID NO: 4393 - protein, 564 aa, Zea mays
  VARIANT 195..564: note = Derived polymorphism lacks residues 195 to 564
MGISQDTHESMATDAANYLCHQLQHLLGPISSATSQSGPWEERSAMVRLTQKLQKSKRNKRWRQRRRKHVEELFQKERADYDRVDQEADEWRAKQIAKDIAKQRVESMQQIARKKTNVERKRLESELELALMVEKLQELRSIRVQKMKKQDPYLNTDASTMSPFEHGETHSVKICSQVDLCNFDGTHGVNVPVGQGYDLTETCAGAAFTEWDDTTSLLLCEAFIHHADVYTAAPEELVAGLEPVPGTNVTEDGYNRQWYIYCPKRYKNGEGRTSGHRLRAVETAGTCWHSETGPKSMQGLPGATVCSLSYGHKEKEDGTSGRHRFHRMGWRMFEYDDTQGGGGDHVLCKVHRSSSSLAKNKSKAKRTATGDHPEAPPTKVIHDVQVQMQDPAGAIFTGAYPTMDDPLLMVRGEEASEAEHGGDLGKFNIGGLLLNIDNVDWKTLLDNVDGEQQQQQPCAEPAKQSSVQVQVDPAATLMPSNVHGHEQGGDSMMVGGEEEQRRRIEEQVSVDDLLDVNNVDWKALLDMLEDDEEQGLPLQQQPCAEPAAEQSQSSRIEDPAVPPV

SEQ ID NO: 4394 - protein, 72 aa, Zea mays
  VARIANT 19: note = Ancestral polymorphism is R, Derived polymorphism is K
  VARIANT 48: note = Ancestral polymorphism is W, Derived polymorphism is L
MAFGSARVPAAMDMGEIRRRLRARQLALAGGPAGNERPPSSAAGWAPWRLIRSLSCKGLEPVAAAAAPVRLV

SEQ ID NO: 4395 - protein, 164 aa, Zea mays
  VARIANT 16: note = Ancestral polymorphism is R, Derived polymorphism is H
  VARIANT 28: note = Ancestral polymorphism is A, Derived polymorphism is V
  VARIANT 31: note = Ancestral polymorphism is P, Derived polymorphism is S
  VARIANT 43: note = Ancestral polymorphism is A, Derived polymorphism is V
  VARIANT 56: note = Ancestral polymorphism is P, Derived polymorphism is S
  VARIANT 77: note = Ancestral polymorphism is P, Derived polymorphism is S
  VARIANT 80: note = Ancestral polymorphism is R, Derived polymorphism is H
  VARIANT 89: note = Ancestral polymorphism is A, Derived polymorphism is V
  VARIANT 90: note = Ancestral polymorphism is A, Derived polymorphism is T
  VARIANT 104: note = Ancestral polymorphism is K, Derived polymorphism is N
  VARIANT 141: note = Ancestral polymorphism is A, Derived polymorphism is T
MARRWRCMRTCRRSCHRRTAVGASIAIVATPALLAISSASSKVREAEAEVAAAVTSCLAELPVTVKAFLDVSIGGESAGRITVGLFGGATRFLSLVTGMGYRRKEFMKVVPGYVQHGGVVSYSAVPAVTERLAAEAEAVRTRCGAEAAERSNRELFQLKPGLIK

SEQ ID NO: 4396 - protein, 515 aa, Zea mays
  VARIANT 322..515: note = Derived polymorphism lacks residues 322 to 515
  VARIANT 178..515: note = Derived polymorphism lacks residues 178 to 515
  VARIANT 98: note = Ancestral polymorphism is R, Derived polymorphism is L
MANASDSDIPSVTHDLDEDEEFDDDDLDDEDDDGGEPLASSSEAARLEAVLRRLTADEVRIRVHQVTIRGCARTRRAAVEAAVGPDVSRAATVRDLVRAAAAAGDRLRCLGAFDTVSITLDAAPPGIPGSAVVVLIDVAEARGRAAGDFGVFANTQSRSCSLEGSVKLKNLFGYCETWDASGALELDKTAELSAGVQMPRIGAIPTPLMARISFVSDDWLKSSLKEHLMGVSVGLLSTINHNIAYNLTWRKLTDPTRMSSNSVQEELGHSLLSSIKYAYKVDRRDSSIRPARGYAFMSTSQVGGLAPGSKYSRFLRQEFDLRVALPLGVLNGALNAGVAAGVIHPLERGSAGSVSPLVERFNLGGNRALVCRLGGPSSLLGFKTRGLRAATESRTQDPNTPGNGTSPSPELNGLGGEVAVTAFADLSFDLPLKPLRELGIHGHAFVCAGNLGRLTECDLRKFPVTEFLQTFRSCAGWGVVVPTRLFRVEMNYCYILKQLDHDGGKTGIQLNFSSS

SEQ ID NO: 4397 - protein, 280 aa, Zea mays
  VARIANT 262: note = Ancestral polymorphism is Q, Derived polymorphism is R
  VARIANT 66: note = Ancestral polymorphism is Q, Derived polymorphism is H
MAMDPSVAARQSEEAAEAFFRAAPPLRDRDRLAASLADFLARHSAGKYFLKAGYAVIFIHRRGSKQPYCRFLPEDSFLDLFELGEDSEIQVPQSHSSVVKAAISNYRKAIDECLLLKLPFTTIFEYLQLLQMVATSMNCLGHRGMFYLAAAVSDFYVPWESMAKHKIESAGGPLNMQLNQVPKMLFILRKNWAPAAFCVSFKLETDPNILLQKAEMALKKYGMNVVVANELANYKDVVVMVTSNGGRTTVSRTSKAEDLEVQLTDLLVKMHSEHIAQPNS

SEQ ID NO: 4398 - protein, 741 aa, Zea mays
  VARIANT 335: note = Ancestral polymorphism is L, Derived polymorphism is W
  VARIANT 28..741: note = Derived polymorphism lacks residues 28 to 741
MGKPPGARNPAEAEADGDDAVFLELSRELKEEGTRLFNRRDFEGAAFKYDKAVQLLPAGRRVEAAHLRASIAHCYMRMSPAEFHHAIHECNLALEAVPRYSRALLRRAACFEALGRPDLAWGDIRTVLRWEPGNRAARQISDRVRTALEDKGISVALDVLPEDENEIASAKGEERKKSRNKRFDSVAGGREGENGIALLESASTEKQAGPRQTNGTGNHQDHTEDSESNGLEKLEQSTETGEKDMGKKRGAHAAGKKPRCGESKQQKHSAVNHCQDNIGAKEEVMKDVKLVFGEDIRCAQMPANCSLPQLREIVQNKFPSLKAFLIKYKDKEEDLVTITLSEELSWASNLAVSQVPIRFYVVEVNHVQELGVDGVRRRPSFATLERNRDIMLDNGTIGHDVEHKHYADDWMVQFAQIFKNHVGFSSDAYLDLHDLGLRLHYEAMEDTIQREEAQEIFEVAESKFKEMAALALFNCGNVHMSRARRRPCLAEDPLQEFILEKVNVSYDWACTEYAKAGAMFEEAVKTKSDFFEGLIALGQQKFEQAKLSWYYALACKINMETEVLELFNHAEDNMEKGMDMWERMETLRLKGLSKPSKEKVVLEKMVLEGFVKDISADEAFEQASSIRSHINILWGTILYERSVVEFNLGLPSWEESLTVAMEKFKIGGASQADINVIVKNHCANETTQEGLSFKVEEIVQAWSEMHDAKNWRSGPLYFRLQPVFRRRAPKLHHILEHMHYA

SEQ ID NO: 4399 - protein, 377 aa, Zea mays
  VARIANT 346: note = Ancestral polymorphism is C, Derived polymorphism is R
  VARIANT 204: note = Ancestral polymorphism is D, Derived polymorphism is N
  VARIANT 141: note = Ancestral polymorphism is K, Derived polymorphism is N
MEPEEPPRCSGGTRSVSLPEDQRFVTSWLSQVIDPASAVAAQPPLVGDSEFVFRHDSASSTVRLYGYYLDSANPEDEGEPDEEDDDIYAEEVLPEEERQRVEYEPLTEEEMAERNDSDDDDEDDDDDDDEDRQPSKFATVNNTAGFMRIAAGTGSQQGGGSDKEILVLYRYTRFSRTWSGRRGVEACRRTKLHWLRFAVPPAGNMRGALAWAGSSLCPLIYPGLFRQELGDLWSILAALVINAIPPQATRLQVVVDAGILRREDYTMERMEHVRGALEATAGEAWPEYYHVGMELQLPETVRREEGGDADEDDGVRTAKRRMVVAEGDCSLCLDPLESGLAAWPGCGHVFHGHCVEQTLAGRATCPQCRHGLCRHAA

SEQ ID NO: 4400 - protein, 112 aa, Zea mays
  VARIANT 108: note = Ancestral polymorphism is L, Derived polymorphism is F
  VARIANT 103..112: note = Derived polymorphism lacks residues 103 to 112
  VARIANT 100..112: note = Derived polymorphism lacks residues 100 to 112
  VARIANT 87: note = Ancestral polymorphism is I, Derived polymorphism is N
  VARIANT 67: note = Ancestral polymorphism is G, Derived polymorphism is R
  VARIANT 51: note = Ancestral polymorphism is G, Derived polymorphism is V
  VARIANT 12: note = Ancestral polymorphism is V, Derived polymorphism is I
  VARIANT 4: note = Ancestral polymorphism is A, Derived polymorphism is V
MWKAAIDSIAFVGFSFALSNGVAKAASSGSREVNNRADLEEPREGKPKGPGLKMYQVKRWRLWSPSGGSNDDRPIVCPMSDFCPVTIDGVLKESFLETLQKKRRWSGLRVTY

SEQ ID NO: 4401 - protein, 436 aa, Zea mays
  VARIANT 329: note = Ancestral polymorphism is P, Derived polymorphism is A
  VARIANT 313: note = Ancestral polymorphism is F, Derived polymorphism is S
MLTLPGTLRRARAPPGLPPRRHLSRLLDRYGFVAPDSLTPAPREPHSDTADSAAAAKKRRAKKPPYRPPSSLDRGGRPPAHSDLPFDFRFSYTESTPASKPIGLREPRYSPFGPGRLDRPWTGLCAPAVDATLRDVEAEDPLPDAERGLEEARRRERERVLGEPLTPAERAFLVDRCQKNRTKRQINLGRDGFTHNMLSDVHNNWKTCEAVRIKCLGVPTVDMQNVCHQLEDKTGGLIIHRHGSLLILYRGRHYNPKKRPVVPLMLWKPAEPVYPRLIKTTIEGLTVEETKQMRKKGLHVPVLTKLGIFFLPFSTYMYSKNGYYASLVPMVRDAFLTDELVRIDCKGLPKSDYKKIGVKLRDLVPCILVSFDKEQIIVWRGNEDGSLQDRTQKSFLSFIDSDVASVKDETGDQEQIPSDLSYDGCSEMKCQITKVI

SEQ ID NO: 4402 - protein, 638 aa, Zea mays
  VARIANT 96..638: note = Derived polymorphism lacks residues 96 to 638
  VARIANT 65..638: note = Derived polymorphism lacks residues 65 to 638
MAAAEARRRSAVWALLPLLLRLLHPAALVLANTEGDALHSLRTNLNDPNNVLQSWDPTLVNPCTWFHVTCNNDNSVIRVDLGNAALSGTLVPQLGQLKNLQYLELYSNNISGTIPSELGNLTNLVSLDLYLNNFTGPIPDSLGKLLKLRFLRLNNNSLSGSIPKSLTAITALQVLDLSNNNLSGEVPSTGSFSLFTPISFGNNPNLCGPGTTKPCPGAPPFSPPPPYNPTTPVQSPGDLLRLSRSSSSSTGAIAGGVAAGAALLFAIPAISFAYWRRRKPQEHFFDVPAEEDPEVHLGQLKRFSLRELQVATDGFSNKNILGRGGFGKVYKGRLADGSLVAVKRLKEERTPGGELQFQTEVEMISMAVHRNLLRLRGFCMTPTERLLVYPYMANGSVASRLRDRPPAEPPLDWQTRQRIALGSARGLSYLHDHCDPKIIHRDVKAANILLDEDFEAVVGDFGLAKLMDYKDTHVTTAVRGTIGHIAPEYLSTGKSSEKTDVFGYGITLLELITGQRAFDLARLANDDDVMLLDWVKGLLKEKKLESLVDEDLDHNYIDVEVESLIQVALLCTQSNPMERPKMSEVVRMLEGDGLAERWEEWQKVEVVRQEVELGPHRTSEWILDSTDNLHAEQLSGPR

SEQ ID NO: 4403 - protein, 125 aa, Zea mays
  VARIANT 52: note = Ancestral polymorphism is G, Derived polymorphism is R
  VARIANT 41: note = Ancestral polymorphism is V, Derived polymorphism is D
  VARIANT 35: note = Ancestral polymorphism is P, Derived polymorphism is S
MATLRFRHTPALHLFADMRNLLGVPNTLNVLTAYSLLLAGVPGLVLCLYGSRCFGVSLRWEASGWFLFYDGNVVAAFGSAYYHLKPDDDRLIWDRLPVPEHYFLAVIFSSIVYSFLFVLAWFSGF

SEQ ID NO: 4404 - protein, 485 aa, Zea mays
  VARIANT 55: note = Ancestral polymorphism is V, Derived polymorphism is L
  VARIANT 87: note = Ancestral polymorphism is P, Derived polymorphism is L
  VARIANT 104: note = Ancestral polymorphism is D, Derived polymorphism is E
  VARIANT 308: note = Ancestral polymorphism is G, Derived polymorphism is A
MGEANATGTPATATVRVLAVSRVAPAPAPAAADPVVVKLSFFDTPWVVLPPIQRVFLYELPGGDGEFTAAVTRLKSSLAATLAVYLPLAGKLAYVAGTGDVVVDCVDDPGVAFVEAEADAGIDTMDVRRLASDEAHDIPAFLALVPELPTKVLPAPVLSVQATRIPGGGLALGLSVHHAVADGQAVWRFMGAWASAARDGSPVTKSLPAPHYSREAVHVPNGDEFARQMLKMVAPNLPAAGTVADYDFSQRFRLARRTFYLGGDDIRALKLRISALAEAEAEAEDDVVADGRSKKKPVSTFVALSALGWTSFVRCKGLGAGDDTYLVFLADLRARMDPPVADGYLGNCIKGCLATADAGDLLGERGLLVACRAIQAAVAEMEAAPLAGSERWIQKMMGLPFARLANVAASPRFRVYEASDFGFGRPARVELVSMNNDGEMVLVGGRGDGEVQLSVSLDPARMEDFKAHVFATSAAPSDSAAAAAN

SEQ ID NO: 4405 - protein, 284 aa, Zea mays
  VARIANT 46: note = Ancestral polymorphism is D, Derived polymorphism is V
  VARIANT 114: note = Ancestral polymorphism is R, Derived polymorphism is H
MSEEMKRLIAYVKDLYEDTNSCNMVKVQWFDKVDEVGVPLPMDFDDREIFFSLDRQDLNVECIDGLAAVLSVQHYEKFKGDTRYNLWQPYFCCRQIDNGDIKPFDRHKDKIKVRYLELQDADETGNLEEWVMLTRFAKPDQLGVRFLGRPMVRPQRVEQSKASCFDVGAIVDAWWHGGWWEGIVLCQVGSGRLQVYFPGENRTAEFGEDELRCSLEWVGNKWNPLKGRKDVTSKLTSTADCGSECLIGKQDPLNFYVPKNSEPQLERHQYDKGGIEKSSVSTIS

SEQ ID NO: 4406 - protein, 186 aa, Zea mays
  VARIANT 48: note = Ancestral polymorphism is P, Derived polymorphism is L
MADQAVAATTAHDQHQQQQRRRRSRASSEYLGVRRRPWGRYAAEIRNPVTKERHWLGTFDTAEDAAVAYDLSAISISGPAAARTNFCYPRGAARGLPSAHALPRQGLQLLPHSPAVPSPAAPPSALLPAGGGGGGGTVDGCDYDCEWRHLKAVEEADADDESMTIAAILQSFQHLNAPSAPPASLY

SEQ ID NO: 4407 - protein, 156 aa, Zea mays
  VARIANT 127: note = Ancestral polymorphism is I, Derived polymorphism is S
MESKVEAEAVQLAGKKKSTFPSSAADDGRVEAASMGIMASSPSAASPAAIVSAFLAPPLSLLRHVASLCAGYLGLDGGLKPPAAAAPPASSSSSAAAAATSQRGEVVDVEAAASVEDYCAAEVVLAIEVRSRGFTPPQRRSAPRESKIAAVGGVIH

SEQ ID NO: 4408 - protein, 130 aa, Zea mays
  VARIANT 99: note = Ancestral polymorphism is A, Derived polymorphism is D
  VARIANT 27: note = Ancestral polymorphism is R, Derived polymorphism is C
  VARIANT 20: note = Ancestral polymorphism is G, Derived polymorphism is V
  VARIANT 4..130: note = Derived polymorphism lacks residues 4 to 130
MAAQTSHSRHKHGDLEPRWGRWGSGARPSLSPTTPRHGLQIHAPMAGKSGEVIDTVDQPPAWQERREGTRKLRGTATLCWGCGMACCAALREDGRLIYAGKQLVDDKTAEDYNIEGGSLLHLVLALRRGQ

SEQ ID NO: 4409 - protein, 82 aa, Zea mays
  VARIANT 22: note = Ancestral polymorphism is V, Derived polymorphism is F
MRHGSSTLGVVEALDATRATAVTAEEARTAAREMEKKAASTAKLAAITMDKVGFVVVAVASAVTEEANALDSVAHHYLDVNL

SEQ ID NO: 4410 - protein, 1059 aa, Zea mays
  VARIANT 686..1059: note = Derived polymorphism lacks residues 686 to 1059
MLPRKRGVDAGEVQDLHNKAPRAAPAQDKDREEVAEMAGRAPEIDEDLHSRQLAVYGRETMKRLFGSNVLVSGLQGLGAEIAKNLVLAGVKSVTLHDDGKVELWDLSSNFFLSEKDIGQNRAHACVPKLQELNNAVIISTVTGDLTKEQLSNFQAVVFTDISIEKAVEYDEYCHSHQPPIAFIKSEVCGLFGSVFCDFGPEFTVLDVDGEEPHTGIVASISNDNPALVSCVDDERLEFQDGDLVVFSEVHGMTELNDGKPRKIKNARPYSFTLEEDTTSYGTYFRGGIVTQVKPPKVLKFKTLKDAIKEPGEFLMSDFSKFDRPPLLHLAFQALDKFRSELARFPIAGSDDDAQKLIDLAISINETLGDSKLEEIDKKLLQHFASGSRAVLNPMAAMFGGIVGQEVVKACSGKFHPLYQFFYFDSVESLPVEPLEPSDLKPENSRHDAQISVFGAQLQKKLEQSKIFMVGSGALGCEFLKNLALMGISCSQNGKLTVTDDDVIEKSNLSRQFLFRDWNIGQPKSTVAATAAMAINPELHVEALQNRASPETENVFNDAFWESLDAVVNALDNVTARMYIDSRCVYFQKPLLESGTLGAKCNTQMVIPHLTENYGASRDPPEKQAPMCTVHSFPHNIDHCLTWARSEFEGLLEKTPTEVNAFLSNPGGYATTARTAGDAQARDQLERVIECLETDKCETFQDCITWARLNFLLMVNIRFEDYFSNRVKQLTFTFPEDAMTSSGAPFWSAPKRFPRPLEFSSSDSSHLNFLLAASILRAETFGIPIPGWAKNPKKLAEAVDKVIVPDFHPKEGVKIETDEKATSLSSASVDDAAVIEELIAKLQAISKTLSPGFRMNPIQFEKDDDTNFHMDLIAGFANMRARNYSIPEVDKLKAKFIAGRIIPAIATSTAMATGLVCLELYKVLAGGHKVEDYRNTFANLAIPLFSMAEPVPPKTMKHQDMSWTVWDRWTVTGNMTLRELLEWLKEKGLNAYSISCGTSLLYNSMFPRHKERLDKKVVDVAREVAKVEVPSYRRHLDVVVACEDDDDNDVDIPLVSIYFR

SEQ ID NO: 4411 - protein, 60 aa, Zea mays
  VARIANT 1: note = Ancestral polymorphism is I, Derived polymorphism is M
  VARIANT 8: note = Ancestral polymorphism is L, Derived polymorphism is F
  VARIANT 14: note = Ancestral polymorphism is A, Derived polymorphism is T
  VARIANT 15: note = Ancestral polymorphism is A, Derived polymorphism is T
  VARIANT 38: note = Ancestral polymorphism is T, Derived polymorphism is I
MLSPLQPLGTVAAAALAMWLHCPFSHPRLPPPSTCPPTAPPASFRCPGFLLSMKPLGCDV

SEQ ID NO: 4412 - protein, 73 aa, Zea mays
  VARIANT 57..73: note = Derived polymorphism lacks residues 57 to 73
MLTILKNVANVLTASGETYFFKKQHGTQVWVALMLMIISAVAGGITDLSFHVVGYIWQTLKCVLTAAYSVFLS

SEQ ID NO: 4413 - protein, 289 aa, Zea mays
  VARIANT 59: note = Ancestral polymorphism is P, Derived polymorphism is L
  VARIANT 96: note = Ancestral polymorphism is R, Derived polymorphism is C
MEQLVGVHHHNHSLSPRAPRTPTRPLPQPQPHPLLHHLPSNRFQDLHSQIHNHIHLVVPAASRVLRATPPFFLILLASVYLLASVTIFSAPTPLLRLRLSSPRPLILPKLVSHPLAPELFDLDDGSIRVRLANVGAAITSFLIPDKNGVLADVVLRFDSLDPYLIKGYKLVAIKLIVPSKGFAEKHYHDLKERPFFNGLCDFLSFGPVLAMVWEGEGVIKYGRKLIGATDPQKYEPGTIRGDLGIVVGRNIIHGSDGLETAKDEIALWFEPKELVSYTSNAEKWVYGVN

SEQ ID NO: 4414 - protein, 139 aa, Zea mays
  VARIANT 92: note = Ancestral polymorphism is Q, Derived polymorphism is K
  VARIANT 88: note = Ancestral polymorphism is E, Derived polymorphism is K
  VARIANT 45..139: note = Derived polymorphism lacks residues 45 to 139
MSDVIIQEEALLSLDPVAAAYSMMNQTIKDAGIQNDALLSEVLYECEKELMEKSAIEETISELMDVKIPMLQAEQLPAMENEKRSIPECSLQKSVSSGCLNSADWMNGAVRPNFLDFQGLDFEAAFGLRRAYSEGDIQV

SEQ ID NO: 4415 - protein, 149 aa, Zea mays
  VARIANT 91: note = Ancestral polymorphism is F, Derived polymorphism is Y
MAGIIIKMLVLCAGWEIARGIVFSSLGSPALCVPVPCFVLFGFSFYASSPVLLQIERIFSSRCVLQIERGYIATQHNTQASNARPMVAVIFIVVSLNDTSSSPHEDLLLSHMKTCCLIMVFVYEDQLPVPTRWTEYLYDVKVNCSASSV

SEQ ID NO: 4416 - protein, 197 aa, Zea mays
  VARIANT 113: note = Ancestral polymorphism is P, Derived polymorphism is R
  VARIANT 24: note = Ancestral polymorphism is G, Derived polymorphism is S
  VARIANT 17: note = Ancestral polymorphism is L, Derived polymorphism is M
MALSPSAQATSPLARQLLRHVSSGLVAAAFHRPAPAISLPSAPRGADDVALAASHHQRLWPAPSPKGRPGAPRQGSGGQVHHAAPAMATIASVVTPPTNALTAATTHVVTRGPARPGLPAQGGGGKTHGAPAAAKARAVMRGPAPPARPKEGSGGKVHVVSPAAMSSASVLMRGPAPPGHPAEGAGGRGGSIHAIAS

SEQ ID NO: 4417 - protein, 60 aa, Zea mays
  VARIANT 8: note = Ancestral polymorphism is S, Derived polymorphism is Y
  VARIANT 14: note = Ancestral polymorphism is E, Derived polymorphism is K
  VARIANT 18: note = Ancestral polymorphism is D, Derived polymorphism is H
  VARIANT 47: note = Ancestral polymorphism is G, Derived polymorphism is R
  VARIANT 54: note = Ancestral polymorphism is K, Derived polymorphism is E
MPIMRKASLHRFLEKRKDRLNANGPYQTSPSDAAPVKKEPESQAWLGLGPNAVKSNLNLS

SEQ ID NO: 4418 - protein, 26 aa, Zea mays
  VARIANT 23..26: note = Derived polymorphism lacks residues 23 to 26
MENTPPVIEPPSKPKYRLTASPEKCL

SEQ ID NO: 4419 - protein, 883 aa, Zea mays
  VARIANT 452..883: note = Derived polymorphism lacks residues 452 to 883
  VARIANT 725..883: note = Derived polymorphism lacks residues 725 to 883
MDRSGRGSGPGQGQGRGRGLFIRLAKGLLGVFAICRTRAVEESVRRRRTDWLHEDLRRYAAVTGHPLPPGSPPPLAPTIPTDLNEWHQQEFGVAFITLEDEVSMEPTVLNRERSAADRRKRMPMLFGDYRDEDYYVLPRKFSIVARVEVKFPIEPRYRDRQHFILSDINGAKIEAMTSSYETVKHFNNLLHEKHVFKMHNVDFCISMGEHQFRHISGPMELYLTRQTIVEPYTVLFQMPPFPKHIFLSLVDIAEIPNRTLVDIMAIVVHLDTIHRTMWGPFRKIVVMDARWSLHAIKVWGDLLNKNALRWVLAKENCSIIIGTMFRRFRRQECLESSDYTTIHFNPFHHNNHHFELDDDGTNINTCASSTTISPILLQTYSNEVPDDRAEVRRLRDRARRASMTSDQIESRRARARERFFNGHFSFTTFNCEYDQNLASSRDGVYTFKAHGQNVMTKLANLLRENPYAETFRSIGQYGNIDEYRIDLNTDYKLDQRTFNTPTSSEVAAVWVEGTELHRQFERGVTLYGNDNAFYSIKPHHGCYDPLAYPLFFPIGELGWHSGIPKVGVNTARIDGRQSIDSDNLDSNGQLYVTMREYYCYKFQMRREIFNTVLHGQRLFQQFAVDTYIKLETTRLNYILFNQSRIRADLYQGLMDSVYAGEHRASALGKLWVLPASFIDGPRDMRRRYMDAFALVQKYVFKAKLDNLKHQLFKKHILGVVASHVYVIEFQKRGLPHAHFLLIMQTGNKLTVPDQYDTVISAELPDKNRFPELFDMVVKHMMHGPCGHLNMQNTCMKNGSCKCHYPRLFGETTLQGKDSYPIYRRRDDGQKVRVRGHDLDNRWVVPYNPTLLRMYDYHINVEVCSSIKAMKYIYKYIHKGHDFT

SEQ ID NO: 4420 - protein, 199 aa, Zea mays
  VARIANT 16..199: note = Derived polymorphism lacks residues 16 to 199
MALSPSAQATSPLARQLLRHVSSGLVAAAFHRPAPAISLPSAPRGADDVALAASHHQRLRPAPSPKGRPGAPKQGSGGQVHAAPAMATIASAVMPPTNAVTAAAATTHVVTRGPARPGLPAQGGGGGKTHGAPAAAKARAAMPGPAPPARPKEGSGGKVHVASPAAMSSASVLMRGPAPPGHPAEGAGGRGGSIHSISS

SEQ ID NO: 4421 - protein, 325 aa, Zea mays
  VARIANT 57: note = Ancestral polymorphism is F, Derived polymorphism is Y
  VARIANT 89: note = Ancestral polymorphism is I, Derived polymorphism is N
  VARIANT 97: note = Ancestral polymorphism is S, Derived polymorphism is F
  VARIANT 114: note = Ancestral polymorphism is A, Derived polymorphism is S
  VARIANT 131: note = Ancestral polymorphism is S, Derived polymorphism is R
  VARIANT 135: note = Ancestral polymorphism is R, Derived polymorphism is I
  VARIANT 137: note = Ancestral polymorphism is R, Derived polymorphism is I
  VARIANT 140: note = Ancestral polymorphism is D, Derived polymorphism is N
  VARIANT 151..325: note = Derived polymorphism lacks residues 151 to 325
  VARIANT 237: note = Ancestral polymorphism is D, Derived polymorphism is Y
  VARIANT 248: note = Ancestral polymorphism is I, Derived polymorphism is N
  VARIANT 253..325: note = Derived polymorphism lacks residues 253 to 325
  VARIANT 264: note = Ancestral polymorphism is A, Derived polymorphism is T
  VARIANT 277: note = Ancestral polymorphism is S, Derived polymorphism is Y
  VARIANT 278: note = Ancestral polymorphism is A, Derived polymorphism is V
  VARIANT 303: note = Ancestral polymorphism is G, Derived polymorphism is R
MIQVVVGASSMRRVDEELHKSRSSRDALQEVAECDNDPLTSSEAQSLADNEFNDFEFLLAIIIWYKILSTVNLVNKQLQAKDMVIDIAIERVQELISFFTKYREIGFSQALEAAREVAAEMDIDPEFRTKSKVKRKRHFDETPEDTSIASQSAQESFKVTYFLAIVDQAIASLTRRFEQYQGYEKTFGFLFTSNKLRSLDDKTLFSCSMNLEAALKSGEHSNIDGKELFVELKLIQDLIKESMGPLDILKHVKHLGCFPNIVIAYQILLIVPITVASAERSFYKLKLVKTYLPSTMTQERLNGLATIAIESDLLDQIKGLIYGFP

SEQ ID NO: 4422 - protein, 261 aa, Zea mays
  VARIANT 159: note = Ancestral polymorphism is K, Derived polymorphism is E
  VARIANT 203: note = Ancestral polymorphism is K, Derived polymorphism is N
MPPAAAALLRCAPAVPFAARSSAVSRSGMARRLVAASAAAGRLAPAYRGLLLDAGGTLLQVARPVAETYASIGRRYGVTKTKKRIMEGFKRAFSAPWPKTLRYQGDGRPFWRIVVAEATDCTDGDYFEEVYQYYAHGDAWRLPTGADAALRELKDAGVKLAVVSNFDTRLRKLLKDLNVSEMFDAIVVSSEVGYEKPSPEIFNIALDQIGVEASKAIHVGDDETADMAGANATGLECWLWGKDVTTFSEIQERILTTDGPQ

SEQ ID NO: 4423 - protein, 738 aa, Zea mays
  VARIANT 463..738: note = Derived polymorphism lacks residues 463 to 738
  VARIANT 368: note = Ancestral polymorphism is S, Derived polymorphism is L
  VARIANT 105..738: note = Derived polymorphism lacks residues 105 to 738
MMNGGGGQKRRNSKIIPYEYRVESDPKFFDKSWRKLHDAIREIYNHNSMSLSFEELYRTAYNLVLNKFAPELYEKFTENMKAHLEEMRTCIEAAQGGLFLEEMQRKWNDYNKALKMIRDILMYMDRTYIPTNKKAPVFDHGIELWRDTIVRSPTIQGRLSDMLVELIHIERTGDVINRGLMRTTTKMLMDLGLSVYQDDFERPFLEVSASFYSGESQQLIECCACGEYLKQAERRLSEESERVSQYLDVKTNEKITAVVVKEMLANHMQRLILMENSGLVNMLVEDRYEDLTRMYALFNHVPDGLTAIRSVMTSHIKDTGKSLVTDPERLKDPVDFVQRLLNMKDKYDNIINVSFSNDKSFLNALNFSFEHVINLNNRSPEFISLFVDDKLRKVVKEANEEDLETVLDKVMTLFRYLQEKDLFEKYYKQHLAKRLLCGKAAPEDSERSMLVKLKTECGYQFTSKLEGMITDLNTSQDTTQGFYASTSSRLLADAPTISVQILTTGSWPTQTCNTCNLPPEIVSVSEKFRAYYLGTHNGRRLTWQTNMGNADIKATFGNGNKHELNVSTYQMCVLMLFNSSNVLTYREIEQSTAIPTADLKRCLLSLALVKGRQVLRKEPMSKDIADDDSFCVNDKFTSKLFKVKINPVVTQKETDPEKLETRQRVEEDRKPQIEAAIVRIMKSRRVLDHNSIMTEVTKQLQPRFMPNPVVIKKRIESLIEREFLERDKVDRKMYRYLA

SEQ ID NO: 4424 - protein, 348 aa, Zea mays
  VARIANT 107: note = Ancestral polymorphism is A, Derived polymorphism is T
  VARIANT 187: note = Ancestral polymorphism is P, Derived polymorphism is L
  VARIANT 188: note = Ancestral polymorphism is L, Derived polymorphism is H
MATSPLSCFSARPRPRSPGTAVWLLPAAVLLLLLNRWSHMASYPSVSPRGSGSVQVGRAELYSKMARDLDERGAAFLKGGETSQSLTLSDLFDTADDGAVVPRLKAADPPVRANVLYMDPKFAAVISKAVKDVFLPYFDQAIWFQNTSMYHFSMFHASHHLEPIVATEDEIEAEVEAVKGVTKNLCPLKIVLDRVVLTSTGVLLGLWQVESGTDPAEIRSRLREALPRAPQKQLISINLSPDLIFFSDSMTLFCFTPRLHEFWDIPGSLKSAWKYSNHRADNAVQSASSFDNVKFFHELVAQINEKICGFQATISELWYVEEYDVLALALNGKMKVRRLHLGCNRQGI

SEQ ID NO: 4425 - protein, 367 aa, Zea mays
  VARIANT 270: note = Ancestral polymorphism is G, Derived polymorphism is D
  VARIANT 257: note = Ancestral polymorphism is G, Derived polymorphism is E
  VARIANT 195: note = Ancestral polymorphism is R, Derived polymorphism is C
MGCSSSREAGGGLVSPAAAPAERRQGLRSRSLGMCRGAHAYTALPFEEPLKGARDPATAEEALPGDDAATEEKRRHEAPIISAAVMASIEDAASSSTARWSAEPAASSLPPEQLPALDLDRAVLPGVRELVQVPSPSENPAPQEACDDDILDVSDSVRARVVDGFHGKLEKKKTAVATEEAPDAVDGDDVTAPRRRLPRAGKPVVLYLTSLRGVRRTFEDCRAVRAILRCYRVRLDERDVSMHAAFRSELRDLLGAEFEGPALPRVFVDGRHDLGGAEGVRALHEAGELARALAACECEAAAEPTTGRLGHACACAACGEARFVPCGTCHGSCKVFVDDERCRLAAFFRQCPDCNENGLIRCPVCCY

SEQ ID NO: 4426 - protein, 252 aa, Zea mays
  VARIANT 216: note = Ancestral polymorphism is A, Derived polymorphism is V
  VARIANT 195: note = Ancestral polymorphism is A, Derived polymorphism is D
  VARIANT 101: note = Ancestral polymorphism is V, Derived polymorphism is G
  VARIANT 19: note = Ancestral polymorphism is L, Derived polymorphism is W
MFNLFQKGEPMALKHNGSLYAHVYFARSGYPVDPTDPKYEQKSSFGRTHPVVAFLPKSKAGKKKSLLGDSEEPEEKAPHNKENKEYEDKDEGLTEYISYFGMVVSIVELWRLRPLWQLKKCRAENYTAVNQPAYAFTNILFSSGTTGEPKAIPWTHITPIKAAADGWCHMDIRKGDFVAWPTNLGWTMGPWLVYASLLNGASMALYNGSPNSSGFAKFVQDAKVTMLGLVPSIVRTWKNTDCTARLDWSSIR

SEQ ID NO: 4427 - protein, 300 aa, Zea mays
  VARIANT 243..300: note = Derived polymorphism lacks residues 243 to 300
  VARIANT 229..300: note = Derived polymorphism lacks residues 229 to 300
  VARIANT 218..300: note = Derived polymorphism lacks residues 218 to 300
  VARIANT 209: note = Ancestral polymorphism is M, Derived polymorphism is T
  VARIANT 178..300: note = Derived polymorphism lacks residues 178 to 300
  VARIANT 176: note = Ancestral polymorphism is C, Derived polymorphism is F
  VARIANT 143..300: note = Derived polymorphism lacks residues 143 to 300
  VARIANT 140: note = Ancestral polymorphism is P, Derived polymorphism is S
  VARIANT 105: note = Ancestral polymorphism is A, Derived polymorphism is T
  VARIANT 74: note = Ancestral polymorphism is R, Derived polymorphism is W
  VARIANT 60: note = Ancestral polymorphism is P, Derived polymorphism is S
  VARIANT 56: note = Ancestral polymorphism is R, Derived polymorphism is H
  VARIANT 19: note = Ancestral polymorphism is D, Derived polymorphism is N
MPPISLGDISSFVRTTDADDFGLWFNITEANNCTKAGALVLNTYDALEADVLAALRAEYPCIYTVGPLGSLLRRHHDNEDADAVGGSLDLSLWKHDTECLSWLDAQEPGSVVYANFGSLTVVTAAQLAEFSWGLAATGRPFLWIVREDLVVGRPAAALPLGFAAETAARGRLAAWCPQERVLRHRAVGCFLTHNGWNSTCECLAAGVPMVCWPVFADQLTNCKYACEVWGVGRRLDAEVRREQVAAHVDEVMESVEVRRNATRWKAMAKEAAGVGGSSHENLLGLVEALRVSSLNSESET

SEQ ID NO: 4428 - protein, 669 aa, Zea mays
  VARIANT 570: note = Ancestral polymorphism is A, Derived polymorphism is V
MKVANGLSLRKSNGRFKSKLMMELVKQWREHQAIMRCMNLSKRNNNIYVGAEGANITSPNDSNIWPTSALVAKNSNSRYVLASKCASQPPTMWLENSLNTSSGFKCSKPSIVRNALPSKTPKASVSWKSKDDSNAIPRHLEQSHRKKTSRATRTHFKAMPNLIHKAKNVDTSNLNDGASGSSWRGQSDSYKGEDINIGKECTKTSELLKSREASRKSNILVVDRKDPNKDEPDKVKGIQDEVVTKEEGLKGHTCEGCATCWSCLKQANTTKANDAPNLGSLLVGNKHTQGLMSNLRDNSSHLFEKNHSRHQRDDPCEYRETNLKFPNRIQSVGGNGKTNDVTSRRKRLLLEEKASAHVQNDLTYGPMKRRRYIEANEDEEEQNDLTYGPMKRRRYIEANEDEEDYVGDHHPVHIEDATTELTPQDSISKHCVERQCYCCSKPIDIPRWSGTFKIDGKEHISLAGHLSSKSCEKVWKLSSLPKVVQVTKVPRMAVWPKIFKASEPSGDNIGLYFFPPEMRHDEELDQLVNEVMDKDLILRAIIGEAEMLIFPSVLLPERYQTFQTKHYLWAAFKAKEDKGDAIVEQEVEKGNCVSNQPDKVQSDNASFPSNHGLDRPSMEAPPQSSSSVFGIVVRQAPNLEPEVKRFIQEMERKGALVTVMRGEAIGGGP

SEQ ID NO: 4429 - protein, 521 aa, Zea mays
  VARIANT 221: note = Ancestral polymorphism is V, Derived polymorphism is A
  VARIANT 126: note = Ancestral polymorphism is D, Derived polymorphism is V
  VARIANT 73: note = Ancestral polymorphism is A, Derived polymorphism is T
MAPPPPALAEETAAFHPSLWGDFFLTYQPPTAPQQACMKERAEVLREDVRKILMGPCELPETLGLILTLQRLALDYYYENEIDKLLHCIYDDDDSDYDDKDLNLVSLRFYLLRKNGYDVSSDVFLVFKTEEGSFAYADDTASLLSLYNAAYLRKHGEEVLDEAISFARRRCLEAGILRTPLFRRVGILEARNYIPIYEKEAARNDAVLELAKLNFNLQQIAFCEELKHCTLWWKDFLAKSKMAFVRDRIVEVYFWMNGACYDPPYSRSRIILTKITSLVTIIDDMFDTYGTTEDCTKFHEAIGRWDESALPLLPQYMKGFYLFQLETFRSFEDELGPENSYRMERLVQQYYREIKWRDENYVPKTMTEHLQVSMESIGSVALACAAYVGMGDVITKETLDWVLSYPQFLTTYGIVRLSNDVVSTKREQTKDHSPSTVHCYMKEHGTTMDDACEKIKELIEDSWKDMLQQSLALKGLPKAVPRTVFDFLRTADNMYKNCDAFTSSEVLREMIRLLFVEPIPE

SEQ ID NO: 4430 - protein, 169 aa, Zea mays
  VARIANT 17: note = Ancestral polymorphism is E, Derived polymorphism is Q
  VARIANT 4..169: note = Derived polymorphism lacks residues 4 to 169
MERLVELYTKEIKWRDEDYVATMSEHLQVSAESIGANALTCSAYAGMGDMSITKETFEWALSFPQFIRTFGSFREQTKDHSPSTVHCYMKEHGITMDDACEKIKELIEDSWKDMLEQSLALKGLPKVVPQLVFDFSRTTDNMYRDRDALTSSEALKEMIQLLFVEPIPE

SEQ ID NO: 4431 - protein, 554 aa, Zea mays
  VARIANT 108: note = Ancestral polymorphism is E, Derived polymorphism is V
  VARIANT 75: note = Ancestral polymorphism is N, Derived polymorphism is Y
  VARIANT 54..554: note = Derived polymorphism lacks residues 54 to 554
MASPPAHRSSKAADEELPKASSTFHPSLWGSFFLTYQPPTAPQRANMKERAEVLRERVRKVLKGSTTDQLPETVNLILTLQRLGLGYYYENEIDKLLHQIYSNSDYNVKDLNLVSQRFYLLRKNGYDVPSDVFLSFKTEEGGFACAAADTRSLLSLYNAAYLWKHGEEVLDEAISSTRLRLQDLLGRLLPESPFAKEVSSSLRTPLFRRVGILEARNYIPIYETEATRNEAVLELAKLNFNLQQLDFCEELKHCSAWWNEMIAKSKLTFVRDRIVEEYFWMNGACYDPPYSLSRIILTKITGLITIIDDMFDTHGTTEDCMKFAEAFGRWDESAIHLLPEYMKDFYILMLETFQSFEDALGPEKSYRVLYLKQAMERLVELYTKEIKWRDEDYVATMSEHLKVSAESIGANALTCSAYAGMGDMSITKETFEWALSFPQFIRTFGSFVRLSNDVESTKREQTKDHSPSTVHCYMKEHGITMDDACEKIKELIEDSWKDMLEQSLALKGLPKVVPQLVFDFSRTTDNMYRDRDALTSSEALKEMIQLLFVEPIPE

SEQ ID NO: 4432 - protein, 538 aa, Zea mays
  VARIANT 56..538: note = Derived polymorphism lacks residues 56 to 538
  VARIANT 97: note = Ancestral polymorphism is R, Derived polymorphism is H
  VARIANT 101..538: note = Derived polymorphism lacks residues 101 to 538
MPGQDGGCGSPRTTAARTSMQRGGTSARSTSATATEASAPAASGGAAGQSHPFPWQDAAISEPYYFLHLLAFFSYFAVRSTTLSADDGGELHDHLLRREIQAVLVFLLLFVVKGLSMFGKNGSGTKYHYNEIISYLDLFIPGSLSGRRGSSQWICTPLSHGKFKFAYCFVGLSAVIACFFKSIEQIMRHSREVVVGVDPRTGAPVVRRDKVWNYTIADIALLAFGTNFPQISLATIDAIRNLGQLTAGGLGPGTLIGSMAFDLFLIHAVCVVMPRAGSKMKISDLGIWLVELFWSFWAYIWLYVILEVRDTITSQSRKNLSHGHVLHQKVGCMYAISLDREKPEQFASLFEKYLGFNVAGAGSTPLHYAACGGNVVYCQVCAAISARGERPEDWVPPEDVSAVYYAKCDGIDETLPMGADGNDGIVDIFSAHSYYDAAEYSQLAEEDMEGSSTMDQVVKNTQENMSWLSIWWQQFVDASMITVQRTEQNNPLGLEVQLHITEVVCPALSEPGLRAFLPFMTGVSVCLNRGDIDPKAQQ

SEQ ID NO: 4433 - protein, 397 aa, Zea mays
  VARIANT 52..397: note = Derived polymorphism lacks residues 52 to 397
  VARIANT 61..397: note = Derived polymorphism lacks residues 61 to 397
MLKCSHSAPLKRPRARFARLSAEIEAAGKAPAEPKPRVERICAMRASPIRTKTARVECPSERKKALTTPRSKAVRPRQELFHSVKHQKEPLAAAARKGTVVKSLFMSTTPKKELVQTPAADKSKGAVSEVCSKLRKLNLACREVPSKYMSQPQPKNTKTAKKSEETTVAKSEKRGLESKTNAKKKILGRSMKRANAGPDGENRNGCSTAVDENSLVETAGSHQERKVVLQELRIEVDASRCGNSDDNKENVSSAPSEEALDNSSHYGSENRLLENNDNVPLKENVALKVAKLQKKVHQEQAGKLKKTTNPRVLWDGWSLLKQLKPNTHSKNYYIHDIIRNFASGVMRTGASPIHLSIVSNGSYGLMESWARVLDFFANVGSLARYTRREATCLTLSG

SEQ ID NO: 4434 - protein, 593 aa, Zea mays
  VARIANT 247..593: note = Derived polymorphism lacks residues 247 to 593
MDCHGRGKGNEKAILYSGESSGAAGGLSKTYVVTKEGKRIELKGTIKDTWSHGTKRGKLGWKCGYCNASHASGGATRLREHLCGLQGNVKPCFNVPRDVKNILLEEVALSKKKKRDTTENRLYIQKALVEHDYRTTIARLNEEEQLEMAMRESLRDVGLTYDGSSRGSGIVIGATSGSRVSNSVVGNYGQTSGSRSGSSTKQSSLRSFYLGPSSSKAPFDIDLARSRAPSQPRVDIMLCRDSKLKLWKALSKWFHANDIPGRKADCPYFRSAMKLAQQLGEVPLPKGKDIDGQLLDMNYNDLEAHMESFKEDWSRYGQKNATLSGFLPKMIQAYNDISAKLKKSERGKGGLLKRTAEVISKRIRYLLNETLMLAGAALDPQELYRSNLAKKSSCQLAVTLAIKKLATSTKEAAAAIDQFSRFIEKKGLFGDPEAKWSALNGKPDAADFQSLQEKDSDPCSMLMDVALYDDQNPIMDWLNNSMSDSAPTLDEYDDSDLDWSTPSSFVTESLQMGIEEVAGFKRDLYMGKKVVKTNRECNGMEKMLKVPQKTMKLILHKNKAAQFMLSQVTVVPMMKVMVSFNQNFQFTFVINIM

SEQ ID NO: 4435 - protein, 437 aa, Zea mays
  VARIANT 330: note = Ancestral polymorphism is A, Derived polymorphism is S
  VARIANT 318: note = Ancestral polymorphism is T, Derived polymorphism is R
  VARIANT 311: note = Ancestral polymorphism is E, Derived polymorphism is G
  VARIANT 277: note = Ancestral polymorphism is K, Derived polymorphism is E
  VARIANT 141: note = Ancestral polymorphism is L, Derived polymorphism is V
  VARIANT 134: note = Ancestral polymorphism is S, Derived polymorphism is T
  VARIANT 52: note = Ancestral polymorphism is K, Derived polymorphism is T
MDATAFHPSLWGDFFVKYKPPTAPKRGHMTERAELLKEEVRKTLKAAANQITNALDLIITLQRLGLDHHYENEISELLRFVYSSSDYDDKDLYVVSLRFYLLRKHGHCVSSDVFTSFKDEEGNFVVDDTKCLLSLYNAAYVRTHGEKVLDEAITFTRRQLEASLLDPLEPALADEVHLTLQTPLFRRLRILEAINYIPIYGKEAGRNEAILELAKLNFNLAQLIYCEELKEVTLWWKQLNVETNLSFIRDRIVECHFWMTGACCEPQYSLSRVIATKMTALITVLDDMMDTYSTTEEAMLLAEAIYSITKESFEWLLTYPELAKSLMNISRLLNDTASTKREQNAGQHVSTVQCYMLKHGTTMDEACEKIKELTEDSWKDMMELYLTPTEHPKLIAQTIVDFARTADYMYKETDGFTFSHTIKDMIAKLFVDPISLF

SEQ ID NO: 4436 - protein, 405 aa, Zea mays
  VARIANT 238: note = Ancestral polymorphism is G, Derived polymorphism is A
  VARIANT 334: note = Ancestral polymorphism is R, Derived polymorphism is W
MASSASAGQGQGRRVEPVRAATGMGALPLDALYDILLRLPAKELCRLRSVCRPWRSLLSDPAFAAAHAARYPEPLIIVGYNYNDSAPPPESDERDWTKPRRYQCVISVMDLTGHVVKNLRVDGHIASMSLSLACVKRTGDGSCRLVNPATGAVHHVPEEDPPYGYSDRLCPFGQVASTREFKVLRKVSYSLNGNPRVLYEICTVAGTGRSNAQWRMIQDHPHRIDIDWRDKASVVIDGVVYFLSKNYASSSSSAGSEEQDWIASFDLDAERWRPNIRGPQSLTVVNNGNDNGLAVDEELSLTNLNGSLVIVHLQSPPCMNLWYLLDSEKGLWVRQYSIQVEEWDCSLSCFTPLIVLDDGRIVIHVEGSEMLEIYDPKTNKLSSVADTGVSSAVSVYTGTLLSLEW

SEQ ID NO: 4437 - protein, 474 aa, Zea mays
  VARIANT 37: note = Ancestral polymorphism is L, Derived polymorphism is H
  VARIANT 85: note = Ancestral polymorphism is H, Derived polymorphism is Y
  VARIANT 119: note = Ancestral polymorphism is K, Derived polymorphism is N
MASSFKPHAAPKRRALATFNIGALPLDLLVYEILLRLPAKLLCRLRTVCRLWRSILSDPHFAAAHAMRHPGPLIIAAIDERPDVHVNIMDLSGQILKQVRGVPGQRVVSTALDLVFVKKTDSSSSSYRFCNPFSGDVHYLPDQLLNPATGAVYQIPNSFAEEHIDFTSSFISQSRYLFGQVSSTGEYKVFRKLYHLSVQFGGRQLLEICTVNGSNHTGWRAVTPLEKNIQFGVFTSVVINGIIYSQCFDPHHSITYDCRATEEDLIITFDIETEKWGPFMRGPPISFSDAAAQVFNDLRLPPIKQLTLANLNGSLAVVHGPAPSMDIWILMDSGKGLWVKQYIIQFKEYASFQYVHPLVVLRDGRVVLYKEDMQLLQIYDPRTNTLTDSVEVLQDRIYCFLCSSQGCLVSVVAISLAIFFLFVLALTFTALDAGAAPLVCSVDVQVDLSLLWICKNAFILVKLRELYRLVPTIY

SEQ ID NO: 4438 - protein, 565 aa, Zea mays
  VARIANT 93: note = Ancestral polymorphism is A, Derived polymorphism is S
  VARIANT 118: note = Ancestral polymorphism is Q, Derived polymorphism is L
  VARIANT 394: note = Ancestral polymorphism is G, Derived polymorphism is R
  VARIANT 457..565: note = Derived polymorphism lacks residues 457 to 565
MALSELQARAWFVQSAAAGAGLRFDEERWLSRVRQSLEREAAEALGAAAKVLDVPRVLRATRPEAYLPQHFALGPYHSSRPELRDMERYKLAAAKRAEKLFAGGRRFDHLVQQLLLAQDRIRAPYHRFLELSDQTLAWMMAIDTCFLLDFLESYHRDEVTDMVSSATNWINATVRDAMMLENQIPLFLFSQALALRHPDAEQAAAAALHAVLDRFIKEVSPVKTTAELVVADVARHAHLLELLYHFLVPDATVFDGDGDGGREPPPMVPEEFTIDMLDPSQQLPDYDKVKQACMQVSSLDVAPVRFVRKNLISRPLSLASSLPGKIMRKVPLLSAVAPLVSRLMASTDVEAQLKGVNLGGIINSPLAQEIMIPSVATLERWGVRFAPAPEGVVGISFDAATATLSLPIITLDGNTEVVLRNLVAYEAVAVRGPLVLARYTELMNGIIDTPKDVKILRRSGVVVNRLKSDKEAADMWNGMCRATRLGKVPRLDAAIREVNAHRNRRAAARAQKLLKKYVFRSWRILTLLAAVVLLLMTAMQTFCSVYPCTRWFGSVFQMPQVGGTR

SEQ ID NO: 4439 - protein, 105 aa, Zea mays
  VARIANT 20: note = Ancestral polymorphism is S, Derived polymorphism is L
  VARIANT 34: note = Ancestral polymorphism is P, Derived polymorphism is L
MAKQYSPSAVERSWYAWWESSGYFGADSASTKPPFVIVLPPPNVTGALHIGHALTVAIEDAMIRWRRMSGYNALWVPGVDHAGIATQFLVMEFGERASILVVKGS

SEQ ID NO: 4440 - protein, 171 aa, Zea mays
  VARIANT 52..171: note = Derived polymorphism lacks residues 52 to 171
MARATAPSSRPPSAMAAAAAAAAATAASAAASLVPQRRATARGASSRSQPHQHRRATLPVVAPARPKRASCACSPTTHPGSFRCALHRGGQGPLPASASAALVSSRLSAPRRASMANPLVRIAAVEGGDHIRRALAALVRPTPSQTRRRADAFRPTPSRLSAMSSTAAAAP

SEQ ID NO: 4441 - protein, 112 aa, Zea mays
  VARIANT 112: note = Derived polymorphism lacks residues 112 to 112
MAERRLGVGRKASARRRVCEGVGRTSAASARLMWSPPSTAAMRTSGLAMDARRGALSLLDTSAAEAEAGSGPWPPLCRAQRKEPGCVVGEHAHDARFGRAGATTGSVARRCW

SEQ ID NO: 4442 - protein, 213 aa, Zea mays
  VARIANT 110..213: note = Derived polymorphism lacks residues 110 to 213
  VARIANT 154: note = Ancestral polymorphism is D, Derived polymorphism is Y
  VARIANT 174..213: note = Derived polymorphism lacks residues 174 to 213
  VARIANT 202: note = Ancestral polymorphism is I, Derived polymorphism is T
MLRIMEQQGNDGVNSSRSSPFFHNDQWTYTLVTELDHLQHGQNTHFHNPSSSHMSMPPSFQQLLEVYNPFLERAEQPNSQETTKETHSPLPQVGSKQKKVSRRGGGFTKEEDRVICSAFLNVSKDPITGVNQSSGGTTSAFLSILMLESPQLDDAVKLFEEKEAFVFMHCWEILRDEPKWNDRMLELNNASTPLYQGWARNIKHRRHSNPWRV

SEQ ID NO: 4443 - protein, 202 aa, Zea mays
  VARIANT 44: note = Ancestral polymorphism is C, Derived polymorphism is R
MSDGFVFPPSEHENLPIELEHENLPIEPEHDESNTNNLEKESSCAGNNDDDWCHVSPEEIDGVSNENLADNSDLPTASEATVPDSHPTEINAKREKDHTTCKADHTCERWWKKKTTYLFHHIKGVTTLCSVVAAGAVVGFVVMGQRWQQDHWHLHQFKFSVSGESMNRVIGAFSRLKDGLPGSEQLRSLLPTRVLLKQPLSA

SEQ ID NO: 4444 - protein, 255 aa, Zea mays
  VARIANT 105: note = Ancestral polymorphism is R, Derived polymorphism is W
  VARIANT 173: note = Ancestral polymorphism is P, Derived polymorphism is L
MSSTRIEPPGGGGSHAAHDPRAREQQSPGRRGALQPAEWQTWRGREEEEPQRPRRYSFRRHRSGAAEWAAVVLFTVLAVVVLLGAVAVLVVVLLLQPRAPYLAVRAASLNTLVYGQTGALDDVQLTVRVEARNGNAHSAAYFSRLECRLAFAGATLAVLRADPFRVPARGVLPLAYVARAQGVPLGDAGSAAMEAALRDGVVPFRVEGEARTRWKVAGIVAIDQWTRLACQLRFFWPNGTALPFRCSSKSKFLFF

SEQ ID NO: 4445 - protein, 603 aa, Zea mays
  VARIANT 180..603: note = Derived polymorphism lacks residues 180 to 603
MYLTSCSRLAQPSKSSVALPESGESMYAAARVEVEADRKKEKVDETERMAREKKNTHEKEQIRKVVMGKRKRNEDELGMEEKQMIAEKEKEEKVKKGNGGGILTTKLFSELYISELTAKAIREMNYSHLTEIQARSIPHLMLGNDVLGSAKTGSGKTLAFLIPAIELLHKASFMPRNGTGVIVVCPTRELAMQTHNVAKELMKYHSQTLGYVIGGTNMRNDANQLLKGINLLVATPGRLLDHLRNTRSFNYKRLQCLIIDEADRILEQNFEEDMKQIFKRLPQDRQTVLFSATQNQKVVEFANFTFGQNEERQKKLVYVGVDDSKLKPTVEGLQQGYCVIPSEKRFLVLYAFLRRMQLRKEDLKVMVFFSSCSSVKFHAEFLNFLGIGCYDIHGQQKQQKRTSTFFQFLKEKNGILLCTNVAARGLDIPDVDYIVQFDPPDDPKDYIHRVGRTARGDKGKGSALLFLLPEELKLLIYLQAAKISLTEYVFSEKHVPKSQSQLEDVVGGNYFLNQSAKEAYRSYLLSYNSHSMKDIFDVHQLDLKKVAASFCFKNPPKVNLDLDSSSSKHRKMRKADGANRHGIGPSTPYGRSGRYGSRQLARF

SEQ ID NO: 4446 - protein, 262 aa, Zea mays
  VARIANT 177: note = Ancestral polymorphism is L, Derived polymorphism is V
  VARIANT 188: note = Ancestral polymorphism is P, Derived polymorphism is S
  VARIANT 190: note = Ancestral polymorphism is C, Derived polymorphism is Y
  VARIANT 197: note = Ancestral polymorphism is P, Derived polymorphism is L
  VARIANT 198: note = Ancestral polymorphism is A, Derived polymorphism is D
  VARIANT 215: note = Ancestral polymorphism is A, Derived polymorphism is S
MAHILPSPHAAAAPAAHPAASSHTPRDPPASSSPRPQHPPPMVAATPAQGKLLPKSAHGYKISSVQPLAWHKCSDLDPSDKISQIPQTSSSERIPQPHARIPQPRRSRSFHPRGSPSRSFHPHEDPPAVPSILADPSALDRIPLIAATINALLPHEIDGARVEGVGRRCAAAINDVLPICSAILAILPGYQSVFGSPAEAQIYLNGFPMKHHLVAHWHHLCSVETGHLLCWLLTLRTVLVRNCYLVGCSPMQWCCTNFILLQ

SEQ ID NO: 4447 - protein, 129 aa, Zea mays
  VARIANT 16..129: note = Derived polymorphism lacks residues 16 to 129
  VARIANT 90: note = Ancestral polymorphism is C, Derived polymorphism is W
MTRGGGGDMKSFFRQQKTHAAAATTKPTGGVSKKAAAHHHKKAALATNVHPAPCTDPDHGAGSRQQEEAEAEQRERAGREFDMDTRYGPCLGVTRAQRWRRAAALGLAPPPALLALCADEQPCLWEGRV

SEQ ID NO: 4448 - protein, 229 aa, Zea mays
  VARIANT 165: note = Ancestral polymorphism is N, Derived polymorphism is K
  VARIANT 195: note = Ancestral polymorphism is K, Derived polymorphism is N
  VARIANT 212: note = Ancestral polymorphism is T, Derived polymorphism is I
MATQISKKKKFVSDGVFYAELNEMLTRELAEDGYSGVEVRVTPMRTEIIIRATRTQNVLGEKGRRIRELTSVVQKRFNFPENGVELYAEKVVNRGLCAIAQAESLRYKLLGGLAVRRACYGVLRYVMESGAKGCEVIVSGKLRAQRAKSMKFKDGYMISSGQPVNEYIDSAVRHVLLRQGVLGIKVKIMLDWDPKGKVGPITPLPDLVTIHTPKDEDEPRPPVLAPPEV

SEQ ID NO: 4449 - protein, 785 aa, Zea mays
  VARIANT 187: note = Ancestral polymorphism is G, Derived polymorphism is R
MDLPRPQAPCCRRPADLRPAPCCIDAPRPSDLRGCAPAAGALWKPSASYPRAAVPPASVRLHDISVRGEEDEQKEMLQQMTDGVRAMLGSIGDGAINISAYDTAWVALVKSLEGGNGPQFPSSLRWIVENQLPDGSWGDEEFFLVYDRMINTLACVIALESWEIHADMCEKGLSFIRENLWRLEHSGSDDWMVVSFEITFPQLLEMARDLGLDVPCDEPSLRAIYARRDAKLARIPKELLHASPTTLLLSIEGMPGLDWERLLKLQCSDGSFMSSPAPTAYALMQTGDTKCLEFLNGIVSKFSGGVPFTYPVDLFEHLWVVDRIERLGIGRHFTGEIKECLEYVHRYWGDEGLPATRDGPVSDVDDTAMGFRLLRLHGYDVSPSVFKHFEQDGAFYCYPGQSNKSVTAMYNLYRASQVAFPGEDELRRAEAYSREFLCRRRASGELKDKWVIPKDLPGEVAYALDVPWKASLPRIETRMYLEQYGGADDVWIGKVLYRMSLVNNELLLRTAQADFRSFQRQCKLEWHGLRKWASRRNLQAYGVTSNSTLRSYFLAAASIFEPDRATERLGWARTAVLAEAVSSCLRDGRCSRADGMLRELTSGIHLRNDDNPAASLVHALHELIGLLAFDNASYNSLLDAWKQWLAMWTAQGHEGSVALLLVRTVEICSGRRRSASATDDGQAHSLSEYSQLEQLTSSVCSKLAAAGTGDGDDLSPASVEDAADRHRVDLEMQTLARCVLRSRSSIDAVTRQTFLHVARSFYYVAHCSARTVDAHISKVLFEDVV

SEQ ID NO: 4450 - protein, 427 aa, Zea mays
  VARIANT 209: note = Ancestral polymorphism is P, Derived polymorphism is L
  VARIANT 59: note = Ancestral polymorphism is H, Derived polymorphism is Y
MMPMPPSPPAVPLIGHLHLVAGGLPHVRLRDLAARQQDGEGLMLLRLGTVPTLVVSSPHAAQQVLRAHDKSFASRPRTVVGDILSYGPSDVGLAPYGDWWRQAKKLVTTHLLSARKVQCYRAAREEEVGAVIAKIHGAAGAHAAVDMSELLSSFTNDILCRAVAGRSFRADDGRNKVFRYAGTAVVGGFNPENLYPRLAKVAGGVLTWPARRRAERLRSQWDKVFDALIDEHAREMAGGAGGGDLEETDFIHVLLSVQEEYGLTRNSIKGILADMFTAGTDTSYAALEFAMAELMRHPHALAKLQAEVRKTTAAAAASGEKQVKETNLDGMTYLKAVIKETLRLHPPAPLLLPHLSLEDCDLDSYTVPAGTTVLINAWAIGRDPRVWNAPDEFMPERFIVDDDDDMGGIDNNGSVDLRGNDFQFLPF

SEQ ID NO: 4451 - protein, 705 aa, Zea mays
  VARIANT 348..705: note = Derived polymorphism lacks residues 348 to 705
  VARIANT 149..705: note = Derived polymorphism lacks residues 149 to 705
MIYTGGKLIDGNTLVSAGGSFTLGFFSPPGEPTKRYLGTWFSFSAPTPDATAIYWVANRDRPLAGTSSALVLTTSGTLLLLDGTTNDTVWSSGSTASTPPAGARILDSGNLVVVQGRNNSTALWQSFDHPCNSLLPGMKIGQNLWNGDEWYLSSWRSPTDPGPGSYRYITELGGGTPENVMRDSGSAKRYRTGPWNGERFDGVPEMASYSSYFTYQVTVSPSEATYSYNAKPGAPYSQLRLGDAGVVQRLVWDAGSRQWNSFLKEPRDDCDDYAHCGAFGLCDRNAASTSLCTCFKGFVPAVPKEWSLREYSDGCRRNVSLDCGGSNRSRSSTDGFQVVPLVKLPDTQNATVDMAISLDECGLRCLANCSCVAYAAADATGGGCIIWTDSFTDLRFVEKGQDFYLRLPKSLLGGKKKKKVAIWIIVVVVLVVAVLVVIGIISGIVFRKKCKRPRVTTPPVGPVQVPGHSIHYQILKDGTKNFSEENKIGQGCFGKVYKCELPPSESTRIGVPGGVNKVAVKVLNQSDKYFEREVQICCALSDVNLARLLAYCNTNTDDTEGRDCKGPILVYEYMEKGSLDDYIFGTYDNLLLYLRTPISIVKINIVITHASVQKLLDPLVPLSDEEKDPKFLSRLRRCVHIALLCVQESPGKRPDISRVLEMLRTDCELPEPEDPTLPAVVEEGETSGTRRTDDDNDIREQNHQL

SEQ ID NO: 4452 - protein, 196 aa, Zea mays
  VARIANT 11..196: note = Derived polymorphism lacks residues 11 to 196
MAHSEPNFHVETRPAFSRRVTIPETSTRHFLSPPLVTDTVGHAATPPSLVAATTPPAIFRASKARLEMPRGRRKQTVESNEEYLSEDHVVQKNSQKTLAHESDSEMEEESFARVYVEPQNQEFKMVNEKTYSQREQEAKEYKDLQPTSRNTSTIHKVLCYLIPHLPRFHGIMQTLIIFIELKKISRCFNSVQDDIM

SEQ ID NO: 4453 - protein, 106 aa, Zea mays
  VARIANT 22: note = Ancestral polymorphism is S, Derived polymorphism is R
  VARIANT 62: note = Ancestral polymorphism is A, Derived polymorphism is T
MGLQEEFEEHAEKAKTLPESTSNENKLILYGLYKQATVGDVNTDRPGIFYQKDRAKWDAWKAVEASQGITVLLAQTLEILAGKSKDEAMNDYITKVKQLQEEAAAS

SEQ ID NO: 4454 - protein, 258 aa, Zea mays
  VARIANT 188: note = Ancestral polymorphism is A, Derived polymorphism is V
  VARIANT 228: note = Ancestral polymorphism is A, Derived polymorphism is T
MEMGDSFEYYWEMQQYLESEELSLYMGTQDDALSCYDSSSPDGSISNSSWAPAGVAATASEKREGPGGAAAANKNILMERDRRRKLNEKLYALRSVVPNITKMDKASIIKDAIEYIEQLQAEERRALQALEAGEGARCGGHGHGEEARVVLQQPAAAPAPVEVLELRVSEVGDRVLVVNVTCSKGRDAMARVCRAVEELRLRVITASVTSVAGCLMHTIFVEVDSDQTNRIQIKHMIEAALAQLDDASASPPSVMSYY

SEQ ID NO: 4455 - protein, 1153 aa, Zea mays
  VARIANT 489..1153: note = Derived polymorphism lacks residues 489 to 1153
  VARIANT 447..1153: note = Derived polymorphism lacks residues 447 to 1153
  VARIANT 445..1153: note = Derived polymorphism lacks residues 445 to 1153
MSSLSRELVFLILQFLDEEKFKETVHKLEQESGFYFNMKHFEDLVQGGEWDEVEKYLSGFTKVEDNRYSMKIFFEIRKQKYLEALDRHDRAKAVEILVKDLKVFASFNEELFKEITQLLTLENFRQNEQLSKYGDTKSARNIMLLELKKLIEANPLFRDKLNFPPFKASRLRTLINQSLNWQHQLCKNPRPNPDIKTLFTDHSCAAPTNGARAPPPANGPLGSIPKSAGFPPMGAHAPFQPVVSPSPNAIAGWMTNANPSLPHAAVAQGPPGLVQAPNTAAFLKHPRTPTSAPGIDYQSADSEHLMKRMRVGQPDEVSFSGASHPANMYTQEDLPKQVSRTLNQGSNVMSLDFHPVQQTILLVGTNVGDIAVWEVGSRERIAHKTFKVWDIGSCTLPLQASLMKDAAVSVNRCLWSPDGTILGVAFSKHIVQTYTFVPNGDLRQQAEIDAHIGGVNDIAFSHPNKTLSIITCGDDKLIKVWDAQTGQKQYTFEGHEAPVYSVCPHYKESIQFIFSTAIDGKIKAWLYDCLGSRVDYDAPGHWCTTMAYSADGTRLFSCGTSKEGDSHLVEWNETEGAIKRTYNGFRKRSLGVVQFDTTRNRFLAAGDEFLVKFWDMDNNNILTTTDCDGGLPVSIFLFLIPVRAASPRLRFNREGSLLAVTTSDNGIKILANTDGQRLLRMLESRAFEGSRGPPQQINTKPPIVALGPVSNVSSPIAVNAERPDRILPAVSTSGLAPMDASRTPDVKPRITDESEKVKTWKLADIVDNGHLRALHLTDTDTNPSKIVRLLYTNNGVALLALGSNAVHKLWKWQRSDRNPSGKSTASVAPHLWQPANGILMTNDTNDGNPEEATACIALSKNDSYVMSASGGKVSLFNMMTFKVMTTFMAPPPAATFLAFHPQDNNIIAIGMEDSTIQIYNVRIDDVKSKLKGHQKKITGLAFSQSMNVLVSSGADAQLCVWSIDGWEKKKSRYIQPPANRPGTLVGDTRVQFHNDQTHLLVVHESQLGIYDGNLDCLRLWSPRDALPAPISSAIYSCDGLLVYAGFCDGAIGVFEAESLRLRCRIAPSAYIPPSILACAGRVYPLVVAAHPMEPNQIAIGMSDGKVHVVEPLDGDPKWGSAPPQDNGAHPHPHPAISAAPSTATNQASDQPTR

SEQ ID NO: 4456 - protein, 223 aa, Zea mays
  VARIANT 76: note = Ancestral polymorphism is T, Derived polymorphism is A
MVDFVRRLASALLKCCDLDIPNRPKGLEDPERLARETVFNVNEIEALYELFKKISSAVVDDGLINKDEFQLALFKTNRKDSMFADRVFDLFDTKHNGILEFEEFARALSVFHPSAPIDDKIDFAFKLYDLKQQGFIEKQEVKQMVVATLAESGMNLSDDIIEGIIDKTFEEADTKHDGKIDKEEWRSLVLRHPSLLKNMTLPYLRDITTTFPSFVFNSQVEDA

SEQ ID NO: 4457 - protein, 348 aa, Zea mays
  VARIANT 23: note = Ancestral polymorphism is S, Derived polymorphism is A
MGTDYYNVLKVNRNATEEDLKKSYRRLAMRWHPDKNPGDVKKEAEAKFKKISEAYEVLSDPQKRAAYDQYGEEGLKASADGGGGGGGSTSTNGAANQRFNPRNAEDVFAEFFGSNKPFENMGRAKSMRFQTEGAGTFGGFGGNESKFRPYNNDSAGTGSSQARKPPPVETKLPCTLEELYAGSARKMKISRNVVKPNGQLGTESEILTIDIKPGWKKGTKITFPDKGNEQPNQLPADLVFVIDEKPHDLYTREGNDLLVHRKIDLVDALAGTTVSLKTLDGRDLVIRLTDVVTPGYELVVAKEGMPIVKENGRRGNLRIKFDVGFPKRLSSEQRHTIRKVLGGQPQQQ

SEQ ID NO: 4458 - protein, 119 aa, Zea mays
  VARIANT 4..119: note = Derived polymorphism lacks residues 4 to 119
  VARIANT 24: note = Ancestral polymorphism is G, Derived polymorphism is D
  VARIANT 25: note = Ancestral polymorphism is F, Derived polymorphism is S
  VARIANT 57: note = Ancestral polymorphism is K, Derived polymorphism is N
  VARIANT 87: note = Ancestral polymorphism is P, Derived polymorphism is L
  VARIANT 99..119: note = Derived polymorphism lacks residues 99 to 119
MLLSFLLPTTFYMEGPWAAMATTGFFLVVAVTDWLDGYIARKLGTPFGAFLDPVADKLMVATTLVLLCTKPLESSLLNDGPWLLTIPSIAIIGREVVTQPICISTSKVFSEFICSLYFF

SEQ ID NO: 4459 - protein, 424 aa, Zea mays
  VARIANT 50: note = Ancestral polymorphism is L, Derived polymorphism is R
  VARIANT 133: note = Ancestral polymorphism is S, Derived polymorphism is F
  VARIANT 205: note = Ancestral polymorphism is G, Derived polymorphism is D
  VARIANT 213: note = Ancestral polymorphism is A, Derived polymorphism is T
MPSGCSVSSLAARFAFFPPEPATYAVRKDEATGRLVASGVPRDNAMDVLLVDTSRGNKVVAFYFRNPCARLTLLYSHGNAADLGQLYDLFVQLKVNLKINLMGTWYQRRFSLYGCVCVTDQFRFACGGRRKHSVTRIGDMDVVILVFPRRFSNVVSIEDSVYMAAYALLPSEENTYADIEAVYQCLETEYGISQEDIILYGQSVGSGPTLHLASRLPRLRGVVLHSAILSGLRVVCHVNFTFCFDIYKNVKKIKKVKCPVLVIHGTDDDVVDWSHGKELWRLAREPHDPLWIKGGGHCNLELYPDFIRHLSRFVREMETVTTKARLRKIRPALHQLRKKAAHRASTAATTTTTTTFTANCCCRVRVRKPTCPSCGSFGCGCCGPLRSCLALRFPRCCRPPAACFTCGGCCWSCRCRSCFKCCCC

SEQ ID NO: 4460 - protein, 323 aa, Zea mays
  VARIANT 25..323: note = Derived polymorphism lacks residues 25 to 323
  VARIANT 26..323: note = Derived polymorphism lacks residues 26 to 323
  VARIANT 33: note = Ancestral polymorphism is L, Derived polymorphism is P
  VARIANT 47: note = Ancestral polymorphism is A, Derived polymorphism is V
  VARIANT 89..323: note = Derived polymorphism lacks residues 89 to 323
  VARIANT 100..323: note = Derived polymorphism lacks residues 100 to 323
  VARIANT 167: note = Ancestral polymorphism is T, Derived polymorphism is I
MQKRAEGSPTPKSGRVLGPALGDQQQGTFSVNLWKVMEQCVARLDVAMFNAILRESASEIPTDPISDPIVNPKVLPIPAGDLSFGSGAQLKNSIGNWSRWLTDKLGIDHDDSEDIGDVEDERRAAAETKSFQLLNELSDLLMLPKDMLLEKSIRKEACPSIGLQLVTRILGNFTTDEFCPDPVLSTVLEELNSEVCSTQLDGASRQQRRDQCVSVHRCPYSVPHTFNVGRGRESSRHRRCAAERAADIGGGAKLDRKASMVQRRGYTSDDNLDDLDSPLASLIDRSTPPSPSNGFAHFSARRGVSMENTRYTLLREVRGLEQR

SEQ ID NO: 4461 - protein, 201 aa, Zea mays
  VARIANT 130: note = Ancestral polymorphism is L, Derived polymorphism is H
  VARIANT 128: note = Ancestral polymorphism is A, Derived polymorphism is T
  VARIANT 107: note = Ancestral polymorphism is R, Derived polymorphism is C
  VARIANT 78: note = Ancestral polymorphism is C, Derived polymorphism is Y
MEEDMEVTEQEERGVVDSDVEGFSIALADLDPVQVNDLLGDEPIVDTSVTTQKTYPTINAIQLMDGVCHLNACILILYSWMTILNYFGNNIPINGSMSGCHREDHPRHRCPSGPFDILGLANDPYQTAILKRRTTSCKTTILQQKNDFSKSMVLIWHVVFSGNLPILRFLLDHGDDLHEEGSLEGHDRFTVLHITTEKDIM

SEQ ID NO: 4462 - protein, 317 aa, Zea mays
  VARIANT 273: note = Ancestral polymorphism is P, Derived polymorphism is L
MEFIDPWDSQSRARVVHSGANSTSFSSSTAKAPLSLRHAASCAAAAVALLAAAFYLLPTYQILSSLLIWIASSLLLAPFAPLSATGGDISVGRGRVVPAPEPAPEPTPEPTPAPRRGRRQNPVPTPTKPSDPGTPPVQSAASLHPLQKATTADGAVVDGGEREEDAGEWTDQELELLRRQMVKHPAGEPQRWEKIAAVFGGRRTPENVIRAAKSGAPAAGGSSFEQFLRKRKPLDPRAEAAVTADDAGGAESADAAWSAGDDRALLNALKEFPKDTAMRWEKVAASVPGKTKAVCMKRITELKRDFRSTKTASEAAS

SEQ ID NO: 4463 - protein, 558 aa, Zea mays
  VARIANT 18: note = Ancestral polymorphism is A, Derived polymorphism is V
  VARIANT 125: note = Ancestral polymorphism is D, Derived polymorphism is Y
MAALALLPLVLRLFAVQAGGRVDGRFTACLAAAGVGNVTTRQSPGYAAALLVSVQNLRFAGAGAPKPAAVVVPASLQELCDAVRCARGAGLALRLRSGGHSYEGQSYTTSDGGGAFAVVDLAALDRVRVDAARRTAWVQAGATLGQAYRAVAAASPALALSAGSCPTVGSGGHIAGGGFGLLSRKHGLAGDNVVDAVLVDARGRVLDRAAMGEDVFWAIRGGGGGAWGAVYAWRVRLSPVPERVTAFVVNRPGPARSVASLVSTWQHVAPWLPDEFYVSAFVGAGLPEADPGRRAAGVSVTFKGLYLGPAHEAMQILAARFPEIGLSDLAPREMSWIESVVFFSGLPEGSAVSDLADRVLHTKTYFKAKSDYVRRPTPLDHLVKAVGLLSEQPKAYVILDPYGGAMDRVGSAVLPFPHRKGNIHGIQYMVEWTAGDDERREEYMGWLRRFYDFMGAYVATEPRAAYVNYMDLDLGTNDWSDADERSPNPQVEAARAWGERYFLGNYDRLVRAKTLIDPDNVFRNAQSIPPLGGGAHGMTWSTRGISPKATSNGSTYDI

SEQ ID NO: 4464 - protein, 249 aa, Zea mays
  VARIANT 118..249: note = Derived polymorphism lacks residues 118 to 249
MLHMDLSLGTLVEVEDSQEVQEEDNNLYKQQRALGQDLHRRQGVSGGGPSHSHGVEREHMFDKVLTPSDVGKLNRLVVPKQHAERFFPAAGAGSTQLCFQDRGGALWQFRYSYWGSSQSYVMTKGWSRFVRAARLAAGDTVTFSRSGGGRYFIEYRHCQRRRRDVDISFGDAATVPAWPRPIVIGTAAMNNGGATVASATIAGHDIEVAVAPSGARSFRLFGFNVECSGDDAPAPAPAPAEVEYVDGDT

SEQ ID NO: 4465 - protein, 663 aa, Zea mays
  VARIANT 51..663: note = Derived polymorphism lacks residues 51 to 663
MPARGEGRPAKERVDQLEKEAINNGTSPGQAHDIDIPPPRPKRKANSPYPRKSGLSSETPTKELPSDKSTKPNMPLSNENVLMAGDASLQKFQRKELSGKESCSEVLNLFRDAPSPSFSSVNKSSSNHGAPIEASKTKIRDMTIMENSSLNPNMQEDVKEINDQEMERLNGTQISSKCEHSHEGYLDISMQQMKLKPESVETTYVDKQTARASHSLAERTGTTSIPVTATEETHSVLTSDQVGINGSMNPSIHPMFPADPKFDSSATPQPFPHNYAAFAPMMQCNCNQDTHRSLVNMSSTFSSMLVSTLLSNPAIHAAARLAASYWPAAEGNTPIDPNQENLADGVQGRSIGSPPSMASIVAATVAAASAWWATQGLLPFFAPPMAFSFVPAPSAAFPTVDVPRPSEKDRDCPAENAQKECQEARKQGQFEGFRVAASSEYDGSGKGEVSVHTELKISPVQNADATSAAGADTTDAFMNKKKQDRSSCGSNTPSSSDVDVDNVPEKEGNGNEKAKQASCSNSSAGDTNHRRFRSSGSTSDSWKEVSEEGRLAFHALFSREKLPQSFSPPQAEGSKEVGKEEEDEVTTVAVDLNKSTTSIDHDLDTIGEPRASFPNELSPLKLKLRRTGFKPYKRCSVEAKENRVPASDEVGTKRIRLDSEAST

SEQ ID NO: 4466 - protein, 60 aa, Zea mays
  VARIANT 48: note = Ancestral polymorphism is R, Derived polymorphism is H
  VARIANT 28: note = Ancestral polymorphism is T, Derived polymorphism is A
MEVNSSGEETVIKVRKPYTITKQRERWTEAEHKRFLEALKLYGRAWQRIEVMGLKSMSHV

SEQ ID NO: 4467 - protein, 89 aa, Zea mays
  VARIANT 5: note = Ancestral polymorphism is K, Derived polymorphism is R
MALLKSQDNRALFLLAMVVVAMAIVLAPCPAHGGDDERCTHMPGCNISRCRSQCKQWGYANPVINCWNTPPNTELDTCCCFSNAARKLA

SEQ ID NO: 4468 - protein, 234 aa, Zea mays
  VARIANT 220..234: note = Derived polymorphism lacks residues 220 to 234
  VARIANT 171: note = Ancestral polymorphism is I, Derived polymorphism is F
  VARIANT 168: note = Ancestral polymorphism is A, Derived polymorphism is V
  VARIANT 157: note = Ancestral polymorphism is R, Derived polymorphism is C
  VARIANT 153..234: note = Derived polymorphism lacks residues 153 to 234
  VARIANT 125: note = Ancestral polymorphism is L, Derived polymorphism is P
  VARIANT 121: note = Ancestral polymorphism is P, Derived polymorphism is S
  VARIANT 118: note = Ancestral polymorphism is A, Derived polymorphism is T
  VARIANT 115: note = Ancestral polymorphism is A, Derived polymorphism is V
  VARIANT 114: note = Ancestral polymorphism is A, Derived polymorphism is T
  VARIANT 112: note = Ancestral polymorphism is G, Derived polymorphism is S
  VARIANT 82: note = Ancestral polymorphism is R, Derived polymorphism is G
  VARIANT 30..234: note = Derived polymorphism lacks residues 30 to 234
  VARIANT 24..234: note = Derived polymorphism lacks residues 24 to 234
  VARIANT 18: note = Ancestral polymorphism is G, Derived polymorphism is R
  VARIANT 17: note = Ancestral polymorphism is T, Derived polymorphism is I
MERAERTSLAPVVVPKTGFYILVWYTFSTYLMPYSQLLSSVPAQTDGMLLREAMVDPLLEKYKVIVLDETHERTFNSIQRPREQIVDENAVGPYHLFGTIIHGSYPSLLLLGLAAIMAEEPFKLLIVDSVIALLRVDFSGRGELAERQQKLAQMLSRLTKIAEEFNVAVYITNQVIADPGGGMFITDPDFKEEEDRQLLLLLTFVTPTSRTEVVSDERRGEHRSALSIGDVATS

SEQ ID NO: 4469 - protein, 223 aa, Zea mays
  VARIANT 209: note = Ancestral polymorphism is T, Derived polymorphism is I
  VARIANT 76: note = Ancestral polymorphism is T, Derived polymorphism is A
MVDFVRRLASALLKCCDLDIPNRPKGLEDPERLARETVFNVNEIEALYELFKKISSAVVDDGLINKEEFQLALFKTNRKDSMFADRVFDLFDTKHNGILEFEEFARALSVFHPSAPIDFKIDFAFKLYDLKQQGFIEKQEVKQMVVATLAESGMNLSDDIIEGIIDKTFEEADTKHDGKIDKEEWRSLVLRHPSLLKNMTLPYLRDITTTFPSFVFNSQVEDA

SEQ ID NO: 4470 - protein, 78 aa, Zea mays
  VARIANT 56: note = Ancestral polymorphism is G, Derived polymorphism is W
  VARIANT 52: note = Ancestral polymorphism is P, Derived polymorphism is L
  VARIANT 40: note = Ancestral polymorphism is T, Derived polymorphism is I
  VARIANT 38..78: note = Derived polymorphism lacks residues 38 to 78
  VARIANT 34: note = Ancestral polymorphism is A, Derived polymorphism is V
  VARIANT 31..78: note = Derived polymorphism lacks residues 31 to 78
  VARIANT 21: note = Ancestral polymorphism is G, Derived polymorphism is C
  VARIANT 20..78: note = Derived polymorphism lacks residues 20 to 78
  VARIANT 10..78: note = Ancestral polymorphism lacks residues 10 to 78
  VARIANT 7: note = Ancestral polymorphism is T, Derived polymorphism is I
  VARIANT 5..78: note = Derived polymorphism lacks residues 5 to 78
MSRAERTCCRGRSNKRASGRGAPSTRYMWRGSGAMYLSSTGVGTASATFVQPQCLGTTIVAKPAIEPGECLEITKLST

SEQ ID NO: 4471 - protein, 318 aa, Zea mays
  VARIANT 164..318: note = Derived polymorphism lacks residues 164 to 318
  VARIANT 156: note = Ancestral polymorphism is T, Derived polymorphism is A
  VARIANT 123: note = Ancestral polymorphism is C, Derived polymorphism is Y
  VARIANT 120: note = Ancestral polymorphism is H, Derived polymorphism is N
  VARIANT 35: note = Ancestral polymorphism is Y, Derived polymorphism is C
  VARIANT 25: note = Ancestral polymorphism is G, Derived polymorphism is D
MRVAYSAVAHFLLQWTDCKLAAALGLLKVMLYKVCADGSSALPDWDMEASIREFYGVIFPSLLQLPSGITELDDRKERKLCLKKFRSRDEQLSEVDTERELECGICLEVSPKVVLPNCAHMLCMRCFEDCYVFQLCTFMSIKFYNLVVAKYEMAPTLLRSLKPQDMSVTIQVQVSRKWEFHGNTDIGSILHIDMILADKECQMVCLYISIHFTAALFEVRGQVEAKMSKEDVLKVQISEADYVHISYHDFYSAFLFSTSWTLPASAVSSATSTANSGASCYMQMPSKLPNPAAGKEMRFATATIFHYTTGFFSSIWIR

SEQ ID NO: 4472 - protein, 168 aa, Zea mays
  VARIANT 134: note = Ancestral polymorphism is P, Derived polymorphism is S
  VARIANT 127: note = Ancestral polymorphism is L, Derived polymorphism is P
  VARIANT 81: note = Ancestral polymorphism is R, Derived polymorphism is S
  VARIANT 71: note = Ancestral polymorphism is E, Derived polymorphism is K
  VARIANT 37: note = Ancestral polymorphism is D, Derived polymorphism is V
MVSGEDSQAILLFYLSDKDLRMLILFTWEYHFLHVGDEMLQSKLLDRDSFVYGRFYYPLRECFALLADDPEHGEASSNDMRKDEQGREDLLSRKVEQVAEVRALLLLPLCSPNVLGQPLLQNLQSNPVNALKSPSSLLEGKKLLLTNIICVLLVHFQKQLPFIKNRLT

SEQ ID NO: 4473 - protein, 146 aa, Zea mays
  VARIANT 104..146: note = Derived polymorphism lacks residues 104 to 146
  VARIANT 88: note = Ancestral polymorphism is G, Derived polymorphism is S
MASRAGGDGKEAINEQVIANTYANMRTEMNQLYTKITELEMEVSEHSLVMGAIEPLDPSRRCYRMIGGVLVERTIREVMPAVKRNKEGLEEVIARMHEALERKKKEITEFELKYKIRIRKADSDAEDEGGKKEGTAQGVLVGPAGQ

SEQ ID NO: 4474 - protein, 547 aa, Zea mays
  VARIANT 173: note = Ancestral polymorphism is R, Derived polymorphism is C
  VARIANT 167: note = Ancestral polymorphism is E, Derived polymorphism is D
  VARIANT 140..547: note = Derived polymorphism lacks residues 140 to 547
  VARIANT 31: note = Ancestral polymorphism is T, Derived polymorphism is R
  VARIANT 30: note = Ancestral polymorphism is T, Derived polymorphism is M
MEVPAPPAWASPLATTTTILLVTAALVLVTTTVLRRRAHRHRKRQRQAPPGPRPWPVIGNLNLLGALPHRSIHELSARYGPLMSLRFGSFPVVVGSSVEVAEVVLRTQDLAYLDRPRMACGKYTVYNYSGMLWSHYGPYWRQLRKLWVTELLSARQLRLTERVRAEEVRAMLRDLHPHPATSTTSTAAVVLKERLLMVTLNVISRMVLGKKYVGEDDAGGPGAAATPEEFRWMIEEIFFLNGALHVGDMVPWLGWLDAHGYVGRMKRLAGKFDRFIEHVLREHGERRRREGAAFVPGDMVDLLLQLADDGDGGPGGLLEVPLDRDGVKASVLELVTGGTDTSSVTVEWAMSEVLREPRVLCKVTEELDRVVGRDRLVGEGDIPGLPYLDAVVKESMRLHPVVPLLIPRVAREHTTVAGYDVPAGTRVLVNVWAIGRDPNVWGPDAGEFRPERFLDGSKRSKVDVRGQDLELLPFGAGRRMCPAHGLGLRMVQLVLANLLHGYVWRLPGGMAPEELSMEEKFGISVSRMHQLKAIPDPRLPHHVYFGP

SEQ ID NO: 4475 - protein, 121 aa, Zea mays
  VARIANT 11: note = Ancestral polymorphism is P, Derived polymorphism is L
MALGRNPEEIPWDEAGAEYVVESIGVFTYKDKTIAHLKKVEQEKLEKLARKGPSLGEQPSSTTGSAASDVKADAGPTESTSASVSTDKNRNYAVLAGVVAALGDLGWYLLSKPKKSEVVVD

SEQ ID NO: 4476 - protein, 131 aa, Zea mays
  VARIANT 23: note = Ancestral polymorphism is P, Derived polymorphism is S
  VARIANT 37: note = Ancestral polymorphism is R, Derived polymorphism is C
  VARIANT 56: note = Ancestral polymorphism is Q, Derived polymorphism is E
  VARIANT 59: note = Ancestral polymorphism is T, Derived polymorphism is I
MFLAMAILEHFLHPLEHTLEHAPPQGIRHSLHLFLGRGGERGAGQSVDLEAATKLEAHTPLEDLPAAMGKRGVKLGKASYQELTGVKKPKLDEQGMLHWPVILLYPYGMPCDFIEGLAYEDTLSPHPSLIT

SEQ ID NO: 4477 - protein, 143 aa, Zea mays
  VARIANT 8: note = Ancestral polymorphism is S, Derived polymorphism is L
  VARIANT 9: note = Ancestral polymorphism is G, Derived polymorphism is E
MLPKKSLSGYQKRKKRKHEDQLVVSQKGALHKFFGVSSNVDVNEVEGHESDHAHDDGQQDHDQQYDHNLNAEDVVIEDGSMEENLIAAIDAVEDSMMQENLQPSCDHENSNDDEQDGSGLSIFDPRTWDNLDNNKRDVLTERG

SEQ ID NO: 4478 - protein, 1850 aa, Zea mays
  VARIANT 157..1850: note = Derived polymorphism lacks residues 157 to 1850
  VARIANT 303..1850: note = Derived polymorphism lacks residues 303 to 1850
MDARFPYSPAEVAKVEFVQFGILSPDEIRQMSVIQIEHAETMERGKPKPGGLSDPRLGTIDRKIKCETCMAGMAECPGHFGHLELAKPMFHIGFIKTVLSIMRCVCFNCSKILADEDETKFKQALKIRNPKNRLKRIYDACKSKKVCAGGDDLDVQEQDTDEPIKKRGGCGAQQPNITVDGMKMVAEFKAPKKKTDDQDQLPEPVERKQILSAERVLNVLKRISDEDCLLLGLNPKYARPDWMILQVLPVPPPPVRPSVMMDTSSRSEDDLTHQLAMIIRHNENLRRQERNGAPAHIITEFAQLLQFHIATYFDNDLPGQPRATQRSGRPIKSICSRLKAKEGRIRGNLMGKRVDFSARTVITPDPNINIDELGVPWSIALNLTYPETVTPYNIERLKELVEYGPHPPPGKTGAKYIIREDGQRLDLRYVKKSSDQHLELGYKVERHLNDGDFVLFNRQPSLHKMSIMGHRIKIMPYSTFRLNLSVTSPYNADFDGDEMNMHVPQSFETRAEVLELMMVPKCIVSPQSNRPVMGIVQDTLLGCRKITKRDTLIEKDVFMNILMWWQDFDGKIPAPTILKPRPIWTGKQVFNLIIPKQINLIRFSAWHSEEEKGFITPGDTMVRIEKGELLSGTLCKKSLGTGSGSLIHVIWEEVGPDAARKFLGHTQWLVNYWLLQNGFSIGIGDTIADASTMETINDTISKAKNAVKELIKKAHEKQLEAEPGRTMMESFENRVNQVLNKARDDAGSSAQNSLSESNNLKAMVTAGSKGSFINISQMTACVGQQNVEGKRIPFGFIDRTLPHFTKDDYGPESRGFVENSYLRGLTPQEFFFHAMGGREGLIDTAVKTSETGYIQRRLVKAMEDIMVKYDGTVRNSLGDVIQFLYGEDGMDAVWIESQKLDSLKMKKPEFDNVFRYELDDENWRPNYMLPEHVDDLKTIREFRNVFEAEVQKLEADRYQLGSEITTTGDNSWPMPVNLKRLIWNAQKTFKIDFRRPSDMHPMEIVEAIDKLQERLKVVPGDDAMSIEAQKNATLFFNILLRSTFASKRVLKEYRLTKEAFEWVIGEIESRFLQSLVAPGEMIGCVAAQSIGEPATQMTLNTFHYAGVSAKNVTLGVPRLREIINVAKKIKTPSLSVYLKPQVNQKKELAKNVQCALEYTTLRSVTHATEIWYDPDPLGTIIEEDTEFVQSYYEMPDEDIDPDKISPWLLRIELNREMMVDKKLSMADIAEKINREFDDDLSCIFNDDNADKLILRIRITNDEAPKGEIQDESAEDDVFLKKIEGNMLTEMALRGIPDINKVFIKEGKVNTFYQDDGFKAANEWMLDTEGVNLLAVMCHEDVDATRTTSNHLIEVIEVLGIEAVRRSLLDELRVVISFDGSYVNYRHLAILCDTMTYRGHLMAITRHGINRNDTGPLMRCSFEETVDILLDAAVYAESDHLRGVTENIMLGQLAPIGTGGCALYLNDQMLQQAIELQLPSYVEGLDFGMTPARSPITGTPYHEGMMSPSYLLSPNIRASPINTDASFSPYVGHMAFSPFPSPGGYSPSSGGYSPSSPVFTPEKGYSPLSPSYSPASPSYSPTSPSYTPGSPTYSPTSPNYSPTSPTYSPTSPSYSPTSPSYSPTSPSYSPTSPSYSPTSPSYSPTSPSYSPTSPVYSPTSPAYSPTSPAYSPTSPSYSPTSPSYSPTSPSYSPTSPSYSPTSPSYSPTSPSYSPTSPAYSPTSPGYSPTSPSYSPTSPSYSPTSPSYNPSSAKYSPSHAYSPSSPRMSPYSQTSPSYSPTSPTYSPTSPSYSQPSPSYSPTSPFNTSGGPSPDYSPTSPNYSPSGSYSPTAPGYSPSSTGQGNDKDDKSAR

SEQ ID NO: 4479 - protein, 262 aa, Zea mays
  VARIANT 175..262: note = Derived polymorphism lacks residues 175 to 262
  VARIANT 159..262: note = Derived polymorphism lacks residues 159 to 262
  VARIANT 86: note = Ancestral polymorphism is A, Derived polymorphism is T
  VARIANT 80..262: note = Derived polymorphism lacks residues 80 to 262
  VARIANT 23..262: note = Derived polymorphism lacks residues 23 to 262
MDDDDVSPDARDVYVANANVSSYFAASDVASADRLFAEVSTDVADVVAWTTMVAGHVSSGGLGRARHFFDAMPERNVVFWNAMLRAYAHAGMLTEARDLFDAMPTRNAATWSCMISGLVLSGRCWEALHDQGLFGDMVRSSSIVPNEPALVSVVSACAQLQSLEHGAWVHAYAEQELQGTMSVVLASAIVDMSGNVGGIHSAIRVFAVMPMRNIYSWNAMIAGLAMNGGERQALSLSSCHGGLVFRQEHARGATPWLMGRTS

SEQ ID NO: 4480 - protein, 241 aa, Zea mays
  VARIANT 190..241: note = Derived polymorphism lacks residues 190 to 241
MSGGGSVSFLEIQPSELAFPFEIMRQSSCSMQLTNKTDHYVAFKVKTTNPKQYCVRPNIGVVLPGSTCNVTVTMQAQKASPPDMQCKDKFLVQSVVAENGVTAQDINAAMFNKEPGKVVDEFKLRVVYVPTTMPNPIPEESELGSSTPSFSQENGIDHSMTPLSVSRSSAETAKEKPSEATSVISKLTEEKMSAVQQNQKLRQELELLRKESSKTGGGFSITFLFVVGLLGIVVGYILKRT

SEQ ID NO: 4481 - protein, 54 aa, Zea mays
  VARIANT 15..54: note = Derived polymorphism lacks residues 15 to 54
MKVVAAKMKVVVAASKEKVQQDEPKAAISDVKCDNPKEEGNVQQTKSCCLRCEM

SEQ ID NO: 4482 - protein, 80 aa, Zea mays
  VARIANT 49: note = Ancestral polymorphism is D, Derived polymorphism is E
MLFFSYFKELVGKEVTVELKNDLAIRGTLHSVDQYLNIKLENTRVVDQDKYPHMVCLLLCLIVMPAQNDRIHALQLNPIG

SEQ ID NO: 4483 - protein, 602 aa, Zea mays
  VARIANT 59..602: note = Derived polymorphism lacks residues 59 to 602
MAMAAAAVLAAVMAAAAAQAAEVRWEVAYLTVEPLGRPQKVIAINNQFPGPLLNVTTNQNVRVNVQNNLDEPLLITWDGIQMRMNSWQDGVTGTNCPIPPGWNWTYEFQLKDQIGSFFYFPSLGLQRAAGGFGPITVNNRATVPVPFDQPHGDITLFIGDWYTKGHVELRNMLDDGQDLGAPDAILINGRAPYRYDSALVPDGLPYEIVGVEPGETYRFRVHNVGVSTSLNFRIQNHNMRLVETEGTYTNQQNYTDLDIHVGQSYSFLVTMDQNASTDYYIVASPRFVGNPRWHEVAGVAVLQYSNSKGRASGSLPDAPDDHYDKYHSMNQARSIRMNTSAGAARPNPQGSFHYGSINVTQTFVLKNEQPLSIGGKRRRTINRVSYSPPETPLRLADLHNLTGVYAADFPATPSDDDAPPRVASSALNASYKGFLEIVFQNNDTDVQTYHLDGYSFFVVGSGKERQPLPVSFRMDYGEWTPDRRSEYNKWDAISRCTTQVFPGGWTAVLVSLDNVGVWNLRAERLDDWYRGQEVYVKVADPLGYNITEMVVPDNALYCGLLKERQKPQVHESNSKSSAQGDAGWSNRLLATMILVVAAVIFS

SEQ ID NO: 4484 - protein, 598 aa, Zea mays
  VARIANT 17: note = Ancestral polymorphism is A, Derived polymorphism is S
  VARIANT 23: note = Ancestral polymorphism is A, Derived polymorphism is V
  VARIANT 39..598: note = Derived polymorphism lacks residues 39 to 598
  VARIANT 41..598: note = Derived polymorphism lacks residues 41 to 598
MAMAAAVAAVLAAIMASAAAQAAEVRWEVAYLTVEPLGRPQKVIAINNQFPGPLLNVTTNQNVRVNVQNNLDEPLLITWDGIQMRMNSWQDGVTGTNCPIPPGWNWTYEFQLKDQIGSFFYFPSLGLQRAAGGFGPITVNNRATVPVPFDQPHGDITLFIGDWYTKGHVVRALFFCELRNMLDDGQDLGAPDAILINGRAPYRYDSALVPDGLPYEIVGVEPGETYRFRVHNVGVSTSLNFRIQNHNMRLVETEGTYTNQQNYADLDIHVGQSYSFLVTMDQNASTDYYIVASPRFVGNPRWHEVAGVAVLQYSNSKGRASGSLPDAPDDHYDKYRSMNQARSIRMNTSAGAARPNPQGSFHYGSINVTQTFVLKNEQPLSIGGKRRRTINRVSYSPPETPLRLADLHNLTGVYAADFPATPSDDDAPPRVASSALNASYKGFLEIVFQNNDTDVQTYHLDGYSFFVVGMDYGEWTPDRRSEYNKWDAISRCTTQVFPGGWTAVLVSLDNVGVWNLRAERLDDWYRGQEVYVKVADPLGYNITEMVVPDNALYCGLLKERQKPQVHESNSKSSAQGDAGWSNRLLATMILVVAAVIFS

SEQ ID NO: 4485 - protein, 434 aa, Zea mays
  VARIANT 60..434: note = Derived polymorphism lacks residues 60 to 434
  VARIANT 203: note = Ancestral polymorphism is C, Derived polymorphism is Y
MLHRDGGSTSSRHQRLPPFVYPSQVAATATQKLPFLPWNGNETWELGRASSRNLLSFPSQDAIQNPTRSRRSQGPLHILPPPSARFPDRAIAGARLGDLVGSRPVLPLRRRCVAVTRQSGLRIPKMASSNGEAEQQWIENIKSGGTVPCLAPENCPNGWATPPGDSFMVRGPEYLTNKVKIPGGEYLLKPLGFDWIKGPAKICEILKDSNHRVRKAIDDEVSRSNQPFVWAFNLQLPKDNFSAIFYFVSLEAIPEGSLMDQFLKGDDAFRNSRLKLIANIVKGPWIVRTAVGEQAICILGRALSCKYVQGSNFIEVDVDIGSSIVANAIVHLAFGYITTLTVDLAFLIESQTEPELPERLIGAVRFSELNPGSAGLFERRSEEHQESTQSRPVGFWQGFSQLLNNQGNTREPSPNLQNTNGTLRKEEANEDAKW

SEQ ID NO: 4486 - protein, 520 aa, Zea mays
  VARIANT 337..520: note = Derived polymorphism lacks residues 337 to 520
  VARIANT 290..520: note = Derived polymorphism lacks residues 290 to 520
  VARIANT 275..520: note = Derived polymorphism lacks residues 275 to 520
  VARIANT 210..520: note = Derived polymorphism lacks residues 210 to 520
  VARIANT 187: note = Ancestral polymorphism is G, Derived polymorphism is R
  VARIANT 170: note = Ancestral polymorphism is C, Derived polymorphism is R
  VARIANT 92: note = Ancestral polymorphism is A, Derived polymorphism is V
  VARIANT 82..520: note = Derived polymorphism lacks residues 82 to 520
  VARIANT 70..520: note = Derived polymorphism lacks residues 70 to 520
  VARIANT 35: note = Ancestral polymorphism is L, Derived polymorphism is P
MAKPRKTCTSAPDPPVAAVRLLWHPPAPAVPIVVLVSLAALRIRVLVSVGPYSGQGAAPKFGDYDAQRHWMELTLHLTPADWYRNTSDNDLVYWGLDYSPLSAYQSLLHGRIINASLPEVVALRSSRGYESMESYAPSPVDFFLLVAWKIEVADAVDGVVIRSVGVLPSCFVYNYISLGLTLEAIAGVLSRNELIAAALFTLAIKQFASQVRCALRKIMGVERFARAPAGRALALPELELKFSHRGDTYRKTVTFWWDIKGSGSVDIYDTFDMIKEPGELIVSPKVPVVQDADVKGADMMEVETAPVHNAKIVPSEESVVSLGVAEGKACAAADLSSLIASEEAGSQNDIDNDRPKTSLCHADSMKIKVSDELPVKQWTYCDHMSNLQSSFTSANNDIAKEMNEVLFKSLPADTSALDLSASSDLLSQRKIDLIGKERLGVRKTRLRLKEQILTMKFKAYRHLWKEDVRLLSERLKSNKRIDQNNRTSQIGSQRQCFSNHSRLAMPGQYYFHFISKFVLN

SEQ ID NO: 4487 - protein, 555 aa, Zea mays
  VARIANT 227..555: note = Ancestral polymorphism lacks residues 227 to 555
MVAAEGGPGGAVEEGVGESSSPPREDAVPAPAGSGGSGGSGGAREICAQVLDRLVADGYAEASDPEFRDRLAAHFGRLPHSYQLDINVDKASDVLVHQNVLAEAKDPDRRPAFYVRFLRIEDMDSAYDSDASEEGDDDGDDLSVRQGTPYTHIHEIVFSTIDKPKLLSQLSALLSDIGLNIREAHVFSTHDGYSLDVFVVDGWPVQVSECQSCINCSHVLFSLLMFWNRDSQDADGLHKALEASILRNEGSWSGSSHSSAAERTLPFQVKGGEWEIDKRLLKMGGMVASGSCGDLYHGTYLGEDVAVKVIRAEHLNKNVWNEFTQEVYILREVQHKNVVRFIGACTKPPQFCIITEYMSGGSLYDFVHKQHNVLNLRTLLKFAVDVCRGMCYLHERGIIHRDLKTANLLMDKDHVVKVADFGVARFQDQGGVMTAETGTYRWMAPEVINHQPYDNKADVFSFAIVIWELITSKIPYESMTPLQAAVGVRQGLRPGLPKKTHPKVLDLMQRCWEADPSARPAFPDILAELEDLLAQVQGTPGKTAHAPSNNSNTKD

SEQ ID NO: 4488 - protein, 93 aa, Zea mays
  VARIANT 39: note = Ancestral polymorphism is S, Derived polymorphism is R
  VARIANT 80: note = Ancestral polymorphism is C, Derived polymorphism is F
  VARIANT 82: note = Ancestral polymorphism is D, Derived polymorphism is G
MAKFFNYTIVQGLLMLSMVLLASCVIHAHIISGETEEVSNIGSPTVMVTMGANRKIIGDNKNLLCYLKALEYCCERTKQCYDDIKKCLEHCHG

SEQ ID NO: 4489 - protein, 96 aa, Zea mays
  VARIANT 11..96: note = Derived polymorphism lacks residues 11 to 96
  VARIANT 12: note = Ancestral polymorphism is G, Derived polymorphism is W
MVKILDHISIRGFFLLFMVLVASFVGHAQIIRGETKEDNDTKSMTMTTMRPGSYVTSMDEKSSLCFEDIKTLWYICRTTYHLYRTLKDCLSHCNSM

SEQ ID NO: 4490 - protein, 103 aa, Zea mays
  VARIANT 18: note = Ancestral polymorphism is R, Derived polymorphism is P
  VARIANT 20: note = Ancestral polymorphism is L, Derived polymorphism is I
  VARIANT 29: note = Ancestral polymorphism is A, Derived polymorphism is P
  VARIANT 49: note = Ancestral polymorphism is N, Derived polymorphism is Y
  VARIANT 80..103: note = Derived polymorphism lacks residues 80 to 103
  VARIANT 86: note = Ancestral polymorphism is T, Derived polymorphism is I
MRSYPSPMVKSLDHITIRGLFLLFMFLVASFVGHAQIIRGETKENKDTNSMTMTTTRLGSYVISMDEKSSLCFLDPRTLWYICKITYRLFRTLKDCLEFCHSI

SEQ ID NO: 4491 - protein, 107 aa, Zea mays
  VARIANT 6: note = Ancestral polymorphism is K, Derived polymorphism is T
  VARIANT 7: note = Ancestral polymorphism is H, Derived polymorphism is R
MEKFLKHTRIHGLWLLSMILFASSVIHARIISGQIKEDTNNARSLTMTTVMSAGDNTTGSVDGEASSGLPSTKYFFGFYLCKKTGRVYRGLPECMAHCLLGVCTKAY

SEQ ID NO: 4492 - protein, 146 aa, Zea mays
  VARIANT 134: note = Ancestral polymorphism is R, Derived polymorphism is C
  VARIANT 29: note = Ancestral polymorphism is C, Derived polymorphism is S
  VARIANT 13: note = Ancestral polymorphism is G, Derived polymorphism is E
  VARIANT 8: note = Ancestral polymorphism is R, Derived polymorphism is G
MMTKCQKRASIQGLWLLSMVLLASSSLVCASMAVDGQTKEDINATSVTSMNMTRSSSASYNMTGGGGELNRGQTKDDINTGSTMITTMRATSNIIGNDGASSNRLSSDHDWVIGWYYCKRTNTYYRRLAECLVRCLRPCTKVERTA

SEQ ID NO: 4493 - protein, 307 aa, Zea mays
  VARIANT 12: note = Ancestral polymorphism is E, Derived polymorphism is V
  VARIANT 13: note = Ancestral polymorphism is T, Derived polymorphism is I
  VARIANT 25..307: note = Derived polymorphism lacks residues 25 to 307
  VARIANT 38: note = Ancestral polymorphism is C, Derived polymorphism is Y
  VARIANT 39: note = Ancestral polymorphism is A, Derived polymorphism is V
  VARIANT 43: note = Ancestral polymorphism is P, Derived polymorphism is L
  VARIANT 87: note = Ancestral polymorphism is T, Derived polymorphism is I
  VARIANT 101: note = Ancestral polymorphism is C, Derived polymorphism is Y
  VARIANT 116: note = Ancestral polymorphism is V, Derived polymorphism is A
  VARIANT 117..307: note = Derived polymorphism lacks residues 117 to 307
  VARIANT 142: note = Ancestral polymorphism is E, Derived polymorphism is K
  VARIANT 263: note = Ancestral polymorphism is T, Derived polymorphism is A
MEEAAVARTTSETQVGDLPEVCLAQAIARTSPRDACRCAAVSPAFRAAADSDQVWRAFLPEQLEAAEDHLDSRRVSPPSQAAHPAATVRGLSKKDAYLSLCDAAGAVAVDGSGCRVWLERASGATCYALSARRLSLPWDDGEFSWRFTHHPRSRFAEVAELVDCTCLDIYGSLPLAALTPATVYAAFLVYGTAPEGAYRGLSYPDQETAVAVGGRVVARHAVCLRPDDAEARKFRGRGAGEEARRPSLRADGWEEMEMGRLRTPPVESGGGGGDVCVVQASFEVLGWYPKRGLVVEGIEFRALHDAS

SEQ ID NO: 4494 - protein, 134 aa, Zea mays
  VARIANT 3: note = Ancestral polymorphism is S, Derived polymorphism is L
  VARIANT 8..134: note = Derived polymorphism lacks residues 8 to 134
  VARIANT 11..134: note = Derived polymorphism lacks residues 11 to 134
  VARIANT 79: note = Ancestral polymorphism is R, Derived polymorphism is C
MPSAFFAWRSQHGTSLVGILFSVLGFLGVGREVARRDFRPTSLGHREACVPWDRLTWSSARFALSYLAPTPGSSRACRRTRCSAGRCGQILTRLCKDKHSVWFNAHVEVERLSLHDYHAVPAKEGLAVEWYASQ

SEQ ID NO: 4495 - protein, 233 aa, Zea mays
  VARIANT 19: note = Ancestral polymorphism is P, Derived polymorphism is R
  VARIANT 23: note = Ancestral polymorphism is A, Derived polymorphism is V
  VARIANT 27: note = Ancestral polymorphism is P, Derived polymorphism is Q
  VARIANT 28: note = Ancestral polymorphism is R, Derived polymorphism is C
  VARIANT 32: note = Ancestral polymorphism is E, Derived polymorphism is D
  VARIANT 49: note = Ancestral polymorphism is R, Derived polymorphism is C
  VARIANT 64: note = Ancestral polymorphism is A, Derived polymorphism is V
  VARIANT 80: note = Ancestral polymorphism is R, Derived polymorphism is H
  VARIANT 83: note = Ancestral polymorphism is A, Derived polymorphism is T
  VARIANT 98: note = Ancestral polymorphism is G, Derived polymorphism is S
  VARIANT 123: note = Ancestral polymorphism is V, Derived polymorphism is I
MADPGGCLEVRLFYVRVSPHGGAAPPPRLALELRPAGGEAAPVPLRLDRHDAASGEATYVSTAAARLPPPSAAFDVADHRGVALLRGSLRWCPGAKGGSHAWEIDCVPAAAAAASASAFEVYVAGCYAGEPAVLTHALRLATPEEAAAALVRRRSGALPAARDEGDNDMNTGSTQYPEGWYSDDDDGQLSWFNAGVRVGVGIGLGVCVGVGIGVGLLLRSYQATTRSLKRRFF

SEQ ID NO: 4496 - protein, 279 aa, Zea mays
  VARIANT 77: note = Ancestral polymorphism is F, Derived polymorphism is S
MAEHATTGVEEQRQVAISMCSAPTPSKLVAVESSSLQKLMLKSPPQADAHGDEQQGREVPLAKKVAAEFVGTFILMFAVVSTVVADAQHGGAEGLVGVAAAAGLAVVAVVLAVVSVSGSHLNPAVSLAMGVFGYLPRAHVLPYAAAQTAGSAAAAFLAKAMYRPADPAVMATVPRVGAAQAFFLELVLTFVLMFVIAAVATDPTSATLENSKELVAIAIAAAIMMNALIGGPSTGPSMNPARTIGAALATGKYKDIWVYLLAPPLGAIAGAATYTLIKP

SEQ ID NO: 4497 - protein, 493 aa, Zea mays
  VARIANT 8: note = Ancestral polymorphism is L, Derived polymorphism is S
MLISVLFLGFRRLHASNKHYMALVQFNGALVPQLGEKPRLLSLSAAIAKAAYSDARFLTPKTGYVCAQFRYCLVVDCNLWAISRGRGKHLLSPSYSLHSQTSSEQLNHVPSSRFRQKRGSRFIVRAEADFYSVLGVSRNASKSEIKSGWYLLFAYRKLARSYHPDVNKDPGAEQKFKDISNAYEVLSDDEKRSIYDKYGEAGLKGAGMGTGDYSNPFDLFESLFEGFGGMGGMGGGRAARNRPMQGDDESYNLVLNFKEAVFGVEKEIEITRLEGCNTCDGSGAKPGTKATTCKTCGGQGQVVSSTRTPLGIFQQVSTCNTCGGTGEFSTPCNTCGGDGRVRRTKRISLKVPAGVDSGSRLRVRSEGNAGRRGGPPGDLYVFIDVLSDPVLKRDGTNILYTCKVSYIDAILGTTVKVPTVDGTVDLKIPSGTQPGTTLVMSKKGVPLLGKSNARGDQLVRVQVEIPKRLSSDEKKLIEELANLNKAQTANSRR

SEQ ID NO: 4498 - protein, 1347 aa, Zea mays
  VARIANT 86..1347: note = Derived polymorphism lacks residues 86 to 1347
  VARIANT 1175..1347: note = Derived polymorphism lacks residues 1175 to 1347
MAVFDMKSAPLMILELLLVSLGLTIAPFSAEENNDHWFVYSGFANASLTLDNTASITPSGLLELTNGTVMSMGHAFYPTPLRLRDSPNSTVQSFSASFVFGIISIYDDLSSHGLAMLIAPSRTLSALPVQYLGLLSGSNDGNKSNHIFAVELDTYQNSEFKDINNNHIGIDINSMTSVQSNPAGFFHDQDGTFENLTLSSKEAMRVWVEYDRENTQIDVTMAPLAIVKPKRPTVSTIQNLSDVLTDVAYVGFSSSTGKIHTQHYVLGWSFAMNGPAPSIDLSMLPKLPRHHHKSRRSWVLETVLPIATAALLLSLGVVAFLLVRRHVRYAEIREDWELEFGPHRFSYKDLFHATGGFENKNLLGIGGFGRVYKGELPRSRLKIAVKRVSHDSKQGMKEFIAEIVSIGRLQNRNLVQLLGYCRRKGELLLVYEYMPNGSLDKYLHNAKEGNSALSWAQRFRIIKGIASGLLYLHEEWEKVVVHRDIKGSNVLLDSEMNGRLGDFGLARLYDHGVDPQTTHVVGTIGYLAPKLARGGNATPLTDVFSFGMFVLEVTCGQRPVRHENVQDSQLMLVDWVLDKVREGSFGATMDARLEGKYDIGEAYLALKIGLLCSHPFASERPTMRQVIQYLDGEIEAPDLSFEYDQKHIAKCALNVHKIFSLFWNPKYSLHSKFLQDTHMLVMAMKHTSFLPYLLLLTTLASCDDQFLLSGFTQSSLNLDGSAIVTNDGLLDLTNSTAITNGHAFYPSPLHFRKSPDGKVESFSVNVVFSIFITYPDLSADGMAFFIAPTKNFSDARAGKYFGLLNENNNGNTRNHIFMVELDTYKNAEVQDINDNHVGININGVFSFKSNTSGFYEDSGAFRELTLNGNKGTQLWIDYDKSTMQINVTLAPINVHKPSRPLLSTTYDLSTVISTSTSYIGFASGASPVNSRHYVMGWSFGMNKPAPPLDVSKLPKLPFHGPKAQSKLLAIVLPIATATLILSIGTIVTLVVRRRLKYAEVREDWEGEFGPHRFSYKDLYHATGGFKNKHLLGEGGFGKVYKGVLPLSNVEVAVKRMSHESRQGMKEFVTEVVSIGRLRHRNLVQLLGYCRRKGELFLVYNYMPNGSLDKYLYCEEHGAILNWEQRFRVIRNIATVLLYLHEKWEKIVIHRDIKASNVLLDGEMNGRLGDFGLARLYDHGTDPQTTHMVGTKGYLAPELLRTGKASPHTDVFAFGMFLLEVACGQRPVKKNAEGTEFFLVDWVLEHWNNGVITKTLDSRLQGDYNIDEAHLVLKLGLLCSHPLPSSRPRMRQVMQYLDGDTPLPELRPTQLSSNMVALMKNSGLNSSVVSYPQISTSFCTISSLSGGR

SEQ ID NO: 4499 - protein, 390 aa, Zea mays
  VARIANT 41: note = Ancestral polymorphism is T, Derived polymorphism is I
  VARIANT 273: note = Ancestral polymorphism is S, Derived polymorphism is F
MEAAAAAVRYGIVGVGMMGREHLHNLAHLATEVEREQSVRIFPGHRELLDSGLCDAIIVSSPNMTHYEILMDIIRHREPQHILVEKPLCTTVQDCKKVIEAAKQRPEIVVQVGLEYRYMPPVAKLIDIVKSGTLGQVRMVAIREHRFPFLVKVNNWNRFNCNSGGTLVEKCCHFFDLMILFAAANPVRVMASGAIDVNHKNEVYDGQVPDIIDNAYVIVEFDNGSRGMLDLCMFAEGSRNEQEICVVGDIGKMKENGLFFYFLVESGFLGFESLLSCLCLIFSSGVRDTFSLKQGETFVPESIVRFGKRTEGRDGVVTIMAEDERIKYQGLHHGSSYLEHLNFLSAIRAQGASGPSVNLSDGLLSVAVGVAGQLSIEQGRFVTMEEVLGL

SEQ ID NO: 4500 - protein, 240 aa, Zea mays
  VARIANT 17: note = Ancestral polymorphism is P, Derived polymorphism is L
  VARIANT 223..240: note = Derived polymorphism lacks residues 223 to 240
MFLPVAQRRLPQVRRLPCRFHSLVLQLDDDVADLRTLVGRLASRASMEAVAEAATRLDRVLVSLSGLLDHPQAQDPLRRLSPSPFAERMTSSASPTRTAASATPWSRSPHSRPRPAPRCAGRSRPASRRLRARCAGPRGVSSLSVVAATARVEVDATPCWMSSPARFSAPSAMPRHVVVTTGSSFSTSMPWIWWVADLMRLMSRAKRQSTKRQHAATSAAGPQMEAAADPEERERKAAFE

SEQ ID NO: 4501 - protein, 385 aa, Zea mays
  VARIANT 110: note = Ancestral polymorphism is A, Derived polymorphism is T
  VARIANT 163..385: note = Derived polymorphism lacks residues 163 to 385
  VARIANT 184..385: note = Derived polymorphism lacks residues 184 to 385
MGGGADRSAPVRAEESVSGGVDVWSDAVSSHAPDHLLVMVHGILGSTADWQYGANEFVKQLPDHVIVHCSEKNASMLTLDGVDVMGERLANEVLDVISRRPEITKISFLAHSVGGLAARYAIARLYRHPDSVSDGNTKGTICGLEGINFITVATPHLGSRGNKQVPLLFGSVAMEKVACHIVHWIFRRTGRHLFLTDDDEGLPPLLQRMVEDHDDLYFISALRAFRRRVVYANADCDRILIISAVGNFLYGVHVVCFIVVVYFWLCTSLMDKPDIVGWRTSSIRRNNELPELPVSSSDKYPHIVHEEHSEETDDDKWQDCMAECDMDVLEEKMVTGLGKVSWEKVDVSFHSSMTSFAAHSIIQVKYAFMNEGADVIQHIIDHFQL

SEQ ID NO: 4502 - protein, 763 aa, Zea mays
  VARIANT 96: note = Ancestral polymorphism is V, Derived polymorphism is I
MSSSPPRRPQRRAASSRPASYDESLLDAELQAYLGDAASRRVRRLRRLSAEERQRETETEALIALSLGFPIDELLPEERPLLPAHIADAPNDYIVVRNHILASWRADPGAPLPLARVLETVSATYDRLVAAAHGYLAREGHINFGVSAAFPAAPPPDAASQGAASVLVVGAGLAGLAAARQLVRFGLRVLVLEGRARPGGRVYTARLGEDKAAVELGGSVITGIHANPLGVLARQLALPLHKVRDRCPLYYPDGRTVETRLDRSIDLVFNTLLDHATRLRESLNEAAERISLGEAIDKLRRLYHVARSDDERMLLDWHFANLEFSNAGCLWELSLAHWDQDDPYEMGGDHCFLAGGNSRLIHALCDGVPVLYEKNVTRIEHGVDGVSVTVEEGQIFQADMVLCTVPLGVLKSGSIVFDPELPEEKLGAIKRLGFGLLNKVAMVFPSVFWDEDIDTFGCLNKESSKRGEFFLFYSYHTVSGGAVLVALVAGEAALEFEKVDPVVALHRVLGILKGIYGPKGVTVPDPVQSVCTRWGSDPFCSGSYSHIRVGSSGADYDILSESVNDRLFFAGEATNRAYPATMHGALLSGLREASKIYRASDSLVNYDQKKNSLPKSLKPPDGALLDLFLEPDLAFGRFSFVFSSLTPDDPAAPGLLRVSLDKRFLLQPNYNSELKGDQKDHSHSHASGAFHLYAAVSREQADRLRRSSEDDRTRLGVLCKDRTVKLMGYDSTCDVGSDLISSILGARKARKLLQHPKNSKIPR

SEQ ID NO: 4503 - protein, 197 aa, Zea mays
  VARIANT 124: note = Ancestral polymorphism is A, Derived polymorphism is V
  VARIANT 63: note = Ancestral polymorphism is G, Derived polymorphism is C
  VARIANT 7: note = Ancestral polymorphism is T, Derived polymorphism is I
MAARARTHGPLFSLLPLLLAVLTVGNSSSSRCPGVPSMTAQQACGAVAGTRRMLELCLRTLRGGAPLPVTRHAAVAVRGALDAYAATVAAATSLLDGGAVPADGERAAFGSCMVGYGSARVAMARVAADLAAAGCDGGGARAAELEAGYTAGLRGMDACTGGMLSYPASPLYARNLADRNVTLLAALLCSLVPAPLA

SEQ ID NO: 4504 - protein, 910 aa, Zea mays
  VARIANT 840..910: note = Derived polymorphism lacks residues 840 to 910
  VARIANT 681: note = Ancestral polymorphism is S, Derived polymorphism is L
  VARIANT 656..910: note = Derived polymorphism lacks residues 656 to 910
  VARIANT 583: note = Ancestral polymorphism is R, Derived polymorphism is S
MAESLVQEWNVWETQIMVLVSFMLQVFLLATGSLRRRHISGLLRALIWLSYVGADLVAVYALGLFSQYEDKYRCGRESFGDTLPYLWVPFLLVHLGGQDSITAFSLEDNNLWLRHLLNLGTQGVLAAYVLWKSFGRISVSILVPAMLVFVSGIIKYGERVWALKSASRNGLPVPSSPYLISVVNEMENNIVVGSKELYALLMVLLARGLFVGRTVVQQGGVGKGIEEKLEMVGMELGMMFDLLYTKANVLQRRTGVLFRCASQALMVVALVLFMIRRDEGANNKVNVVITYTLFSGAIFMETCCVAAAMASPWTRAHLKKSRCLHGICNFAKSFFEAVQCNNKRYRTLSSAATIRQFNLMDYCISMKSKPRVFSEALSTIGLDKQWRNSWYVHHIDDAGIYWSIISRVFEYLAPSDHSFETLNPHHPAVFSHLHVRRLKYILSRPFEDALYTLHLYTDLHLSRRLDTYCTAGVSPPPEIMRLMKECETLSNYMMYLMVVHPSMLPVITYYAADLEPLLMKWVTRNHGDGGAAPATKLAMLEHYTRSEIEHQSVPDSGSPFELEHNAEFHLQQSLTQIKEMWVRLLMYAASKCGGELHARQLGEGGELITFVWLLMLHHGVGDMAMKVGLLRPNEDAQGWPLLSYIPSLFDAQHGSRKRSGLWASGYPFEPEQNSTLHLQQSLTRIKEMWVRLLMYAAGKYGGEPHAEMMLSRLVAARSLVAFADFAEGSVGMGGVVEHGRSLMHCQFVTVVLLWGMVNFTGDSIAAPRRLLASRFEYWDVDGMAEGVVHVRPAGRQSADPNTTRRAQPTSPPPSRARPPAAASATGPSTPILRCRTRPPQQPADPAPVTPPAALVAARNHRVPLLSAPASPRSPSRFTLLKASLSRPSNRTTLMMGMGMGKIGSIPSHLL

SEQ ID NO: 4505 - protein, 111 aa, Zea mays
  VARIANT 8: note = Ancestral polymorphism is R, Derived polymorphism is M
  VARIANT 24: note = Ancestral polymorphism is E, Derived polymorphism is K
  VARIANT 25: note = Ancestral polymorphism is K, Derived polymorphism is M
  VARIANT 35: note = Ancestral polymorphism is R, Derived polymorphism is H
  VARIANT 41: note = Ancestral polymorphism is R, Derived polymorphism is M
  VARIANT 43: note = Ancestral polymorphism is P, Derived polymorphism is L
  VARIANT 46..111: note = Derived polymorphism lacks residues 46 to 111
  VARIANT 74: note = Ancestral polymorphism is M, Derived polymorphism is R
  VARIANT 77: note = Ancestral polymorphism is C, Derived polymorphism is Y
  VARIANT 89: note = Ancestral polymorphism is A, Derived polymorphism is V
MEAISNTRLALGILVADSVVLVGEKVTSKLFQISRSTDVRRPPPLWDLLLIHKVGQAPRLPTLLKRPIWQLRWREGCRCWGQQPDQLYAELMEPEKHMQIFSCRKMRCQTY

SEQ ID NO: 4506 - protein, 663 aa, Zea mays
  VARIANT 398: note = Ancestral polymorphism is W, Derived polymorphism is C
  VARIANT 463: note = Ancestral polymorphism is F, Derived polymorphism is C
  VARIANT 571: note = Ancestral polymorphism is R, Derived polymorphism is S
MVLLSFTLQLFLLSTGSLRRRHNSGLLRALIWLSYVGADLVAVYALGLFSQYEDKYRCGRESFADTLPFLWVPFLLVHLGGQDSITAFSLEDNNLWLRHLLNLGTQGVLALYVLWKSFDRISVSILVPAMLVFVSGIIKYGERVWALKSASQNGLGQPSGIFYNSLADYIVYTKASKELYARLTVLLARGLFVGRTVVELLEGSAAMLESDFKNYQGTEEKLKVVEMELGMMFDLLYTKANVLQRRTGVLFRCASQALMVVALVLFMTLEGAHNKINIAITYKLFSGAIFMETCCVAAALASPWTRARLKGRSRLRGLCNFATSFFEAVHHCKKRHRMTLSTTATMGQFNLMDYCISIKSRPRVFSQTLNAIGLDKQWRNSWYVHHIDDAGGSGGIYCWIINRVLEYLSTLDNNYTVHTLPPHDPAVFGQLHIRRLNFTLSLPFHKALYRLHVYTDLYLSRHCNNCSTEIMRLKEECETLSSYMMYLMMLHPTMLPVSTVAGDLESQLLQWVTSHSTHEDGGAMTKLEILERYTRMMLEQGSDPGNPFEPEQYGSLDLHHSLTQIKEMWVRLLMYAAGKCGGDVHARQLGEGGELITFIWLLMLHHGLGDQANRKLSLLRPDNPNVAERGSSSAERIYKPVYAFNLPEPVCFSFWPLSSLWTS

SEQ ID NO: 4507 - protein, 124 aa, Zea mays
  VARIANT 40: note = Ancestral polymorphism is G, Derived polymorphism is E
  VARIANT 45: note = Ancestral polymorphism is A, Derived polymorphism is V
  VARIANT 58: note = Ancestral polymorphism is R, Derived polymorphism is L
  VARIANT 59: note = Ancestral polymorphism is R, Derived polymorphism is H
  VARIANT 62: note = Ancestral polymorphism is G, Derived polymorphism is D
  VARIANT 99: note = Ancestral polymorphism is P, Derived polymorphism is L
MAVVGAMALSTPTSARAEQPDITRYRKLGSGVILKDVVEGEAAEVREGDLVQFNYVCRRANDYFVHSTVDQFNGESRPVTLALGGEEVTSFTPEFVYPPEMIPLWCGQPYSLLSSVWLLISLCS

SEQ ID NO: 4508 - protein, 91 aa, Zea mays
  VARIANT 29: note = Ancestral polymorphism is M, Derived polymorphism is K
  VARIANT 45: note = Ancestral polymorphism is G, Derived polymorphism is R
  VARIANT 55: note = Ancestral polymorphism is P, Derived polymorphism is L
  VARIANT 63: note = Ancestral polymorphism is A, Derived polymorphism is T
  VARIANT 73: note = Ancestral polymorphism is E, Derived polymorphism is K
  VARIANT 84: note = Ancestral polymorphism is S, Derived polymorphism is F
MKKIEDNNTLVFIVDLKADKKKIKAAAKMYDIQAKKVNTLIKPDGKKKAYVKPMPDYDALDVARCLLDSVEVEFSYDADISLVSVDLLMPD

SEQ ID NO: 4509 - protein, 80 aa, Zea mays
  VARIANT 16..80: note = Derived polymorphism lacks residues 16 to 80
  VARIANT 12..80: note = Derived polymorphism lacks residues 12 to 80
MRSLRRRRPKSRKRRRGRIGLSTGRREEIIDLGMNYPHQCDHFFFFSTLFLVIAMILYVALHLWYHIVVFLHSIVGSWML

SEQ ID NO: 4510 - protein, 476 aa, Zea mays
  VARIANT 446..476: note = Derived polymorphism lacks residues 446 to 476
  VARIANT 409..476: note = Derived polymorphism lacks residues 409 to 476
  VARIANT 359: note = Ancestral polymorphism is P, Derived polymorphism is S
  VARIANT 96: note = Ancestral polymorphism is M, Derived polymorphism is V
  VARIANT 80: note = Ancestral polymorphism is G, Derived polymorphism is W
  VARIANT 60..476: note = Derived polymorphism lacks residues 60 to 476
  VARIANT 53: note = Ancestral polymorphism is L, Derived polymorphism is R
  VARIANT 14: note = Ancestral polymorphism is R, Derived polymorphism is S
MLVFVSGIIKYGERVWALKSASRKGLDRTSANPSSHEDTIDDVLICTKESYALRTVLIARGFFVGRTMPLMGQGPASTLWFCFKTKYQGREEKLKMVIMELGMMFDLLYTKANVLQRRIGVLFRCASQALMVVSLVLFMIRREEGAHNNKVNVAITYTLFSGAIFVETCCVAAAIASPWTRAHLKESGCLRGLSDSLFEVVHLCKSTANNMSQFNLLDHCISVNSKPRLFSKALSAIGLDKQLYVHHMDKQCYWWIINRVLEHLATLPDEFSGVATVHFTINAPTEHPVWFNQLSTSFEQVLYGLHLYTDLHLSRHFNNCSTSSVVQPPPPEIMRLKEECETLSNYMMYLMVMHPSMLPVNTVAAGDLVQQLIGWVTNHSGHGATTTKLAILRGYSRTFYIPGIAEPDQQRSFYYLQHLLTQIKEMWVRLLMYAAGKCGGEVHARQLGEGRELITFVWLLMLHHGLSETWQLSSSF

SEQ ID NO: 4511 - protein, 108 aa, Zea mays
  VARIANT 91: note = Ancestral polymorphism is D, Derived polymorphism is Y
MLPAKVSFVFLIVYCAVTFSLGQIAVGEACTVDQRDKITTDCREFIKLKGPVTAPSYTDDCCVAIRAVPNLDMECIIRLLSNKQKKKYDVDKIRRLGSVLCNPHPVMT

SEQ ID NO: 4512 - protein, 183 aa, Zea mays
  VARIANT 29: note = Ancestral polymorphism is V, Derived polymorphism is I
  VARIANT 56: note = Ancestral polymorphism is P, Derived polymorphism is T
MAMAYVAAAVLAAVTLTASFAGGEACNFVASMTWTAACQQTGRWENLCQQTLQTAPATAEVTVYALVATRLAKLRYENTLGEVDTMLWPRNAPADARAALDNCKYKYSVALGRMDAVSDEIFACDFSHARQEYVDAEVAVRSCQDGLLRLPNQYHSWPLFAKVSADYDLTMVAYLLGAIFLGR

SEQ ID NO: 4513 - protein, 229 aa, Zea mays
  VARIANT 179: note = Ancestral polymorphism is L, Derived polymorphism is V
  VARIANT 68: note = Ancestral polymorphism is K, Derived polymorphism is N
  VARIANT 62: note = Ancestral polymorphism is R, Derived polymorphism is W
MPLWGTAASAQPAAEGDAARAPSGSGGGGVKVIRSLLPTRRRLRLDPPAKLYFPYEPGKQVRSAVRIKNISKSHVAFKFQTTAPKSCFMRPPGGVLAPGESIIATVFKFVEHPENNEKPLDKCKVKFKIVSLKVKGPVEYVPELFDEQKDQVAVEQILRVVFLDAERPSPQMDKLKRQLAEAEAALEARKKPPEDNGTRIVGEGLVIDEWKERRERYLARQQEEGVDSV

SEQ ID NO: 4514 - protein, 141 aa, Zea mays
  VARIANT 15: note = Ancestral polymorphism is R, Derived polymorphism is C
  VARIANT 64: note = Ancestral polymorphism is P, Derived polymorphism is L
  VARIANT 93: note = Ancestral polymorphism is T, Derived polymorphism is I
  VARIANT 118: note = Ancestral polymorphism is R, Derived polymorphism is W
  VARIANT 119..141: note = Derived polymorphism lacks residues 119 to 141
  VARIANT 128: note = Ancestral polymorphism is G, Derived polymorphism is S
  VARIANT 132: note = Ancestral polymorphism is W, Derived polymorphism is C
MAGFNGAYPPPSVLCHLMYTRFASWGSSIFGLPSLATGGGWPFWEGARWWTIRRCCTDQRRIKPIDLHANIAATNVTYEYTIFMNSHFVMKITSVSPWSELCNGLDFDKLECGGGLLRQALLLAYKSGFQVWDVEHVDDVR

SEQ ID NO: 4515 - protein, 516 aa, Zea mays
  VARIANT 45: note = Ancestral polymorphism is S, Derived polymorphism is Y
  VARIANT 385: note = Ancestral polymorphism is R, Derived polymorphism is C
MGSLDTTPTAAFADVAGGGFEPLNADDVRSYLHKSVDFIYDYYKSVESLPVLPGVEPGYLRRLLQSVPPTSSAPFDIALKEVRDAVVPGMTHWASPNFFAFFPSTNSAAAIAGELIASAMNTVGFTWQASPASTEMEVLALDWLAQLLRLPPTFMNRTAAAGRGTGGGGVILGTTSEAMLVTLVSARDAALRRAGSVGVAGITRLAVYAADQTHSTFFKACRLAGFDPANIRSIPTGPETDYALDPARLLEVMQADVDAGLVPTYVCATVGTTSSNAVDPVGAIADVAAVFNAWVHIDAAYAGSACICPEFRHHLDGVERVDSISMSPHKWLMTCLDCTCLWVRDTHRLTDSLETNPEYLKNDASESGTVTDLKDMQVGVGRRFRGLKLWMVMRTYGSAKLQEHIRSDVAMAKMFEDAVRADHRFEVVVPRNFALVCFRIRPQGTDLTEEDADVVNRELMERLNRTGKAYLAHTAIGGKFVLRFAVGSSLQEERHVRSAWELIKKTTTEIFEEETM

SEQ ID NO: 4516 - protein, 515 aa, Zea mays
  VARIANT 391..515: note = Derived polymorphism lacks residues 391 to 515
  VARIANT 150: note = Ancestral polymorphism is L, Derived polymorphism is V
MGSLDTNPNAFSAFGVDATTGFQPLHPDDVRAYLHKAVDFISDYYKSVESLPVLPDVKPGYLRQQLRSAPPTSSAPFDVTMKELTDSVVPGMTHWASPNFFAFFPSTNSAAAIAGDLIASAMNTVGFTWQAAPAATEMEVLALDWLAQLLRLPPSFMNRTGAAGRGTGGGVILGTTSEAMLVTLVAARDAALRRTGSQGVSGLPRLAVYAADQTHSTFFKACRLAGFDPANIRSIPTGPETDYALDPARLFEVMQADVDAGLVPTYVCATVGTTSSNAVDPVGAIADVAAVFNAWVHIDAAYAGSACICPEFRHHLDGVERVDSISMSPHKWLLTCLDCTCLWVRDTHRLTDSLETNPEYLKNDASDSGNVTDLKDMQVGVGRRFRGLKLWMVMRTYGAAKLQEHIRSDVAMAKMFEDAVRSDNRFEVVVPRNFALVCFRIKPHGGGIMTEEDADEANRELMERLNRTGKAYLAHTVVGDRFVLRFAVGSSLQEERHVRSAWELINKTTTEIMQK

SEQ ID NO: 4517 - protein, 86 aa, Zea mays
  VARIANT 25: note = Ancestral polymorphism is G, Derived polymorphism is D
  VARIANT 50: note = Ancestral polymorphism is S, Derived polymorphism is Y
  VARIANT 56: note = Ancestral polymorphism is E, Derived polymorphism is K
  VARIANT 58..86: note = Derived polymorphism lacks residues 58 to 86
MAFRKDEHGVVNAVPLLDLATSGLGAEQEYGKYKHIVELSKAIFGLRVNYVQWEPELQKSWDDNQVLEGYLKGTLGESKFFQVYNF

SEQ ID NO: 4518 - protein, 439 aa, Zea mays
  VARIANT 151: note = Ancestral polymorphism is R, Derived polymorphism is I
MAPEERMKQTEGSHKVVTAAAAGGKMAVLHSPVGVRSIVTSLVAFFILASSVVFLLLDREAGLQEEPAIRAGGGGGDEECSWSRGRWVYDNVSRPLYDGLKCAFIFPEVACDKYGRKDVMYQHWRWQPHGHGCDLPRFDAMKLLEELRNKRLVFVGDSVNRNQWVSLVCMVEASIPDDRLKMRIFNGSLISFKALEYNATIDFYWSPLLVESNSDNPIIHRVEYRIIRADRIEKHASVWRDADVIVFNSYLWWRKQKDDMRMKVMYGSFEDGDAKLDEMEMADGFEIAIKKLTEWLAKNIDKNKTRIFFAGSSPTHSWASNWGGQDKNKCLNETEPISYRPGGGYKAATTDYSLMAMARSYFRRTLEPRGIRVQILNITELSDYRKDGHPTVFRRQFVPLTKEQIADPASYADCTHWCLPGVPDVWNEFLYGYLTQQSK

SEQ ID NO: 4519 - protein, 129 aa, Zea mays
  VARIANT 44: note = Ancestral polymorphism is Q, Derived polymorphism is L
MNSLLLLAVAAAAAVCAFVPTPATADPFLCPWRTVAHPEDPFIQNLGSWAVDQQHSVLHFDKVESAKAQGVGDCTSMTRNYELVIDASIRAGSGDYKYRAVVYVTNFTQPQKVISFAAIPPSRRPPAAN

SEQ ID NO: 4520 - protein, 265 aa, Zea mays
  VARIANT 115..265: note = Derived polymorphism lacks residues 115 to 265
  VARIANT 162..265: note = Derived polymorphism lacks residues 162 to 265
  VARIANT 209: note = Ancestral polymorphism is I, Derived polymorphism is N
  VARIANT 215: note = Ancestral polymorphism is D, Derived polymorphism is V
  VARIANT 226: note = Ancestral polymorphism is P, Derived polymorphism is L
MATSVPVPLASQAPQRKPRTYTRAHGVTSSSTTSHALRHRGGIYFQRLVLSQLLSMKERAKVKEQQIAHQLSAGLKVLLVSIMNTTNKIEEELKLQGNMHAELVKKMVINTAKSYHAEVKWRDEHFVPTTVEEHLQISIPSSGRMQMTNLALISSRGNMTTREDAEWVFTFPKIREQASLDHVASTVQTCMKQYEVTEEEANEKLRAINEMAWMDIVQDNLEQERPIALLDTAINVARIADFLYKREDAYTLPFSLKDIIGSMYV

SEQ ID NO: 4521 - protein, 481 aa, Zea mays
  VARIANT 143: note = Ancestral polymorphism is R, Derived polymorphism is C
MTTSVPVPLASQPQAPQRKPRTYTPSPWGDFFLHHTPCTPSQLLSMKERAKVKEQQVRQIIQETMASSNLLRKLELVDTLQRLGVDYRYYEEIDQLLRSVYDDGDKDGGGSDDLYLTSLRFYLLRKHGYTTSSDVFEKFRDERGSVSSDDASCLLMLYDAAHTRTHGEEILDDIIAWSKSRLQSLLEEKNLEPELAEEVRCALETPRFRRVKRVEARRYISAYEKKGGRDGTILEFAKLDYNISQAIYCDELKELTVWDEQIAHQLSAGLKVLLASILNATNKIEEELKLQGNMHAELVKKMVIDTAKSYHAEVKWRDEHFVPATVEDHLQISIPSSGCMQITNLALISSRGNMTTREDVEWVFTFPKIVRGACIVGRICNDIMSHEREQASLDHVASTVQTCMKQYGVTTEEANEKLRAVIEMAWMDIVQDNLEQERPIALLDTMINVARIADFIYKREDAYTLSFSLKGIIGSMYVYSV

SEQ ID NO: 4522 - protein, 28 aa, Zea mays
  VARIANT 26: note = Ancestral polymorphism is S, Derived polymorphism is T
MCFAMVRKTSYRMGARAFLVDTLHVTLH

SEQ ID NO: 4523 - protein, 98 aa, Zea mays
  VARIANT 34: note = Ancestral polymorphism is G, Derived polymorphism is S
MSSSNARSKGFDWKETTRSIVPAKNEKKESSNTGKRETRKSIKRTGEDPVGVRDLLVSYGMFATRGCDRFVNVWDDINKRILYQYSKVRIKHCCTVIR

SEQ ID NO: 4524 - protein, 358 aa, Zea mays
  VARIANT 105..358: note = Derived polymorphism lacks residues 105 to 358
  VARIANT 106: note = Ancestral polymorphism is P, Derived polymorphism is L
  VARIANT 134: note = Ancestral polymorphism is L, Derived polymorphism is R
  VARIANT 145: note = Ancestral polymorphism is A, Derived polymorphism is V
  VARIANT 155: note = Ancestral polymorphism is G, Derived polymorphism is S
  VARIANT 159: note = Ancestral polymorphism is R, Derived polymorphism is H
  VARIANT 170: note = Ancestral polymorphism is A, Derived polymorphism is T
  VARIANT 211: note = Ancestral polymorphism is A, Derived polymorphism is V
  VARIANT 228: note = Ancestral polymorphism is A, Derived polymorphism is T
  VARIANT 229: note = Ancestral polymorphism is T, Derived polymorphism is M
  VARIANT 235: note = Ancestral polymorphism is C, Derived polymorphism is Y
  VARIANT 250: note = Ancestral polymorphism is A, Derived polymorphism is T
  VARIANT 286: note = Ancestral polymorphism is G, Derived polymorphism is D
  VARIANT 288: note = Ancestral polymorphism is V, Derived polymorphism is E
  VARIANT 293: note = Ancestral polymorphism is G, Derived polymorphism is S
  VARIANT 296: note = Ancestral polymorphism is R, Derived polymorphism is G
  VARIANT 298: note = Ancestral polymorphism is G, Derived polymorphism is S
MEAWPDDFRCPITLEVMTDPVILPSGHTFERRSIQSWLDGGHLTCPVTNLPLPPSPPLIPNHALRRLIAAVSPSAAASLVPAEGGAHARQEAVSAAAAVPARPASPVPALLRLAKSGAAGRKEVLESGSAAVLLRHAEAGDEAAARALLHLSLDGDDTRVGLVADGAVDALSAAVSRGGAAAASAATALTSLATVDVNKCTIGAHPSAIPALAGLLRRGGPRERREAATALYELCKLPENRRRAVREGAAPALADFAAAGSARAVEVLGLLARCREGRQELCRVPGVVSVLTGAAGSGNARAIEQALLVLNWICSESNELALEAIKLQAFDLCEALVNDDNCKIAKNAVDLARTLEKA

SEQ ID NO: 4525 - protein, 257 aa, Zea mays
  VARIANT 143..257: note = Derived polymorphism lacks residues 143 to 257
  VARIANT 221..257: note = Derived polymorphism lacks residues 221 to 257
MSLAPDPADGGAGTGTGDDWFLDCGILDDLPAAACGAFPWDASPSSSNPSVEVGSYVNTNDVFKEPNDVFKEPGSNKRLRSGFNDVHVPTSKASREKMRRNKLNDRFLELGSTLEPGKPVKADKAAILSDATRMVIQLRSEAQQLKETNGSLEEKIKELKAEKDELRDEKQKLKLEKESLEHQMKLMTSTPTYMPHPTLMPAPFPQAPLAPFHAQGQAAGQKLMMPFVSYPGYPMWQFMPPSEVDTSKDSEACPPVA

SEQ ID NO: 4526 - protein, 250 aa, Zea mays
  VARIANT 180: note = Ancestral polymorphism is R, Derived polymorphism is S
  VARIANT 179: note = Ancestral polymorphism is T, Derived polymorphism is I
MDASTTFLFLALACMAATNTLPHCANARHFLPPSRSHGSSTGTRSSSAVDAAAAAASSSKLSWPLLPWKKPGRGGSSRGSGSGHGFGWTVSHNGSDTDVGFGGGAGAGTSSSGGGSSAGGGAGLGVGIHVGNDGVDVAIGVAGGGAVVVSTSNGGGVGVGAGGGGGVGIHLGPDVVAVTRGGGGGAGGDDSSSGSGTGVGRAGSAVGSAHGYGNASGGTGAGGGSGAGSGGQGGYGGGGGGGTGSSGGHP

SEQ ID NO: 4527 - protein, 1510 aa, Zea mays
  VARIANT 1244..1510: note = Derived polymorphism lacks residues 1244 to 1510
  VARIANT 1404..1510: note = Derived polymorphism lacks residues 1404 to 1510
MAELASGAVTSLLGVIRSEWRLLGRVGGDVHFIREEMESMNSFLMHLARTTPPGGEHDEQVQTWMNQVRVLANDCNNCIDLYLYRGNPDIHLGRDRLRRYLRWVPWFLQKTVAQHRAALELSVLKERARDVGKRRLRYGVEVPKKAAVAPASPGAAAGAQGGNEAAAAALFHADDVEDGGGHDQAWERATAASSRIRRALFGIYVREDYLSDLLAEWIQQVRAQPQWSAPDDQGRHDTRCGAFLVPKEESVAIARQASAVAEKHVKNTILLDIPSLHRWRALGPKNVLYYILREIELKQQKTQADAKSQGWRPIREEKRRRIEEIKNEIEKLKAMDKIQEIKNLIENVKDNNQKLQPYLSKPKRKEDHITKEKIRNKNHALPELLVLLLMSSAAADKTDEKIQWKALEDHYDVILQNAAKSLKEHMDQVNKGAAKGQGIIHNVAQYARILQDVFPSVSSSSNNNSTRQPQDAQEQEATAEATTGKIQIIIDKVKQDILSEVFEAVGGAKAQEATKTDTTTRTTAATTLDEAQVKKMIQEAIHQLKEEKPADKKQETDVSGGQGSTAAAPRQENPDEKKAQPDTTGSSSAQQGSSQGAKASTVDEATKKTGELLVPIIKQTTEKMGDLQRKIKRQLDINGIVAKIRSHLTGQETMIILRVDYQHVDEWEKTRSALSLLPRVAVMMILTKTDRNLERARTEYCHPQGEPMDYTYLAAFYHHIALEITGLHQKSTSSDDDAAQQIRLLRAIFDKCEPYFMCMKIFAQTLYARPRRSKQELQKLYSTLEGLQQRSYRSIAMKMLKFSYRDVKKEYQSSLLYLAIFPPGHRIRRSTLIARWVVERMVTTEDWRWSSAVSIAEQCFDALVIRGLVHPTEISATGRVKSCMVGDVTYDFITKMAKKRRILEPRLSHHLACHFSVFSDLHLSVSDNISNFLNRLSESSQWPRLKVLDLEGCRGFRENRHYLPNICNKIVLLKYLSLRRTDVDKLPHEINNLRELEVLDIQQTEVPASCTMDLLLLKLKRLLAGNRNPSPRTHGHVLVPGKIDKMSDMEVLSNVRVKSDKDLEGIGRLWQLRKLGVVINVKDKDTLLKAVTNLHECLRSLSITLDATTSHKGTFSTIRGRRELEGSSTGRDEKKIMKEHPKVLESLSISGDVHITPKRILPSELTDKSTPLIKLTLSNTLLTQDDLVALANLHMLRCLKLRHNTYPGNKLAFKQVRFQKLEYLLVEGSNWIEISFEEDTAAPELVKVVLCFEIIESIAGVDRLKKLEELELNKCNKDSDKTDPATAAGVTNAPVPSTATAPYPAPSAPTAASAVATDHVPSSTPTIRNPAPSRTTTTASAANPTQTTTSTNQVLLPELLSSAKQVSKVTLHGTMLKQGDLRALARMENIRCLVLSHGSYDGSQLDVNKDEFPRLNVLVVRCPTVTGIKFEAGSSPQLEKLVWAFAEMKTFSSIENLTRLKKLELIGHSLPDKVKEDIDKHRDGDRIHYTHYKPPGEPEVLSSKKRGKRG

SEQ ID NO: 4528 - protein, 87 aa, Zea mays
  VARIANT 7: note = Ancestral polymorphism is L, Derived polymorphism is I
  VARIANT 21: note = Ancestral polymorphism is K, Derived polymorphism is M
MEEEKLLGIFRKRDKDTKPHKTRPEDRVLRATEGHFRNGILNVKHLLAPPKPSGKDMSEPKMRKDKHKGKGKQKGAEERDVEESTLL

SEQ ID NO: 4529 - protein, 493 aa, Zea mays
  VARIANT 204: note = Ancestral polymorphism is W, Derived polymorphism is R
  VARIANT 301..493: note = Derived polymorphism lacks residues 301 to 493
MSTPYHGIPLRALLLAVPLISIFIVFHLLYRPAPLPSTFRTYADGAASHRAEELSCPPLSSNLPPPAPKPEETLEPTSLRHVVFGIASSRRTLPLRLPLLRLWLRAPARAFLFLDAPAPAPDARDLPPGLALRVSADASRFPYTHPRGLSSAVRVARIAGELVSGLKQGEGEDVRWLVLADDDTAFVLPNLLHTLRRYDHREHWYLGARSESAAQNAWHAFAMAYGGGGIAVSWPLARRLARVVDSCVLRYPHLYGSDARIYACLAELGVELTHEPGFHQIDLHGDISGLLRAHPLSPLVSLHHLDHVYPLYPGMDRARAMRHFFRAADADPARILQQTVCYDRKESLTVSVSWGYSVQVFKGNVLLPDLLAVQKTFVPWKRGRNVTDVYMFNTKHYPRDECKRGALFFLKGITSREGKTETTYNRQPPRKCPPDLIPLKSLRLIKVTSERLQLAPGKALRRHCCDIVPSSSDANIDINVRKCRDDELIAMHS

SEQ ID NO: 4530 - protein, 169 aa, Zea mays
  VARIANT 4: note = Ancestral polymorphism is A, Derived polymorphism is V
  VARIANT 20: note = Ancestral polymorphism is V, Derived polymorphism is L
MVMAAAAAVLLALAAVATEVAAAGTTYTVGAPDGLWDMQTDYAQWVKSKTFRPGDTITFTYSPELHDVVEVTRAGYDACSSANNISAFRTGNDAVPLTAVGTRYFLCGLTGHCGNGMKIRVDVVAAAASPSAPGPAAAAAAPPTTSSPCIVGVVAASLLLLLLHAVVSY

SEQ ID NO: 4531 - protein, 512 aa, Zea mays
  VARIANT 293: note = Ancestral polymorphism is P, Derived polymorphism is L
  VARIANT 318: note = Ancestral polymorphism is P, Derived polymorphism is H
MASIRRALLLFLALLAQLLHIPPPIPLSSAHHTHADNYLKSADGHLPVVPFLCRPDQAKSLLQLKKSLSFVDSTTTLSSWRDGTDCCLWEGVGCDASSSGDVTVLDLNNRRLFSHYGLDPAVFSLTSLRRLDLSMNDFSRGDDDVQPLPDNITATTPAGFERFSLLTHLNLSYAGLRGPIPAGIGKLVNLVSLDLSSYFSTDEDGVPDDLWTNLTGHVPNFSNASCLESLMLARTSLLPIEQVKPTSITNFVSLKELVLSGNLASVDFLSSFGTLGSLCKLELTFDEVSELGPVFSWIGHHKNLTSLVLSGNFSEMTPTLVSNFKALRSLSMHDCTLPRHVLDAVGNLIALRTLDLYYCNITWGSTMPSSIGNLTNLRDLHIIQCGFSGPMPAAIGRLTNLRNMYVFRSGFSGPIPAAIGKLTSLEILDIEDGFSGPIPATIGNLSHLNRMRSFGEFYGPMIPYTIAQLSHLTRLTIAGSNFSGRIPGSMANLTQLTEMILPYNSLNGNSTY

SEQ ID NO: 4532 - protein, 551 aa, Zea mays
  VARIANT 320: note = Ancestral polymorphism is R, Derived polymorphism is T
MLDISNSGLYVMDVDDGEIPPFIFTLPALCYLDLSNNQLSGHVQDFDTTTSRLKSLFLSNNALSGFIPKAFFELTSLGALDVSSNNFTGSLDLSHFWRLHELTMLDLSNNWLHVMDADDDNLVDISYLSELQDIRLASCNVIRFPRFLRQVKSISYLDLSRNKIDGNVPNWLWDKLWSFAPYLNLSHNMFTGMQLINSYILPFSTSMEVLDLSFNRFSGRVPMPSSSGEVLEYSNNMFSSLVPNWTLYLRDTIYFSISKNNINDQLPPSICDAILDVLDLSNNNFYGPIPSCIIENMTHTILNLRGNNFNGTLPTDIMTTCDLQVLDLHEYNSSGETIDFDSNNYSYEPFYRYSIEFTYKGYFMTFERMLTTVTLIDFSNNRLEGTIPEALGSLLSLRILNLSHNNFIGNIPAQLGSLTDLESLDLSCNQLLGEIPQELTDLTFLATLNLSDNDLVGRIPQSRQFSTFGSSSFGGNPRLCGPPLSEFPCGASPSPYTPSAQLVHRSSPNSFDVVLFLFIGLGFGVGFAAAIVVKWNRVGRWFIANARALHR

SEQ ID NO: 4533 - protein, 316 aa, Zea mays
  VARIANT 48: note = Ancestral polymorphism is R, Derived polymorphism is C
  VARIANT 59..316: note = Derived polymorphism lacks residues 59 to 316
  VARIANT 134: note = Ancestral polymorphism is L, Derived polymorphism is P
  VARIANT 138: note = Ancestral polymorphism is A, Derived polymorphism is T
  VARIANT 163..316: note = Derived polymorphism lacks residues 163 to 316
  VARIANT 182..316: note = Derived polymorphism lacks residues 182 to 316
  VARIANT 201..316: note = Derived polymorphism lacks residues 201 to 316
  VARIANT 240: note = Ancestral polymorphism is R, Derived polymorphism is W
MTKIPLLPYPLGCSPPQTSLEEAPPPSAGGAGEESAILRAALGSGKLRIEGSLSFKRAQAALQVETEISIRAAALPAPGPRPLPRGARFAGSAAADSPKHEGAALRLQKVYKSFRTRRQLADYAVLVEQSWWKLLDFALLKCSSVSFFEVLQRGSLAGAPKQQTKLPWRALPWPCSCGEQVWARRKRKQAARYYRKSPQWQPISNFYDIMVGKGLLKDENAQKLALQHWLEAEQIDPRHWYGHNLHCYYNCWLHSESKQPFFYWPHLKKSYISLRKNSKLKERKLLGSRKSCKHNYKLNRPHLKKTKVCCARPKRK

SEQ ID NO: 4534 - protein, 479 aa, Zea mays
  VARIANT 229..479: note = Derived polymorphism lacks residues 229 to 479
MATTAAAAIRSPTRAAAPGPAAPAQQRAVLRVASSRTSSARPRRAAAAVAAAAMQPAKAVAAEAASPAAVEMGNGAAAPGLQRPDAMGRFGRFGGKYVPETLMHALTELESAFHALATDDEFQKELDGILKDYVGRESPLYFAERLTEHYKRADGTGPLIYLKREDLNHTGAHKINNAVAQALLAKRLGKQRIIAETGAGQHGVATATVCARFGLQCIIYMGAQDMERQALNVFRMRLLGAEVRAVHSGTATLKDATSEAIRDWVTNVETTHYILGSVAGPHPYPMMVREFHKVIGKETRRQAMDKWGGKPDVLVACVGGGSNAMGLFHEFVEDQDVRLVGVEAAGHGVDTDKHAATLTKGQVGVLHGSMSYLLQDDDGQVIEPHSISAGLDYPGVGPEHSFLKDIGRAEYDSVTDQEALDAFKRVSRLEGIIPALETSHALAYLEKLCPTLADGVRVVVNCSGRGDKDVHTASKYLDV

SEQ ID NO: 4535 - protein, 393 aa, Zea mays
  VARIANT 71..393: note = Derived polymorphism lacks residues 71 to 393
  VARIANT 5..393: note = Derived polymorphism lacks residues 5 to 393
MRAAWWDLVGLGLGGMVGAGVFVTTGRAARLYARPGLVVSYAIAGLCALLSAFCYTEFAVDMPVAGGASSYLLVTFGGGAPALDKPKQRTSIFLGRSTAQDRSQCPRSMSFIPERIRVMGRSPAFTALAATFESSSNRNLLTPRVVKKLYLRYVTPDSSNTSKSSVIAALAGSLDRPSQTPAPAFVKDGSESEKPKQKGDGKGVHTVVTRVESLTINEDVKENKPEDEDSLPIYLYERLKTTTTDPVTEIDVTRQEVISRSHITFLFQKNVMVTLFSIWHAGEFAAFLTGANLIMEYVFSNVAVARSFTVYLGTAVGVDVPSKWRIPVPGLPQGFNQVDLVAVGVILLLSVCICYRLRFCLQVSFYLSFLFVLSLVCSPLADTELLASDFQMF

SEQ ID NO: 4536 - protein, 418 aa, Zea mays
  VARIANT 196: note = Ancestral polymorphism is S, Derived polymorphism is F
MEEPDCPEGSVPDRGGERRTASLPLPAAFLEFLSENGLDPAVYSMAATIPRYIRELNLVFLNPRLKPGMESKIAEIEAELKCALDKVLWLPGFYAIPPEIQIAGSKAYQQGKIYGIDAASGAAILALDVRPGNHVLDLCAAPGAKLCMLADTLGTTGSLTGVDVAKHRLAACRTMLQKYSLGDRTRLFVADGTLFSLLPVNSRMQRMEGSIGVEENGSIFPEWTSRRSWKDRQKTRKANANGQQHLLAASEPELIYYGKHSGLVGQCKSDVFCPSVDDEACTSGYDKVLVDAECTHDGSIKHIQKFEFWGWKSLDRRVLDAERTENLLQLQLHLLTNGFKLLKTGGSLVYSTCSLTVAQNECVVQQFLSTHPSADLQKINLADNWPCRSGGIPKTLRFDPAVSQTSGLFVAKFCKLPT

SEQ ID NO: 4537 - protein, 627 aa, Zea mays
  VARIANT 257..627: note = Derived polymorphism lacks residues 257 to 627
  VARIANT 275: note = Ancestral polymorphism is S, Derived polymorphism is R
  VARIANT 281..627: note = Derived polymorphism lacks residues 281 to 627
  VARIANT 286: note = Ancestral polymorphism is G, Derived polymorphism is R
  VARIANT 354: note = Ancestral polymorphism is V, Derived polymorphism is I
  VARIANT 392..627: note = Derived polymorphism lacks residues 392 to 627
MAVPLPPPPPPSRRCALPRDACAFVPVMLAPTPASSAPATPRAQPPPRDARPSSQMPAPVSSTATPLALPRLPDAGPRILGPDAAAIPRCRPPYPRPRARSPELRRAPALAPDTMLCPTLNLATTPSTTPPSFLATTPSLDGRRDWWHLPDLGARLILAPNAAPPPIRAASSDGSRDNAPSPSPEPRRLTFQGCRSAILTSSSLAVARPPDRRLRPRDPPDSPTSPSTAASITHLHADEKARPPLSPRLPTTRLLNKDLSKHPVDGFSAGLVDDSNVFEWQVTIIGPPDTLYRTIQHIQIRVMDMFSVKSLYLYSDWLLDLFGVLHDGKKSYPTILALSSHFEELRVNVSELTVEELRVPEYLQFKEQLMEEGFKVEAGRTYHRTVLEILDQLEKIWLTLMDEYDLYEVPGIYRLHGISLLLLRRYQAEVDFLGQLHHKHLIKLIGYCIEDDQRSYPWTLPLPWSNRMKIALGAAKGLAFLHGGPKPVIYKDFKTLNVLLDVEYNAKLSDFGLAKAGHQGEKTHVSTRVVGTYGYVAPEYVMTGIRDKLLTSVATYSRNYVPCLSVACWFFTLFSELVVILVFTPYWIVNWLNIFVRRHKTKVPLQMFFFQVKLCFSFLHAVKVVRL

SEQ ID NO: 4538 - protein, 139 aa, Zea mays
  VARIANT 111: note = Ancestral polymorphism is T, Derived polymorphism is I
  VARIANT 87: note = Ancestral polymorphism is K, Derived polymorphism is N
  VARIANT 24: note = Ancestral polymorphism is A, Derived polymorphism is V
  VARIANT 11: note = Ancestral polymorphism is T, Derived polymorphism is I
MMKKKGGAATTAVAAVALVLLAAAAVRADVNCADVDASLRPCVGYVTGKEAAPAAECCAGVKRIRAMPSGPAERRQACECVKQAAANYQPLNADAIRDLPAQYSGTLSSSTVSSLTLTLSSSKCELTDILPQHLTDVEV

SEQ ID NO: 4539 - protein, 208 aa, Zea mays
  VARIANT 125: note = Ancestral polymorphism is A, Derived polymorphism is V
  VARIANT 110: note = Ancestral polymorphism is V, Derived polymorphism is I
  VARIANT 53: note = Ancestral polymorphism is C, Derived polymorphism is Y
MTIDPFTCTLSNQAFLVALIFNSRSNARAHNVSRNCIIDMAEKEETKGRCPACHTRYDKDMIVKMAATCDRTVADKNAEKKQKAQRVKPKAAPTATTTSTVESKKHLATIRVIQRNLVYIIGLPAHLCNESVLERREYFGHYGKVLKVLVSRPTGPPSQQASANSSISVYVSLNYTVYMHDLFILHMNLDLYFQYWSISLMEYQITIY

SEQ ID NO: 4540 - protein, 209 aa, Zea mays
  VARIANT 42: note = Ancestral polymorphism is V, Derived polymorphism is I
MSPPKSAARPPASLTSPKTGANKRQRKAASAVPLGDITNLLVLAESPTPSKPRRTARRALPATSDVSAVSSTCSSSASVTPAPKPSSAAVFEEEHSVVKSPTISTVHRRTTGAQERCRRNPASANNKGKEPVAATASCPPLGKSARTHSRKKDTRPISASVPCHEGRKKRPIASTPNLLEDLLEKQRAYFADIDAFELVEEEVSESELE

SEQ ID NO: 4541 - protein, 303 aa, Zea mays
  VARIANT 265..303: note = Derived polymorphism lacks residues 265 to 303
  VARIANT 165..303: note = Derived polymorphism lacks residues 165 to 303
  VARIANT 162: note = Ancestral polymorphism is T, Derived polymorphism is N
MDEAVPALATGQASTDAVTEQPVNVYIWDMDETLILLKSLLDGSYAGAFDGLKDHEKSTEIGKRWENLILELCDEHFFYEEIENYNEPYLNALNEYDDGRDLTSYDFEADCFSSPYDDANKKKLAYRHRAIGEKYAKGLEKVLDGHMVKVCNDQYSLTDKYTDGWLSSAHKLLEEALGKSASAPSANSSSINCIVTSGSLIPSLAKCLLYHLDDVVSSENVYSSWEVGKLQCFKWIKERFDGPNVRFCAIGDGHEECSAAQVMKWPFIKIEFRPEAHHRFPGLDLPTVQTYMDVIYESSSKDG

SEQ ID NO: 4542 - protein, 338 aa, Zea mays
  VARIANT 187..338: note = Derived polymorphism lacks residues 187 to 338
  VARIANT 176: note = Ancestral polymorphism is D, Derived polymorphism is Y
MAASTAAAAARKGALTDQRFSELSPTLSPEVVEALDRDGFQRCTPVQAAAIPHLLSHKDVAVDAAIGSGKTLAFIVPVVEILRHRSSPPKSHEVLALIISPTRELSSQIFNVAQPFFATLNGVPSMLLVGGLDIKAELKKVEEEGANILVGTPGKLFDIMHTDALEYKNLEILILDEADRLLDMGFQKHINFILSMLPKLRRTGLFSATQTKAITNLSKAGLRNAIMVEVKTEAKSTSKDAGQQELGPSITPLGLRLEYMICEASNKSSQLVDFLVQNSGKKIMVYFATCAYVDYWAVVLPLINPLKGSPIIAYHGKMKQSLREKALASFSALSSCFY

SEQ ID NO: 4543 - protein, 300 aa, Zea mays
  VARIANT 109: note = Ancestral polymorphism is T, Derived polymorphism is M
MESKCVNDQDTLIDLESGNGTAVINHSNDLESGCVCACANGCPRDDRNNQHMDCSSPASDAVARSGDDRKSEGEEKLGLGLLDSSGGDKAKKKRSKKKPPRPPRPLTPTPLDVSDQKLLNELSELAVLKRARVERMKALKKMKNAKQGFSGGNLCPLIVTVIFCVVILWQGFFSGHGPAVSFHGSPESSIRGTRSSLISIRFYKNHSNTRPPPFSETTAAPDAVLLHLLIVTDLLKCGVFLVVAGWAVLFIPARGWLEVFHFKTLSYRFHSARNPAAGVSEMRSSPGELRTQAVDLKESL

SEQ ID NO: 4544 - protein, 406 aa, Zea mays
  VARIANT 233..406: note = Derived polymorphism lacks residues 233 to 406
  VARIANT 70: note = Ancestral polymorphism is D, Derived polymorphism is E
MDMDMDMAMAMVGFDEDMDQVLAAMSPAGSSATSSAPTAAAAPPAVVAAGSSDDDEAGAADLRRGPWTAEEDILLVNYIAAHGEGRWNSLALSAGLKRTGKSCRLRWLNYLRPNVRRGNITAEEQLLILDLHSRWGNRWSKIAQHLPGRTDNEIKNYWRTRVQKHAKQLRCDVNSAHFRHIVRHVWMPRLLERAQADARCGGVQAPATTTASAPPACYNYYDDGRQHLLQQQGSAHHGVPAASEAHHHHQYYSEPAGPTAATATALSPDDASSALRPSSSLTADDASHYAAAYAYTSAATATPTTDDQQGVLHHCGADARTGPTPSDAAGDDDVFAGTTWSELLATTATGGPHEDCSSMSMIGLQLQDFGIGYFEGGLWSLDDLSLEQPCTLSSPADAYHHHHACS

SEQ ID NO: 4545 - protein, 355 aa, Zea mays
  VARIANT 214: note = Ancestral polymorphism is Y, Derived polymorphism is C
  VARIANT 213: note = Ancestral polymorphism is Y, Derived polymorphism is C
  VARIANT 165: note = Ancestral polymorphism is H, Derived polymorphism is Q
MAMMGFDEDLDQVLAAMGPADSSATSSAPNAAAPAPLAVVPAGSSDDEEAAAADSADDLRRGPWTVDEDILLVNYIAAHGEGRWNSLARSAGLKRTGKSCRLRWLNYLRPNVRRGNITAEEQLLILDLHSRWGNRWSKIAQQLPGRTDNEIKNYWRTRVQKHARHLRCDVNSAHFRHIVRHVWMPRLRERAQAGGVQAPATTTASAPPACYNYCGSQHLVQQQGAHRGVTAASEAHHHHQYYSEPAGPTSAATALSPDDASSALRSSSLRADDASHYTAAYTYTSAATATPTTNDQGYEQTTTDDDVFAGSTTSELLVTATGGPDDEYSSMIGLQLQDFGFEDFEYGLWSLDDLC

SEQ ID NO: 4546 - protein, 410 aa, Zea mays
  VARIANT 260: note = Ancestral polymorphism is S, Derived polymorphism is P
MASVGVARSSLGFQNGTSSSSDPDRLPNELGSMSIRDDKDVEDIVVNGNGAEPGHIIVTSIDGRNGQAKQTISYMAERVVGHGSFGTVFQAKCLETGETVAIKKVLQDKRYKNRELQTMRVLDHPNVVALKHCFFSKTEKEELYLNLVLEYVPETAHRVIKHYNKMNQRMPLIYAKLYMYQICRALAYIHNSIGVCHRDIKPQNLLVNPHTHQLKLCDFGSAKVLVKGEPNISYICSRYYRAPELIFGATEYTTAIDVWSAGCVLAELLLGQPLFPGESGVDQLVEIIKVLGTPTREEIKCMNPNYTEFKFPQIKAHPWHKIFHKRMPAEAVDLVSRLLQYSPKLRSTALEALVHPFFDELRDPNTRLPNGRFLPPLFNFKPHELKNVPADFMVKLVPEHARKQCAFVGW

SEQ ID NO: 4547 - protein, 405 aa, Zea mays
  VARIANT 207: note = Ancestral polymorphism is G, Derived polymorphism is E
  VARIANT 265: note = Ancestral polymorphism is T, Derived polymorphism is M
MVAEAEVMHQSPVPVLEVQYHRRATTKGVDDVVGMSAPAPAEVGVGVGVEVEVEVEVAVEVPRMGLEQPDVAPSLSTDMIQQFVPNIRSGSFADIGPRRYMEDEHIRIDDLSAHLGSMLVCPLPSAFYGVFDGHGGPDAAAYMKRHAMRFLFEESEFPQASQVDEVYLESVESCVRRAFLQADLALADDLDISRSSGTTALTALVFGRQLVVANTGDCRAVLCRKGVAMEMSRDHRANHVEERERVAASGGYIEDGYLNGVLSVTRALGDWDMKAPGASASAALIAEPEFRRATLGEDDEFLVMGCDGIWDVMTSQHAVSLVRRGLRQHDDPARCARELVMEAKRLETADNLTVVVVCFAPEMGSPFTPQQQQEEELPARPRSCKKGLSTEALCSLRSWLDTDHR

SEQ ID NO: 4548 - protein, 455 aa, Zea mays
  VARIANT 391: note = Ancestral polymorphism is R, Derived polymorphism is L
  VARIANT 390: note = Ancestral polymorphism is P, Derived polymorphism is L
MALLDGAAACNEAVLHASALLSRADYDDVVTERTIADACGNPARASPLLPPPPRGPASASPSASTASTTSRRRAASAPAAASSPPRPYGVPPDRLAALVEGSAAGDGLGFEGVDGNGKMEGEGRKVEYWMGPFYAIDIEGYVPRRDRIAQGQKPQAKQNKVAGSEQSRTENVDYRACAPSEDGMTSSPSLVEAHASSEVIAEGMDGLVLGKSTRTPGRKKTKTPSKMLEQEEDNSMLSSCICDSIAKQLEDVVFEERKGSQKIKVSRASSRAQKGKSRTMPAESDGREVDFTSTIIIGDASTNLEESVAGSKSGRRTVTWADENGTVLETSKAYESPSSSIKQPEEGIDSSPRFASAEACAAALIKAAEAISSGTAEAEDVGEHVFTIFPLFLFFEGYLIDTLSFVDALPSLRSRQWQAVVLVMLNALSVRQLPALAPVFPNPKLVQKVMKIFSA

SEQ ID NO: 4549 - protein, 354 aa, Zea mays
  VARIANT 20: note = Ancestral polymorphism is Q, Derived polymorphism is K
MKVSVLALWSAAAALLLVAQAPSAAEASHHGGAGLKLGYYKKTCPGVENVVKYHVAKAIKANRGAGAALVRLIFHDCFVRGCDASVLLDPTPANPETEKTAPINIGLAAFEVIDEIKAALEERCPGTVSCADIVVYAARDASSLLSNGHVHFAAPAGRLDGVVSRAADAQRDLPDSTFTVSELIRNFRRKNFTVEELVILSGAHAVGVGHCSSFRARLSAPPAQIVPAYRNLLSGKCAAAAGGADDPVVANNVRDEDPRAVAAAFPSFLGKLRKARDFLDNSYYHNNLARIVTFNSDWQLLTEKEALGHVKEYAENGTLWDEDFSDALLKLSRLPMPPHSKGEIRKTCRWVNHH

SEQ ID NO: 4550 - protein, 338 aa, Zea mays
  VARIANT 206: note = Ancestral polymorphism is H, Derived polymorphism is Q
  VARIANT 134: note = Ancestral polymorphism is A, Derived polymorphism is S
MAMLMMTWTWTCNAKLLLMTLVFAAALSATVTTSRAQSPPLQYNFYGASCPQAEATVRNVTEGIIANDRTMGAAFMRLFFHDCFVRGCDASILLDPTSSNTQVEKKAIALRGYAAVNTIKAAVEAVCPGVVSCADILAFAARDTAVVSGGFAGFGMPSGRRDGVVSSFIEVLQNIPSPTFKLPDLVSNFAKKGLDVDDLVTLSAAHSFGQAHCSFVNGRLYPTVDPTMNATYAAGLKTVCPPPGSGGGDPVISNNRVTDPNALSNQFYSNLMTGQVLFVSDQQLMNTTYTAAKVANNSADSAAWMTQFQTALLKMGSIQVLTGTAGQVRKYCNVVNSS

SEQ ID NO: 4551 - protein, 160 aa, Zea mays
  VARIANT 134: note = Ancestral polymorphism is V, Derived polymorphism is I
  VARIANT 97: note = Ancestral polymorphism is T, Derived polymorphism is I
  VARIANT 40..160: note = Derived polymorphism lacks residues 40 to 160
  VARIANT 24..160: note = Derived polymorphism lacks residues 24 to 160
  VARIANT 20: note = Ancestral polymorphism is G, Derived polymorphism is D
  VARIANT 18: note = Ancestral polymorphism is T, Derived polymorphism is M
MLGGSCPGSPTSRLLPITLGQVFQRIDVVSRDFDNIVELELGAPNGLKNNQGGATVCLTLPPSLSVFHFVSEVFSTDAGNQTQVGICVLQSEHEMATYNKCLGEIDLMGIPPAPRGLPRIEVTFDIDANGIVTVSAKDKATRKDRNITIRSSSGLSEADI

SEQ ID NO: 4552 - protein, 327 aa, Zea mays
  VARIANT 4: note = Ancestral polymorphism is T, Derived polymorphism is I
  VARIANT 289: note = Ancestral polymorphism is P, Derived polymorphism is L
  VARIANT 300: note = Ancestral polymorphism is M, Derived polymorphism is T
MAATSSAALVTMVVVIAAAAISTASGTALLQYNFYGSSCPKAEEAVRNATQKIISDDPTMGAAFVRLFFHDCFVRGCDASILLDQSNSNPQPEKLAIPLRGYAQVNTIKAAVEAVCPGVVSCADILAYAARDSAAASGGFAFAMPGGRRDGSVSNLNDIPGNLPAPNMQVQDLIASFGSKGLSAADLVALSGAHSFGQTHCSFVTPRLYPAVDATMNATFAAALKAVCPPPSQGGGGTVLNNNRVTDPNKLSNQYYTNLATGQVMFTSDQTLTSSNTTNKMVQDNAADPIAWMARFAGAMLKMGGIQVLTGTQGEIRRVCGATNGGN

SEQ ID NO: 4553 - protein, 140 aa, Zea mays
  VARIANT 12: note = Ancestral polymorphism is G, Derived polymorphism is R
  VARIANT 23: note = Ancestral polymorphism is A, Derived polymorphism is V
  VARIANT 28: note = Ancestral polymorphism is G, Derived polymorphism is R
  VARIANT 52: note = Ancestral polymorphism is R, Derived polymorphism is H
  VARIANT 53: note = Ancestral polymorphism is D, Derived polymorphism is N
  VARIANT 62: note = Ancestral polymorphism is R, Derived polymorphism is S
  VARIANT 67: note = Ancestral polymorphism is V, Derived polymorphism is M
  VARIANT 68: note = Ancestral polymorphism is P, Derived polymorphism is L
  VARIANT 69: note = Ancestral polymorphism is V, Derived polymorphism is I
  VARIANT 80: note = Ancestral polymorphism is K, Derived polymorphism is N
  VARIANT 88: note = Ancestral polymorphism is R, Derived polymorphism is K
  VARIANT 89: note = Ancestral polymorphism is A, Derived polymorphism is T
  VARIANT 90: note = Ancestral polymorphism is V, Derived polymorphism is M
  VARIANT 91: note = Ancestral polymorphism is A, Derived polymorphism is G
  VARIANT 96: note = Ancestral polymorphism is R, Derived polymorphism is W
MSSRKNHELPEGGAWGSDAGRTAVWDTGSSLYDSYKLAAVRRLLDKRLLTLRDAEETRGKGRQLVVMPVVSSRRVHHRGKATLRALFRAVATCAARTRQALPLAYAYAAGMVHDHQGGSPVEPEDLPSRPTVNFDDHPYV

SEQ ID NO: 4554 - protein, 116 aa, Zea mays
  VARIANT 31: note = Ancestral polymorphism is S, Derived polymorphism is Y
  VARIANT 37: note = Ancestral polymorphism is V, Derived polymorphism is I
  VARIANT 40: note = Ancestral polymorphism is D, Derived polymorphism is A
  VARIANT 60: note = Ancestral polymorphism is Q, Derived polymorphism is K
  VARIANT 61: note = Ancestral polymorphism is V, Derived polymorphism is A
  VARIANT 62: note = Ancestral polymorphism is Q, Derived polymorphism is L
  VARIANT 67: note = Ancestral polymorphism is H, Derived polymorphism is Q
  VARIANT 92: note = Ancestral polymorphism is A, Derived polymorphism is V
  VARIANT 100: note = Ancestral polymorphism is D, Derived polymorphism is Y
  VARIANT 103: note = Ancestral polymorphism is S, Derived polymorphism is L
  VARIANT 114: note = Ancestral polymorphism is A, Derived polymorphism is V
MRVQHLKKKFYFHFQDYVDLIIWKLKSSFNSLRAITVLLARSFSHKTFFSRGPYSMVVDQAQFLDRQHLFVKFGSVDGGVSRSTDQNLAFFVVYNMETTDIVSVHQNSSEDIYAWY

SEQ ID NO: 4555 - protein, 966 aa, Zea mays
  VARIANT 713: note = Ancestral polymorphism is A, Derived polymorphism is S
MDYQGDNLRDFFQTNGRKVLQRAENNYSLKYFTENEIRNITDGYKSVLGRGAFGEVYKGTLEDQSSVAVKRYIHGTHKEVFAKEVIVHSQINHKNVVRLLGCCTEENALMIVMEFISNGNLDSILHGNRGNGRVPFPLKKRIEIAIEVAEVLWCMHSMYSPVLHGDIKPANILLDENFQPKISDFGIARLLSANGPQQATTVIGSIGYLDPAYCESGILTPKSDVYSFGVVLLEIITRNKAVDGTVTLAQSFNEALTKGEDVQHMFDEEISVAENKKFLRRIGQLAAKCLQRDVKTRPEMVEVANSLRMIRKAMQRDQDEDVLLAAYQFGDLKIFNETEMKEMTKNYSMAFRKSMCECLYNGVIGMNRPIIVRLLETSSETGREIFLNTMSILSQKNHKNVVNIVGFHIGKSSLECVYESCCDLSKTMLGSISLSNRNLYDTICSMKKLHLQQRLSIAVQCAEGLVHIHSLAAESPESCGTSLLGNFRSANIFLDENFVPKIFNVNLSTFLGLSGAQKHTVFSIHYNGPEKYYSDPRDVSGQLLNKKSDVYSFGVVLLELITWKTVRYMYNLRARVLTTDFLDSYRRDRDAIGMFGKVCDEHEGYFVHEALSIAIDCLQLDIQMRPEMEHVLFRLRIIVARSKLAAGSNNKPSQHIGRALVNNIDKLHPTLISTISMEELNEATGNFSNDVLIGQGPYAECFLGVLKDGQNLAVKRLRTSEEIQVEVPTILRMCYHDNVVQFLGCFLEGGTRVLAYEYAPRGSLHDILHGKMGIKGARPGPPLSWLQRVKIAVSAAKGIEFLHEKVDPRIIHNNIKSSNILLFDNDVAKIGDIGVSIHDAHRRVHNWAEYYSVREHLAPEFAFRRRYSTKSDVYSFGLVLLELLTGRSVFHVATQCGPRSAVRWAKPMLSQDKVEQCIDPRLGGGYLLNDVRKMASVAALCLQDEPEFRPEMSIVVEALSLLLNSK

SEQ ID NO: 4556 - protein, 129 aa, Zea mays
  VARIANT 46: note = Ancestral polymorphism is S, Derived polymorphism is Y
MAAAAAWTTTRKATTSTSKAALSALASCVAAAGGVTRTTTSSGKAYRKGYLPIVLVRGSGDDDDAGTVETETMVLVRVSDLKEPCMAALLEAAEEQFGYGQLGVLKVPCDAQRFHHVVNMARKQMVRSS

SEQ ID NO: 4557 - protein, 237 aa, Zea mays
  VARIANT 188: note = Ancestral polymorphism is T, Derived polymorphism is M
  VARIANT 12: note = Ancestral polymorphism is A, Derived polymorphism is T
MRGFDVIDDAKAVLEAHCPRTVSCADIVAFAARDSTYLAGGLDYKVPSGRRDGRVSKEEEVLDNNVPAPTDEVDELIESFKRKGLNADDMVTLSGAHTIGRSHCSSFTQRLYNFSGQLGQTDPSLDPAYAGHLKARCPWPSSDDQMDPTVVPLDPVTPATFDNQYYKNVLAHKVLFISDNTLLDNPWTAGMVHFNAAVEKAWQVKFAKAMVKMGKVQVLTGDEGEIREKCFAVNPHY

SEQ ID NO: 4558 - protein, 499 aa, Zea mays
  VARIANT 15: note = Ancestral polymorphism is G, Derived polymorphism is A
MESHETSSKQIQRHGKARKERFLDFLRAAPSKDLWLQRFGVTVTAPHAFLRRVATVGYVPAAYARFFPLRAPAAFVRGVDWRALRARCKAWARRPTNAALLVWLAFVAAGVAFVFLLMTGALDSAVPDAARRRRWTEVANQVLNALFTVMCVYQHPRLCHHLALLLRWWRDDAAAAELRAVYCKNAAGTRRERLHVAVVLLLLHATCFAQYAYCALFWAFSSDTRPDWAVNFCMAFGLAAPVAAALYMVYGPLGRRIVQLPAAAAADTGDDEAVAVMAADEARYTGGRVAVARPEWAGGLFDLADDPTVAALSLTCTFCMFGWNMERMGMGNMYVHVFTFALLCAAPVLVFAVAALNIHDATLGFLVGATGALLSVLGLTYGGFWRAQMRRRFSLPADRSMCGGRPAAADYAKWLLCAPCALAQEVRTGNLYDVEDGSLYHVRGSDEDALEEEKPGMAPLEREGCVAPAPLTADKTRAGRVECVVTVKPPAPLRIMRGE

SEQ ID NO: 4559 - protein, 338 aa, Zea mays
  VARIANT 308: note = Ancestral polymorphism is A, Derived polymorphism is P
  VARIANT 291: note = Ancestral polymorphism is G, Derived polymorphism is R
  VARIANT 288..338: note = Derived polymorphism lacks residues 288 to 338
MRSTWLAFALSALVVVSSSAAHVHASPGKLEVGFYEHSCAQAEDIVRNAVRRGIAREPGVGAGLIRMHFHDCFVRGCDGSILINSTPGNLAEKDSVANNPSMRGFDVIDDAKAVLEAHCPRTVSCADIVAFAARDSTYLAGGLDYKVPSGRRDGRVSKEEEVLDNNVPAPTDEVDELIESFKRKGLNADDMVTLSGAHTIGRSHCSSFTQRLYNFSGQLGQTDPSLDPAYAGHLKARCPWPSSDDQMDPTVVPLDPVTPATFDNQYYKNVLAHKVLFISDNTLLDNPWTAGMVHFNAAVEKAWQVKFAKAMVKMGKVQVLTGDEGEIREKCFAVNPHY

SEQ ID NO: 4560 - protein, 340 aa, Zea mays
  VARIANT 248..340: note = Derived polymorphism lacks residues 248 to 340
  VARIANT 218: note = Ancestral polymorphism is S, Derived polymorphism is I
  VARIANT 198: note = Ancestral polymorphism is G, Derived polymorphism is S
  VARIANT 115: note = Ancestral polymorphism is A, Derived polymorphism is T
  VARIANT 53: note = Ancestral polymorphism is R, Derived polymorphism is H
  VARIANT 40: note = Ancestral polymorphism is S, Derived polymorphism is T
MGSMTWLAAVLAALVVAASSSVASHASPPGKLEVGFYEHSCPQAEDIVRNAVRRGIAREPGVGAGLIRMHFHDCFVRGCDGSILINSTPDNKAEKDSVANNPSMRGFDVVDDAKAVLEAHCPRTVSCADIVAFAARDSAYLAGGLDYKVPSGRRDGRVSKEDEVLDNNVPAPTDEVDELIESFKRKGLNADDMVTLSGAHTIGRSHCSSFTERLYNFSGQLGRTDPSLDPAYAEHLKMRCPWPSSNDQMDPTVVPLDPVTSATFDNQYYKNVLAHKVLFISDNTLLENPWTAGMVHFNAAVEKAWQVKFAKAMVKMGKVQVLTGDEGEIREKCFAVNPHY

SEQ ID NO: 4561 - protein, 339 aa, Zea mays
  VARIANT 4: note = Ancestral polymorphism is T, Derived polymorphism is R
  VARIANT 187: note = Ancestral polymorphism is L, Derived polymorphism is Q
MSSTWLAFAWAAAALVVAAATAHAPHHPSSLQVGFYKHSCPQAEDIVRNAVRRGLVRDPGVGAGLIRMHFHDCFVRGCDASILINSTPGNLAEKDSVANNPSMRGFDVIDDAKAALEAHCPRTVSCADIVAFAARDSACSAGGLEYEVPSGRRDGRVSRQDEVLDNNVPTPTDVVAELIESFKRKGLSADDMVTLSGAHTIGRSHCSSFTQRLYNFSGQLGWTDPSLDPAYAGHLKARCPWPSSDDQMDPTVVPQDPVTPATFDNQYFKNVLAHKVLFVSDNTLLDNPWTAGIVQFNAAVEKAWQVRFAKAMVKMGKVQVLTGDEGEIREKCFVVNPHY

SEQ ID NO: 4562 - protein, 843 aa, Zea mays
  VARIANT 138..843: note = Derived polymorphism lacks residues 138 to 843
  VARIANT 531..843: note = Derived polymorphism lacks residues 531 to 843
MRCLVGGGVQDSPRAAAKRVSPASWRLDAATAEADAGRAEAKGVRFCVRPPDVMETVHEVAIYIHRFHNLDLFQQGWYQMKISAMWEEGGNKTPASPARVVQYEASDVGADDALGIWKIDDVDNSFHTQPFRIKYARQDIYLSVMVSFNIFNIEEEGPAASAVMLKFELMYAPTLENGSELQASSVTSSAAVHEFRIPHRALLGLHSYCPVHFDAFHSVLVDLTLHIVYLKAGATKPSLKVHRHLEFECTNKNISFLTLPGQLLSAGDMSFYENETPTENGLSMFASVANLLCISNHVPDQGLGPTSYHIVKALLTSRKLLLEELKKISGAIGKTVEELDVADLNLGRYESFNPSKSGLPNSSKVFPATGKGVGQLTGVLHDFLEKNNDMVNGTDDSMLYTLPQEELFELFLTLSGQLSLLWNAFLKFHRQVVNKTKILEYLHDAWAIDRKAEWSIWTVHSKIEIPHRYLRSMNDESSHRHSLLRVSGSRKFHDDPAQNSASRAELHRKSIAQMKINTQSVQDMHIYADPSHVPVVLIEQHVMVVPQHSSSKDLASNASEQKDTIVLPKLQGEPLGHHLDLRLVRNQWLLLDPGADCLMSEANEDKTSGDFKEMGSRLAGEVIAFLKKKMDKLSRYGGCKELKLSFVGHSIGNIIIRSALAEPALQPYLKNLYTYMSISGPHLGYWYSSNSLFNSGLWLLKKLKNAQCIHQLTFSDDQDPHNTYFYKLCKLKTLENFKNIILLSSPQDGYVPYHSARMELCPAASSDTSKKGQVFTEMLNNCLDQIRAPSSDTRTFMRCDVNFDQSNHGRSLNTMIGRAAHIEFLETDIYAKFIMWSFPDLFR

SEQ ID NO: 4563 - protein, 138 aa, Zea mays
  VARIANT 39: note = Ancestral polymorphism is K, Derived polymorphism is T
  VARIANT 52: note = Ancestral polymorphism is R, Derived polymorphism is C
  VARIANT 58..138: note = Derived polymorphism lacks residues 58 to 138
  VARIANT 66: note = Ancestral polymorphism is E, Derived polymorphism is D
  VARIANT 76: note = Ancestral polymorphism is S, Derived polymorphism is L
  VARIANT 127: note = Ancestral polymorphism is V, Derived polymorphism is A
  VARIANT 129: note = Ancestral polymorphism is D, Derived polymorphism is G
MSQQLPTNLVEIMEQRMKLIEQRSAYLQEQINQEIEGLKSLVANDREEKDMCEMAAEELLVAVEEEKRLQHELFRSLLPKDEADEKDCILEVRAANVCDHHSMSLSLILLRYRYEKYAQKNGWKFDVIDIMESAVKGY

SEQ ID NO: 4564 - protein, 169 aa, Zea mays
  VARIANT 160: note = Ancestral polymorphism is D, Derived polymorphism is A
  VARIANT 126: note = Ancestral polymorphism is R, Derived polymorphism is W
  VARIANT 72: note = Ancestral polymorphism is K, Derived polymorphism is T
  VARIANT 33..169: note = Derived polymorphism lacks residues 33 to 169
  VARIANT 3..169: note = Derived polymorphism lacks residues 3 to 169
MSQQLPANLVEIMEQRMKLIEQRSAYLQEQINQPAASPEEYLRANKEFRKLESTMELIKDLRSKQEEIEGLKSLVANDREEKDMREMAAEELLVAVEEEKRLQHELFRSLLPKDEANEKDCILEVRAGTGGEEASLFAMDIFRMYEKYAQKNGWKFDVIDIMESAVEGY

SEQ ID NO: 4565 - protein, 463 aa, Zea mays
  VARIANT 135..463: note = Derived polymorphism lacks residues 135 to 463
  VARIANT 120..463: note = Derived polymorphism lacks residues 120 to 463
MVSDGARGLLGAYELGRTLGEGNFGKVKQARHRGSGGQFAVKIMERARVLSQRADEQICREIATLKLLAHPNVVRLHEVAASKTKIYMVLELVNGGELLDRIQAASEGKLPEQEARRLFQQLVDGVSYCHEKGVCHRDLKLENVLVDRKGNIKISDFGLSALPQHLGNDGLLHTTCGSPNYIAPEVLQNRGYDGSLSDIWSCGVILYVMLVGHLPFDDRNIVVLYQKIFKGDAQIPEWLSPGARNLLRRILEPDPAERIAMAEIKAHPWFQEHYVPVLPPYDDDDDHDSVKQIGAGSKTTHHINAFQLIGMASSLDLSGFFEEEDVSQRKIRFTSAQPPEDLFAEIERSATDMGFHVHRGHSKLRLTRNCDRSKNQKNPMSSSSSSFLVCTEVFELSPSLYVVELNKSHGDPALYRQLCQRICGDLGVLEMDQIFGTRPPVADDLAGLALALERRSATPLVAL

SEQ ID NO: 4566 - protein, 435 aa, Zea mays
  VARIANT 77: note = Ancestral polymorphism is G, Derived polymorphism is A
  VARIANT 250: note = Ancestral polymorphism is T, Derived polymorphism is M
MGTIVDADVGFAVKRTSRSLVPPASATPRETLRLSVIDRVAGLRHLVRSLHVFAAGGDKKRQQATATPAKALREALGKALVDYYPFAGRFVVVDAEGGGETRVACTGEGAWFVEANAACSLEEARHLDHPMLIPKEQLLPEPSPDVNPLDMPLMMQVTEFSCGGFVVGLISVHTIADGLGAGQFINTVAAYARGATSATPKPVWARDVIPDPPKMPAPPPRLDLLDLRYFTADLSPDHIGKVKARYLESTGQRCSAFDVCVARTWQARVRALRLPDPAAPVHVCFFANTRHLLPAAATAGFYGNCFYTVKATRASGEVAAADVVDVVRAIRDAKARLGADFARWAAGGFDRDPYELTFTYDSLFVSDWTRLGFLEADYGWGTPTHVLPFSYHPFMAVAVIGAPPKPKPGARIMTMCVQEQHLPEFQEQMMSQQAA

SEQ ID NO: 4567 - protein, 357 aa, Zea mays
  VARIANT 1: note = Ancestral polymorphism is M, Derived polymorphism is L
  VARIANT 50: note = Ancestral polymorphism is A, Derived polymorphism is T
MSSLPLPESPMAAENEACDWGEMPSDALVSVFGKLDVIEILTGAGLVCRAWHRLAASDPMLWRRVDMRHMSYGYEGERLQTEKVEDMARAAIDPSAGTMEPFFADTIVNDDLLRCLSQRSGKRLQTEKVEAMARAAIDRSAGTMEAFFADIFVNDDLLRYLSQRAPSLKCLHLSACNFTDQCFAEAINCFPQLEELDVTLCLLYGSACEAVGRACPQLKRFRLNELWSISRKEDIGMEALGIASTMPRLQELELIGNNLTNDGLMSILDRCPRLESLDIRECFNIQMDDALKLKCSRIRDLRLPHDPIFFDDTRYWPYYINSGVFDSDIDSEVGTYDDPLDDMGESMSIMFNDDFYV

SEQ ID NO: 4568 - protein, 509 aa, Zea mays
  VARIANT 145..509: note = Derived polymorphism lacks residues 145 to 509
  VARIANT 181: note = Ancestral polymorphism is T, Derived polymorphism is M
  VARIANT 191: note = Ancestral polymorphism is G, Derived polymorphism is V
  VARIANT 460: note = Ancestral polymorphism is G, Derived polymorphism is A
MGRGRGHLLLPAAAACLWALSCALLLHASPHGAGAGAGGLLRVGLSRRGGGLDQRALAAAKAARQQEASRLGASGGGDVPLVDYLNTQYYGVVGIGTPPQNFTVIFDTGSSNLWVPSSRCYFSIACYLHHRYKSAKSSTYKADGETCKITYGSGSIAGFFSDDDVLVGDLTVKNQKFIETTRESSITFIIGKFDGILGLGYPEISVGKAPPIWQSMQEQELLAEDVFSFWLNRSPDAAAAGGELVFGGVDPAHFSGNHTYVPVSRKGYWQFDMGDLLIDGHSTGFCAKGCAAIVDSGTSLLAGPTAIIAQVNEAIGADGIISTECKEVVSQYGEMILDMLIAQTDPQRVCSQVGLCVFDGARSVSEGIESVVGKENLGSDVMCSACQMAVVWIENQLRENKTKELILQYANQLCERLPSPNGESTVSCQEISKMPSLAFTIANKTFTLTPQQYIVKLEQGGQTVCISGFMAYDVPPPRGPLWILGDVFMGAYHTVFDFGNDRIGFAESA

SEQ ID NO: 4569 - protein, 167 aa, Zea mays
  VARIANT 132: note = Ancestral polymorphism is R, Derived polymorphism is S
  VARIANT 124: note = Ancestral polymorphism is Q, Derived polymorphism is R
  VARIANT 22: note = Ancestral polymorphism is D, Derived polymorphism is E
MGGGSGNPLPPPQAAAAAFRVDRPLQALGFEFTRVTAEEVVGRLPVTETCCQPFDWLNGGVSALMAETTASIGGYVASGYRRLAGVQLSINHVGPARLGDLVQARATPVQLGRKIQVWEVQIWRIDPSTSESKDLVSTARVTLLTNLPTPEKMKSFEQGLKKFSSKL

SEQ ID NO: 4570 - protein, 814 aa, Zea mays
  VARIANT 210..814: note = Derived polymorphism lacks residues 210 to 814
  VARIANT 69: note = Ancestral polymorphism is G, Derived polymorphism is D
MLLLQVILLGLLSLHAPSNSATATDTVSPGNGLAGSSRLVSNNSKFALGFFRMDSKSFNYATNPYTYLGIWFNKVPKLTPLWSANGESPVMDPASPELAIAGDGNLVILDQATRSVIWSTHANTTTNDTVAVLQNNGNLVLRSSSNSSTVFWQSFDYPTDTFFAGAKIGWDKVTGLNRRLVSRKNLIDQAPGLYTGEIQKNGVGHLVWNSTVEIESTGLWNGQYFSSAPEMIGNTVSITTFEYVNNDKEVYFTWNLQDETAIVLSQLGVDGQGMVSLWIDKDWVVMYKQPVLQCDAYATCGPFTVCDEGENEGPICNCMKGFSVSSPRDWELGDRRDGCTRNTPLHCGRSRNTDKFYAPQNVMLPQDAMKMQAATSDEDDCSRACLGNCSCTGYSYGEGGCSVWHGKLTNVKKQQPDGNGETLYLRLAAKEVPGVPRKNSRIFRFGAAIIGASAAAVAALMILGLMMTWRRKGKLFTRTVGDAQVGIGITTFRYVDLQHATKNFSEKLGGGSFGSVFKGYLSDSLALAVKRLDGANQGEKQFRAEVSSVGIIQHINLVKLIGFCCQGDQRLLVYEYMPNHSLDAHLFKVGSDTVLEWNLRYQIAIGVARGLAYLHTGCRDCIIHCDIKPENILLDASFVPKIADFGMAKVLGREFSDAITTMRGTIGYLAPEWISGEAVTSKVDVYSYGSVLFEIVSGRRNSSQEYSKDGDYSAFFPVQVARKLLSGDIGSLVDASLHGNVNLEEVERVCKVACWCIQDSEFDRPTMTEVVQFLEGVSELHMPPVPRLLDAITGGATNTKIYSMLSVEGSPTSV

SEQ ID NO: 4571 - protein, 85 aa, Zea mays
  VARIANT 63: note = Ancestral polymorphism is Y, Derived polymorphism is S
  VARIANT 66: note = Ancestral polymorphism is V, Derived polymorphism is M
  VARIANT 68: note = Ancestral polymorphism is V, Derived polymorphism is A
MGSWVRTITSPFRKMLNPQRDGKTKTPRHHHHHQSPSPSSSAMEQSGEMDRSQLYGEVMACTYEDVQVMWTMLDKARTCAAAAAS

SEQ ID NO: 4572 - protein, 108 aa, Zea mays
  VARIANT 25: note = Ancestral polymorphism is P, Derived polymorphism is S
  VARIANT 45: note = Ancestral polymorphism is Y, Derived polymorphism is H
  VARIANT 84: note = Ancestral polymorphism is L, Derived polymorphism is Q
  VARIANT 102..108: note = Derived polymorphism lacks residues 102 to 108
MHRTYLGGEINFTDGSINVILHSQPKSIVGTPAYIAHEVLLKKEYNGKVADVWSCGVTPYVMLTITIPEIRNHPWFLKNLLADQMDDNTMSKQYEEPEQPMQSMNEFM

SEQ ID NO: 4573 - protein, 58 aa, Zea mays
  VARIANT 26: note = Ancestral polymorphism is Y, Derived polymorphism is H
MSEGTANCVDILIAIILPPLGVFLKYGCGHEFWICLLLTFLGYIPGIIYAIYAITKNT

SEQ ID NO: 4574 - protein, 1326 aa, Zea mays
  VARIANT 1092..1326: note = Derived polymorphism lacks residues 1092 to 1326
  VARIANT 1044..1326: note = Derived polymorphism lacks residues 1044 to 1326
  VARIANT 874..1326: note = Derived polymorphism lacks residues 874 to 1326
  VARIANT 859..1326: note = Derived polymorphism lacks residues 859 to 1326
  VARIANT 845..1326: note = Derived polymorphism lacks residues 845 to 1326
  VARIANT 12: note = Ancestral polymorphism is R, Derived polymorphism is W
MDRVGLQAFCKRHGLSARGSNADLIARLDAALGRAAGAEEAAAGVAARKACVRQTGGDADETKKVTFVEVGGDVPVKLSRRNSLGAHVPVRRSRRNSLGADVLVRQSSRNSLCAEAQDCELRSQVTCSPVVAKTRGKSAQAGSVEVGAVVPLRRSRRNSLRAAESEEVEVAVFVDRKRKCKNQENDKGVVLSAQVGASSRVTRRSSLAVAAAVLPPLVEPKRGRGEAAGVQTSTQVEVPARITRSRSIAPVVMSPTVVENKRRKNGDAQTNVELPTVSDVPRNDAPVTRSLRNRVVQVNNSVVDANKPATKEPVRGLRRRSVVSELHEKEKDVEKQLIVKQPVRRSSRKSVLPDMLENNIQSGKSQDNEKEQKLKEPIRRSRRSVATVLLEEQNSGLHEEKLSKLTMRRSTRKSVALNGVEKTSMDHTEIVVQSETLKGRSSKRRRTIDPVEMMPVKEANDDMIIREATIDTHKATHEYNKSTSRIQESCQVNATREEFSSGPLLVTVTPTNEIYTVQSIHEVVPGSESGDNAKENLDKSKQPQEHHDIQAVDSHLSETRSGELDQSSCIAGLVPHNCVASDDKALISGDRVEQSPVSGEGRVGLEANAIESGEKNLTGIMSTALYTKSLQHDIDIVAEETAKGTTCDLEKPSLCSLAQKCKHQCGLLEEIVLPSRNMGSLPNAEESPFGLESLFWQESIHESVEYGAPASATTHTENGFGESKGCHVKSALENTHVSEPFSHHDTEENISKIGGCMHTSQQDNGMEDAIENPLISLSTPGCKHEGALSEEAVHTMKDYAGTCSSNPRVPMQLHDDLAFPGPEKSGDESVNIEVKVHHGSNLSQLGSTDLLDDTELLHQGHNYKDRSNEDMLEQAASEPCTNGDDIVEAAAATKCLESGAMLVPSEERSNLNDRQLTPKLESPDIMESGLNCDKDARNTLDNGSVVAVAGKRTPSGSGHYEHNVYQVSGICATSEAAPVGVVETGIAVETSSLVDDQPNPVLDGDEVEKHSLNCEADTGRILGTGSVTSNTTLVPKDGHTICCQELELPNGLSSFLFPEESGICQYASVSGSGPCLQHVNESTSTQATYNIETLNQQHHEEYDQTARGILASSFPEAVGIEQSGLAPAAEAPVLAVPDGQPNSKLEGNEVDEHSCSYDAEFLNREASNLHKDLFSEDSHRSHLPSLRSPQRSAYFHNGNDSGSSGVCQSSRRGGVDGLRAKRQSFKVSSSIKGSYVAKTSVPRPKPGDSLSQSAIALRGVRKNTTAVEVGGHPVSLKPNAVRSVAKDPSSSRGPPRDSLSQSAIALPKHRKDATAVKSKTNNKPWL

SEQ ID NO: 4575 - protein, 267 aa, Zea mays
  VARIANT 238..267: note = Derived polymorphism lacks residues 238 to 267
MAAVMNADVEVVDFDLDDDDLMDEDAGPDPAPAPTSRLRSTIAGDDAPRRTKGRGFREDPNSSAPRDSRFGAGGRADLDSLGGPGPIQSIEGWIVLVTGVHEEAQEDDLQNAFQEFGQVKNLHLNLDRRTGFVKGYALIEYEKFEEAQAAIKELDGAELYEQKMSVDWAFSSGPAKRRFTRKRVEIGMQILEHIKILETKTGRAKTYLPFHFCLVTFALALALIQYQSVSCFRFPKIYGEITTKGSFKDPTQEKALMFPQQVMNYYA

SEQ ID NO: 4576 - protein, 466 aa, Zea mays
  VARIANT 397: note = Ancestral polymorphism is P, Derived polymorphism is A
  VARIANT 276: note = Ancestral polymorphism is T, Derived polymorphism is M
  VARIANT 267: note = Ancestral polymorphism is D, Derived polymorphism is Y
  VARIANT 255: note = Ancestral polymorphism is A, Derived polymorphism is V
  VARIANT 165: note = Ancestral polymorphism is R, Derived polymorphism is G
  VARIANT 76..466: note = Derived polymorphism lacks residues 76 to 466
MSTLAFAVRRREAELVGPAAPTPRDTKRLSDLDDQAILRRHERLMFFYRGRSGSRATNADPAAAVRRALSEALVPYYPLAGRLREVEEGRKLAVDCTGEGVMFVEADADVRLAELEAATGGLRPPFPCVDQLLFDVEGSGGVLGCPLLLVQVTRLLCGGFVVALRLNHTMCDAHGVAQFVSAVAELARGLAAPAVAPVWSREVLEARSLPEPAGVLQPHRRDHDVVPVVPQPPPPPPGDGDMVVRTFTFGPRDVAAIKKRLPPRLRDTATSYEALTAAIWRARTAALELAPGEEVSLVVVANCRGVRGLGIPDGYYGNAVAYPVARATAGALGLGNAVELVREAKAAVTAEYVRSAVDLLARRRGCPPALATMANVFAVSDNRHAGFHRVDLGWGVPVFGGVVTTVFGASFLVPVSGSDGKEAVAVPIVLPRPAMDRFASEIEMTLTLTCHAAVGSAAPPPPRGRL

SEQ ID NO: 4577 - protein, 245 aa, Zea mays
  VARIANT 158: note = Ancestral polymorphism is P, Derived polymorphism is L
  VARIANT 119: note = Ancestral polymorphism is T, Derived polymorphism is I
  VARIANT 115: note = Ancestral polymorphism is R, Derived polymorphism is W
  VARIANT 106..245: note = Derived polymorphism lacks residues 106 to 245
MASFVPLLHNACKHDVRHHLNTMPATWSGSTTNNVSATGAMAAATFGSTSNSNAAPSGATDMASYLQQLQDIAAAKSSGGGGAARGEQCPRCASHDTKFCYYNTSQPRHFYRACRRYWTLGGSLRNVPIGGSTRKRPRLGQGGGGLLGSMFALGAAGLLLEGRGAGSSFDFDFDLGLGLPTGPLHLGAGAGAGAGEAAALQMQGLGLRGGGSAAGSSAFLWPAGAGMLVDNDSVDTWKLHRVSDA

SEQ ID NO: 4578 - protein, 319 aa, Zea mays
  VARIANT 206..319: note = Derived polymorphism lacks residues 206 to 319
  VARIANT 74: note = Ancestral polymorphism is S, Derived polymorphism is F
MIATHLSPAPKQYRFPSLLHSTSHNHHLPVHLSLPRRHRNFAKPTAAAQDLLASVESVASAASVLAAIVLVHESGHFLAAASRGIHVSQFSIGFGPTLARFRLSPVEYALRAIPLGGYVGFPDDDSESGFAPNDLNLLHNRPIPDRLLVVSAGVAANLAFAFLIVYAQLRSPSASPSSSPWPLRPPSWPPTCSSYESGHFLAAASQGIHVSQFSIGFGPTLVRFCLGPVEYALRAIPLDGYVGFPDDDPESGFAPNDPDLLCNRPVPDHLLVVSAGVAANLAFAFLVVYEQALTIVLRRWLGHGCGAHGGRRASDEDVM

SEQ ID NO: 4579 - protein, 86 aa, Zea mays
  VARIANT 44: note = Ancestral polymorphism is R, Derived polymorphism is K
  VARIANT 37..86: note = Derived polymorphism lacks residues 37 to 86
MNRWGKSKNPAPPARSGAGAGAAGVGEVPVQKVSKIEFHSLVNRPAIYGGGGGGRASRGAEDDINEKAERFIRETRLWFHRQKPAA

SEQ ID NO: 4580 - protein, 98 aa, Zea mays
  VARIANT 3: note = Ancestral polymorphism is R, Derived polymorphism is G
MFRRAKATTTAPPPTDGEVRIQKVDKIEVVYKNILSKPKLYKPTAATGKHPTAGHEVAGWKKKVVDQNPSRPRSAVHVDDINKLSERYITEMKKRFLG

SEQ ID NO: 4581 - protein, 95 aa, Zea mays
  VARIANT 78: note = Ancestral polymorphism is D, Derived polymorphism is G
MAPRAKNSLVAEGDVSVQKVKKIEPVYDYDLVTRPWVFGNPRVVTVLARPPPGAGVSVASGQKKLFQRALSEQEIINDYIARKKKQFAGEIPYST

SEQ ID NO: 4582 - protein, 81 aa, Zea mays
  VARIANT 43: note = Ancestral polymorphism is S, Derived polymorphism is W
MSKMFRGNNNPSSNYELPVESVVRVKKVERIEANNLVSKPKPSQTKVTRSLTVSVVRVGDVDEMPDDSHSSFVSVPIAAHT

SEQ ID NO: 4583 - protein, 259 aa, Zea mays
  VARIANT 31: note = Ancestral polymorphism is A, Derived polymorphism is T
  VARIANT 43: note = Ancestral polymorphism is P, Derived polymorphism is A
  VARIANT 51: note = Ancestral polymorphism is E, Derived polymorphism is K
MANAAAQNSTEQLLHLKLAFLAGEPPSCVLTLAREAGGGSITPHVQNFLLETCTGSNVERCRDSTYTTIIFKKIISEVELSSNVVIDELYEEFAQRMLSEAKFSFLDKTSHIYKEISFLSPTYDHIFPKRVSVVARLSCSSNMLEGDTGCSIWPSSLFLSEFVLSYPKIFSTKCCFELGSGVGLVGICLNHVGASKVILTDGDPCTLRNMKENMELNNLCIEQEDSRALKESKNKVECKYLSWEEVSESDLWGYQPDVV

SEQ ID NO: 4584 - protein, 129 aa, Zea mays
  VARIANT 8: note = Ancestral polymorphism is D, Derived polymorphism is G
  VARIANT 24: note = Ancestral polymorphism is R, Derived polymorphism is W
  VARIANT 26..129: note = Derived polymorphism lacks residues 26 to 129
  VARIANT 28: note = Ancestral polymorphism is N, Derived polymorphism is D
  VARIANT 34: note = Ancestral polymorphism is E, Derived polymorphism is K
  VARIANT 38: note = Ancestral polymorphism is F, Derived polymorphism is L
  VARIANT 46: note = Ancestral polymorphism is V, Derived polymorphism is I
  VARIANT 52: note = Ancestral polymorphism is L, Derived polymorphism is I
  VARIANT 67: note = Ancestral polymorphism is L, Derived polymorphism is M
  VARIANT 68: note = Ancestral polymorphism is S, Derived polymorphism is T
  VARIANT 90: note = Ancestral polymorphism is D, Derived polymorphism is N
  VARIANT 109: note = Ancestral polymorphism is I, Derived polymorphism is T
MSSWDDDDDSAAAAAATDVELLKRAWRDEKAAPEILRFDLPLVSRVREQIQLLVRSSPYPSLQCRSLSWTPSSSARPRATGEEVVDLVADDLYVLRYKSIKGLVESNRIDLVWCQWRWRREPILFESWK

SEQ ID NO: 4585 - protein, 338 aa, Zea mays
  VARIANT 13..338: note = Derived polymorphism lacks residues 13 to 338
  VARIANT 19..338: note = Derived polymorphism lacks residues 19 to 338
  VARIANT 46: note = Ancestral polymorphism is C, Derived polymorphism is Y
  VARIANT 47: note = Ancestral polymorphism is L, Derived polymorphism is H
  VARIANT 50..338: note = Derived polymorphism lacks residues 50 to 338
  VARIANT 51: note = Ancestral polymorphism is E, Derived polymorphism is G
  VARIANT 52: note = Ancestral polymorphism is P, Derived polymorphism is L
  VARIANT 55: note = Ancestral polymorphism is C, Derived polymorphism is S
  VARIANT 59: note = Ancestral polymorphism is P, Derived polymorphism is A
  VARIANT 64: note = Ancestral polymorphism is A, Derived polymorphism is T
  VARIANT 122: note = Ancestral polymorphism is S, Derived polymorphism is F
  VARIANT 226: note = Ancestral polymorphism is K, Derived polymorphism is N
  VARIANT 229: note = Ancestral polymorphism is G, Derived polymorphism is S
  VARIANT 261..338: note = Derived polymorphism lacks residues 261 to 338
  VARIANT 263..338: note = Derived polymorphism lacks residues 263 to 338
  VARIANT 288..338: note = Derived polymorphism lacks residues 288 to 338
MKKKFCCNGNVVQDPEISQVIQLQGDQHKDALTSTIVQQLLVCISCLRLEEPGLCSYIPCVQLAALPYLTDIFVSITIHGRSLVIKNWERTKLEELKEAHLVNSFSCQYVGGNYIVQCATGSDVLRWRSLYASYDITWRVHYHEVFDHGTRESTKKVVLDDKLAEFALLDPKPSIATSEFTVVNMGNTLPVHDMSESTGYSTRHLRLGLGGGRGDDLVLPGLVIDKETGKPKGYGFCEYKDEETVLSACRDLQGYEINGCQLCVDFAENGRNTDSNREKVDNPQNYYRRAITTTLEFFINTSSCIVFIHVNDNSCASSDYHVSPVVISYKHVYICTTS

SEQ ID NO: 4586 - protein, 286 aa, Zea mays
  VARIANT 180..286: note = Derived polymorphism lacks residues 180 to 286
  VARIANT 161..286: note = Derived polymorphism lacks residues 161 to 286
  VARIANT 108: note = Ancestral polymorphism is R, Derived polymorphism is M
  VARIANT 100: note = Ancestral polymorphism is M, Derived polymorphism is T
  VARIANT 51..286: note = Derived polymorphism lacks residues 51 to 286
  VARIANT 29: note = Ancestral polymorphism is S, Derived polymorphism is R
MDMDPRFNVDWSANEIEMVRSLIACHGASNSTNDDIVDELQAMFPGKDKRQVTDLYVELVVEMINSGAELSSNQLLLNSGGVHSRTMDGYLADEMKAKRMLLEEQRRRKLVAVPRQDNQQRAGRFWTLEEHRNFLRGLRVYGRGNWKNISKDFVTTKTPVQVSSHAQKYFRRQESTTRKQRYSINDVGLYDAEPWEEQQQQQQNSSLPAFTSTNNNAYYNPYCYAFGGGQQQLASSPFQCHASQASSSSQTAVTWAAGGQQPPICSSAAPPMMEGGGAEMSWTTYY

SEQ ID NO: 4587 - protein, 390 aa, Zea mays
  VARIANT 346..390: note = Derived polymorphism lacks residues 346 to 390
MDPNINCAWSAFEIDMVKSFITSHKTNNTYTNGVAKNHNDIVDELQARFPCKEKQQVIQLYVKLIVEMNTMQRNNQQVMASNALMNDNFGVPMEDIDMNNMDMFHGYILDDVEVMKMVEEPLHKQNIVPKKKRQHPVIVWTQDEHKNFLRGLEVYGRGNWKNISKYFVPTRTPIQICSHAQKYFHRKEGTTRKQRFSINDIDLYDTDPRVQKNSSSLEALTFGHTAYNNKYYDFERQNVVLNKLTHTSQTSSGHVATWTRGQHIIASSSIDPTMVQSNSLGWEALTFTSDANNTNNYDFDWQHDSINNLRCANQASNNQVATWTRGQQTTSSSAAPTMVQNTSHSWDVLSFTGNAYNTNYYGFDEQQVALSNITRGNHGEQQPGSYLDKR

SEQ ID NO: 4588 - protein, 137 aa, Zea mays
  VARIANT 27: note = Ancestral polymorphism is R, Derived polymorphism is H
  VARIANT 37: note = Ancestral polymorphism is G, Derived polymorphism is R
  VARIANT 91: note = Ancestral polymorphism is G, Derived polymorphism is S
  VARIANT 94: note = Ancestral polymorphism is P, Derived polymorphism is L
MLCSQYAAQTPKRSQQLEIEVAAEKPRRLITADSGGRGDAKPEATPASEGFGRGDKGPRFADLGGMEAVIEELMMEVVMPMCHPEIPHRLGVRPIAGLLLHGLPGCGKTTLAHAIDNVTGVLFYKISAPEVVSGVSD

SEQ ID NO: 4589 - protein, 167 aa, Zea mays
  VARIANT 121: note = Ancestral polymorphism is G, Derived polymorphism is R
  VARIANT 109: note = Ancestral polymorphism is S, Derived polymorphism is N
MNVLNPYINEFVKLGGEQLVPYYADILIAFTLITDFFVCKVARETNEELCAIKADPTEGFDTGPILSIAKRFSIKSFGNEITNKKFEAKIYVLTKDEGGRHTAFVTNYNPQFYFRTADVTRRVELLGEMKMVLPGDNGWDQDAHDQGAVGNSSFPTVLNCVVNSQHA

SEQ ID NO: 4590 - protein, 281 aa, Zea mays
  VARIANT 56..281: note = Derived polymorphism lacks residues 56 to 281
MDPNFNGVWSASEMDMAKSLIPSQITNKTYTNDMETKHIDFVDDLQAMFPWKEKHQVTNLYVELLVEIMRAQSNNQHVVPSSVLVNDNFGMLSKPMDNMKVIEGYLMDEMEAMRILEEQPNMLNVIHKKKRHGVKFWTTDEHRNFLRGLEAFGRGEWSNISKYFVPTRTPVDISSHAQKYFRRQECTTGKQGFNIDNVSFYGTQPWVQNNPSSCEALTFTGGAYNTNYNDLDEKHVAFNSFASDNQLATWFVDQHTSSYLAPLMEEDVSQTNKWMDLENID

SEQ ID NO: 4591 - protein, 393 aa, Zea mays
  VARIANT 241..393: note = Derived polymorphism lacks residues 241 to 393
MGKASKGSRKGKKAWRANIGTDDIDDFFEKQTRDAHAGTAAIPSLPSDSLFFVDKPATSASTSAAGASDTTTKDIPVKRKIEKKREKVLYHESVLKRNPFVQPIPSSVPGKKDKKIKKKKLQETQGEKSVPMENDSVVKNFDIWAVDGKGDSKAKKRSTISVIPAVEVEPAGCSFNPPFEAHQDSLAQAVADEKRKEYMKELGPTPVPLIVPGEAIAEEDKFFLDAGEGDEDEDAAENGDQDADTSIGQRKNTTKRVTRVEMNRRARRKERLRAEAKAKKMENILKEIDSLPNIMDEIAKEDKEKEKRHKRRTVVKEERRKSGPPRLGRHKFEPAPVQVLLTEEISGSLRKLKGCCNLARDRYKSIEKRGILAPSKRIRFAFVFPSKELTQGY

SEQ ID NO: 4592 - protein, 1110 aa, Zea mays
  VARIANT 182..1110: note = Derived polymorphism lacks residues 182 to 1110
MAASVDAAAALAVTPPAVEEAGGAVEQARTLIGALNLLSRNLPLPPDVLRAVSSIYHDGGAGDDEEEEGGEREAEKEGNMEMTAAEEGYPVDVATKGSSLIEELEDAIYKNKKTPISYSELAALKEGRFNASIQHRLAELEGLPSTRGEDLQMKCLLEMYGLKLLDLQKKVRSDISAEYWLQKKCAYPERQLFDWGLMRIRYPLSMYGIGDILSMDADDVHRKKRFTERMSRLEEEEKNQADIRKRKFFAEILNASREHQVQLGTTFKQRKQRNDGVQAWHVRARQRISRQEKNRLNLLKIGDQVAYMKMVEESKNERLKMLLDKTNELLEGIGKAVQRQKDAEHVSQHEGSEVPKGSESEDCSQISGVKSESPGESPSDDDADFAGSADESKFNAGRRLDFTVHSIEEKVTEQPSALEGGELRPYQLEGLQWMLSLFNNNLNGILADEMGLGKTIQTIALIAYLLENKEVAGPHLIIAPKAVLPNWSNEFKTWAPSIGTILYDGRPEERKLLREKNFDGLQFNVLLTHYDLILKDKKFLKKVHWHYLIVDEGHRLKNHECALARTLVSGYQIRRRLLLTGTPIQNSLQELWSLLNFILPNIFNSSQNFEEWFNAPFACDVSLNDEEQLLIIHRLHQVLRPFLLRRKKDEVEKYLPVKTQVILKCDMSAWQKAYYEQVTSREKVALGFGLRSKALQNLSMQLRKCCNHPYLFVEHYNMYQREEIVRASGKFELLDRLLPKLQRAGHRVLLFSQMTKLLDVLEIYLQMYNFKYMRLDGSTKTEERGRLLADFNKKDSEYFMFLLSTRAGGLGLNLQTADTVIIFDSDWNPQMDQQAEDRAHRIGQKNEVRVFVLVSVGSIEEEILDRAKQKMGIDAKVIQAGLFNTTSTAQDRRALLQEILRRGTSSLGTDIPSEREINRLAARTDEEFWLFEKMDEERRLRENYKSRLMDGNEVPDWVFANNDLPKRTVADEFQNIMVGAKRRRKEVVYSDSFGDQWMKSDEGFEDIPKATQRSKKTAYSSDIQVEFSERRKRPRSVENSADGVSNPTWTPDKGRAGVSSYSKDETEDDGEDEVITSGLQKGNSFTWNTLGRRRSSHFSSSSDSRGRPTF

SEQ ID NO: 4593 - protein, 453 aa, Zea mays
  VARIANT 46: note = Ancestral polymorphism is E, Derived polymorphism is K
MDRLDGSARLLLVSDLDQTMLHYSQIDHDDRENLSLLRFEALWEAEFAQDSLLVFSTGRTPVSYKGLRRDKPLVTPDVTIMSVGTVIAYGEEMVRDVGWEERLDSDWDRAVVVEETARLPQLTRMQPERNQGPHKVSFFVDKQGAQEVMDYLPKKLERRGVDVKIVYSSGNALDVLPRGAGKGQALVYLLKKLDSNGKPPKNTLVCGDSGNDAELFGVPSVHGVMVHACINILFHQVCNAQEELVQWYQENARDNPRIIQATERCAAGIMQAIGHLGLGPNVSARDLVGFPAYYPNNNKKGAAATAKPADVVVRFYVLYEKWRRGELPSSNYFSSSSAMRYLKSITHPNGTIIHPCGSERSLHASVDALLSSCYGDKKNFRVWVDRLVTSPIGTSSWLARFDSWEMEGGVRYCCRTTILLNIKPESPEGLELTHIHKTWVQGHSAGPGSALVF

SEQ ID NO: 4594 - protein, 601 aa, Zea mays
  VARIANT 166..601: note = Derived polymorphism lacks residues 166 to 601
MACVAALFASPALLPFPSTTSSMASCSCRLRPAVVARAPRQQPRGRRALRRFDEVEGVSKKRRGIGGGGGVGAGGSQPSSSRRDRGLSVDFKEPQVAEFDDLEEDKFLNAVVKVYCTHIAPDYGLPWQKQRQHSSSGSAFMIGDGKLLTNAHCVEHDTQVKVKRRGDDKKYIAKVLARGVECDLALLSVENEEFWRGTEALHFGRLPCLQDSVTVVGYPLGGDTISVTKGVVSRIEVTPYAHGTSDLLGIQIDAAINPGNSGGPAFNDQGECIGVAFQVYRSDEAENIGYVIPTTVVSHFLNDYQKNGKYTGFPCLGVLLQKLENPALRESLKVPSSEGVLVRRVEPTAPASSVLRKGDVIVSFDGIAVGCEATVPFRSTERIAFRYLTSQKYAGDIAQLGIIRDGNSMKVQTILQPRKHLVPFHVEGGQPSYLIVAGLVFTPLTEPFIEEECEDTLGLKLLAKARYSLATFEGEEIVIVSQVLAHEVNIGYEHMGNQQVMKLNGTTIKNIHHLAHLVDTCKDKFLTFEFEDDFLVVLHREEADAASSDILKEHAIPSIRSSDLSEPYAEANNNEIQKTSEDFGESPVTNFEMGIDCLLWA

SEQ ID NO: 4595 - protein, 559 aa, Zea mays
  VARIANT 228..559: note = Derived polymorphism lacks residues 228 to 559
MGLGLGALLKSGGLSVSDHDAIVSINIFIALLCSCIVIGHLLEGNRWVNESITALVMGLITGGVILLVTNGTNSRILVFSEDLFFIYLLPPIIFNAGFQVKKKQFFRNFITIILFGAIGTLISFVIISLGAMGLFKKLDVGPLELGDYLAIGAIFSATDSVCTLQVLNQDETPLLYSLVFGEGVVNDATSVVLFNAIENLDIDNFDAIVLLNFVGKFLYLFFTSTILGVATGLLSAYIIKKLCFARHSTDREVSIMILMAYLSYMISMLLDLSGILTVFFCGIVMSHYTWHNVTESSRVTTKHTFATLSFIAEIFLFLYVGMDALDIEKWKLASSSPKKPIALSAIILGLVMVGRAAFVFPLSFLSNLSKKEARPKISFKQQVIIWWAGLMRGAVSIALAYNKEALLYNRPCKILQFTASGHTEVRVNAIMITSTVIVVLFSTMVFGLLTKPLLSLLIPPRTGLNTSSLLSSQSMLDPLLTSMMGSDFDVGQINSPQYNLQFILTAPARSVHRLWRKFDDRFMRPVFGGRGFVPFVPGSPVERSVPESHLGTVTEAERS

SEQ ID NO: 4596 - protein, 180 aa, Zea mays
  VARIANT 112: note = Ancestral polymorphism is P, Derived polymorphism is S
MALRLPISSSHGLASTPAPISTTTCRPAVLATAAAQKRSLLLATASETRGVAPVRSSGIETSTVGLGCEAVTGQVTEVNKDTFWPIVEAAGDKVVVLDMYTEWCGPCKVMAPKFQEMSEKNLDVVFLKLDCNQDNKPLAKELGIKVVPTFKILKGGKVVKEVTGAKIDELAQAIDTVKSD

SEQ ID NO: 4597 - protein, 200 aa, Zea mays
  VARIANT 26: note = Ancestral polymorphism is R, Derived polymorphism is P
MWHAPLRFTIPPAADPRALALHVLLPAERAFGDRDVGEVVVPVQDLAAASPDGADQRHLSYQVRRPVSSRKRGVLHMTTSPYRLSDEPDAHNHPYAQVPPASSMRHLGKAADAAITAYPVATPRGGQYHQPYGPAPYGAYPCHHQYGYGTYGAAPAASSGGGMSTAGLGFGLGLLGGLVIGDAEVDAAYDGGGFMDGMGL

SEQ ID NO: 4598 - protein, 223 aa, Zea mays
  VARIANT 138: note = Ancestral polymorphism is V, Derived polymorphism is L
  VARIANT 137: note = Ancestral polymorphism is N, Derived polymorphism is S
  VARIANT 79: note = Ancestral polymorphism is R, Derived polymorphism is L
MATPAVKVYGWAISPFVSRALLALEEAGVDYELVPMSRQDGDHRRPEHLARNPFGKVPVLEDGDLTLFESRAIARHVLRKHKPELLGGGRLEQTAMVDVWLEVEAHQLSPPAIAIVVECVFAPFLGRERNQAVVDENVEKLKKVLEVYEARLATCTYLAGDFLSLADLSPFTIMHCLMATEYAALVHALPHVSAWWQGLAARPAANKVAQFMPVGAGAPKEQE

SEQ ID NO: 4599 - protein, 309 aa, Zea mays
  VARIANT 6: note = Ancestral polymorphism is A, Derived polymorphism is V
  VARIANT 75..309: note = Derived polymorphism lacks residues 75 to 309
  VARIANT 196: note = Ancestral polymorphism is R, Derived polymorphism is Q
  VARIANT 198: note = Ancestral polymorphism is S, Derived polymorphism is L
  VARIANT 212: note = Ancestral polymorphism is R, Derived polymorphism is C
MAFCLAGNLLLIIVPAVCDKDRNPFGDDSSTCRSRSLSYLSLSMALGGLFIWTHTYSLMQKSGKLYNKMQSKRIQCLADSNEEHEQAKEDGSAGCADKEAPLPTSIKPREHEHGEEKEHQMEAPLLSCESEVTDKGFWTKLKDAIHQFIEEMMAPPTISTRQHDPLHHPYPRRKPDSRWALFRLESDIAVIQARLRKSGLKHAVIVAILCVRFVLLLLIGIAVVRTAYGLGFRASHDEHRKSSIEAIEAGKKKLYEATYIKNLTTRMGPFMDRVVVEAMVILYWLLVADKEFEIKINDNIYEVRIRCSG

SEQ ID NO: 4600 - protein, 314 aa, Zea mays
  VARIANT 212: note = Ancestral polymorphism is P, Derived polymorphism is L
  VARIANT 41: note = Ancestral polymorphism is P, Derived polymorphism is S
MVVPVIDFSKLDGAERAETLAQIANGCEEWGFFQLVNHGIPLELLERVKKVCSDCYRLREAGFKASEPVRTLEALVDAERRGEVVAPVDDLDWEDIFYIHDGCQWPSDPPAFKETMREYRAELRKLAERVMEAMDENLGLARGTIKDAFSGGGRHDPFFGTKVSHYPPCPRPDLITGLRAHTDAGGVILLFQDDKVGGLEVLKDGEWTDVQPLEGAIVVNTGDQIEVLSNGLYRSAWHRVLPMRDGNRRSIASFYNPANEATISPAAVQASGGDAYPKYLFGDYMDVYVKQKFQAKEPRFEAVKTGAPKSSPAA

SEQ ID NO: 4601 - protein, 135 aa, Zea mays
  VARIANT 102: note = Ancestral polymorphism is R, Derived polymorphism is W
  VARIANT 47: note = Ancestral polymorphism is P, Derived polymorphism is L
  VARIANT 44: note = Ancestral polymorphism is H, Derived polymorphism is Y
  VARIANT 23: note = Ancestral polymorphism is W, Derived polymorphism is L
  VARIANT 16..135: note = Derived polymorphism lacks residues 16 to 135
  VARIANT 12..135: note = Derived polymorphism lacks residues 12 to 135
MADLLGDPAWPQLHPRPYTDTPLPGLQCELAPDDARVLHTTRLHLAPDVTTPPCRPGARLDPASLRGLPHLRMLSVFVCFDVDRAVHVVVLARADCAQVQPRPHRPHTGDVGSYFGKYCVIHTDGYQLSDKYCVI

SEQ ID NO: 4602 - protein, 315 aa, Zea mays
  VARIANT 41: note = Ancestral polymorphism is P, Derived polymorphism is L
MVVPVIDFSKLDGAERTETLAQIANGCEEWGFFQLVNHGIPLELLERVKKVCSDCYRLREAGFKVSEPVRTLEALVDAERRGEEVAPVDDLDWEDIFFIHDGCQWPSDPSAFKKTIREYRAELRKLAERVMEAMDENLGLTKGTIKDAFSGGGRHEPFFGTKVSHYPPCPRPDLITGLRAHTDAGGVILLFQDDRVGGLEVLKDGQWIDVQPLAGAIVINTGDQIEVLSNGRYRSAWHRVLPMRDGNRRSIASFYNPANEATISPAAVQGSSGGETYPKYVFGDYMDVYVKQKFQAKEPRFEAVKAAAPKSSPAA

SEQ ID NO: 4603 - protein, 315 aa, Zea mays
  VARIANT 236: note = Ancestral polymorphism is A, Derived polymorphism is V
MVVPVIDFSKLDGAERTETLAQIANGCEEWGFFQLVNHGIPLELLERVKKVCSDCYRLREAGFKASEPVRTLEALVDAERRGEEVAPVDDLDWEDIFFIHDGCQWPSDPSAFKETMREYRAELRKLAERVMEAMDENLGLTKGTIKDAFSAGGRHEPFFGTKVSHYPPCPRPDLITGLRAHTDAGGVILLFQDDRVGGLEVLKDGQWIDVQPLAGAIVINTGDQIEVLSNGRYRSAWHRVLPMRDGNRRSIASFYNPANEATISPAAVQGSGGGETYPKYVFGDYMDVYVKQKFQAKEPRFEAVKAAAPKSSPAA

SEQ ID NO: 4604 - protein, 356 aa, Zea mays
  VARIANT 94: note = Ancestral polymorphism is C, Derived polymorphism is S
  VARIANT 163: note = Ancestral polymorphism is A, Derived polymorphism is T
  VARIANT 237: note = Ancestral polymorphism is K, Derived polymorphism is R
  VARIANT 250: note = Ancestral polymorphism is T, Derived polymorphism is I
  VARIANT 257: note = Ancestral polymorphism is G, Derived polymorphism is D
MPSPSSSHQLASLPYSNCLHTTLPSSRARLRSIPKSNNNITTMVVPVIDFSKLDGAERAETLAQIANGCEEWGFFQLVNHGIPLELLERVKKVSSDCYRLREAGFKASEPVRTLEALVDAERRGEVVAPVDDLDWEDIFYIHDGCQWPSEPPAFKETMREYRAELRKLAERVMEAMDENLGLARGTIKDAFSSGGRHEPFFGTKVSHYPPCPRPDLITGLRAHTDAGGVILLFQDDRVGGLEVLKDGQWTDVQPLAGAIVVNTGDQIEVLSNGRYRSAWHRVLPMRDGNRRSIASFYNPANEATISPAAVQASGGDAYPKYVFGDYMDVYAKHKFQAKEPRFEAVKVAAPKSSPAA

SEQ ID NO: 4605 - protein, 480 aa, Zea mays
  VARIANT 48: note = Ancestral polymorphism is R, Derived polymorphism is P
  VARIANT 218: note = Ancestral polymorphism is F, Derived polymorphism is S
MAAEGAGGRGRAMRYPPLSALVVSAIAAFSAVIVLAVVHSAYDDAMSRTRTLLGHNLEPTPWHPFPHDKGRPPARAALRCAPSIACLPPLSSSSSSPQPQGNKKKKQKQCPAYFAAIHRDLAPWRGQGRGVTRALLDEARRRASMRVTITGGGRRLHVDLYYACVQSRALFTVWSLLQLMRRYPGRVPDVDLMFDCMDRPAINRTEHGDGALPPPPLFRYCTTRDHFDIPFPDWSFWGWPETNIEPWNHEFKNIRAGARATRWADRVPTAYWKGNPDVASPLREALLGCNDTALWRAEIMRQNWDDEARSGYQHSRLSAQCTHRYKIYAEGFAWSVSLKYILSCGSMALLIEPRYQDFFSRGLEPRVNYWPVAALGMCESIRDAVDWGNANPDEAERVGRRGQRLVQDLRMHAVYDYMLHLLTEYARLLIDQDHGLSPPPHAQEACEASLLCLADDKQRRFLHASKADPAPGDPCVLPPP

SEQ ID NO: 4606 - protein, 500 aa, Zea mays
  VARIANT 36: note = Ancestral polymorphism is R, Derived polymorphism is C
  VARIANT 83..500: note = Derived polymorphism lacks residues 83 to 500
  VARIANT 164..500: note = Derived polymorphism lacks residues 164 to 500
MSTASGDGADAGGDGAAASAPAGRRIPPASSMPWVRNLRRFVGTGAGLGSEALMELETKRILLEIFKERQRKSAEAGSIPSFYKKKPEEGSISSRVQRLAKYRFLKKQSELLLNADDLDAMWVCLRENCVIDDATGAEKVRFLFDMNYEDFCHIATVCTEQIGQKCKRFFSPSNFMKFEKDDSGRIAILPFYLYVMRTVSLTQARIDMSELDEDSDGFLQPHEMEAYIRGLIPNLAQLRDMPTAFVQMYCRIAARKFFFFCDPHRRGKACIKKVLLSNCLQELMELHQESEEEVTDTEQAENWFSLTSAQRICGMPAGIIVNNMFLALDKDTNGTLSKQELKEYADGTLTEIFIERVFDEHVRRSKVGGGNSREMDFESFLDFVLALENKDTPEGLTYLFRCLDLNGRGFLTTADIHTLFRDVHQKWIEGGNYELCIEDVRDEIWDMVKPADPLRISLSDLLSCKQGGTVASMLIDVRGFWAHDNRENLLQEEEEQVEEA

SEQ ID NO: 4607 - protein, 174 aa, Zea mays
  VARIANT 65: note = Ancestral polymorphism is G, Derived polymorphism is S
  VARIANT 49: note = Ancestral polymorphism is L, Derived polymorphism is R
  VARIANT 28: note = Ancestral polymorphism is P, Derived polymorphism is L
  VARIANT 23: note = Ancestral polymorphism is R, Derived polymorphism is H
  VARIANT 21: note = Ancestral polymorphism is A, Derived polymorphism is P
  VARIANT 18: note = Ancestral polymorphism is G, Derived polymorphism is D
  VARIANT 1: note = Ancestral polymorphism is M, Derived polymorphism is K
MLITVGDETGETDFILFGHMAQRIVKRPLDILIADNPARFILDEITRLRENVYTFNVNTFVTEISDGGWVPISPSGSQPSSISSTRVASKSTSAEFVPTEGTSSQTPQSTKTYNKDKVADATSKRWVHSYQEGCEEDIGDSTDKTGVGGGSASVAADSRYILSSLCHLGVYNIV

SEQ ID NO: 4608 - protein, 514 aa, Zea mays
  VARIANT 94..514: note = Derived polymorphism lacks residues 94 to 514
MYKNQLQELAQRSCFNLPSYSCIREGPDHAPRFKATVNFNGEMFESPVFCSTLRQAEHAAAEVALNELSKRGPSSTLAAKVLDETGIYKNLLQETAHRAGLKLPIYTTIRSGPGHTPVFACTVELAGKAFTGNPGKTKKQAQKNAAMAAWSELKKLPRVGEPSSSSCPPDQDDEVQEQVVVTRTLASLNQANSGKVPHQKEKQQSNNRPSSRRCYPKPNTPFYRPFMQNQAYPSVPPDQAMYHLWHRMQVTANASLSSGLLPCFPDASPAMLRHFSPYPVSYVPRSPLPVTVHNVHERRHDHTETVELPDAVVFSQCTTLDSFRTSECGGPPLKVQEPTKNRKEGCIGSPEKELDTLAVSSSTAQASSQKLEANEGKQTVQAGLKQTHEQQLMSSSSCVSSSVVAQSSHYASSIQHDESIHRRNPPHTSSPALPDVWSSRSQALPRFGSPSWVFQQRPWLAAPVTVRTAVPVCSARPNVVNSTTGIRPAAQSHDGERDLNSAAAASSGFNKLQI

SEQ ID NO: 4609 - protein, 281 aa, Zea mays
  VARIANT 87: note = Ancestral polymorphism is D, Derived polymorphism is N
  VARIANT 92: note = Ancestral polymorphism is V, Derived polymorphism is I
  VARIANT 93: note = Ancestral polymorphism is R, Derived polymorphism is C
  VARIANT 128: note = Ancestral polymorphism is E, Derived polymorphism is G
  VARIANT 130: note = Ancestral polymorphism is R, Derived polymorphism is C
  VARIANT 139: note = Ancestral polymorphism is G, Derived polymorphism is R
  VARIANT 151: note = Ancestral polymorphism is Y, Derived polymorphism is H
  VARIANT 189: note = Ancestral polymorphism is D, Derived polymorphism is E
  VARIANT 198: note = Ancestral polymorphism is Y, Derived polymorphism is N
  VARIANT 203..281: note = Derived polymorphism lacks residues 203 to 281
  VARIANT 211: note = Ancestral polymorphism is T, Derived polymorphism is M
  VARIANT 212: note = Ancestral polymorphism is L, Derived polymorphism is Q
  VARIANT 213: note = Ancestral polymorphism is L, Derived polymorphism is R
  VARIANT 247: note = Ancestral polymorphism is L, Derived polymorphism is I
  VARIANT 262: note = Ancestral polymorphism is L, Derived polymorphism is P
MAGLAMNHCMFDDIGAMKFINSWAETGRGVAELTVSPFLDRNVLKARDSPVHTFPHHEFAEIPDISDTAALYGAQELQYRSFCFDPDQLERVCGLALADGALGRCTTFKALSGLVWRACTKALGLALGQRTKLLFAMDGRRWFVPPLPRGYFGNDIVLTNALATASELLSVPVSRAVGLVQEAVRMVTEDYMRSAVDYFEATRARSSLACTLLITTWSRLEFHGADFGWGEPVMSGLVTLPEKEVILFHVSRESRGERGSRPQSRLRAVIPHDLGAGLPSM

SEQ ID NO: 4610 - protein, 111 aa, Zea mays
  VARIANT 64: note = Ancestral polymorphism is G, Derived polymorphism is S
  VARIANT 52: note = Ancestral polymorphism is N, Derived polymorphism is S
  VARIANT 30: note = Ancestral polymorphism is R, Derived polymorphism is L
  VARIANT 24: note = Ancestral polymorphism is T, Derived polymorphism is S
MPTSRESAVFTVGDRGGWSFSTSTWTNGKRFKAGDVLVFKYDSTAHNVVAVNAAGYKGCSAPRSAKVYTSGNDRVTLARGTNYFICSIPGHCQSGMKIAVPRATYIYLSTA

SEQ ID NO: 4611 - protein, 117 aa, Zea mays
  VARIANT 33: note = Ancestral polymorphism is K, Derived polymorphism is E
  VARIANT 71: note = Ancestral polymorphism is M, Derived polymorphism is V
  VARIANT 89: note = Ancestral polymorphism is G, Derived polymorphism is S
MVIIAGSEYGSGSYRESAAKGPMLLGVKSVIAKSFERIHRSNLVGSLLSSRRGCRFTLPHRTYSMPRVWRMYVNKWHILIFNCVLLRSGIEVGRSCNILSLHDMSVDFVLPTDYLYS

SEQ ID NO: 4612 - protein, 277 aa, Zea mays
  VARIANT 27: note = Ancestral polymorphism is I, Derived polymorphism is T
MAVAHLLLQLSAGVNGASRNRMLIPAILSILQLIHLAALGVDGAASFRFTNACQHPVWVGALHGASSPPLASSGFYLARSATSRLDAPSSGTWSGTFWARTGCAVDSATGRFSCATADCGTGDVACQGRGPAPPVSLVEVTLAAPGSGGQDFYDVSLVDGFNVPVRVAPSGGGGDCRPAACAGDVNAMCPADLRVVASSGSGGVVACKSACSAYGSARYCCTGQYGTPATCRPTNYSQVFKSACPSAYSYAYDDTSSTFTCSGASSYDVTFCPGTGS

SEQ ID NO: 4613 - protein, 544 aa, Zea mays
  VARIANT 198..544: note = Derived polymorphism lacks residues 198 to 544
MELNSDTLLFLTTIISAAILVVCSLSRRKPSPGPKKKRPPGPWRLPLIGNLLHLATSQPHVALRDLARKHGPVMYLRLGQIDAVVISSPAAAQEVLRDKDVAFASRPNLLVADIILYGSMDMSFAPYGAYWRMLRKLCMSELLSTHKVRQLLAVRDSETISLVRKVRAAGGQSGEPVNLGRLVLSCSMAITGRATFGQLCGDELMSVVDVAVLYGGGFCAGDLFPSLSFVDVVTGLTRRLWRARRHLDGIFDKIIAECEARQRQAKTTTGTTNGDGDGLLSVLLRIRDEGETGISMTSIKAILFVSAVKYIYGAAESCLSSSKSQFLLIDHQDMLAGGTETTSSAAEWIMSELMRNPEAMAKAQAEVRRVLDGKSPQDHEGQMDKLSYTRMVVKEGLRLHPVFPLLLPRLCRETCDVGGFEVAQGTKVIVNAWALARSPEHWKHPEEFWPERFADDTSVAAAADYVGSQFEYIPFGSGRRMCPGNTFGLAALELMVARLLYYFDWSLPDGMRPDELDMDTVVGSTMRRRNHLHLVASPCKEIES

SEQ ID NO: 4614 - protein, 668 aa, Zea mays
  VARIANT 26: note = Ancestral polymorphism is S, Derived polymorphism is L
MGESVSSRCAARHSPPLLPPGKNPASATLRRRLGFQPLGHAAGRGTSATGSRYPSYAIAAPPPVTAGADKARLVGRQRARKHNLLAVLVHASPCALADESSHLDTVEPVAIRATVGLTDHLQRTDLGLPFTAHEHDLLGRAPLRGGKQARRRSRATEGGGGHEQQKVAARRRLQGWGRSCFELYFIITMQTRKKGAAKNAVGYHANPKTSRPSRRATQSTVAEKKVSDLITSSSKKQRPVGVTSKKHSKGGRKLLVSCDTTDAGNDAPQVPPSVFPDLQAQHSDGVADDRPNDSIFSPTYHHHKEGGVNNLSKGLEEQTTHVHGSKEASLKSGSNLACNTHDGINDHSGTLKLQSAGQSTLLEVDEYSELGNLSSEVSAIYLAMQQSKLECIDEQSQDSTSTEGYGEAEETEEYDDFDPYSFIKDLPDLSMVVPKFRPVLLPKQTRSCPTMTLVLDLDETLVHSTLEHCEDADFTFPVHFNFREHTIYVRCRPYLKEFLDRVASVFETIIFTASQSIYAEQLLNVLDPKRKLFRHRVYRESCVYVEGNYMKDLTVLGRDLTRVMIVDNSPQLEHAMNKDVLVWNSCMSWFMDLNVKPLSSLQAFGFQLDNGIPIESWFDDPNDMELLKLLPFLESLVGVEDVRPYIARKFNLREKVATASSLTIDMQM

SEQ ID NO: 4615 - protein, 152 aa, Zea mays
  VARIANT 6: note = Ancestral polymorphism is E, Derived polymorphism is D
  VARIANT 54: note = Ancestral polymorphism is F, Derived polymorphism is C
  VARIANT 103: note = Ancestral polymorphism is T, Derived polymorphism is K
MNLHTDPLNLKEATVTCIPRLRGGGGGRRRPRRGAAAATQVSVLDRVRDVVLRFAMLSAASSTATTTKGGAPVTTTRRRRPAAATARSTAAARVSPAASVAYTDSYRSEAVDDCIEFLKRSAAGVVVPATAVEATTTAAAASPLHAAAARAM

SEQ ID NO: 4616 - protein, 516 aa, Zea mays
  VARIANT 308: note = Ancestral polymorphism is E, Derived polymorphism is K
MSFSDDEPIIPSPNSGPRPTPIVPGRVQLVSKNNNMAPLEENTQKVLLELTGGDSTSDRSGLDLVAVLDVSGSMQGEKIEKMKTAMKFVVKKLSSIDRLSIVTFLDTANRICPLRQVTEDSQPQLLKLIDALQPGGNTNISDGLQTGLKVLADRKLSSGRVVGVMLMSDGQQNRGEPAANVKIGNVPVYTFGFGADYDPTVLNAVARNSMGGTFSVVNDVNLLSMAFSQCLAGLLTVVVQDLTVTVARIEDESTLQKVAAGNYPQTPDADAGSVTVAFGDLYSKEVRKVIVDLLLPAIDSDRGADILEVTYSYKTAGKLFDAPPATVTVRRSGTAFPADDPPVDVQTEEARLKTATMIQQARTMADGKKLGDARDKLAEAQNALEDVVAQSDPLLDALRTELQELLKLMKSQDVYEKQGRPYAMSSETSHDRQRFAARGDIESNRLFSTPRMDKYLEQAKKFDEDPAAPLPSADKDEEEEVAANPLAPLVGPITFYIRAAVEALQAIEKLINKGAN

SEQ ID NO: 4617 - protein, 554 aa, Zea mays
  VARIANT 232..554: note = Derived polymorphism lacks residues 232 to 554
  VARIANT 142: note = Ancestral polymorphism is D, Derived polymorphism is E
MAPLLATAMAMNHAGHPGPNHESFSRHHLSCSPQNSKPRCNLSFRPRAERVSGQNNGSQVLSAAGDVPQRSMFPPDFIFGASTSAYQIEGGWNEDGKGPSSWDYFCHNFPEWILDKSNGDVAADSYHMYPEDVRLLKEIGMDAYRFSISWSRILPNGTLEGGINPDGIKYYKNLINLLLENGIEPFVTLFHWDTPQALMDKYGGFLDKSIVKDYTDFAKVCFDNFGDKVKNWFTFNEPETFCTFSHGTGQCAPGRCSPGIITPTGSTSCANPIGNSLTEPYIVGHNLLRAHAEVVDLYNKHYKIDYKGENGRIGIVFDVMGRVPFEKSAFIDQQAEERSWDINLGWFLEPVVRGDYPFSMRSLVRDRLPFFTNEEREKLVGSYDMLGLNYYTSRFSKHIDITQHNTLRLNTDDAYASQETKGPDGEPIGPPMGNWIYLYPQGLKDLLKIMKEKYGNPPMYITENGMAEVDLGHNLNDQKRIDYLQSHLAALQDSVESGANVKGYFLWSLLDNFEWFCGYTQPYGIVYVDRNDGCKRYMKQSAKWYKSFIAANDK

SEQ ID NO: 4618 - protein, 103 aa, Zea mays
  VARIANT 30: note = Ancestral polymorphism is T, Derived polymorphism is I
MASAAQKKMAIVCLMLLAVVGQIVADADVTVEHPSRICTETVIDPRVPNNECICSKNCACAGKCILESPDAVQTCFVDCVLKNDCICSSKIIPGADDPKANAK

SEQ ID NO: 4619 - protein, 425 aa, Zea mays
  VARIANT 230: note = Ancestral polymorphism is R, Derived polymorphism is K
MARAAASRLAAVANSSSTRELFARHLAAAAASAWTAPPRLPEPGRERRSPGWWCPSRSFHATRRVYTRDYYDVLGVSKDASAPDIKKAYYALAKKFHPDTNKDADAEKTFQEVNRAYEVLKDNDKREIYDQLGPEAYERQASGGDPGGPGFPRGNPFGDIFGDVRTIAFVIFDNAYRGGQDVKVSVELSFMEAVQGCRKTITYEADTFCGTCNGSGVPPGTVPKTCKTCKGSGAIYMQKGIFTVECTCSLCNGSGKIVKSFCKTCKGEQVVKGKTSVKLDIAAGSDDNDIMKVFGKGGADVDRNKPGDLYVTIKVREDPTFRREGIHVHVDSVLSIAQAVLGGTVTVPTLTGNVTVKVRQGTQPGEKVVLRGKGIKARNSPVFGNQYVHFNIRVPTDVTQRQRELIDEFDKEECADRERPAVASG

SEQ ID NO: 4620 - protein, 343 aa, Zea mays
  VARIANT 88..343: note = Derived polymorphism lacks residues 88 to 343
  VARIANT 101: note = Ancestral polymorphism is C, Derived polymorphism is F
  VARIANT 108: note = Ancestral polymorphism is Y, Derived polymorphism is D
  VARIANT 109: note = Ancestral polymorphism is R, Derived polymorphism is C
  VARIANT 114: note = Ancestral polymorphism is S, Derived polymorphism is L
  VARIANT 133..343: note = Derived polymorphism lacks residues 133 to 343
MASQCAPPLPPRPRAAAPFLLGHTPPHARPPRCAALTPSVRAAARPCFLASTRVLLRPQSEEAPASCSWSASDPLLCASPASALLVAWRRRHSPAMGCKACDKPKPNYRKGLWSLEEDQKLRDYILLHGHGCWSALPMKAGTNVKIAAIPSSVVVLTSETFDSIVLDEFYAPWCGHCKHLAPIYEKLASVFKQDDSVVIANLDADKHTDLDEKYGVSGFPTLKFFPKRNKAGEDYDGGRDLDDFVKFINEKCGTSRDPKGHLTSEARLVPSLNPLVKEFLNVVDDKRKEVLSKIEEDVAKLSGSAAKHGKIYVTAAKKIMDKGSDYTKKETERLHRMLEKVGI

SEQ ID NO: 4621 - protein, 698 aa, Zea mays
  VARIANT 112..698: note = Derived polymorphism lacks residues 112 to 698
  VARIANT 439..698: note = Derived polymorphism lacks residues 439 to 698
MNPYFVGILVPVAVSLLLRKRRKAQRMRGVPVEVGGEPGYAVRNYRFEQPVETHWEGVSTLADLFEQSCKEYVYMPLLGTRKLISRETEAAPGGRSFEKLHLGEYEWKCYAECFKSVCNFSSGLIRVGHQKNERVAIFAETRAEWQIGLQACFRQNITVVTIYASLGEEALCHSLNETEVTTVVCGQKELKKLIDISGQLDTVKRVVYINEEGISTEVSLAQNCTSWIVESFEEVTRLGAEAPVEANMPLPSDVAVIMYTSGSTGLPKGVMMTHRNVLATLSAVMTIVPALGSKDIYLAYLPLAHILELAAEALMAAVGASIGYGSPLTLIDTSNKIKKGTLGDASALKPTLMTAVPAILDRIRDGVRKKVDTKGGIAKQLFDIAYNRRLAAINGSWLGAWGLEKLLWDTLVFGKVRAILGGKIRFVLSGGAPLSGDTQRFINICLGAPIGQGYGLTETCAGGTFSEYDDTSVGRVGAPLPCSYIKLIDWPEGGYLTADLPMPRGEIVIGGPNITKGYFKNEAKTNEVYKDDEKGMRWFYSGDIGRFHPDGCLEIIDRKKDIVKLQHGEYVSLGKVEAALIVSPYVENIMIHADPFHNYCVALVVAAHIELESWASQQGIKYNDFSDLCQKQEAVKEVLGSLAKAAKQARLEKFEIPVKIKLIPEPWTPESGLVTAALKLKREVIRKTYENDLAELYA

SEQ ID NO: 4622 - protein, 103 aa, Zea mays
  VARIANT 20: note = Ancestral polymorphism is V, Derived polymorphism is I
MASAAQKKMTIVCLMLLAVVGQIVADDDVTVEHPSRICTETVIDPRVPNNVCICSKNCACAGKCILESADAVQTCFVDCVLKNDCICSNKIIPGADDPKANAK

SEQ ID NO: 4623 - protein, 103 aa, Zea mays
  VARIANT 6..103: note = Derived polymorphism lacks residues 6 to 103
MASRAQRKMTIVCLMLLAVVGQIIVGMAVEHPNPSNICTETVIDPRVPNNECICSKNCACAGKCILESADAVQTCFVDCVLKNDCICSSKIIPGADDPKANAK

SEQ ID NO: 4624 - protein, 461 aa, Zea mays
  VARIANT 52: note = Ancestral polymorphism is L, Derived polymorphism is P
MAMADDEDKGEPPGLDPRTRRPVATGDMAGGGGEEEWEGPPGYVLSLPAVAPLLPVAVSCLDATVRRKRRSRPRLRAQPSGWWAFKLPVPAPEEAKGPVLPASVVNNPSEEARPQSLCVRQAPSPDPYTPAAAEERPVKSVRMCLQCGAVVTPQWRSGPMGQGTLCNACGVRLKVAGALRGQVRHRPAPRTAARPPPDSPASESSPDSPIWEPGSVPDVYLVRKMPLKQGRPPPPSPMPAPPPPAPAVYLVKKKRKKTPASVASAKKPWRPPKSAKQCLHCGSSSTPQWREGPLGRSTLCNACGVRYRQGRLLPEYRPLASPTFEPSEHANRHSQVLQLHRQRRSGSQSHHHQQQHPLPVEKHPPRPTAALQFPQRWHVKEEYPPTPPHQPLPHPVVAGSLAAGELRVGGMVDAAADADADAGHGGGNGNGLSNAPSSLDSLLLEGPSAPLLVDDDDPLID

SEQ ID NO: 4625 - protein, 162 aa, Zea mays
  VARIANT 9: note = Ancestral polymorphism is Q, Derived polymorphism is R
  VARIANT 12: note = Ancestral polymorphism is L, Derived polymorphism is H
  VARIANT 22: note = Ancestral polymorphism is S, Derived polymorphism is F
  VARIANT 131: note = Ancestral polymorphism is D, Derived polymorphism is G
MCRRHHHHQHVLVAAIALMAAFILQGVSSTTNFTGYAATTAYDVLELNNMPRGLLPLGVQSFVLDAGGALELTLPGECNFFVEVAGKQIKFRFDSSVSGAIRSGSISRLSGAWIQVEFALVGFNQVSRAGDQLNFRLEKKSTQSFPTSAFAESVPCSGLLAP

SEQ ID NO: 4626 - protein, 714 aa, Zea mays
  VARIANT 261: note = Ancestral polymorphism is K, Derived polymorphism is T
MASADVHMAGGAETETFAFQAEINQLLSLIINTFYSNKEIFLRELISNASDALDKIRFESLTDKSKLDAQPELFIRLVPDKASKTLSIIDSGVGMTKSDLVNNLGTIARSGTKEFMEALAAGATDVSMIGQFGVGFYSAYLVADRVMVTTKHNDDEQYVWESQAGGSFTVTHDTTGERLGRGTKITLFLKDDQLEYLEERRLKDLVKKHSEFISYPIYLWTEKTTEKEISDDEEEDNKKEEEGDVEEVDDEDKDAKDKSKKKKKVKEVSHEWVQINKQKPIWLRKPEEITREEYASFYKSLTNDWEDHLAVKHFSVEGQLEFKAILFVPRRAPFDLFDTRKKLNNIKLYVRRVFIMDNCEELIPEWLGFVKGVVDSDDLPLNISRETLQQNKILKVIRKNLVKKCIEMFFEIAENKDDYAKFYDAFSKNIKLGIHEDSQNRAKLADLLRYHSTKSGDETTSLKDYVTRMKEGQKDIYYITGESRKAVENSPFLERLKKKGYEVLFMVDAIDEYAVGQLKEYDGKKLVSATKEGLKLDDEDDEEAKKRREERKKRFEELCKVIKDILGDRVEKVVVSDRIVDSPCCLVTGEYGWTANMERIMKAQALRDSSMSAYMSSKKTMEINPDNGIMEELRKRAEADRNDKSVKDLVLLLFETALLTSGFSLDDPNTFAARIHRMLKLGLNIDEDAAADEDADMPALDEGAAEESKMEEVD

SEQ ID NO: 4627 - protein, 329 aa, Zea mays
  VARIANT 198: note = Ancestral polymorphism is R, Derived polymorphism is W
  VARIANT 179: note = Ancestral polymorphism is A, Derived polymorphism is G
MASSSEPSALPTLLVFRVRELRFLAALRERYRVLDFFTSGSPLAAFLAAAAGGADPPRALVTVGGDSVRVDAALLDAVPSLRFVHSTGAGLDHIDLGECARRGVGVASSGTVYSTDVADHAVGLLVDVLRRVSAADRFVRRGLWPLHGDYPLGSKLGGKRVGIIGLGNIGTLIAKRLAAFGCVICYSSRKPKESVSYRYFPSVHDLASESDVLVVACALTRETRHIVNKDVLAALGKDGVVVNIGRGPNIDEAELVAALKEGRIAGAGLDVFDKEPKVPAELFSMDNVVLTHHVAVFTTESRSDLRDVTISNLEAFFAGRPLLNPVLHS

SEQ ID NO: 4628 - protein, 337 aa, Zea mays
  VARIANT 268: note = Ancestral polymorphism is G, Derived polymorphism is A
  VARIANT 210: note = Ancestral polymorphism is Q, Derived polymorphism is L
  VARIANT 176: note = Ancestral polymorphism is G, Derived polymorphism is D
  VARIANT 67: note = Ancestral polymorphism is V, Derived polymorphism is I
MTIPGGVQRILPVPAVLFIRRPGAPFGNAMHERFRVLELPSPASSEQAAAFLAAAAAEPDPPRAAVVMGGGAVRADAAFLDAVPSVRCLVSTAAGVDHIDLAECARRGVAVANSGTVYSADVADHAVGMLIDVLRRVSAAGRFVGRGLWPLQEGEYPLGSKLGGKRVGIIGLGNIGSLVAKRLEAFGCVICYNSRRRMDSVSYRYFSNVQRLASESDVLVVACALNKETRHIVNEDVLEALGKDGVVINIGRGASIDEAALVSALKEGRIAGAGLEVFENEPKVPPELMSMDSVVLTPHSAVFTTESRADLCQHLICNLEAFFAGKPLITPVLRLTE

SEQ ID NO: 4629 - protein, 367 aa, Zea mays
  VARIANT 240..367: note = Ancestral polymorphism lacks residues 240 to 367
MGGAAAGTKWIHHIQRLSAAKVSAEAVERGQSRVIDASLTLIRERAKLKAELLRALGGVKASASLLGVPLGHNSSFLQGPAFAPPRIREAIWCGSTNSSTEEGKELNDPRVLTDVGDVPIHEIRDCGVEDDRLMHVISESVKTVMEEEPLRPLVLGGDHSISYPVVRAVSEKLGGPVDILHLDAHPDIYDCFEGNTYSHASSFARIMEGGYARRLLQALESTCGILYRHTVLWVLEPLVWLWQQVGLRSITKEGREQGKRFGVEQYEMRTFSKDREKLENLKLGEGVKGVYVSVDVDCLDPAFAPGVSHIEPGGLSFRNVLNILQNLQGDVVAADVVEFNPQRDTVDGMTAMVAAKLVRELTAKISK

SEQ ID NO: 4630 - protein, 240 aa, Zea mays
  VARIANT 229: note = Ancestral polymorphism is P, Derived polymorphism is S
MSSGPAACGVCGAAACCPHLLHTGDGNDDDLISRAFFSVFPVVGHHRRHESTSSPAMQQPSGCLHEFQFFGHQDDHHHQETIAWLLDHPPPPAPELGGDDGPSPAGDENDDQPAFHPFGTPQYHHPGKGNGNGLTFELDATLGLGTARQTTETAEASATIMSFSGSTFTDAASKEPALIDDGNELQMPVDQSSTEREVKLMRYKEKRMRRCFEKQIRYASRKAYAQVRPRVKGRFAKVTE

SEQ ID NO: 4631 - protein, 226 aa, Zea mays
  VARIANT 214: note = Ancestral polymorphism is R, Derived polymorphism is C
  VARIANT 163..226: note = Derived polymorphism lacks residues 163 to 226
  VARIANT 122: note = Ancestral polymorphism is G, Derived polymorphism is S
  VARIANT 111: note = Ancestral polymorphism is L, Derived polymorphism is I
  VARIANT 47: note = Ancestral polymorphism is P, Derived polymorphism is L
  VARIANT 10..226: note = Derived polymorphism lacks residues 10 to 226
MAEFENLGAQGWPTKHLEFLSIEKYFSLLWHEHDNVNDFEQSHLKAPEFELAVESLPYAPVTEVRLEEKTKAPADTEAAPEDIDDAIELPDVPTKVPERPEAPEKNKGFDLVLLSHSVFLSGHFVILQAAVRNNGGLVKEAKAIIRLFPIWVACLLYAVAYSQSSTFFTKQAATLNRRIGRHFQVPPAALHSFISITIVVIIPIYDRVLVPVSRRYSGKPSGITML

SEQ ID NO: 4632 - protein, 181 aa, Zea mays
  VARIANT 5: note = Ancestral polymorphism is M, Derived polymorphism is L
  VARIANT 17: note = Ancestral polymorphism is V, Derived polymorphism is M
  VARIANT 20: note = Ancestral polymorphism is L, Derived polymorphism is H
  VARIANT 24: note = Ancestral polymorphism is P, Derived polymorphism is L
  VARIANT 29: note = Ancestral polymorphism is P, Derived polymorphism is S
  VARIANT 33: note = Ancestral polymorphism is P, Derived polymorphism is S
  VARIANT 38: note = Ancestral polymorphism is V, Derived polymorphism is L
  VARIANT 41: note = Ancestral polymorphism is P, Derived polymorphism is S
  VARIANT 45: note = Ancestral polymorphism is P, Derived polymorphism is S
  VARIANT 54: note = Ancestral polymorphism is A, Derived polymorphism is D
  VARIANT 59: note = Ancestral polymorphism is P, Derived polymorphism is L
  VARIANT 88: note = Ancestral polymorphism is P, Derived polymorphism is T
  VARIANT 93: note = Ancestral polymorphism is P, Derived polymorphism is L
  VARIANT 100: note = Ancestral polymorphism is P, Derived polymorphism is S
MALIMLIGNGSTTCHAVWHLVHAPLPVAPVTVPGIPVVTKPSIVPVATLPLMLDIPMVLTVGVVPQIHVVPNTAALPPMSAPVLAVMTKVTLLPMLVVVPKVGAFPPMPVVMPKVPRTRHELGGQACEDARGVSEPENQMYVRAYLRGHRRVGVAGERQVTGGEQIHHRYRLRGLGTTLCR

SEQ ID NO: 4633 - protein, 470 aa, Zea mays
  VARIANT 78: note = Ancestral polymorphism is G, Derived polymorphism is D
MAGTEVEDPPAAALEVPAKRGLLRYNSPLAQVSLLGLICFCCPGMFNALSGLGGGGQVDPTIADNANTALYACFAVFGVLGGAAHNLLGPRATLLAGALTYPLYAGSFLYYNHRPGSQVFPVTAGALLGAGAGFLWAAQGAVMTSYPPPNRRGTYISLFWCLFNLGGVLGGLLPFALNYNRGDKKGSVSDGTYIAFMAFMLVGAALTVLVLPPARIVRDDGTRATRVTFSSPATEGAEILKLFANWKMLLALPAAWASNFFYTYQFNNVNSGLFTLRTRGLNNVFYWGAQMIGSAGIGYFLDFGFASRRKRGLFGVAAVAAVGTAIWGGGLANQLSYNAVPVPDPIDFKDGHRYAGPFLLYFSYGLLDAMFQSLIYWIIGALANDSQILSRYVGFYKGVQSAGAAVAWQVDRRHTPLMSQLIVNWGLMTISYPLLALLVFLAVKDESYSVSSVEDGREKDSKLSAPTSFH

SEQ ID NO: 4634 - protein, 105 aa, Zea mays
  VARIANT 25..105: note = Derived polymorphism lacks residues 25 to 105
  VARIANT 33: note = Ancestral polymorphism is G, Derived polymorphism is R
  VARIANT 49: note = Ancestral polymorphism is A, Derived polymorphism is V
  VARIANT 56: note = Ancestral polymorphism is G, Derived polymorphism is R
  VARIANT 67: note = Ancestral polymorphism is Y, Derived polymorphism is C
  VARIANT 69: note = Ancestral polymorphism is L, Derived polymorphism is M
  VARIANT 70: note = Ancestral polymorphism is R, Derived polymorphism is C
  VARIANT 78: note = Ancestral polymorphism is V, Derived polymorphism is A
MYTARKKIQKDKDLEPSEFEDSVAQAFFDLENGNQELKSDLKDLYINNAIQMDVTGSRKAVVIHVPYRLRKAFRKIHVRLVRELEKKFSGKVIFSFLFFLLLFVV

SEQ ID NO: 4635 - protein, 204 aa, Zea mays
  VARIANT 187: note = Ancestral polymorphism is S, Derived polymorphism is G
  VARIANT 183: note = Ancestral polymorphism is L, Derived polymorphism is V
MLQGSDGGDTQKPFIAFVLGGPGSGKGTQCTKIASDFGFAHLSAGDILRHEIASGSEKGELILEIIKEGRIVPSEITVELIRKAMEMNNAKRVLIDGFPRCEENRIAFERIVGTEPDIVIFFDCPEDEMVKRLLGRNQGRVDDNIETIKKRLKVFESLNIPVVDYYSSRGKVHKVSKQFCFALNYLSKINFVSYHYIVLLTLYH

SEQ ID NO: 4636 - protein, 102 aa, Zea mays
  VARIANT 20: note = Ancestral polymorphism is W, Derived polymorphism is C
MVLNHGSVSFGRSAAESLSWGKKALTKLRAPGLVTQKKAFFEEYYKRSRHLKAQERLHQTGATMEENNNNQADELPPAMSADLVANAPQQKRMVQGSGKSNR

SEQ ID NO: 4637 - protein, 983 aa, Zea mays
  VARIANT 32..983: note = Derived polymorphism lacks residues 32 to 983
  VARIANT 454..983: note = Derived polymorphism lacks residues 454 to 983
  VARIANT 457..983: note = Derived polymorphism lacks residues 457 to 983
  VARIANT 647..983: note = Derived polymorphism lacks residues 647 to 983
  VARIANT 676..983: note = Derived polymorphism lacks residues 676 to 983
MDLVAGAVGSIIRKLGELLQAEYKLQAGLLEQIESLKNELESAHAALRTVSEVPPEQLDPQVRLWAREVREASYDMEDILDTFLVDGAPADGLGKGRRLLKKMEKLFRKSKERHAIAGAIQKMKGRLQEVADRRDRYAVPVAAPAPVRTLDPRLVYMHREAAQLVGIDKTKAELMAMLLPLSSSRCPEDDVDVSASDGDKMKIVSVVGAGGLGKTTLAKAVYDELKPRYDHGAFVSVGRKPDLVQVFTSIFFHLDEQKYNAIREVKDLQLLAGELRRFLQDKRYLIVIDDVWDTKSWDTIKLAFDQKNKQSRVITTTRNRQVASSEEVYELHPLSHDSSKKLFYMRLFWGEDKCPANHPEEASQRILDKCGGVPLAIITMASLLVGKSREYWLEVCNSPGFYRGKDTNEQVDDTVWILSLSYYDLPSYLKTCLLYLSVYPEDYEIEKHRLIWKWVAEGFIEKNAGSSSLFEQGEEYFHELINRSMIEAMEFDEGFGIIIGCRVHDMVLDLIRDISNKENFVTVSYDDGRRGTTSSSSRNVVRRLAHQNRRMTEDNPVEGSMTHLRSLVACGCDMDGWVMHSSSTLLLRVLALEQCCTPPSMDIGHLGKLLHLRYLGLRGTLVDKLPDEIGSLKLLQALDLLGTGISRLPRTVCLLTQLKYLYGDACTIVPNGFLGKVTSLEELHIHPPSEGDEYNQQQFMQDLGTHQGEIRVLDLMRFRDEFDDLSMESGLVQALGSLHKLQTLLVSSDYTKQQVAQYSWDTAALPRCLRILVFVDLRFHHVPSSINPASLPNLSRLELSVGHLDEASLRALGGLPGLTYLTLTAADWLKSSCKASVVDVVVADGFFLKLRSLRLYGWMLQLVPSEDSTSVSFNIWKGDEDVVALGFCRTSVAAPMTSSIIMPDLIDLWFYVPVRALCKSRNGSICDSLGWECLPSLHKIDAVVDSKGAYIGDVKKVEAEMRQAAKLHPNQPIINILLLNQYI

SEQ ID NO: 4638 - protein, 351 aa, Zea mays
  VARIANT 77: note = Ancestral polymorphism is K, Derived polymorphism is E
MAGGSSLKNMVVAFLVPLPSILFYLSFVRAGGDTGASPLASWCAAHPLVLANVLFFLNVDVLFWLVGLLLSNHWVSKHYTANTLARNLFDAMPTRLLLYLSPEQLIDLYWTVIPVMLLHYYRGHPASVADAARSAVAVALTWAWSARLTHNYLRREGWELGKREDWRFNEMRAQYGNTWWWMSFFAVYLSQQVFLIGICLPMYAIHSSNQPWGVWDLVAAATCVAGILIAHFADTQLHRFVTRNEKLKRLGEPTVPTLEDGLWRYSRHPNYFGEQLWWWGLYLFAWNLGQRWMFLGPLVNSLCLGYVTVLVERRMLKQEHRAEAYKLYQKRTSVWIPWFRKAVPESKLKET

SEQ ID NO: 4639 - protein, 875 aa, Zea mays
  VARIANT 272..875: note = Derived polymorphism lacks residues 272 to 875
  VARIANT 97..875: note = Derived polymorphism lacks residues 97 to 875
MEDVLTPPPQPELVGEKRKRDETSLDASIEDAPAAPASTGGAEDAAGSDVARHPMWKTSLCSYFRRRGAGAEECSHGESCRYAHTEEELRPRPDGTWDPTSDRAKKLRKVAAEAQEEAEEEVTVDEQSLEKCLVGLPMGWTADRLKPFLQDQGISYAIAKKKKGMTVGFVTFQSVEQLTNAVQILKKNPSGGKEIKIVDANRRSHQKAHDGALVSNTGTTTENGSSPTTPAEETSVLESVSSSKKGARDAVTPLANMTYIDQLEHKNQSMAQILKKLTRNARKACPPAIPHPDWVFKSKEIGGLPCKFEGILESPVVNGYRNKCEFSVGYSLEGKKTVGFMLGNFREGVTAVEEPVNCPNVSEISCKYAQMFQDFLQPSSFPLWSRIDNSGFWRQLTVREGRCPAEAVVSQNAESQISEVMLIVQVCSTGVDEALMKEEFDKLSAILIQGAATCSPPLPLTTIVVQDHKGISNAAPTDCPLIPLLVPKGDQLDGTTEDKIRIHDHISNLKFSLSPTAFFQVNTLAAERLYTLAGDWANLNSDTLLFDVCCGTGTIGLTLAQHVGMVVGIEMNESAVSNACRNALVNGIKNCRFVCGKAEDVMGPLLTEYLGSPQQQAAASKSNSEIDDASKNEDTIGCASYDGENIDSSKQRNDNAEGQQPMGASVDHPTCASEVDENNVASGEQNCGEASLVNDKPIETASDNSLEQGKACKDGSSSPNNNVLAANACQFKNVVAIVDSPRVGLRPTIQSIFIGDQGIEDASTYSTSSIKFTRRICSEVFAAALLNCDRGSDVRYVSCNPDSLVANAIELCTPTSEKQEKNKGNRGWRSMSSAGLARQRTKSMPNSEPFIPKRAMAVDLFPHTPHCEMVMLFER

SEQ ID NO: 4640 - protein, 267 aa, Zea mays
  VARIANT 43..267: note = Derived polymorphism lacks residues 43 to 267
  VARIANT 107: note = Ancestral polymorphism is C, Derived polymorphism is R
MQDAALMPREKDGEEEKHRRFHGVLLAFHSYTRTRSPHSDLGWVVWGRGSQGRHRACRLAAATKITEGQSETASAPEGVSVLRRNSDDVGWEYGALVDLNNKDKVKCILCDKQKCGGVYQLKQHIAQKGKNVKKCQCMKTTKEKLLEAQEKCKKALDEAKRKREEKTVRELELREEVHVSRVGGSEEVTCVGSLEPHKLGPMDKWTKAIDPTATKSESLTQQRLNKELWKERLHEVHKYIARWAFDHAISFNACDNDEFKQMCEAIG

SEQ ID NO: 4641 - protein, 122 aa, Zea mays
  VARIANT 1: note = Ancestral polymorphism is M, Derived polymorphism is V
  VARIANT 12..122: note = Derived polymorphism lacks residues 12 to 122
  VARIANT 19: note = Ancestral polymorphism is V, Derived polymorphism is I
  VARIANT 20: note = Ancestral polymorphism is H, Derived polymorphism is L
  VARIANT 32: note = Ancestral polymorphism is K, Derived polymorphism is N
  VARIANT 60: note = Ancestral polymorphism is A, Derived polymorphism is V
  VARIANT 64: note = Ancestral polymorphism is G, Derived polymorphism is S
  VARIANT 66: note = Ancestral polymorphism is Q, Derived polymorphism is H
  VARIANT 68: note = Ancestral polymorphism is H, Derived polymorphism is Y
  VARIANT 71..122: note = Derived polymorphism lacks residues 71 to 122
  VARIANT 75: note = Ancestral polymorphism is A, Derived polymorphism is V
  VARIANT 101: note = Ancestral polymorphism is A, Derived polymorphism is V
MDAEVRSKRMPQLLGAAYVHHAGVVVITTTLKEMPSLQKALPPELADNVLRLYRECLRRAKYIGHQKHNKELLVAMVRQQFKKNMHETDPEKIQKMKDDAARGLINHILYESEKITGRKFSG

SEQ ID NO: 4642 - protein, 392 aa, Zea mays
  VARIANT 193: note = Ancestral polymorphism is K, Derived polymorphism is N
MASIRRPHSPAKQHLLRHHHPFATSSPPSSPLRHSSTSSSPRTHHHLHHPHPFLFFTRRPLPRFAAFFLLGSFLGLLHFLSHLPHQTPHLRPASSSPAVIPRHQLPIDRLNNHHHHHHDDDDDESNSKLLVVVTPTRARAAQAYYLSRLGHTLRLVHPPLLWLVVEAGDPTPEAAAALRGTTVMHRYVGCCDKLNASASASDDALRFRPHQMNAALELLENHRIDAIVYFADEEGVYSLDLFKRLRQVRRFGTWPVPVISENRKDGVGVVLEGPVCKQNQVVGWHTSEHASKLRRFHVAMSGFAFNSTMLWDPRLRSHLAWNSIRHPDTAKQGLQATTTFVEQLVEDESQMEGIPADCSQIMNWHVPAGSENLAYPRGWRVAANLDVIIPLK

SEQ ID NO: 4643 - protein, 692 aa, Zea mays
  VARIANT 422..692: note = Derived polymorphism lacks residues 422 to 692
MGGSNSTGRRSGSVPRAMPPVEEVDISAVRYKSPALQAPHLTGFSLRAFVWLMESPLLGRLITSVLKSQNNMPQAGSHIPSLSPCSPRRLHPHSFLIIILCMPCLISSLRFVQMLQQTVIPERPMYYPEFPLQDGQNPLYPLDDHFDKTAFATISGLVYSYKCHITHYVLSFVNSGVAAPNYSDPEPEVVLVDEDRDPVERVHEALRCLPQYDPSVRWTTEENPPFLYWKIRDFAHAYSSGITTPSVVAEYVIAGIEEWNNKKPPMPMLIYFNAEDLKKQAEASTKRFQRGNPISILDGIFVAIKDDIDCFPYPTKGATTFFDQIHTVERDAVCVARLRKCGVIFIGKANMHELGLGVTGNNPNYGTARNPHSVDRYTGGSSSGPAALVSSGLCSIAIGTDGGGSVRIPSALCGIVGFKTTYGRTDMTGVLCDSGTVEVASPLTSSVDDAILVSPSPLCVPNLLSPENSNILGSVKIGKYTEWFNDVSGHEISGTCDDALKLLCSAFGCQVEEITLPELEEMRTAHVVSIGSESFCDLNPHYKAGRKTEFTLDTRTSLALFGSFTATDYVASQSIRRRIMHYHMEAFKKVNVIATPTTGITAPKIPPSALKSGESDYVVSAYLMRFIIAGNLLGLPAITVPVGHDKQGLPIGLQLIGRPWGEASLLRVASAVEELCLKKRKRPSAFYDILKA

SEQ ID NO: 4644 - protein, 207 aa, Zea mays
  VARIANT 52: note = Ancestral polymorphism is Y, Derived polymorphism is C
  VARIANT 55: note = Ancestral polymorphism is R, Derived polymorphism is P
MVSLSTWFRYAAQKFEYCVSLSLKKYNDVGRISSTQLTDVLNKNLFQGKLTYVCPTKGEEAMAPIASPTGGAVLVRKLANLSPTQVFVGDVVLLKDPEKSDDLIIRRLAALEGYEMVSNDEKDEPFVLEKDQCWVLADNLALKPKEARDSRLFGPVPMTDILGRVIYSLRTAVDHGLVENSGMAMKQDGPVLAVELDVEEMAKNIKP

SEQ ID NO: 4645 - protein, 630 aa, Zea mays
  VARIANT 47: note = Ancestral polymorphism is W, Derived polymorphism is R
MGLFSSPAKVYKPAADVDLGPGSDELYISPNVKAPRVAGLLVKIFVWILEMPIVGQIVLYILKKDNLINKLVSDADIPEPPLFTASHSWEDTPEQSVRLTKPDLSAAERVQEAVGCLPARLEAALAADARGIRRWTVRDFSDAYRSGEVTPVQVAARFLAAVRESSGPGVSNMAFFISCDPDDVMRQAEESTLRYQRGAPLSALDGVLVGVKDEIDCLPYPTTGGTRWLGAARRCEADAACVAQLRACGAVLAGKANMHELGAGTSGINPHHGSTRNPYNASTIAGGSSSGSAAIVCAGLCPVALGVDGGGSVRMPAALCGVVGFKPTAGRLSNAGVLPLNWTVGMPGILAGTVEDALIAYSAIVDQSQPSYLRVNPSSLLSLLNLISTVPVVCTIRLTGQLGSTLSIGNIKLARYGKWFNDSAEDIRSCCDKALQALRANYGWQTVDVTIPEVEEMRLAHYVTIGSECTTSLAKYLDKLKRSEIGWDARVALSVYGSFSSRAYLNAQRLRNRQMYFHKQIFKAADVIVSPMTGVTAYPLQDDALSTGELDYINGAALVRYSIAGNFLGLPAITVTVGYDRGGLPIGLQFIGRPWAEATLLHVAFATQQACAKGYKKPPVFYDLLGKQQD

SEQ ID NO: 4646 - protein, 321 aa, Zea mays
  VARIANT 295..321: note = Derived polymorphism lacks residues 295 to 321
  VARIANT 230..321: note = Derived polymorphism lacks residues 230 to 321
  VARIANT 209: note = Ancestral polymorphism is P, Derived polymorphism is L
  VARIANT 177: note = Ancestral polymorphism is P, Derived polymorphism is L
MQNHTPGSYILPCLPDLLLFACICILSLSHTHNNFLAYILLPTCCLFSHVHEHHHHITQVRHAQGVHNVEGDTDHSAYMKPDFFDASITPLGWNQVDLLREHVKESGLAEKIELVICSPLSRTMQTAVGVFGGESCSNGVSVPPLMVENAGRPAVSSLNCPPFLAVEACRERLGVHPCDKRRSITEYRALFPAIDFSLIESDEDVLWVPDVRETFESLAERGMKFIDWLWTREEREIAIVTHSGLLSHTLRMYSKECHPTVAQEVSKYFANCELRSLVLVDRSMLGSDGPSYNNYPGKMKIPAGLDLPSDDKKQPLQNQSG

SEQ ID NO: 4647 - protein, 737 aa, Zea mays
  VARIANT 74..737: note = Derived polymorphism lacks residues 74 to 737
  VARIANT 364: note = Ancestral polymorphism is R, Derived polymorphism is W
  VARIANT 375..737: note = Derived polymorphism lacks residues 375 to 737
MGTGWRRALCTSVQRDDDPDRDASTKKRRPQQDAPSPRGTATATGFFSAVKSAATGSSSNPSTPVLRCRTRPLQQPADPAPVTPPSAPAPARNHRVPLMQALSAPASPRSPSRFALLKASLLPSKPRCGVCSRGVKSGGSSAVFTAECSHAFHFPCIAAHARSSSANGVLSCPVCASPWRQAPFLASLRLHCSFHDDKHRGGGDGRKTSPLAKLYDDDEPLLAPKATANGGGFNPIPEADEDDEEQGAASEFRGFFPCPRSRTTSGLAVTVAPEVALVSSGRRHGKYVVAVKVKAPGLRSSSTAPRRASIDLVTVLDVSQGMMGEKLQMLKRGMRLVVASLGPTDRLSIVAFSGAAKRLLPLRRMTRTGQRSARQIVDRLVVCAAAATTATATQGQQSACVGDALRKATKVLEDRRDRNPVATVMLLSDTQQQQSAAPENSSRKQFGRPAVAPATRFTHVEIPIGPGDPPPLVSECEEEPPVEHAFAKCLGGLVSVVMQEVQLELAFLTGEITAVYSCGPGQQAVAVSGGAGVSVRLGEMYAEEERELLVEVRAPLGSHPHSLSVRCTYRDPASQEAVRGAEQPLLLPALEGERASSSSRRLHDLFVATRAVAESRRLAELQDLGTAIHLLSSARALVLQSPPTQQQQELVGSLDTELSDMRWRRANSQHQEVVTPTSRSGRRRGDGDTTTPVGTPRGEVLTPTSAWRAAEQLAKVAIMRKSMNRVSDLHGFENARF

SEQ ID NO: 4648 - protein, 312 aa, Zea mays
  VARIANT 274: note = Ancestral polymorphism is S, Derived polymorphism is W
  VARIANT 237: note = Ancestral polymorphism is M, Derived polymorphism is I
  VARIANT 220: note = Ancestral polymorphism is V, Derived polymorphism is G
MRRSGRGRAGRSTEANSLTSFLRRSSSTSRRIPSNPPTQGSARVCLLQIQSNKQQTARGHRVDATMVGNRAWFAGLFSGSGKRRQVSAEKIVLDLTPLQEQRLQSLKERLNVPYDETRTDHQESLRALWNASFPDTELTSLVSEQWKDMGWQGVNPATDFRGCGFVSLENLLFFARTYPASFKRLMLKQQGMRTTWEYPFAVAGVNISYMLIQLLELNSVRPKSLPGINFIKVLTGIDECSIFYGLSEHEDAFDVLYCIAFEMMDAQWLAMRASYMQFKEVLEATRQQLERELSLEDLNGIHDLPACNLLYK

SEQ ID NO: 4649 - protein, 532 aa, Zea mays
  VARIANT 287..532: note = Derived polymorphism lacks residues 287 to 532
MEEQQLRARPNMMVLSSLAKNNPEAVLALIAFVTVVALRHLISSWRQHGRLPPGPTSLPVIGHLHLLRPPVHRTLQELASRIGPLMHIRLGSTNCVVASSPEVASELIRGHEGSISARPFTAVARKFSYDSAGFVFEPYNTHWRFMKRLCMSELLGPRTVEQLRPVRRAVTVSLVSDLLASSARGETVDITRHLIRLTNTSIIRMVASTVSGSVTDEAHELAKAVIEVVGAFNVDDYIAVVRGWDFQGLGRKAADVHRRFDALLEDILRHKEEARAARRLDDGHGKQATHSKDLLDILMDKAEDPAAEVKLTRENIKAFVIDVVTSGSDTSAAMAEWMLAELMNHPETLRKVVEEIDAVVGGGRIASEADLPQLPYLMAVYKETLRLHPAGPIAHRQSTEEMVVHGFTVPPQSTVLIHVWAIGRDPAYWEEPLLFRPERFMPGGAAESLEPRGKHFQYIPFGSGRRGCPGMGLAMQSVPAVVAALVQCFYWATVDGGVDKIDMSESDGLVCARKKPLLLRPTSRLTPFPPVV

SEQ ID NO: 4650 - protein, 86 aa, Zea mays
  VARIANT 74: note = Ancestral polymorphism is R, Derived polymorphism is M
  VARIANT 48: note = Ancestral polymorphism is K, Derived polymorphism is N
MPWLLVAAAGSRSGAQGNATTKAQSRSGFRTQIMSSRKYASGSEKRKKRKKIDELIESQRGGIERVLHLKLVWRHHFRSSAKHRAH

SEQ ID NO: 4651 - protein, 1359 aa, Zea mays
  VARIANT 114: note = Ancestral polymorphism is L, Derived polymorphism is I
MALGDLMASRLVHSSSSRGLSSSPTPPLPNQHHHQNHNHTGDGLLAASGPEPRNGLEADEVDKSAPVPYLPQLVVLCEQRHEPEGIDEAAAAAAGPSTSGLVSKWRPKDRILILFFSDPFSMAPPKALESIGKTLHSQYERWQPKARYKLQLDPTVEEVKKLCNTCRKYARSERVLFHYNGHGVPKPTSNGEIWVFNKSYTQYIPLPITDLDSWLKTPSIYVFDCSASGIIVKAFLERLDWSSSSSASSRKDCILLAACEAHQTLPQSAEFPADVFTACLTTPIKMALHWFCKRSLLRGSLDLSLIDQIPGRQNDRKTLLGELNWIFTAITDTIAWNVLPHDLFQRLFRQDLLVASLFRNFLLAERIMRSANCSPVSYPLLPPTHQHHMWDAWDMAAEICLSKLPQLIADPNAEFQPSPFFTEQLTAFEVWLDHGSEDKKPPEQLPIVLQVLLSQSHRFRALVLLGRFLDMGPWAVDLALSVGIFPYVLKLLQTSAMELRQILVFIWTKILSLDKSCQVDLVKDGGHTYFVRFLDSLDAYPEQRAMAAFVLAVIVDGHRTGQEACMNAGLIDVCLRHLQPENPHDSQTEPLLLQWLCLCLGKLWEDFPDVQLLTLQTNTPEIVLCLLSEPQPEVRAAAVFALGTLLDTTSSNGADDDSDYDEKVKAEINVVRSLLQISSDASPLVRSEVAIALTRFALGHNKHLKSVAAEYWKPQSNSLLKSLPSLANINNPNNVYSPNNILQGSIGPVLRVGSDSSAAGRDGRMSTSSPIATSSIMHGSPQSDDSSQLSDSGLLLRENASNGGPGYTRSRPVDNVIYSQFISTMCSFAKDPYPRIATIGRRALSLIGVEQVVMKNTRFNSGGAHRGETSASNFGMARSSSWLDMNSGNNLIKFRTPPVSPPQHDFLPGLRRVCSMEFGQHPISSPDGLAVPLLSSAAATSNAELSILPQSTIYNWSCGHFSRPLLIGSDDNEEANARREERERLALDYIAKCQRSCMWTYISLHYILLVGFLDYLSVIFWLFTLGIAACKMTNQIASWDTRFELGTKTALLLPFSPIVVAADENEQIRVWNYDDALPVNSYQNHNLSDRGLSKLLLINELDESLLLAASSDGNVRVWKNFTQKGGQKLVTAFSSVQGHRTAGRSIVIDWQQQSGYLYASGDMSSILLWDLDKEQQLSTIQSSGDSAISSLSASQVCSGHFAAGFAAGSVRIYDIRSPDRVVYTARPHAPRTEKVVGIGFQPGFDPYKIVSASQAGDIQFLDVRRSAEPYLTIEAHRGSLTALAVHRHAPVVASGSAKQMIKVFSLEGEQLTIIRYQPSFMGQRIGTVNCLSFHPYKSLLSAGAGDNALVSIYAEENYK

SEQ ID NO: 4652 - protein, 544 aa, Zea mays
  VARIANT 9: note = Ancestral polymorphism is R, Derived polymorphism is P
  VARIANT 18: note = Ancestral polymorphism is S, Derived polymorphism is W
  VARIANT 132: note = Ancestral polymorphism is S, Derived polymorphism is W
MEEQQPRPRPSIMFVLSSLAKNNPESVLALIAVLTVVALRHLISSWRQQARLPPSPTSLPVIGHLHLLRPPVHRTFQELASRIGPLMHIRLGSTHCVVASTPEVASELIRGHEGSISERPLTAVARQFAYDSAGFAFAPYNTHWRFMKRLCMSELLGPRTVEQLRPVRRAGTVSLLADLLASSARGETVDLTRHLIRLSNTSIIRMVASTVPGSVTDEAQEVVKDVAELVGAFNVDDYISLVRGWDLQGLRRRAAGVHRRFDALLEDILRHKEEARAARRLDQDDDGRGSSKQDKKQATHSKDLLDILMDKADDPAAEIKLTRENIKAFIIDVVTAGSDTSAAMVEWMLAELMNHPETLRKVAEEIDAVVGGDRIASEADLPQLPYLMAAYKETLRLHPAAPIAHRQSSEEMVVRGFTVPPQTAVFINVWAIGRDPAYWEEPLAFRPERFMPGGAAESLEPRGQHFQYMPFGSGRRGCPGMGLALQSVPAVLAALVQCFHWATVDGDGGVNKIDMSESDGLVCARKKPLLLRPTPRLTPFPAVV

SEQ ID NO: 4653 - protein, 1003 aa, Zea mays
  VARIANT 33..1003: note = Derived polymorphism lacks residues 33 to 1003
MRWPRSKFRWLFSACLICLLLQLAGAIRTSLFWPPACQLPSPAIPSGDESVEQLWHSCALDLKIPQDVRNRSHYSLLFNTISNSYRENDNKFYPQKIGIEEAITATLSPAKDANTFLDCLKKHNFPFSDHGLQKQREETRSLLPNSNSISNLPFVMKRRRLHEEDSTIAPTRPKAKEAIRSVLSSEGEAHLLVATVKKSGKPEPKHKSKDNSGTIIAALSVACVALVALICLCYCACRGSEDPESSYDGNPLLSLNMSDLSGATKENKAAFVFFFLAHPISLLHGCFRTHKKNRQRGILTQLIYLSIHALFINATGSSRKSCSTPIDVNRLGALSTSSSESQRKEFKLPPVPAAVREMSMKSEFERRSNVQAMKLSSHEITTIAGRPSASTNSEEVKAAVPSSNATGNICKPAAGPAPPPPPPPLGHPLPKAPHAPLAPAPAPPVPPPPKMPTAASSSNPPPPGPPTPPAPRPAAGPGPPPPPSRAGPGPGPPPPPSRGGAGPPPPAMPGGPKARGPPPLKKAGNVAGPPVADNKTKLKPFFWDKVTANPDQAMVWDQIKAGSFQFNEEMIESLFGCHATDKKNADGKKDLAAKDTPQFVRILDAKKAQNLAISLKALSVSADEVRNAVMEGHELPIDLIQTLIRWTPSSDEELRLRLYTGELTQLGPAEQFLRTIIDIPYLYQRLDVLLFMSSLPEEAANAEQSFKTLEVACHELRNSRLFKKLLEAVLKTGNRMNDGTFRGGAQAFKLDTLLKLSDVKGVDGKTTLLHFVVQEIIRSEGVRAVRAAKEQSNSSISSVTSDDLTEDVSDDTEHYKQLGLGVVSSLGDDLQNVRKAAILDADALTISVASLGHKLVKANEFLNTGMKSLDEDSGFHRKLGEFIEQSQVRVTQLLEEEKKLRALVRTTVDYFHGSTGKDEGLRLFVVVRDFLGILDKVCREVKEAAAKAAANNKKPSAAGSGSKGRQPSQSSSSFRDPRQQLVPAIKDRRSAAARSSSSSSDSD

SEQ ID NO: 4654 - protein, 346 aa, Zea mays
  VARIANT 19: note = Ancestral polymorphism is E, Derived polymorphism is K
  VARIANT 21: note = Ancestral polymorphism is P, Derived polymorphism is S
MVKAASSGNDEVNNHVDLEEPPKQAPKDFLQIIDFDKDTIMKVLNRAIEVKALIKSGDKSFQPFKGKTMVMIFAKPSMRTRVSFETGFFLLGGHAIYLGPDDIQMGKRGLFDKAAKNQEFDAAAKEITKALTTVGISHIIDTTAISIGRRYGRTDEIGVPFVVAMDSTNVTIRERDDKEQIQYFYGYNDIIMARVFAHQDILDLAKYASVPVINGLTDYNHPCQIMADALTMLEQIGRIENTKVFYVGDGNNIVHSWLLLADVLPFHFVCACPKGFEPDAHTVEMARGAGISKIEITNRPREAVKGADIVYTDVWASMGQKEEVDYRKQKFQGFTVDETLMEIAGP

SEQ ID NO: 4655 - protein, 303 aa, Zea mays
  VARIANT 14: note = Ancestral polymorphism is S, Derived polymorphism is R
MATASSFTAIFFSSAFAACFAEVCTIPLDTAKVRLQLQRKAPLPSPPVAAAAAAGGTLATIMCIAREEGVAALWKGVIPGLHRQFLYGGLRIGLYEPVKAFFVGGAVVGDVSLLSKILAALTTGVIAIVVANPTDLVKVRLQADGKANTIKRSYSGALNAYATIIRQEGIGALWTGLGPNVARNAIINAAELASYDQFKQMFLKLPGFTDNVFTHLLAGLGAGFFAVCIGSPVDVVKSRMMGDSTYRSTLDCFTKTLKNDGPGAFYKGFIANFCRIGSWNVIMFLTLEQKSKNDRCTHPYVDE

SEQ ID NO: 4656 - protein, 1543 aa, Zea mays
  VARIANT 397..1543: note = Derived polymorphism lacks residues 397 to 1543
MPSKWQVWGQPDGSIVWLPVSDAPPNPPRPGPLRPAPRHPPLPDEAPIEETLCPDTAGGCRISSMADLLLQAREQLIEGDAMDGLAQSVNTAGLFSTGSGRPLAVSQRAVRRASALVGEEVDEATDNNNKKRKKPFGCDAGLEGELANLHVPFGGGVHKDNFFPMFQSGSGKAVLLNKDSIQKARAVLEENVENAAGAKQPMFHTSTGRSVLVSKSSIDKARAVLGGRMIAHEGDVGGVDGMEQFPVSQAGSGNVEGPGRPANQSLIFQTSSGRPVLISKRYVERSRALLMDEDVKNIRQWDTGCQLPIFQTGLGRPVAVKHSSIKKASTILGDGDVKRSGNGHTGVCTTPFQFETPKSVLMSSSLIINGMTVTPEENTSVRAEKCFNDDGQLPLFQTGSGRSVTASKGSFKRASSVLEPRNIAKELEDESHLNDGYATSIFKTGLGKSILPTENSRERAQFVLEAKEAVKQAVISDIGAGFGENPMFHSGKQQFSPENDTSRPRASTPMEQGKFATKGYEDCGSPLPMFQTGSGKSVLVCESSMQKARAVLEEEEHYKLVKMDKKIAASASPLKTSHARTVNISSTGVSRAATLLGLEENTLSTQFFGHVSDKLGTEITVKRGNPEHMLDVASAHAISSGTHKGFIYPTENPTHMDKHQQFGFSKSSTSYVGEHSIRFSTAGGRSMAISVDALQRAKSLLGDSDLVVSPNGSIGRSLASAIENLPKPTISPKGDVSNLSYGTRAIGYAVPDTPVTKTSANQFHMGREYRPVNEIPKVPKPPSRCLSEGDNASNSKDKTQWHHMPAGPLVDITNYMATCSGNTDCLANGKRIIGGRNSVSPFKRPRSSRFITPIKNNKLSSAVFFTGESIVPPMQISPCRTMLSVRYPFQHQRKNYKEYFGGPPCFKYLTEHVTDDVKLMDARRAEKFRFQHMDTGAEEFQKMLLTCGASLSCATKEWVSNHYKWIVWKLASLERCYPTRVAGKFLTVDNVLEELKYRYDREVNHGHRSAIKKILEGNSSPSLMMVLCISAIYSCPYQNNNKLEVNKVDTNEDNSGNQSFSATNRNMSANIELTDGWYSLDASLDVALLEQLEKRKLFVGQKLRIWGASLCGWSGPVSFHEVSGVVKLVVHINGTYRARWNDALGFCKHVGLPLAFRCIKVSGGRVPRTLVGITRIYPILYRERLPDGRFVVRSERMERKALELYHQRVSKITEDILFEQQENCDSTDDNEEGATICKMLEHAAEPEFILAGMTPEQLKCFSSYIEKQKIVKQNEVSEKVEKALVVAGLSSRDVTPFLKVRVIGLVNKHSASTSSNKEGLITIWNPTEMQKDNLVEGQAYSVMGLVPSNYCTEIMYLHARGSSTTWKPLASAQTTDFKPFFTPRRAIELLKFGEVPISSEFDIAGLILYVGNTYLCNNKKKQWLFLTDGSKFVSGQGCEEQDCLLAVSFSSATTDEDSTLFSYTLSGNTVGFSNLVKRQKDETRQVWVAEATESSSYTLSNEIPRKSHLKEAAVLAERWASRSYHKIQELKERVLCIVGNAGV

SEQ ID NO: 4657 - protein, 102 aa, Zea mays
  VARIANT 41..102: note = Derived polymorphism lacks residues 41 to 102
  VARIANT 76: note = Ancestral polymorphism is G, Derived polymorphism is R
  VARIANT 79: note = Ancestral polymorphism is M, Derived polymorphism is V
  VARIANT 86: note = Ancestral polymorphism is Q, Derived polymorphism is K
  VARIANT 89: note = Ancestral polymorphism is T, Derived polymorphism is A
  VARIANT 92: note = Ancestral polymorphism is W, Derived polymorphism is L
MAVPGKTSWPELVGSEIEQAVDTICVERTDVNVICEIQDGQPASTEVSTTISPVTGEGPPVIVYITYVIDDQVLSGAIMSLEIGEQYLTDLWMVPNIGLETF

SEQ ID NO: 4658 - protein, 73 aa, Zea mays
  VARIANT 37: note = Ancestral polymorphism is W, Derived polymorphism is C
  VARIANT 29: note = Ancestral polymorphism is G, Derived polymorphism is R
MGRAINKTIMVVELIKRRIVGLHQNTTTGSTDITDMWEPLEEGLLLLETTRHVSMITITLSKKELDTSSIGLS

SEQ ID NO: 4659 - protein, 104 aa, Zea mays
  VARIANT 88: note = Ancestral polymorphism is L, Derived polymorphism is W
  VARIANT 98: note = Ancestral polymorphism is G, Derived polymorphism is C
MAVPGKTSWPELIGSEIEQAVDTICTERPDVNVICELQDGQPASTEVCTTVSPVTGEDPPVTVYITYVVDDQVLSGAIMSLEIGKQYLTDLWMVPNIGLRSWIK

SEQ ID NO: 4660 - protein, 104 aa, Zea mays; identical to SEQ ID NO: 4659
  VARIANT 76: note = Ancestral polymorphism is G, Derived polymorphism is R
  VARIANT 80..104: note = Derived polymorphism lacks residues 80 to 104
  VARIANT 92: note = Ancestral polymorphism is W, Derived polymorphism is G

SEQ ID NO: 4661 - protein, 120 aa, Zea mays
  VARIANT 117: note = Ancestral polymorphism is R, Derived polymorphism is W
  VARIANT 106: note = Ancestral polymorphism is G, Derived polymorphism is E
  VARIANT 102: note = Ancestral polymorphism is G, Derived polymorphism is R
  VARIANT 100: note = Ancestral polymorphism is P, Derived polymorphism is Q
  VARIANT 73: note = Ancestral polymorphism is R, Derived polymorphism is H
  VARIANT 24: note = Ancestral polymorphism is Q, Derived polymorphism is P
  VARIANT 9: note = Ancestral polymorphism is R, Derived polymorphism is W
  VARIANT 5: note = Ancestral polymorphism is K, Derived polymorphism is Q
MNTTKVMLRVLVFSLVFTMLSTHQALGNKENCDKDKDFIKRQCERCIGVGRKFPTTKLCCNAIKRADMACVCRSITLEEQLTISVMKVVDVAKECGNPVPPGNKCGTWTVPPQLLARVHP

SEQ ID NO: 4662 - protein, 120 aa, Zea mays
  VARIANT 117: note = Ancestral polymorphism is R, Derived polymorphism is W
  VARIANT 106: note = Ancestral polymorphism is G, Derived polymorphism is E
  VARIANT 102: note = Ancestral polymorphism is G, Derived polymorphism is R
  VARIANT 98: note = Ancestral polymorphism is P, Derived polymorphism is L
  VARIANT 73: note = Ancestral polymorphism is R, Derived polymorphism is H
  VARIANT 72: note = Ancestral polymorphism is C, Derived polymorphism is Y
  VARIANT 24: note = Ancestral polymorphism is Q, Derived polymorphism is P
  VARIANT 16: note = Ancestral polymorphism is V, Derived polymorphism is L
  VARIANT 9: note = Ancestral polymorphism is R, Derived polymorphism is W
  VARIANT 7: note = Ancestral polymorphism is M, Derived polymorphism is V
  VARIANT 5: note = Ancestral polymorphism is K, Derived polymorphism is Q
  VARIANT 4: note = Ancestral polymorphism is T, Derived polymorphism is I
  VARIANT 2: note = Ancestral polymorphism is I, Derived polymorphism is N
MNTTKVMLRVLVFSLLFTMLSTHQALGNKENCDKDKDFIKRQCEKCIGVGRKFPTTQLCCNAIKRADMACVCRSITLEEQLTISVVKVVDVAKECGNPVPPGNKCGTWTVPPQLLGWVHP

SEQ ID NO: 4663 - protein, 100 aa, Zea mays
  VARIANT 53: note = Ancestral polymorphism is S, Derived polymorphism is W
MRPQLILVGTLAVLAILAALGEAAPGSSSWPCCNNCGACNRKQPPECQCNDVSVNGCHPECMNCVKVGAGIRPGMGPGPVVTYRCDDVLTNFCQSSCPEA

SEQ ID NO: 4664 - protein, 685 aa, Zea mays
  VARIANT 106..685: note = Derived polymorphism lacks residues 106 to 685
  VARIANT 96: note = Ancestral polymorphism is T, Derived polymorphism is I
MVNSCAPAAFLHSSASWQALLVFFISVTAVGAADAGGQDAGGQGPCPHFSCGDLGNISKPFRRPGDPEECGVKAYELVCSNGKATIRINTGTYFVTSINYTNRSFWVVDANLDMHSSCPLPRWDQFPYTSEGLFWRSGKHTHIDLPTDDASLWACFVNCSRAVRITNNLGYKPVTCLSGSSSFVYIYVQYGACTVGSLEPFCGYLAEISFGTNPKGTNASYADIIQVVKKGFSVGFPKDEYDYSYHNTSWIFKTCLNNFTRYFHEQLSSGGIVGITRAFFWSDVFLLKCAESYNATTVILDFDVISVVTGVKITTLLVLFRFVFTALAVQMFLAHKYWKTTIAIDAVEKFLHMQQMLGPTRFAYTDITAITGHFRDKLGQGGYGSVYKGALLSGNMHVAVKMLGNSNCNGDEFISEVSTIGRIHHINVVRLVGFCAEEMRRALVYEYMPNGSLDKYIFSAERSFSWDMLNEIALGIARGINYLHLGCDMQILHFDIKPHNILLDSNFVPKVSDFGLAKLYPRDKSFVPASAMRGTIGYIAPEMISRSFGAISSKSDVYSFGMLLLEMAGGRRNADQNAANSSRAYYPAWVYDRLAEQDAGEISVAADMHELERKLCIVGLRCIQMKPQDRPTMSEVIEMLECGTHGLGLQMPSRPFFCDDDDPNMPAADSYHFSSELTAISEEDG

SEQ ID NO: 4665 - protein, 570 aa, Zea mays
  VARIANT 116: note = Ancestral polymorphism is S, Derived polymorphism is L
MSEFLVIALLLCLLKDGAYKATAWDDADFFSNCPPSRCSKHGPEIRYPFRLESSNTSSLCGAPFMKLGCYGDDTILVLPTVVIQYKVTAIDYRHGTLTLAPRVDNSSSSCKQKLMSVSLPRSIIKCENLYPCSLLCYFGYGMIVSCLREFTPSNLAVNYIFGPISCLSSAADFSYLVDRSASMSVLPLDCRVMPDSYFLMMDTRNDDSTFKEKAETILNFSATSSVATIVVLLLMVATGLYLSLKTRYNEEIHLKVEMFLKTYGTSKPTRYSFSELKKITRRFKEKVGQGGFGSVYKGELPNGVPVAIKMLENSIGEGEEFINEVATIGLIHHANIVRLLGFCSEGTRRALIYEYMPNESLEKYIFSNDSSISQDLLVPKKMVDIALGIARGMEYLHQGCNKRILHFDIKPHNILLDFNFNPKISDFGLAKLCARDQSIVTLTAARGTMGYMAPELYSRNFGGVSYKSDVYSFGMLVLEMLSGRRTSDPSVDSQNDVYLPEWIFERVITGQDLVLSREMTAAEKEKVKQLAMVALWCIQWNPKNRPSMTKVVNMLTGRLENLQMPPKPFV

SEQ ID NO: 4666 - protein, 232 aa, Zea mays
  VARIANT 44: note = Ancestral polymorphism is L, Derived polymorphism is F
MAGKELTLLGLWASPFVLRARIALSLKGLTYAYSEENLDDKSELLLSSNPVLKKVPVLIHHGKPVCESQIIVQYVDEAFPAAAPNFLPSDPYDRAIARFWASYVDDKFYSAWIPVFRGRTAEEMAEAARQAVAALETLEQAFRECSKGKAFFGGDSVGLVDVVLGGLVGWLYATEAICGVKALDAGRTPLLAAWAERFCALEGVKGLIPDVDRLLEYTKARRAVFGLPPLRP

SEQ ID NO: 4667 - protein, 90 aa, Zea mays
  VARIANT 85: note = Ancestral polymorphism is N, Derived polymorphism is K
  VARIANT 41: note = Ancestral polymorphism is R, Derived polymorphism is W
  VARIANT 26: note = Ancestral polymorphism is A, Derived polymorphism is S
  VARIANT 21: note = Ancestral polymorphism is D, Derived polymorphism is Y
MTSFMAACLVSIKKTKDLPPDQLQKALRKTFSAEKKKGKIRKAWDGTKVIYNVHGAPLLLGKFYNRTNPFFEFTCTEIGTSKNKNYFMSK

SEQ ID NO: 4668 - protein, 136 aa, Zea mays
  VARIANT 118: note = Ancestral polymorphism is P, Derived polymorphism is Q
  VARIANT 116..136: note = Derived polymorphism lacks residues 116 to 136
  VARIANT 47: note = Ancestral polymorphism is R, Derived polymorphism is H
MLGGSVLNPFYILSSTRENDSIFDKFECCQSGDGLRVETGSYSNIFRVFGCRSGTSEATTLEATRNPTRWQVQTTSRATRSLSTLTRAVRRGGESTEIDANGNSYDLSTKLLHLAWHPSENLIACAAANSLYMYYA

SEQ ID NO: 4669 - protein, 336 aa, Zea mays
  VARIANT 225: note = Ancestral polymorphism is P, Derived polymorphism is S
MSSHPPSSTDSPVCIPFSALRLLTFHTTLLCLTLLSCPNPRAGMELGATTALYPLHRCKTIYLVRHAQGIHNVAGEKDFGAYMSHELFDAQLTPLGWNQVDGLREHVKKSGLAEKIELVISSPLLRTMQTAVGVFGGEKYTDGVNAPPLMVENARHSGRPAVSSLNCPPFIAVETCREHLGVHPCDKRRSITEYRPLFPAIDFSLANMYLLYLQIENDEDVLWEPDVREPNEAVALRGMKFMDWLWTREEKEIAIVSHSGFLFHTLSMYSKECHPTISDEVSKHFANCELRSMVLVDRSMLGSYSSRFNYAGKNPTGLDVPSDIADKKQVDEAQKN

SEQ ID NO: 4670 - protein, 180 aa, Zea mays
  VARIANT 59: note = Ancestral polymorphism is P, Derived polymorphism is S
MYTCVALVVGAVLLQLPAVIVAAGDGPSMHHLHLYMHEKDAGPNSTAVVVVNCTGPPLPAGRGSYGCFGDTRVVDDVLTAEPNRTSPVVGRVQEFHVMASRQESVLIMSLTVVLTDYPPYTGSTVVVVGRNDLLAPVRELPVVGGTGSFRMATGYVLFKTKSWSSDYHDVVLELDVFLRT

SEQ ID NO: 4671 - protein, 148 aa, Zea mays
  VARIANT 3..148: note = Derived polymorphism lacks residues 3 to 148
  VARIANT 120: note = Ancestral polymorphism is A, Derived polymorphism is T
  VARIANT 121: note = Ancestral polymorphism is A, Derived polymorphism is V
MELAVGASAATLKSLLSKLGSLLAEQYTLIRGVRGDIQFIADELASMQAFLSNLSKCKKSHDDQTEDWIKQIRDISYDIEDCIDGFAHSLRPDPRGSGWLTAVRKTLYEIRTCCTRRNITVQITDLKNRAEHIGKRRLRMFMYVLTEF

SEQ ID NO: 4672 - protein, 245 aa, Zea mays
  VARIANT 213: note = Ancestral polymorphism is S, Derived polymorphism is L
  VARIANT 227..245: note = Derived polymorphism lacks residues 227 to 245
MASTKAPGPGEKHHSIDAQLHQLVPGKVSEDDKLIEYDALLVDRFLNILQDLHGPSLREFVQECYEVSADYEGKGDTTKLGELGAKLTGLAPADAILVASSILHMLNLANVAEEVQIAHRPVADPTQILSGGPNMNGGLNEVLLINKPFRNSKLKKGGFADEGSATTESDIEETLKRLVSEVGKSPEEVFEALKNQTVDLVFTAHPTQSARRLLQQKNARIRNCLTQLNAKDITDDDKQELDEAL

SEQ ID NO: 4673 - protein, 650 aa, Zea mays
  VARIANT 245..650: note = Derived polymorphism lacks residues 245 to 650
MASPLCISVLLLIMSTSTAAIAVAPSSRSGRPSKRNGSSTDLAALLAFKAQLSDPAGVLGGNWTATTSFCKWVGVSCGGRWRQRVAAIELPGVPLQGSLSPHLGNLSFLSVLNLTNASLAGAIPSDIGRLRRLKVLDLGHNALSSGIPATIGNLTRLQLLHLQFNLLSGPIPAELRRLRELRAMKIQRNYLAGSIPSDLFNNTPLLTHLNMGNNSLSGPIPRCIGSLPLQYLILQVNNLSGLVPQSIFNMSSLRVLSLAINALSGALAMPGGPSNTSFSLPAVEFFSVARNRFSGPIPSELAACRHLQRLSLSENSFQGVVPAWLGELTAVQVICLYENHLDAAPIPSALSNLTMLLDIILKQMDRMDLSANRLVGSLPDSLGQLQMMTYLNLSLDSFHGPIPPSFEKLISMKTLDLSHNNISGAIPKYLANLTVLTSLNLSFNELRGQIPEAGVFSNITRRSLEGNPGLCGDARLGFPPCLTEPPAHQSYAHILKYLLPAVVVVITFVGAVASCLCVMRNKKRHQAGNSAATDDDMANHQLVSYHELARATKNFSDANLLGSGSFGKVFKGQLSNGLVVAVKVIRMHMEQAAARFDAECCVLRMARHRNMIRILNTCSNLDFRALVLQYMPNGSLEELLRSDGGMRLGF

SEQ ID NO: 4674 - protein, 225 aa, Zea mays
  VARIANT 154: note = Ancestral polymorphism is P, Derived polymorphism is L
MPARALASTATMPVPLHPPPPPPRRNIIANTLAVLEAMAAHNVRTLIYSSTCATYGEPDKMPSLKELPSIILVISQSWMHWKALLKGKQYSNMACSYLAFLFVCVVSCMFYTKSLYAHNLCILTSISAQKSLYASKQTFGIVVHIGFNTTSVVPGVPMFYMGDEYGHTKGENNNTYCHDHYVNYFRWDRKEEQSFDLYRFCCLMTKFRKECESLGLEDFPTSERL

SEQ ID NO: 4675 - protein, 1765 aa, Zea mays
  VARIANT 493..1765: note = Derived polymorphism lacks residues 493 to 1765
  VARIANT 5: note = Ancestral polymorphism is E, Derived polymorphism is K
MNGMKAAAGAVVTEATGAFGPVLAKLTALLTPDQDGDDVEDSIMSQLERVQSLLLRIWERQDLEAACEDWMAEARKVSYDIQDDIDGFELGLEHHGGGSSSATKSLLERIKAKVKGLMLDSQSGYKECCRAIGELSSATALLVDHRSRFFHKDASELVGTMEEKKAEVTKLLQEHEVVCIHGSAGMGKTTLADLAYQAMSIGDDGLKCRAFVSVSPSATMVQMLKTILSQLSRRHHLLYGGSNETSSDETADDKRIVSEVARHADTDIAKEQYLIESISNLLVNKRYLVVVDDVWHWEQWEIIRKSLPKNNLGSRIITCTRVEAVAMKFMMESDACLYEMAGLSMDAAAALSRRIFEDGSVRATSELHNSWSASIAKMSGGMPLAVICMSLAVARAQLTPEEAVERLTNIPCLRPLVESLSLGYHGLPLHLKTCLLHCSMYPPQHILDRDGLARMWIAEGFVYEEEEARSYVDQLFKMGLIRRCSSALVPSPKFQIDAMMLYFLRCRSQETFYYLGCGRRRNGAGRRVHHRLSIISAQKNGPAGGTSTLPHVDVVSNNNTRSLYVFDRSWRVPFNEFERLRVLHLHCSSRNADLVDICGLVWLRCLSLSGSPITMLPKQIGRLQLLRTLDVSSTGILCVPGEIGALQQLEILDVSDTMVQKLPAEIGQLRRLKALYARNSSLRELHTSQIRELQLLETLDVSNTVLAEGGGLMMLIGDDENLKVVDAAGGGGMLMMAEGGGSTATVATGALGPVLAKLRKNAADDDGGRYLGDIEFIISELESLHSFLTRMWESSEGGGIDENAACQSWMAEARELSYHIEDDIDRFMLDLEHGGDRTTTTAPFRRIKLRIKGLVDRYQEEWRMAADCRIKAPQLGPPSRYYSRKDASELLEIDDKETEVKELLQEHELLCIFGFAGMGKTTLANQVYQAIGKQFECQAFMSISPRMDASQILTTFYAQVTAQQREIIAASDSLSDQQFMIDSISKFLFNKRCLIIVNDVWHWEQWEVIRKSLPKNNLGSRIITSTCVHAVAMRFVEDNGVFLYKIAGLSMDASVSLCERIFKESCKDGGTVVSSGLCSSIAKMAGGMPLAVICLSSAVAAQAQLATEEDVGRVHDPPDWFRMAEARALAGLTNIPCLKPLADSLCLAYNQLSVHLKTCLLHCSSLCPPYHIFGTDDLVRLWIAERFVYDEGDARSYVDQLVSTGMISVQSCSSDLLIGPKKVQMNTMMLHFLRCIASHEGYCIASSDCGSGMSSLLVGPIRRLSIQSCKNKVEISRLHASDIRSLYVFDRTWTTLFKNLTNLRVLQLLGNNLRNEDLTAICGLPHLTYLNLSGTLVNLLPEELGRLKLLKTLIVRGTGILRLPVGIGELMQLETLDLGDTMVVELPSQIVKLHNLRTLDLRNSSLCELPNEIGDLLLLETLDVGDTMVAELPSQIGKLQRLRALGISGTGIEKLPAEIGELEHLEILDVSCTTVAELPLPTAGGSMAMLQQLNICNTEIRELPWESGRRSVRVLCGDSDAPHVCNLADLSEGLLQPSVVVVLFDRFGSIWVPVPFPRIKVPGKHRSVPQFVASICYLEISLWKLEEDSLKSLREMPNLRGLALRVDVLPTKPAISILGFRKLESLCIDCRVPRITFEKEAMPELTYLEFKFYACRPTTEHNMGIANLQRLQRVVFRSASWYTSDPSAGIHAVINRVREEAREHPNTIILSVNGNVESYHEKKAAAAAAQGIKPSLSGDVSRRSDSRARTIRRIKTYAGESSAYN

SEQ ID NO: 4676 - protein, 504 aa, Zea mays
  VARIANT 214: note = Ancestral polymorphism is R, Derived polymorphism is M
MEAVAEFQLANWTPVDYASIDIPGGACGLQAYDYDVQLQHHLAEYYSAASQHNSNIVAKAAKISSNDDSDDASTSRSEVRKVVDRFKADMEMMKEKMHRYPACLGAVDKSYTVPRIVAIGPYHCGMEHLKKAEEVKQVAAWQCTGTGKLLKEMYEELIPVADAAYDLYDKDAIQGVAEDDFRHMMFFDACFLVQFMLSRAGSSKIDKSLQVYLRHNRYDIFHDIMLLENQLPWMVVEAVMRFMPQPSTIPKSFVHRMRRCMMPYDHREPPEPKPFIWYEDYNPPHLLGLLRYYIVGRRCECDIDDDEEEKPEPKNMSFSASAMDLAEIGITLKANKTMQLIDMHLNRPKAGAVFTELCLAPLSLDRDRASYLVNMAAHELCAVESFGGAKEEDSAVCSYVLLLANLVYREEEVQELRERGIIQRGGGLTNEEALCFFTNFQNLRMGPRYYRIMQDIAIYRENSLIKTKIHGFLHNHKKAIAAVVTGIGAVGGIIGALLSIKKSI

SEQ ID NO: 4677 - protein, 107 aa, Zea mays
  VARIANT 91: note = Ancestral polymorphism is K, Derived polymorphism is E
MLLEVFTGKKPTDAMFVGELSLRHWVHQAFPEGLVQVVDARILLDDASAATSSLKGFLVAVMEPGLLCSADSPDQRTTMKDVVVTLKKVREDYIKTIAMSTSATHEQ

SEQ ID NO: 4678 - protein, 285 aa, Zea mays
  VARIANT 11: note = Ancestral polymorphism is G, Derived polymorphism is R
  VARIANT 43..285: note = Derived polymorphism lacks residues 43 to 285
MLTYSLDIVRGFQEEELPSIFNCMKTTIQLSKTGNAAIIVDPSSMQIVAKATDQTHKHDTPEGNTVSEANADVTCSLNESMGNGSNLSLPGSFLPKCDSLNMEISCINPWGWMKKKTCERKPLPCDGCFAWHPLRHAPMVAIENAAERDRTMFPSLASITKTDSNGNLEKYCDNEQAKRLKTDTKVKFKHQDNEPSASESFCGDLSETSRPYLCTGFDIYLVWEPCTMCAMALVHHRFKRVFYAFPNPVTGALGGVYMLHGERSLNHHYNVFRVSVPEAYSNGLN

SEQ ID NO: 4679 - protein, 638 aa, Zea mays
  VARIANT 82..638: note = Derived polymorphism lacks residues 82 to 638
MRHHRMTASAHRIGRFALLAALFSPLSAAVQGQRIPFPSASVPKSGRPAAGTSQQSQASILTEEAERRKRESGGSAAVLQKQPTGCPSADRSVYKWLARRAAAASREGQEEEKCRRPLLPTGTAQGIAASPCRHPPQLKMLNRIATVKDDGTVVVDVPSGLEPTIVGGTEDIYTEAVEEALDGTEILYRPPMQIVILIVGTRGDVQPFVAIGKCLQDYGHRVRLATHANFKEFVLTAGLEFFPLGGDPKILAEYMVKNKGFLPSGPSEIPIQRKQMKEIIFSLLPACKEPDPDTGIPFNVDAIIANPPAYGHTHVAEALKVPIHIFFTMPWTPTNEFPHPLSRVKQPAGYRLSYQIVDSMIWLGIRDMINEFRKKKLKLRPVTYLSGSQGSGNDIPHGYIWSPHLVPKPKDWGPKIDVVGFCFLDLASNYVPPEPLVEWLEAGDKPIYVGFGSLPVQDPQKMTEIIVKALEITGQRGIINKGWGGLGTLSEPKDFVYLLDNCPHDWLFLHCKAVVHHGGAGTTAAGLKAACPTTIVPFFGDQPFWGDRVHARGLGPPPIPVDQFGLQKLVDAITFMMKPEVKDKAVELAKAMESEDGVTGAVRAFLRHLPSKAEEQSLPQSSGFLEFLGPLSKCLGCS

SEQ ID NO: 4680 - protein, 456 aa, Zea mays
  VARIANT 305: note = Ancestral polymorphism is V, Derived polymorphism is A
MGLLPTDRMDSLFSPRCQWVNGPIIVGAGPSGLAVAACLREQGVPYVMLERADCIASLWQRRTYDRLKLHLPKQFCELPRMPFPDHYPEYPTRRQFIDYLEDYAARFEIRPEFSTTVVLARYDETSGLWRVTTSAPANGGDVEYIGRWLVVATGENAEAVVPDIPGLGGFHGKVTHVSDYKSGEAYAGKRVLVVGCGNSGMEVSLDLSDHGARPAMVVRDAVHVLPREVLGKSTFQLAVLLRRWLPLWLVDKIMVILAWLVLGNLAKLGLRRPAAGPLELKETHGRTPVLDTGALARIRAGDIAVVPAVTRFGKGGQVELADGRTLDFDAVILATGYRSNVPQWLEQQRFLQQGRIPQDGLPSRVEGSIWALRRGFHPAWSLGRLHRRRAHCQGPRQRLEGGDQAHEEGRRLPQALHLRRLLIRPTSMTTTNEANLITEAHTNRHTDRYTCSFMVF

SEQ ID NO: 4681 - protein, 1174 aa, Zea mays
  VARIANT 895: note = Ancestral polymorphism is R, Derived polymorphism is L
MEATALSLGKAVLGGALSYAKSKAAEEVALQLGVEDDVTFITDELQMMQSFLMTADEERSQTKVVTTWVTQVRDLAYNVEDSLMDFGIDVGKKPIWGCIPRSSCDRRRIAKEVKKLRSKVEDVSNRNLRYRLIKDGSRSKPAGAAEQTTASDGVERQKPKADLLQLVTSKEVDLRVVAVCGTTGDRGKTAAIHEVYDHPSVASKYGLRAWVRLIHPFNPEEFLRSMVRQFLENFHDKPQGGEEATNVGATVLLKMDKMNQSDLVHTFTTQLSSNSYLIVIDDLCTVEEWQRIRRFFPDNKKESRIIVSTQQVEVISEIQEEYQPPKSTGNSFSTSTTGKKFDRMRTMTLNDDVLVGRKTEKSEVIDLIGQPSDKLCKVISVWGMGGLGKTTLVRSIYRSQQLDDWNWKRAWVTATRPFDNEVLIRTLASQLLHDSNTANMKLDVLRKKIDQLLLNENYLIVLDDLSSIEEWNLVRDQWAKAKRIIVTTREYSVAKYCSGGDMNTHKLQVLQEEDALALFLKKVFNNHTENTNLGTDMLDQAALIIKKCHGLPLAISAIGGFLANKPKTATEWRKVNDRIRAELDMNPELRSIKTVLMRSYDGLPYHLKSAFLYMSIFPEDYKIKRKRLIRRWIAEGYCRGMHGMSAEEVGDRYFEELLDRSMILLLEEDTKYGGAIDSCQLHDIIREICILKAREENLAFTLEEGCCLSDAQGTIRHLAIGSNWKRDKDVLVESMLDLSHVRSLTVFGEWKPFFISDKMRFLRVLDLGDTFGLRDRHLDQIGQLLHLKIASFPSAITKLQKLEQLLASGADDGFAYDYRHDSSSKSCLIPDFENHLIYDPRSVSHDAMPRIVQDAFLLWHSEMSDGSRRVREYVPMRKNNCCTSLLYHIRMGLLRFIFGLSICYFCWRPEAMGAGFNRRDVFNFNMISTLNMILFGGVKAPRGIRKLKALHTLGVVDVSRSKTALKELEELTQLRKLAVAGVHSKYSNKFWSVISANKQLRSLSVKGLGLDSCFGGDLLPPIHLESLKLEGKLVRINEWIHKLQNLSKLQLYNTKIDSADPMQAIGQLPNLTMLTLCHGSFMDNSELLFHGPSSFPELMVLKLKDVDCEIVSFKEQAMPKLELIHADFQGGICGLAFLASLKEIRLGTRTRDTLKKDLQKQLTGDLERVSLKLL

SEQ ID NO: 4682 - protein, 119 aa, Zea mays
  VARIANT 82: note = Ancestral polymorphism is R, Derived polymorphism is W
  VARIANT 81..119: note = Derived polymorphism lacks residues 81 to 119
  VARIANT 80..119: note = Derived polymorphism lacks residues 80 to 119
  VARIANT 64..119: note = Derived polymorphism lacks residues 64 to 119
  VARIANT 44: note = Ancestral polymorphism is G, Derived polymorphism is V
  VARIANT 35: note = Ancestral polymorphism is G, Derived polymorphism is S
  VARIANT 29: note = Ancestral polymorphism is V, Derived polymorphism is M
  VARIANT 17: note = Ancestral polymorphism is P, Derived polymorphism is A
MAVSSKDCVGTHEYLAAELVSGSGHGNGVDWWAFGVFLYELVYVRTPFKGHTKEVTLKNILSKQATYPQLDGEADASQSQLRDLVGRLLERDPRHRMGATRGATKIKRHPFFTGINHMH

SEQ ID NO: 4683 - protein, 375 aa, Zea mays
  VARIANT 1: note = Ancestral polymorphism is M, Derived polymorphism is I
MENKELFKMGNAHTDTAALHKEWDDVLCPICMDHPHNAVLLLCSSHDKGCRSYICDTSYRHSNCLDRFKKMKVNDEDSPSQPSSSMPRGTGNQNVVQRSRFGLTRESPRLHIDISVPDETSDHQDASHRPAAIVGEQEENIYNEGPDLTLETHEVGINGSSVSSDVSSLNQLLCPLCRGAVSGWKIIKEARQYLDGKSRACSREACMFSGNYREIRRHARRVHPTTRPADVDPSRRRAWHHLEHQRDYADIVSAIRSAMPGAVVLGDYAIEGGEIFSHDRETSEPSGSLLTTFFLFHMLSSSPIRSGDEPRGTSRGLRRQRRRYLWGENLLGLQYDDDDDDDDNEGEEDEVDAVDEVQRPRSRRRFIRSRSEERA

SEQ ID NO: 4684 - protein, 1469 aa, Zea mays
  VARIANT 534..1469: note = Derived polymorphism lacks residues 534 to 1469
  VARIANT 523..1469: note = Derived polymorphism lacks residues 523 to 1469
MMPESHPHPHAGAVLASTSSRRSLSLGSSISQSFRQMDTEDPFARSQSEHEHRDDEENLRWAALEKLPTYDRMRQGILRRALDQQQESGGGGVEIVDIHKLAAGDGGRALLERLFQDDSERFLRRLRDRIDMVGIELPTVEVRYEQLTVEADVITAGRALPTLWNAATNFLQGLIGRFGSSNKRNITILKNVNGILKPSRMTLLLGPPSSGKSTLMRALAGKLDKNLKVSGSITYCGHPISEFYPERTSAYVGQYDLHNAEMTVRETLDFSRRCLGIGARYEMITELARRERDAGIKPDPEIDAFMKATAVQGQETNIITDLTLKVLGLDICADVIIGDEMIRGISGGQKKRVTTGEMLTGPATALFMDEISTGLDSSSTFQIVKFMRHLVHVMNETVMISLLQPPPETYNLFDDIILLSEGYIVYHGPRENILEFFESVGFRCPDRKGVADFLQEVTSKKDQQQYWYLDQEQYHYVSVPDFAERFKSFHACQQMQKELQIPFEKSKTHPAALTTKKYGLSSWESLKAVMSREQLLMKRNSFIYIFKVTVLIILAFVSMTVFLRTKMPHGQIADGTKFFGALTFGLITIMFNGFAELQLTIKKLPVFYKHRDFLFFPAWTFGVANILLKVPISLVESVVWVVLTYYVMGFAPAAGRFFRQFIAFFATHQMAMALFRFLGAVLKTMVVANTFGMFVLLIIFIFGGFVIRRNDIKPWWIWGYWASPMMYSQNAISINEFLASRWAIPNNDTTIDAPTVGKAILKSKGLFTEEWGFWLSIGALIGFIILFNSLYLWALTYLSPSSGSNALVSEGEDDVNEIALKERSRDARSEDEISQVVYGDLGANTCTNGATNTLVQSRVTLPFQPLSLCFNHVNYYVDMPAEMKEQGFTESRLQLLSDISGAFRPGVLTALVGVSGAGKTTLMDVLAGRKTSGAIEGDITLSGYPKKQETFARISGYCEQTDIHSPNVTVFESITYSAWLRLSSDIDDGTKKMFVEEVMALVELDVLCDALVGLPGVSGLSTEQRKRLTIAVELVANPSIIFMDEPTSGLDARAAAIVMRTVRNTVNTGRTVVCTIHQPSIDIFESFDELLLLKRGGQVIYAGELGRHSHKLVEYFEAIPGVQKITEGYNPATWALEVSSPLSEARLNMNFAEIYANSVLYRKNQELIKELSVPSPDYQDLSFPTKYSQNFYNQCAANFWKQYRSYWKNPPYNAMRYLMTFLFGLVFGTVFWQKGKNIDSQQDLYNLLGATYAATFFLGASNSITVQPVVSIERAVFYREKAAGMYSPLSYAFAQTCVEVIYTILQGILYTVIIYATIGYDWKADKFLYFLFFMTACFNYFGLFGMMLVACTPSALLANILITFALPLWNLFAGFLIVRPAIPIWWRWYYWANPVSWTIYGVVASQFGENQGELSVPGGKPVVVKQFLKDNLGIQHDLLGYVVLVHFAYIIAFFFVFGYSIKFFNFQKR

SEQ ID NO: 4685 - protein, 69 aa, Zea mays
  VARIANT 2: note = Ancestral polymorphism is P, Derived polymorphism is L
MPACKKFRLAALENEDLEIMFNGVSCTNAYAMAPGAKEGLPANDSDDVEEVSPSVEDKQARKRDGFHLK

SEQ ID NO: 4686 - protein, 168 aa, Zea mays
  VARIANT 16: note = Ancestral polymorphism is V, Derived polymorphism is L
  VARIANT 105: note = Ancestral polymorphism is A, Derived polymorphism is T
  VARIANT 111: note = Ancestral polymorphism is P, Derived polymorphism is S
  VARIANT 116: note = Ancestral polymorphism is P, Derived polymorphism is R
MEASSRRRVSLVPLLLVIIGCCACRAQIPIPARTDGFVYGGKPPAWGETVVVEAFLDPVCPDSRDAWPALKKVVEHYSSRVSIVVHLFPLPYHSYAFIACRSIHAVNKLNPSFVYRLLEKFFKDQNGCARGVTGTPYFFVNGIPINDSGSPLEYKDWISILGPLVGKM

SEQ ID NO: 4687 - protein, 262 aa, Zea mays
  VARIANT 2: note = Ancestral polymorphism is K, Derived polymorphism is I
MKAATGSSSVSRALALLLAACLLWKEAACFSASGLNKAFATFYGGSDASGTMGGACGYGNLYSTGYGTDTAALSTALFNDGASCGQCYRISCDYQADPRFCIRGTSVTITATNLCPPNYALPNDDGGWCNPPRQHFDMAEPAWLKIGIYRGGIVPVNYQRVPCVKKGGVRFSINGRDYFELVLISNVGGCGSIQSASIKGSRTGWMAMSRNWGVNWQSNAYLNGQSLSFQVTSSDGQTKTFPDVAPASWGFGQTFATSQQFS

SEQ ID NO: 4688 - protein, 242 aa, Zea mays
  VARIANT 98: note = Ancestral polymorphism is S, Derived polymorphism is C
  VARIANT 50..242: note = Derived polymorphism lacks residues 50 to 242
MGFISFVGRVLFASLFLLSAYQEYVSPLLPRLARTPLRSHLVLVSSARRQIEAAPFPLGRLSVGCFRLDLALVARVRTCSIEILPLRASHIRIPELVSVYTCIFMYSRFIEFGNDGGPAAKTLKPKFNLFVKLVSKNTGLGVPHIDIKTVIAATMFLKGFGGLLFIVSSSFGAFLLLIYLAFITPIVYDFYNHEMESTLFVDLFFKFIQNLAFMGALLFFLGMKNSIPKRRSKGRTTKTKTN

SEQ ID NO: 4689 - protein, 234 aa, Zea mays
  VARIANT 50..234: note = Derived polymorphism lacks residues 50 to 234
  VARIANT 58..234: note = Derived polymorphism lacks residues 58 to 234
  VARIANT 122: note = Ancestral polymorphism is R, Derived polymorphism is H
  VARIANT 125..234: note = Derived polymorphism lacks residues 125 to 234
  VARIANT 133..234: note = Derived polymorphism lacks residues 133 to 234
  VARIANT 154..234: note = Derived polymorphism lacks residues 154 to 234
MKKEYTWFMEFKNATTGLGWIEAKQTVDCSKDWWDEHLARCNNPDKGIKCNHVRFRKQGPKHLDDLHMLFDKIHVSGTSASCPGDISSDDSSDDVLEIERTPENDEVKVAVSKRSKPVKRKRKASCTAAEEKEEKSPFFRLYKNTCLKIETAAEKISTSVEASSTHPTSQVPSIAETMKMVKDCGVKEKTALMHTTTFLIVKPEFREVFCMLETNEGRFDLLEREHAKEMMRHM

SEQ ID NO: 4690 - protein, 188 aa, Zea mays
  VARIANT 47: note = Ancestral polymorphism is K, Derived polymorphism is N
MRPGSTSRPSPRRCLYVYGSASALPKLLLLLLAASSSAQAQQAARMKTDPVEAAAVNAVFAKLRQTASSEWNISGDPCTGIATDGTVIEDNGNFNPGIKCECSDQNNITVCHVTKLKIYALNAVGPIPQELQNLTRLINLDLSKNYLTGSLPSFLGNLTAMQYMTLGTNALSGSVPKELGNLVNLVSL

SEQ ID NO: 4691 - protein, 193 aa, Zea mays
  VARIANT 174: note = Ancestral polymorphism is A, Derived polymorphism is V
  VARIANT 75: note = Ancestral polymorphism is Q, Derived polymorphism is L
  VARIANT 36: note = Ancestral polymorphism is G, Derived polymorphism is A
  VARIANT 32: note = Ancestral polymorphism is A, Derived polymorphism is D
MARLRLLLLAAVLALTAGTCRSFEFQEATLDAIHLGFKNGSLTSMALVQHYLGQISRLNPLLHAVIEVNPDALRQAARADAERRSSGDGRVGGLHGVPVLLKDNIGTRDVLNTTAGSLALLGSVVRRDAGVVTRLRRAGAVVLGKANMDEWANFRSAIGTGGWSARGGQGKVSAVVGFPLSLNCLLSPTDLAA

SEQ ID NO: 4692 - protein, 383 aa, Zea mays
  VARIANT 24..383: note = Derived polymorphism lacks residues 24 to 383
  VARIANT 85..383: note = Derived polymorphism lacks residues 85 to 383
  VARIANT 110..383: note = Derived polymorphism lacks residues 110 to 383
  VARIANT 145..383: note = Derived polymorphism lacks residues 145 to 383
MTCHPDHCLCKADIKLWLFSKKKWSRSLDVEDSKVKVFWDLADARFSVEPEPVEGFYVVVVFYLELALLLDDMKKDAYRKTRASQLTMNAPFMARREHIYGKKIHSAKAQFCDNGQFNHISIECDTVSVKDLCLKIRVDKKPMMQVKRLAWKDDEFDESSSRLDPLKFDDRKSITLRRSKLVKWFMEPFFDDLIFECFMWLGIGKTEYGTLSYRMCIVSDSPPKEEEFMEWLQKEDRNGACIPTQQEVLGKKEAIQEAYNFEYSAATVQQMLRDKSVVRHPINIVAEKDRLRSELSMALSRRNEAKAERMRVKQKNLQRRPQPESKDNKVANLESMNWKNRADNFKNALELKLVNISLKAGESGYDPFLRRWTRSRNYYASKP

SEQ ID NO: 4693 - protein, 575 aa, Zea mays
  VARIANT 36: note = Ancestral polymorphism is G, Derived polymorphism is E
  VARIANT 255..575: note = Derived polymorphism lacks residues 255 to 575
MYQRDDANLGAASYYVTGAQTWGVSNVGKFTEAVYESYIISSSRQFYNTLDPELFQTARMSASSLRYYGIGLQNGNYTVALQFADFDFEDSQTWQSVGRRIFDIYLQGERKEKNFDIMKAAGGKSYTAVEKQYIVPVTRNFLEIHLFWAGKGTCCIPFRGYYGPAISAFSVTPNFNPTVQTSRKTGIIVGVVVGAAVLGVLALAGLCMRRQKRRKLLLEQQELYSIVGRPNVFTYGELRTSTENFSSNNLLGEGGYGSVYKGKLAEGRVVAVKQLSETSHQGKQQFAAEIGTISRVQHRNLVKLYGCCLEGNKPLLVYEYLENGSLDKALFGSGRLNLDWPTRFEICLGIARGIAYLHEESSIRIVHRDIKASNILLDANFNPKISDFGLAKLYDDKKTHVSTKVAGTFGYLAPEYAMRGHMTEKVDVFAFGMVILETLAGRPNFDNMLDEIKVYILEWVWQLYEDKHPLDMVDPKLEEFNSGEVIRAIHVALLCTQGSPHQRPSMSRAVSMLAGDVEVGEVVNKPSYITEWQIKGGNTSSFMSNNVSGQSSMAPRSSASHTSSPFLNSVIEEGW

SEQ ID NO: 4694 - protein, 106 aa, Zea mays
  VARIANT 69: note = Ancestral polymorphism is T, Derived polymorphism is P
  VARIANT 49: note = Ancestral polymorphism is P, Derived polymorphism is L
MAEENHVVAGAGQKLYWSRQTRATAVQRLRFAAHCCLHALTCTLPLYEPENQTLWEENQFLKMVSKRMTRLLFDEIANVRERLFDFLVNEMIDIGGSCRVEGASYN

SEQ ID NO: 4695 - protein, 535 aa, Zea mays
  VARIANT 28: note = Ancestral polymorphism is G, Derived polymorphism is D
MAHDHKVLDALDAAKTQWYHFTAVVVAGMGFFTDAYDLFSISLVTKLLGRIYYSDPSSKTPGSLPPNVSAAVNGVAFCGTLAGQLFFGWLGDKMGRKKVYGMTLMLMAICCLASGLSFGSTPKDVMVTLCFFRFWLGVGIGGDYPLSATIMSEYANKRTRGAFIAAVFAMQGFGNLAGGIVAIAVSAAFKSRFDAPAYKDDPAGSTVPQADYVWRIVLMFGAVPALLTYYWRMKMPETARYTALVAKNAKQATSDMARVLDVDLAEERQKPVEELERRREEFGLFSRQFAKRHGLHLLGTTVCWFTLDIAFYSQNLFQKDMYAAVNWLPRADTMNALEEMFRISRAQTLVALCGTIPGYWFTVFFIDIVGRFAIQLGGFFFMTAFMLGLAIPYHHWTTPGHHVGFVVMYALTFFFANFGPNSTTFIVPAEIFPARLRSTCHGISSAAGKCGAIVGSFGFLYAAQSTDPTKTDSGYPPGIGVRNSLFMLTGCNVIGFLFTFLVPESKGKSLEELSGENDEEAAPQQQQTVPTDLSE

SEQ ID NO: 4696 - protein, 487 aa, Zea mays
  VARIANT 19: note = Ancestral polymorphism is L, Derived polymorphism is H
MGFFTDAYDFFAVSLVMDLISYLYFEEQIRRGVKAIIYGIALCGAVPGQLVFGWLGDKMGRKRVYGVTLVLMVVTSLASGLSLSFGTNDNEAANVVAVLCFFRFWLGFSIGGDYPLSATIMSEYANKRRRGAFIAAVFAMQGFGNLAAGFVVVVVSLQLKTNPRRNANFVWRIVLMLGAVPAIFTYYWRMKMPETARYTALVAKDARKAASEMSSVLNMEIGQEDEAVRELVRQDEYGLFSVQFLRCHGTHLLATSVCWLAVDITFYSLNLYMKDIFVDVGLIDPPEKSDLFKRMTVSTLLHMAIAFGGTLPGYFFTVAFVDRIGRVRIQLLGFTMMAALTASLAATYDPYWKQQKTKRRKIGFAVLYGLTNFFTNFGPNTTTFIVPAEIFPTRMRATCHGIAGAFGKIGAIIGVFGFMFTMEEHHVAPRALWALFASNLVGLVFTFLLPDSKGKSLEEMTGETEEQQLQQDAAVVAAADHIHLVPI

SEQ ID NO: 4697 - protein, 526 aa, Zea mays
  VARIANT 216: note = Ancestral polymorphism is G, Derived polymorphism is W
  VARIANT 222: note = Ancestral polymorphism is G, Derived polymorphism is S
  VARIANT 264: note = Ancestral polymorphism is T, Derived polymorphism is I
  VARIANT 281: note = Ancestral polymorphism is A, Derived polymorphism is V
  VARIANT 286: note = Ancestral polymorphism is S, Derived polymorphism is L
  VARIANT 297: note = Ancestral polymorphism is P, Derived polymorphism is L
  VARIANT 320: note = Ancestral polymorphism is P, Derived polymorphism is H
  VARIANT 369..526: note = Derived polymorphism lacks residues 369 to 526
MTSLPERGESPVPPLDSLRQDSAVTVLAAAAVASSSAGSDRKEDSGSRQPKASILSGVFSPPFAIFEGQQQGSSSPACDARSTKSSSGSYGLSRILRRFVGSGSMWRLLGCGRVLTSSDVWFLGKCYKVSPEEEESGDSESDSGHAAFLEDFSSRIWITYRKGFDAISDSKLTSDVNWGCMVRSSQMLVAQALIFHHLGRSWRKPPEKPYNPDYIGVLHLFGDSEACAFSIHNLLQAGRNYGLAAGSWLGPYAMCRAWQTLIRTNREQADAVDGKENFPMALYVVSGDEDGERGGAPVVCIDVAAQLCSDFNKGPSTWSPILLLVPLVLGLDKINPRYIPLLKETFMFPQSLGILGGKPGTSTYIAGVQDDRALYLDPHEVQMVNLHTFYIYLACICIYFINLYSNGINTGMFSMCQTVDIALDNLEADTSSYHCSVVRALALEQIDPSLAIGFYCRDKDDFDDFCSRASELAEKANGAPLFTVVQSIEPSKQMYKQDDGLGCSGSSMANDDDLDGSGEAEEWQIL

SEQ ID NO: 4698 - protein, 588 aa, Zea mays
  VARIANT 54: note = Ancestral polymorphism is A, Derived polymorphism is V
MRPSDGRTQLSGFAQSDESTLDVEGHCYHQQSFPSSPSMQPIASGCTHTENSAAYFLWPTSNLQHCAAEGRANYFANLSKGLLPKSGRLPKGQQANSLLDLMTIRAFHSKVLRCFSLGTAVGFRIRKGALTDIPAILCFVARKVHKKWLNPDQCLPAIVEGPGGIWCDVDVVEFSYYGAPAQNPKVQMFTELVDKLCGSDECIGSGSQVASQDTFGTLGAIVKRRTGNKQIGFLTNRHVAVDLDYPNQKMYHPLPPNLGPGVYLGAVERATSFITDDVWYGIYAGTNPETFVRADGAFIPFAHDFDISTVTTTVRGVGDIGDVKVIDLQSPLNSLIGRQVCKIGRSSGHTTGTVVAYALEYNDEKGISFFTDLLVVGENRQTFDLEGDSGSLIILTGQDNEKPCPIGIIWGGTANRGRLKLRCDHGPENWTSGVDLGRLLDRLELDLIITNESLKEFILDKDAVQQQRLALVAAANSAVGESSTAAVPAPEEKVEIFEPLGIKIEQLPRHDVSATTEGDEAAVINVEERQFISNFVGMSPVRDDQDAPRQIANLNNPSEEELAMSLHLGDREAKRLRTDTESELDLEK

SEQ ID NO: 4699 - protein, 509 aa, Zea mays
  VARIANT 374..509: note = Derived polymorphism lacks residues 374 to 509
MALGQQLRVLHALDVARTQLYHFMATAIAGMGFFTDAYDFFAISLVMDLISYLYYEEQIDRGVKATINGIALCGAVPGQLVFGWLGDKMGRKRIYGVTLLLMVVTSLASGLYFGTNEASNVVAVLCFFRFWLGFGIGGDYPLSATIMSEYANKRRRGAFIAAVFAMQGFGNLAAGIVAVVVSASFLRTNPRRNANFVWRIVLMLGAVPAILTYYWRMKMPETARYTALVAKDARKAASDMSSVLHVEISPEDEAVRQDQYGLFSPQFLRYHGTHLLATSACWLAVDITFYSLNLYMKDIFVDVGLIDPPGKNHLFMRMTVTTLLHTGIALCGTLPGYFFTVAFVDRIGRVRIQLLGFTMMSVLTAILAATYAYWKRQETIQRKMGFAVLYGLTNFFANFGPNTTTFIVPAEIFPARMRATCHGIAGAFGKIGAIIGVFGFMSNMEEHGVVPRKLWALFSSNLVGLVFTFLLPDSKGKSLEEMAGETEEQQQQQDAAVVAAADHINLVPI

SEQ ID NO: 4700 - protein, 81 aa, Zea mays
  VARIANT 64: note = Ancestral polymorphism is N, Derived polymorphism is S
  VARIANT 44: note = Ancestral polymorphism is V, Derived polymorphism is I
MIFFFCALQGTKMVYKHLATLYFVFVFDSSENELAMLDLVQVFIETLDRCFKNVCELDIVFNFNKVPYVHMILLFYPFIIE

SEQ ID NO: 4701 - protein, 450 aa, Zea mays
  VARIANT 4: note = Ancestral polymorphism is C, Derived polymorphism is F
  VARIANT 9: note = Ancestral polymorphism is Q, Derived polymorphism is H
  VARIANT 12: note = Ancestral polymorphism is L, Derived polymorphism is P
MTLCTVLLQILLPTLLLVSAITGADASGIGVNYGTRGTTLPAPADVARFLARDTIFDRVRLLDADPVLLRAFAGTGLAVDVTVPNGVVPHLLNLTFARRWVRDNVTPYAGATNISRLLVGDEVTTEANRTLLLALVPAMQNLHTALVAASLHGRVKVSTTHSLGVLTTTEQPSAARFRDGYDAAIVRPLLRFLRATGAPFMVNAYPFYALANDSSLDFALFRVNDGVMDQGTGLVYGNMLDAQLDAVHSAVRRMGFGDVDIAVSETGWPSAGEDWEVGVGADLARDYNSNAIRHLGSGVGTPLMPNRTFEVSIFSLFDENLKPGPVSERNFGLFRGDMTPVYDVGIFTDPETLEPVRAKVTSRKWCVPEPAADEMVLQENIDFACGQKGVDCTAIRPGGVCYEPDTVQAHAAYAMNLYFQANGQHAFDCDFGQTGIVTTADPSYGGCKFM

SEQ ID NO: 4702 - protein, 371 aa, Zea mays
  VARIANT 338..371: note = Derived polymorphism lacks residues 338 to 371
  VARIANT 289: note = Ancestral polymorphism is G, Derived polymorphism is R
  VARIANT 168..371: note = Derived polymorphism lacks residues 168 to 371
  VARIANT 167..371: note = Derived polymorphism lacks residues 167 to 371
  VARIANT 72..371: note = Derived polymorphism lacks residues 72 to 371
MDARAPPPPQPHPSRAPSPQPHLSRAPSPQPPPAPSRRYGVHFSASSFIQAPLTALLEYSGILRPDPGCGIQQPGTGAGPGEVSIRIVAPGEAGTSSERAEEVIVEEEEEDGQATRTRPEDSSPAAGGGEGGRETSSSYQRYDIQQVARWVEQILPFSLLLLVVFIRQHLQGFFVTIWIAAVMFKSNDILCKQTALKRERKIPVLVGITILFVVHVSGFYWCYKNEDLIRPLMMLPPKEIPPFWHAIFIILVNDTMGQMLTIVEYFLLLYRALLPTPMWYRFFLNKEYGSLFSSLTTGLYLTFKLTSVVEKTIQNERILYHVFPLYLTMAVTYMFAFWGNGCNFPIGKGWCVAAKERTSCFCARKKDAKDL

SEQ ID NO: 4703 - protein, 86 aa, Zea mays
  VARIANT 36: note = Ancestral polymorphism is M, Derived polymorphism is I
MQMKIKVFVIIGIIITINSCSCISKKIEGDGMYNDMHGKEGRKLINTDGRTAPAGDSIDHVCPLGSYPCRSLIYSSHDTTQDPGGH

SEQ ID NO: 4704 - protein, 336 aa, Zea mays
  VARIANT 295..336: note = Derived polymorphism lacks residues 295 to 336
  VARIANT 277..336: note = Derived polymorphism lacks residues 277 to 336
  VARIANT 166..336: note = Derived polymorphism lacks residues 166 to 336
  VARIANT 138: note = Ancestral polymorphism is L, Derived polymorphism is Q
  VARIANT 132: note = Ancestral polymorphism is V, Derived polymorphism is M
  VARIANT 102: note = Ancestral polymorphism is M, Derived polymorphism is I
  VARIANT 101: note = Ancestral polymorphism is A, Derived polymorphism is T
  VARIANT 96: note = Ancestral polymorphism is G, Derived polymorphism is R
  VARIANT 93: note = Ancestral polymorphism is V, Derived polymorphism is M
  VARIANT 90: note = Ancestral polymorphism is A, Derived polymorphism is V
  VARIANT 74: note = Ancestral polymorphism is R, Derived polymorphism is C
  VARIANT 58: note = Ancestral polymorphism is R, Derived polymorphism is H
  VARIANT 55: note = Ancestral polymorphism is A, Derived polymorphism is V
  VARIANT 36: note = Ancestral polymorphism is R, Derived polymorphism is W
  VARIANT 35: note = Ancestral polymorphism is R, Derived polymorphism is C
MPRRFAVAPSFRSYNIVLSTLARADCHADALLLYRRMLRDHVPPTTFTFGVVARALCRLGRAGDALARLRGMARHGCVPDAVLYQIVIHALVVQGRVAEATMLLDEMLLMGCAADVNTFNDLVLRLCGLRRVREAARLVDRMMTQGCMPSAMTYGFLLQGLCRTRQADEACTLLGRLPEVNVVMLNTVICGCLMEGKLARVTKLYEMMGSKGCPSDVHTYSILMHGLCKLGRFGSGVRMLDKMEENSCAPNIMTYSTLLHSFCRNGMWDDARAMLDQMLAKGFSMNSQGYNGIIYALCKDGKLDQATRLVQEMKSQGCKPDICTYNTMIYHLCNND

SEQ ID NO: 4705 - protein, 82 aa, Zea mays
  VARIANT 69..82: note = Derived polymorphism lacks residues 69 to 82
MKGIVPQFLCILLIATTSSSSTALARKLAENQRGLQAGQVQAEPAINVDGRPSTGYGDHVCPRNMFPNCNRLDQASSNNNLG

SEQ ID NO: 4706 - protein, 74 aa, Zea mays
  VARIANT 57: note = Ancestral polymorphism is S, Derived polymorphism is F
MESSRMFQPAIILLLLLIVTTDVAQAARECEKDSERFLGACMASDNCANVCRGEGFSGGRCSTFRRRCICTKPC

SEQ ID NO: 4707 - protein, 74 aa, Zea mays
  VARIANT 31..74: note = Derived polymorphism lacks residues 31 to 74
  VARIANT 35..74: note = Derived polymorphism lacks residues 35 to 74
  VARIANT 36: note = Ancestral polymorphism is S, Derived polymorphism is P
  VARIANT 38..74: note = Derived polymorphism lacks residues 38 to 74
  VARIANT 44: note = Ancestral polymorphism is W, Derived polymorphism is C
MMGSTAYAYSAAPTSGSLGRRCSLQTTNACCKSKESESSKALDWWNLYKVRGNRRYSVAMCRVYACLFVRLGIS

SEQ ID NO: 4708 - protein, 1843 aa, Zea mays
  VARIANT 737..1843: note = Derived polymorphism lacks residues 737 to 1843
  VARIANT 650..1843: note = Derived polymorphism lacks residues 650 to 1843
  VARIANT 591..1843: note = Derived polymorphism lacks residues 591 to 1843
  VARIANT 181..1843: note = Derived polymorphism lacks residues 181 to 1843
MEVEQAAEVSAPETADLNVPAKTPAHDDDKEKVPNGNTNLQVKETHNDEDDGTGSDGFELIDVKENFDSAKVGEEIAASRSTTVDTSPVTEQSETQEEKITAPEEQSVAANTRHVESSMLNQQTEQLEKLTRRIEELESEKDKLVKDLTEAENKQSMHYSSLQEAQSSLSMKDKELAEATESLKELGSELETSKKRVQEIEAELDSSADKLRKLEELKDERSLHAAQEAKRASELDKMLELAQSNMKEMEKHISSLQEEVKGHQDKATDHQQIEESLRNTISELKVVQEALELSKSQVADLEQKLASQDADISKLTEELNLHCSSEESLKENNLKLQTELTTALEELQLKLLSLQEMETKLDEQSKDRQTSEAALEKQNEQLLILQAGLDNLKDENESLQGSLADLNSKLSEKDFMLHQAEDELAKAQLVLSEALSQKEELEVNLNSLSEQHGESKAFGENASQKIIELEAQIQAMRAAEEALNLELKEAEASVKAAEKKGSDLEQQLSEIESKLVASSEEIELLKERIQQEAAVSAERGMQLEETMTSAEGYKEKINELQSSLDSSMSKNQLLEQEVKELTDKCSEHQEQAHSVQQRSLELEDLLHTSKTHAEGAYSRTQELEQELNSTYEKLKGVEEELEQYRSKASQLSDDLEAYQTKAASLEAVVEAASEKEKELMESLSQITEEKKKIEELTAEYEAKLEESLKEKQSLEENLKEKQSLEESLQQELVKLREENEHHQNNIADLNLQLSTNNDMHSQLETQLKEINDDHSKTRALLFETQSHKEELELNLRSLNDLHTASKTAAESSMQKISEFETHIQELTASEQSLKLQLSELESKLTSAEKTSIDLEQELKAATGECSSCHVKIDELSEELEAYKHKSTSLETSLAEAKELEAELSEKLAQVNEEKEKFEELSKKTTIRHLEAEKQVQILQDELESVRGKMQEVENDLQSLGIRESSVLDKLKSAEEQLEHKGRALEHATSKTLDLEALYQSLLEDTETKLQQSADSLTQKETECQQLSEKLKLAEEEAASYQSRATAATEEVEAMKVELEAFESEISTHEATIEELKIKVSDSESKAQQALAELAMLTGTNETLKEELDAKLAMLHEVQEQLNSTHVEKEEVAAKLAEHERTVEHLTEVHSRGIELQSAAESRNAEIEAQLREALEAAGQKEAELRNLNEKLVALESEIESLTDVNQALKQEIDAKLVMVDELQEKCSSINSEKEEVAEKLSIHERKLEHLTEEHSRGLELRSVVESRNEEIESQLREVLEKVAQKEAEVTGLTEKLALLEAENEKLTGVNETLKDEVDAKLAMFDELQERFSSTHAEKEEVAEKLAVHERTISHLTEEHTRTLELHSVAESKNGEIEAQLREALETIAQKEGEAKELCKKLDALEIELGYYEEQATEAAAAEENHKVKFDEASQKIKILEEQLAETQSKLEHFLIEKESLTQTNSTLNEELELHQNKLNDLQLALAAAVAEKEEASEEIHSLHKTLDGMIEHKAELEIQVSSTIQEHEELKSKYQNTMEEKQTLSDKYETTKKELEDAIAKLEEEMNVDKSEKESHISKLERQITLSEIKYMEEIKTMQVETTEKNEALTAKMQEHTDLQHEKDELEQQLLEVRKELDGAYHTIANQEEQASVREIKWDAFRKYSEDRLEAEQQRAEELELQVAALKQQLQEAEIHYKQKEEQVSLREVQWEADQNHSLDELNAQRQYATDLEKQIEDLTQKLTSADAHYKQKVTEERDKLAEVTKELSELKQKAVDTVESRSREFSLDSSTSSGKQQDKTQAVSPNPTLQGVQEPSGIMAFKFILGVALLSVLIGVFLGKRY

SEQ ID NO: 4709 - protein, 73 aa, Zea mays
  VARIANT 25: note = Ancestral polymorphism is Q, Derived polymorphism is E
  VARIANT 17: note = Ancestral polymorphism is L, Derived polymorphism is V
MESSRRFQPAVILLLLLIVSTDMAQARECEKYSERFVGACMIADNCANVCRGEGFLAGRCSTFRRRCICTRQC

SEQ ID NO: 4710 - protein, 131 aa, Zea mays
  VARIANT 55: note = Ancestral polymorphism is R, Derived polymorphism is T
MDAGMRPPSIGIGFGGGDWALENNMAKEYAILIVLISMVLVVSCNVVDGSAADMRHATLPRKGLKEDIKLAINGVNSPVSSISGQASSNSETGTDNDMSSATAFTSKVTTTQGSHRGYEIHGFQGSKISPP

SEQ ID NO: 4711 - protein, 202 aa, Zea mays
  VARIANT 44..202: note = Derived polymorphism lacks residues 44 to 202
  VARIANT 52..202: note = Derived polymorphism lacks residues 52 to 202
  VARIANT 94..202: note = Derived polymorphism lacks residues 94 to 202
MSDGFVFPPSEHENLPIEPEHENLPIEPEHDESNTNSLEKESRCAGNNDDDWCHVSPEEIDGVSNENLADNSDLPTASEATVPDSHPTEINAKREKDHTTCKADHTCERWWKKKTTYLFHHIKGVTTLCSVVAAGAVVGFVVMGQRWQQDHWHLHQFKFSVSGESMNRVIGAFSRLKDGLPGSEQLRSLLLTRVLPKQPLSA

SEQ ID NO: 4712 - protein, 169 aa, Zea mays
  VARIANT 63: note = Ancestral polymorphism is V, Derived polymorphism is M
  VARIANT 61: note = Ancestral polymorphism is V, Derived polymorphism is F
  VARIANT 37: note = Ancestral polymorphism is C, Derived polymorphism is Y
MHKKSEPIGQDAPTNRFSSMLASRGSQSAVSALRMLCFSKEEVDALVEHMNGDMRVRFVGVPVALNKLLCTFISSVFPGVAFGTYFAIYSRNGIEGIIKAYGGTMYKLQRSIFIAEAKCSDDFVFSIVFSVIGLACTYIEMIYGIASAIFVIFMTSFLIDVCDMNDGSF

SEQ ID NO: 4713 - protein, 160 aa, Zea mays
  VARIANT 115: note = Ancestral polymorphism is K, Derived polymorphism is N
  VARIANT 109: note = Ancestral polymorphism is R, Derived polymorphism is S
  VARIANT 99: note = Ancestral polymorphism is P, Derived polymorphism is L
  VARIANT 96..160: note = Derived polymorphism lacks residues 96 to 160
  VARIANT 67: note = Ancestral polymorphism is E, Derived polymorphism is K
MDLMATETGANRLLSYSSSGPWELWPDVSNYVLQVLSRGRRARGDGHDHDPALLMYFLDSGGGSYTEVVSSAQVRWFHTQSQFLNPDGRILELIFWHIPSTAYAKIEKRLDKLNNSKTKDTQVKVKEQAEKSGLEKIQQALMEGEPTRSVDLSEHEKEAI

SEQ ID NO: 4714 - protein, 75 aa, Zea mays
  VARIANT 43: note = Ancestral polymorphism is R, Derived polymorphism is W
  VARIANT 35: note = Ancestral polymorphism is P, Derived polymorphism is S
  VARIANT 31: note = Ancestral polymorphism is R, Derived polymorphism is W
  VARIANT 26: note = Ancestral polymorphism is K, Derived polymorphism is E
  VARIANT 24: note = Ancestral polymorphism is G, Derived polymorphism is D
  VARIANT 14: note = Ancestral polymorphism is T, Derived polymorphism is I
MDTVYHHHHVSPLTGNGAATATVGEKLGVERFELPLFYISLSWKEKEDDFLAMKGTKLPSELRKGPRTWTRPSKY

SEQ ID NO: 4715 - protein, 775 aa, Zea mays
  VARIANT 219..775: note = Derived polymorphism lacks residues 219 to 775
MAPFGDGGWGGDGGEALLGRDPLRSGSAPPTMEAGAEAAVAAERVFGSVGGGASFFSGIDGRGLGARMDEVTMRHGAAGVQEHFGNSASLSVRPHGQQFNGTGDLDEQQFGLSRVHSGGVMANYSASDMGPLWTDMNPDNVDYCRNIQNRSMSNIGKMNAYGNRDLSASYMFDSNLLDALSGLRLSNSLVMDQWNHGEGQLDEILECQRDFSKIGDENRSPLVGNVFRASRSDVHPLPIYGHGISQRQTSALDGSNVSRFSRHHIKGVDHLSLAAERVAAMQSGNLRRGTNLSRNAYMTNMVNPMSNRYYSNTDLDLVSSRRAFLDDLLAQQYLQEDNLSYDDSRIYHGEPRFSSSRMQRPGSHFYPNSRNILSHGDRQSRFFSLNRKAMGRNIGSQVYHDNALANYLDVPSLDNADRNGADSVELIDVVGHVKEVSMDQYGSRFIQQKLEIASPDDREKIFPEILSNVIVLTTDVFGNYVIQKFFEFATESQLIQLADQLKGRILELSLQMYGCRVVQKVLEVVGMDQKVDIVHELKNYILKCIGDQNGNHVIQKCIECVPEDRIPFVIDPILSQILVLCTHQYGCRVIQRVLEHCHDPVTQSAIMNEIMQQTFHLTDDKFGNYVVQHVLEHGKPEERSVIIQKLSGQVVTLSKQKFASNVIEKCLEFGTPEERDSLIGEIISSGQTFQELMKDQFGNYVVQKVLETCDDKYLEMILSSIKLHLNELKNYTYGKHIVARVEKLIVTGENRARMASMSGQHQQQQPNNCTAVDEH

SEQ ID NO: 4716 - protein, 570 aa, Zea mays
  VARIANT 244..570: note = Derived polymorphism lacks residues 244 to 570
MRNSVSERSFLIESDDDDDAAVEDGKRRGLGGGGGGDDDDDGSDSSSPCDSPRVVAARCSQPSSYTQQWPQSYRQSIDMYSSVHSPNLSFLGTPSLSRLSNSFLTNSFRGKPPEIISSLIKPLLPTSIASASDDQQQQQHEDVRKSSHYLPPSRKASSLQRIPEDQRPMVGGHEVGPYRQCSYTQGVMNGVNVLCGVGILSTPYAVKQGGWLGLVILAVLGALAWYTGILLRRCLDSKDGLETYPDIGHAAFGTAGRIIISIILYMELYACCIEYLILESDNLSKLFPNAHLTMGNLTLDSHMLFAILTALVVMPTTWLRDLSCLSFISAGGVIASIVIVSCLFWVGLVDHVGTVESEGTALNLPGIPIAIGLYGYCYSGHGVFPNIYSSLKKSNQFPAVLFTCIALSTVLFAAAAIMGYIMFGESTESQFTLNLPPNLVASKIAVWTTVTNPITKYALTMTPLALSLEELLPPNKQTYPNIMMLRSALVVSSLIIALSVPFFGLVMSLVGSFLTMFVAYILPCACFLSILRSKVTWYQVVLCVFIIVVGLCCVGVGTYSSLSKIIQKYQ

SEQ ID NO: 4717 - protein, 108 aa, Zea mays
  VARIANT 57: note = Ancestral polymorphism is A, Derived polymorphism is T
MLPFDSFLPSKPSTSDTATDHSSDSDFATTNSNEDTAILGMTGDGAFAISFADCFTASASAALFVEKRMVHGSKSMAVPEQGIPPNVVEDGEPFRHTSVGTYRGADVL

SEQ ID NO: 4718 - protein, 297 aa, Zea mays
  VARIANT 240: note = Ancestral polymorphism is L, Derived polymorphism is V
  VARIANT 77: note = Ancestral polymorphism is A, Derived polymorphism is G
MESPFRADVVKDKAALVTGGGSGICFEIAAQLARHGAQVAIMGRRREVLDKAVAALRSQGLRAVGFDGDVRNQEDAARVLAATVAHFGKLDILVNGAAGNFLASPEDLTPKGFRTVLEIDTLGTYTMCYEALKYLKKGGPGKGPSTGGLIINISATLHYSASWYQIHVSAAKAGVDSITRSLALEWGTDYDIRVNGIAPGPIQDTPGLRKLAPEEMSKGLREMMPLFKFGEKRDIAMAALYLASDAGKYVNGTTLVVDGGLWLSHPRHIPKEEVRELSKVVEKKVRASGVGVTSSKL

SEQ ID NO: 4719 - protein, 372 aa, Zea mays
  VARIANT 290..372: note = Derived polymorphism lacks residues 290 to 372
MAHLISSAIAGAGNLVADGISGVTGVASQVVEGVEDTLGSIVEAIDQGVKDEDQLDLPKYVCFKGDNGLYLSARTVEGHPYLQFASEDIGDPSVRFITYNHKVNGKRVVRFKSNHLGKFWRRSPNWIWADTDDTSTKNSDTLFEVIKIDEDGVYALRNLGNNHFCHRLTYDGKESCLNATIPTIRKEAHIKIEEAVLSRKISNIEYHLKGAKIFDKKAKTLITREAVNGTSTDSKTTITLKYSVIKGKLWDSSKSMKLGVTTTIEAGVPVVLPATIEVQSEFNSTYSWGESIIEKEEYSNAYEVVVPAYSVVTVSVLATQGICQVPFSYTQEDVLTTGERKVFKFDDGIFRGVNSFGFKSEVTERKLSKDDD

SEQ ID NO: 4720 - protein, 595 aa, Zea mays
  VARIANT 233..595: note = Derived polymorphism lacks residues 233 to 595
  VARIANT 245..595: note = Derived polymorphism lacks residues 245 to 595
  VARIANT 255..595: note = Derived polymorphism lacks residues 255 to 595
  VARIANT 442: note = Ancestral polymorphism is G, Derived polymorphism is V
MPLHLHLLSSPATAAKLAAGLRAAPLRRCHSLAPAPRHTDRVALASSLSAVARSAGPAVAAAQTKPSVSGKKQVLISLSDKTDLAYLGNGLQGLGYSIVSTGGTASSLEAAGVSVTKVEEITHFPEMLDGRVKTLHPSIHGGILARRDQEHHLKALKDHGIGTFDVVVVNLYPFYDKVTSGNISFEDGIENIDIGGPTMIRAAAKNHKDVLIVVDHNDYPALLEYLKGKRDDQQFPRMLAWKAMQHVASYDSAVSEWLWKQSNKGEMFPPSFTVPLELKSTLRYGENPHQSAAFYADKSLSLVGAGGIATAIQHHGKEMSYNNYLDADAAWNCVSEFDSPTCVVVKHTNPCGVASRKDILEAYRLAVRGDAVSAFGGIVAFNTTIDEDLAKEIREFRSPTDGETRMFYEIVVAPGYTEKGLEVLRGKSKALRILEAKRSGKGMLSLRQVSGGWLAQESDDLTPEEITFTTKSERSPQENELADAKFAWLCAKHVKSNAIVIAKNNCMLGMGSGQPNRRESVRIAFRKAGEEAKGAALASDAFFPFAWNDAVEEACQNGIGIIAQPGGSKKDEDAVACCNKYGVSLVLTGVRHFKH

SEQ ID NO: 4721 - protein, 329 aa, Zea mays
  VARIANT 219..329: note = Derived polymorphism lacks residues 219 to 329
  VARIANT 233..329: note = Derived polymorphism lacks residues 233 to 329
  VARIANT 238..329: note = Derived polymorphism lacks residues 238 to 329
  VARIANT 278: note = Ancestral polymorphism is S, Derived polymorphism is F
MNGLISAIILLRGCIIDIELGHEPIRELKCCSGKRENKRIWTYYEDEELIKALYEISFDPKWKSEGGFKNGYCYVLENELKARLPGCGLSAIPHIESRVRHFRTKYGAIEVMLAKSGFNWDDNRKMVQCEKHQYEAHCKDNPDAKGLYGVAFPYFDTLAAIYGKDIATGEGAEGLGEAITNMEKEIAMGEDCPVVEEDMISMDTPQRSMDNRNSDHSTSSSSKRRKKHKDSMSSDPFLDLASGIRGDLNKASQHFGRMAEVMEMEAKKDQMQELQEKSVVELTRLGFGGSELLKAATIFVKVHNQMTMLFTLPETLRREFILNMIADNN

SEQ ID NO: 4722 - protein, 176 aa, Zea mays
  VARIANT 156: note = Ancestral polymorphism is G, Derived polymorphism is S
  VARIANT 154: note = Ancestral polymorphism is S, Derived polymorphism is R
  VARIANT 105: note = Ancestral polymorphism is G, Derived polymorphism is R
  VARIANT 101: note = Ancestral polymorphism is V, Derived polymorphism is I
  VARIANT 99: note = Ancestral polymorphism is A, Derived polymorphism is V
  VARIANT 91: note = Ancestral polymorphism is A, Derived polymorphism is E
  VARIANT 72: note = Ancestral polymorphism is F, Derived polymorphism is I
  VARIANT 70: note = Ancestral polymorphism is V, Derived polymorphism is I
  VARIANT 69: note = Ancestral polymorphism is A, Derived polymorphism is V
  VARIANT 62: note = Ancestral polymorphism is T, Derived polymorphism is M
  VARIANT 39: note = Ancestral polymorphism is T, Derived polymorphism is M
  VARIANT 37: note = Ancestral polymorphism is E, Derived polymorphism is K
  VARIANT 34..176: note = Derived polymorphism lacks residues 34 to 176
MDRRMETSTASNMPQGISLMQLISLHWQLLSTFWRPECTVGGDDGQQVTVHDPEVRDPLPLTIHHMPIAVTFAYFGEGNIVVLDPTYKEEAVMGGRMTAIVNSNGDVCAIQKAGGEGLMSSVTMQCLRIAPVKVADITSKIKKAVSNPLRLMTRRGAHVLIWFPTKFKSKHAYDVK

SEQ ID NO: 4723 - protein, 493 aa, Zea mays
  VARIANT 180: note = Ancestral polymorphism is W, Derived polymorphism is C
  VARIANT 259: note = Ancestral polymorphism is A, Derived polymorphism is V
  VARIANT 329: note = Ancestral polymorphism is A, Derived polymorphism is S
  VARIANT 353: note = Ancestral polymorphism is M, Derived polymorphism is T
MKEEMMVGLSAPEPVGRWGAAPPQAMLERMKDYGQEGAFALWDDLSPEDQELLVRDIESLDLSRIDRIIRRSLGSQGIPLPAVEPVPESSVSKVEGRSAEDKERWWKKGLKAISEGKLAVVLLAGGQGTRLGSSDPKGCFNIGLPSGKSLFQLQAERILCVQKLAAQSSESPSNTVPIHWYIMTSPFTDAATAKFFETRRYFGLDPDQVTFFQQGTLPCVSADGRFIMETPYRVAKAPDGNGGVYAALKSKKLMEDMAARGVKYVDCYGVDNALVRVADPTFLGYFIDKGASSAAKVVRKAYPQENVGVFVQRGRGGPLSVVEYSEMDAAMATEMNQSTGRLRYCWSNICLHMFTLDFLNQVANSLEKDSVYHLAEKKIPSIHGFTTGLKLEQFIFDAFTYSPSTALFEVMREEEFAPVKNASGATYDTPDSAKLMLLRLHSRWVVAAGGFLTHSVPLYMTGVEVSPLSSYAGENLEAICRGRTFHAPSEISF

SEQ ID NO: 4724 - protein, 343 aa, Zea mays
  VARIANT 148: note = Ancestral polymorphism is C, Derived polymorphism is R
  VARIANT 87: note = Ancestral polymorphism is V, Derived polymorphism is E
  VARIANT 86: note = Ancestral polymorphism is G, Derived polymorphism is S
  VARIANT 5: note = Ancestral polymorphism is R, Derived polymorphism is G
MVSSRAFLLLLAILTGCACSFPSPVLAARELSDDAAMAERHERWMAVYGRVYKDAAEKARRFEVFKDNLAFVESFNADKKNKFWLGVNQFADLTTEEFKANKGFKPISAEEVPTTGFKYENLSVSALPTAVDWRTKGAVTPIKNQGQCGCCWAFSAVAAMEGIVKLSTDNLVSLSEQELVDCDTHSMDEGCEGGWMDSAFEFVIKNGGLATESSYPYKAVDGKCKGGSKSAATIKGHEDVPPNNEAALMKAVASQPVSVAVDASDRTFMLYSGGVMTGSCGTQLDHGIAAIGYGVESDGTKYWILKNSWGTTWGEKRFLRMEKDISDKQGMCGLAMKPSYPTE

SEQ ID NO: 4725 - protein, 170 aa, Zea mays
  VARIANT 10: note = Ancestral polymorphism is P, Derived polymorphism is R
  VARIANT 81: note = Ancestral polymorphism is C, Derived polymorphism is Y
  VARIANT 86: note = Ancestral polymorphism is C, Derived polymorphism is Y
  VARIANT 87: note = Ancestral polymorphism is W, Derived polymorphism is R
  VARIANT 88: note = Ancestral polymorphism is S, Derived polymorphism is N
  VARIANT 102: note = Ancestral polymorphism is T, Derived polymorphism is M
  VARIANT 127: note = Ancestral polymorphism is K, Derived polymorphism is R
MSGPRMGTQPDGSHLLGRSKEITHRVGGLEKAYLAAKSLLQAAKICNNMAMAISMLGVSEAFALGQNLGIKATTVTDIFNCSSARCWSRDHDGKVIPEEVATAIVYLKDTIGKEAVQEIIINLSKDRDWFIHDTYMFLQCCICPIFLYFSKCSLYAHLQYSEGKILVEIL

SEQ ID NO: 4726 - protein, 159 aa, Zea mays; identical to SEQ ID NO: 3762
  VARIANT 7..159: note = Derived polymorphism lacks residues 7 to 159

SEQ ID NO: 4727 - protein, 544 aa, Zea mays
  VARIANT 183: note = Ancestral polymorphism is G, Derived polymorphism is V
MTSAGVNVPGDDGVGNPAAASGSASAPECRTMQRRRRRLEPQGSGDAAAGPSWVRRLRPAASRFSPSPSQGSADRPNDEEQEEDDPDVQEMELVPLPPAGPQELQPADVPAQVWPVAFGSLSMAGRMRMMEDTISLHPDLCTWADGSPVHFFAVFDGHGGSHVSALCRDRMHEFVAEELGKEGAAFLRRRQEWLAWGDGAGAETSAAAFVRGPRGAWPEREEEERAWRSALRRSFRRADAMAALACACGRVARPSCRCPLSSVVSGIVGSTAVVALLVRGRLVVANCGDSRAVLCRGPAGTPPVPLSSDHKVFEADSWLASGGGLFVLADVQRPDVSGNGGQVRAVRSAPAGSIEASSSSSSTGTKAGHAVAVPWIASNFRGGSRRAIAVAERTRGGDAGGSEPNRPDERARIEAAGGLVVFNNGHRVRGILAMSRALGDRLLRPEVIAEPEITVTERTAEDECMILATDGMWDVIANDVACNVARHCLEDGNPPPAATAAAATAGREEEPRCVRATSLLARLAIGRETLDNVSIIVVDLKHRE

SEQ ID NO: 4728 - protein, 326 aa, Zea mays
  VARIANT 176: note = Ancestral polymorphism is E, Derived polymorphism is K
  VARIANT 188: note = Ancestral polymorphism is P, Derived polymorphism is A
  VARIANT 197: note = Ancestral polymorphism is G, Derived polymorphism is D
  VARIANT 298: note = Ancestral polymorphism is W, Derived polymorphism is C
MANIPHSFAGASPPSPSPMAGSSSGPAPGQAAKDKKMASAEQLVLELCDPELRENALLELSKVASTAKREIFQDLAPLLWHSFGTIAALLQEIISIYPSLSPPTLSPGASNRVCNALALLQCVASHPETRILFLNAHIPLYLYPFLNTTSKTRPFEYLRLTSLGVIGALVKVDDTEVISFLLQTEIIPLCLRTMEMGSELSKTVATFIVQKILLDDVGLRYICATAERFFAVGSVLANMVVSLADQPSTRLLKHIIRCYLRLSDNPRACAALQSCLPDMLKDGTFNNCLRDDPATRRWLQQLLHNVTGGGMGGAPQPGMDPMNMGM

SEQ ID NO: 4729 - protein, 496 aa, Zea mays
  VARIANT 194: note = Ancestral polymorphism is G, Derived polymorphism is S
MEPAAGRRARCLLLPLLVGALALALAGAATATAWPHPHGGAAGLGHGAGAAAAGAGRPGGAERWYRDLALRRMESVRSSFGARRDLATASASARVYHVTDYGADPTGAADATAAISKAIADAFRPPTNATMTGGIPDLGGAEVHLDGGTYLIKGPLTLPASGGGNFKIHSGSLRASDDFPTDRYLIELSAAKSGRSYDYEYATLRDLMLDCSYRGGGVAVVDSLRVAVDNCYVAHFASDGVAVRGGHETLIRNTYLGQHMTAGGDPGERGFTGTAIRLDGNDNSVSDVVIFSAATGIMVTAPANSISGVHCYNKATGFGGTGIHLKIPGLTQAWISNCYMDYTSIVAEDPVLLHVSGSFFLGDANVVLKAVSGVARGVQVVGNIFSGRDKGVDIVQLDGAFATVDQVYVQQNSATGMTVRSTSARASLEGNGTSWTLDFSPVLLFPDRIGHVQYSLVAGDEFPGHTLRNVSGNQVVVATDKAVSATVHVLVDQNSD

SEQ ID NO: 4730 - protein, 107 aa, Zea mays
  VARIANT 9: note = Ancestral polymorphism is A, Derived polymorphism is T
MSGVITKFAVTSMVMWMAPVAIMYGFYYQVFPGVSQMSSSAQTLASGFLAVISVNLVIGFYIFMAMKETPHQEPQPDPTFLEKAKASINQPTSSRVSDDSKGKGKVE

SEQ ID NO: 4731 - protein, 787 aa, Zea mays
  VARIANT 151: note = Ancestral polymorphism is P, Derived polymorphism is R
MLLRVGLARSARLRGGGGGVSLSLAIARHLSFESPPPVPPSRPDPEWTDTVDYLDESGALLSSARGARPAVPGADPTILSGASAHPLPRPAAAARLAALALRHRSGATLSAALSALPSPPDPALLLLAAASLPASDPVPLISLVAWARLQPWFVPSDDLSSLLAARLPPATHSSELLALFDDTLGLSDLATFPKTFNAVVSALATHGLLEPAFYCFKRLRDVSFRGLETPAYNALLSLLLTRGLAFKAFEVLDEMATSGCALDEGTYQLAVPALARAGRIDAARKMFDEMKQREGIGRAPVGVYSVMVDVLAKAGRLDAAMGMYREMVVVGHRVSTAVSTAMVEALVRSGKLDAGMELWEEMRRGGLRPSFGLYTMVVEANARSGRLDMAAKLFGDMEKSGFFPTPATYACLVEMHASAGQVDAAMRLYHSMANSGTRPGLSTFTALLTMLANKSLLDLAAKVLLEMKASGFPIEVTASDLLMIYIKDGSTDLALRWLRFMGSAGIRTNNFIIRQLFESCMKTGLYDSARSLLEAYVAGAAKVDLILYTSILAHLVRCQDESSERTIMDILGTSKHKAHDFMCGLFTGPEQRKQPVLSFVREFFQGIDYDNEESAARYFVNVLLNYLVLMGQMNRARCVWKVAYENKLFAKAIVFDQHIAWSLDVRSLSVGAALVATVHTLHRFRKRMLYYGVVPRRIKLVTGPTLKMVVAQVLASLESPFEVSKVVLRAPGDSVLEWFKKPIVQQFLLNEIPSKADVLMHRLNVMFPSSAPEVRSLSIPRSLGMPR

SEQ ID NO: 4732 - protein, 370 aa, Zea mays
  VARIANT 196: note = Ancestral polymorphism is G, Derived polymorphism is V
MAPVEAEQHRRRALALAAHDASGAVSPIRISRRDTGDDDVAIQILYCGICHSDLHTIKNEWKNANYPVVPGHEIAGLITEVGKNVKRFNVGDKVGVGCMVNTCQSCESCEGGHENYCSKIIFTYNSHDRDGTVTYGGYSDMVVVNERFVIRFPDGMPLDRGAPLLCAGITVYNPMKHHGLNEAGKHIGVVGLGGLGHVAVKFAKAFGMRVTVISTSPGKREEAMETLGADAFVVSGDANQMKAAKGTMDGIMNTASASMSMYAYLALLKPQGKMILLGLPEKPLQISAFSLVTGGKTLAGSCMGSIRDTQEMMDFAAKHGLAADIELIGTEEVNEAMERLAKGEVRYRFVIDIGNTLNAASLGSSPVPAL

SEQ ID NO: 4733 - protein, 145 aa, Zea mays
  VARIANT 107: note = Ancestral polymorphism is C, Derived polymorphism is W
  VARIANT 95: note = Ancestral polymorphism is L, Derived polymorphism is M
  VARIANT 78: note = Ancestral polymorphism is G, Derived polymorphism is D
  VARIANT 57: note = Ancestral polymorphism is T, Derived polymorphism is M
  VARIANT 53: note = Ancestral polymorphism is P, Derived polymorphism is L
  VARIANT 21: note = Ancestral polymorphism is Q, Derived polymorphism is P
MATMNHRIVPLLLVAATLLAQAAACPYCPTPKPPPPPPPSSSSTPCPPPPYSPSPSTPTGKCPVNTLKLLACVDALNGLVHAVIGTKASDTCCPLLSGVADLDAALCLCTTIKAKALSVSLVLPVAISVLVNECGKHVPSSFQCP

SEQ ID NO: 4734 - protein, 307 aa, Zea mays
  VARIANT 14: note = Ancestral polymorphism is R, Derived polymorphism is C
  VARIANT 27: note = Ancestral polymorphism is E, Derived polymorphism is Q
  VARIANT 48..307: note = Derived polymorphism lacks residues 48 to 307
  VARIANT 50: note = Ancestral polymorphism is G, Derived polymorphism is S
  VARIANT 202..307: note = Derived polymorphism lacks residues 202 to 307
  VARIANT 219..307: note = Derived polymorphism lacks residues 219 to 307
MAERHERWMAEYDRVYKDAAEKARRFEVFKDNFAFVESFNADKKNKFWLGVNQFADLTTEEFKANKGFKPISAEEVPTTGFKYENLSVSALPTAVDWRTKGAVTPIKNQGQCGCCWAFSAIAAMEGIVKLSTGNLVSLSEQEPVDCDTHNMDEGCEGGWMDNAFEFVIKNGGLATESSYPYKVVDGKCKGGSKSAATIKGHEDVPPNNEAALMKVVASQPVSVAVDASDRTFMLYSGGVMTGSCGTQLDHGIAAIGYGVESDDTKYWILKNSWGTTWGEKGFLRMEKDISDKRGMCDLAMKPSYPTE

SEQ ID NO: 4735 - protein, 123 aa, Zea mays
  VARIANT 11: note = Ancestral polymorphism is E, Derived polymorphism is K
  VARIANT 40: note = Ancestral polymorphism is A, Derived polymorphism is V
  VARIANT 62: note = Ancestral polymorphism is P, Derived polymorphism is S
  VARIANT 71..123: note = Derived polymorphism lacks residues 71 to 123
  VARIANT 85: note = Ancestral polymorphism is Y, Derived polymorphism is N
MKDRLPNFTAEEADVVRGTIDYVGVNQYTAYYVRDRQPNATSPLSYSSNWHAEFVYKRNGVPIRSRENSDWLYIMPWGLYKAVTYVKEKYGNPTRPQCFMYENSKAQTTAEMNIRPSYSHPCS

SEQ ID NO: 4736 - protein, 469 aa, Zea mays
  VARIANT 36: note = Ancestral polymorphism is N, Derived polymorphism is K
  VARIANT 26: note = Ancestral polymorphism is L, Derived polymorphism is P
MGCTTTSATSSSSSAASGGGAHVLLPPYPGAQGHTNPLLQFGRRLAYHGFRPTLVTSRYVLSTTPPPGEPFRVAAISDGFDGGGAAACPDIAEYYRQLEAVGSETLAELIQTEAAEGRPVRVVVYDPHLPWARWVAQAAGVAAAAFLSQPCSVDVIYGEVWAGRLPLPLPVVDGKELFARGLLDVDLGRDDVPPFAARPDWCPVFLRATVRQFEGLEDADDVLVNSFRDIEPKEADYMSLTWRAKTIGPTLPSLYLDDDRLPLNKAYGFNLFSSSDSCLPWLDKQRPRSVVLVSYGTVSDYDETQLEELGNGLYSSGKPFIWVVRSNEEHKLSDELRDKCKERGLVVSWCPQLEVLAHKATGCFYTHCGWNSTLEAIVNGVPMVAVPHWADQPTISKYMESVWALGVKVRKDENGLVTRDEVERCIKDVMDGDRKDEYRMNATVWMKKAKEAAQYGGSSDKNIVELVMC

SEQ ID NO: 4737 - protein, 802 aa, Zea mays
  VARIANT 414..802: note = Derived polymorphism lacks residues 414 to 802
MPDVMAAALTGFSPRGVIPSRGRASLPGVARAYAERRLVAENTSLPNMHKEQLETIIRNQLRKPQLPPSSYDTAWVSMVPVRGSHQTPRFPQCVEWILQNQQDDGSWGVSQSDSSVSKDVLLSTLACVLALKRWNVGRENIWRGLHFIGRNFSVAMDEQFTSPIGFNFTFPGLLSLGIDMGLEFPVRQIDVCGILHRREMELKRLAVDSSFGRKAYMAFIPEGFGNMLDWDQVMKFQRKNGSLFSTPSTTAVALIHKYNDQALQYLNLLVNEFGSAVPAMYPSRVHCQLSMVDALEKMGISQRFVSEIESILDMAYNCWLQNDEELMMDIATFAMAFRLLRMNGYDVSSDELSHVAGASTFHDSLQGYLNDTKSLLELYKTSKVTLSENDLILDRIGSWSGNLLKDKMCCSRVQKDSIFGEIEYAVNFPLYSTLERLEHKRNIEHFDAWGSLMLTTKSSSFRINQEFLALAVEDFSFSQRVYRDELRHLDSWVKENKLDQLQFARQKLTYCYLSAAATVFSSELSDARISWAKNGVLTTVVDDFFDVGGSKEELENLIALVEKWHGHHAVEFYSEQVKIVFSAIYTTVNHLGAMASAAQGRDLTNHLVEIWLDLLRSMMVEAEWQRCQYVPTVEEYMTNAVVSFALGPIVLPALYFVGQELLEHAVKDEEYDKLFRLVSTCGRLLNDYQSLEREGNQGKLNSVSLLVLHSGGSMSIEAAKKAMQKSIDVSRRDLLRLVLRKESAVPRPCKELFWKMCKILHLFYSQNDGFSSPKEMVSAVNAVINEPLKVQNSTTFLSSSSR

SEQ ID NO: 4738 - protein, 347 aa, Zea mays
  VARIANT 317..347: note = Derived polymorphism lacks residues 317 to 347
  VARIANT 298: note = Ancestral polymorphism is G, Derived polymorphism is E
  VARIANT 151..347: note = Derived polymorphism lacks residues 151 to 347
MGIPKALLLAILGCGVCLCSAAVLAARELGGDDELAMVARHEQWMVQHGRVYKDETDKAHRFLVFKANVKFIESFNAAAAAGNRKFWLGVNQFADLTNDEFRATKTNKGFNPNVVKVPTGFRYQNLSIDALPQTVDWRTKGAVTPIKDQGQCGCCWAFSAVAATEGIVKISTGKLTSLSEQELVDCDVHGEDQGCNGGEMDDAFKFIIKNGGLTTESNYPYTAQDGQCKSGSNGAATIKGYEDVPANDEAALMKAVASQPVSVAVDGGDMTFQFYSGGVMTGSCGTDLDHGIAAIGYGKTSDGTKYWLMKNSWGTTWGENGFLRMEKDIADKKGMCGLAMQPSYPTA

SEQ ID NO: 4739 - protein, 541 aa, Zea mays
  VARIANT 258: note = Ancestral polymorphism is A, Derived polymorphism is V
  VARIANT 455: note = Ancestral polymorphism is M, Derived polymorphism is T
MAKPLNLTPAFLSLMATSCRFSSGGHAHRFASSLPCGRTTPTPRTTSSSTRPAAQVSPDRSKQRDDEAASETTIRQQLQQVDVLENTGISRHFAGEIKCILDRTYRGHLNDTRTLLELHKASTVSISEDESILDSIGLRSSTLLREQMESSGALQNPPLFREVEHALYHPFYATLDRLTHRWNIENFNTTEHQMLDTPYLSSRYTSRDILALGIRDFNSSQLTYQQELQHLKSWVKECRLDQLPFVRQNLAYFLLSAAGCMYSPELSEARTLCAKNGALITVVDDFFDVGGSKEELENLVMLVELWDEHRKIEFYSEHVEIIFSSIYNSVNQYGAKASLLQDRNVTKHLVQIWLDLLKSMMTEVEWRLNKYVPTEEEYMTNASLTFALGPIVLPALYFVGPKIPESIVKDPEYDELFKLMSTCGRLLNDVQSFEREYKEGKLNIVSLLVLHGGSMSISDARRKLQKPIDTCRRDLLRLVLREESVVPRPCKELFWKMCKVCYFFYSRTDGFRSPVERAKEVNAVINEPLKLQENHTHMSVL

SEQ ID NO: 4740 - protein, 567 aa, Zea mays
  VARIANT 401: note = Ancestral polymorphism is P, Derived polymorphism is L
MVAEPLVHKVLSMATSSSSSSKKARPAAASANKGGAAAAGDGRLGILSLEVANAMSRAANLYRSLSDAEAARLLGPLCLGSRAVRALVPGDDARLLALALAEKLDALNRVAAVASRLGRRCTAPPLVGFDHVYADLLAGRSGATGALFAVASASDAASLVRRLDRLAAATAALYAALEALTELEQSARKLPTDEARRALEQRARWRRHDVRRLRDASLWNWTYDKAVLLLARAACAIYARIRLVFGDPMLGLDLLLATPSSESSRQCDQSRRLSGPITANSGPVRSDLSDCGNSGPVSRVDPDMSRPVNLRSGCGASPGKMLMECLSLSSSASWNDGFEDEFLEDSSRISTIRSGMLVPFSSEQGLSTTTTMTTTPPSKSGRITRKAARFGPKSTVTSLAPPSTVGGSALALHYANVVIIIEKLLRYPHLVGEEARDDLYQMLPSSLKAALRRSLKTHAKSVAIYDAFLAHDWREALEKTLAWLAPMAHDTVRWQAERNFEQQQIVMKGNVLLLQTLYFADRETTEAVLCELLVGLNYICRYEQQQNALLDCSSSLDLDDCVEWQVQ

SEQ ID NO: 4741 - protein, 282 aa, Zea mays
  VARIANT 12: note = Ancestral polymorphism is T, Derived polymorphism is M
  VARIANT 97: note = Ancestral polymorphism is P, Derived polymorphism is A
  VARIANT 117: note = Ancestral polymorphism is S, Derived polymorphism is L
  VARIANT 129: note = Ancestral polymorphism is A, Derived polymorphism is V
  VARIANT 138: note = Ancestral polymorphism is R, Derived polymorphism is W
  VARIANT 160..282: note = Derived polymorphism lacks residues 160 to 282
  VARIANT 187..282: note = Derived polymorphism lacks residues 187 to 282
  VARIANT 188: note = Ancestral polymorphism is A, Derived polymorphism is T
  VARIANT 201..282: note = Derived polymorphism lacks residues 201 to 282
  VARIANT 204: note = Ancestral polymorphism is N, Derived polymorphism is H
  VARIANT 210: note = Ancestral polymorphism is A, Derived polymorphism is G
  VARIANT 220: note = Ancestral polymorphism is S, Derived polymorphism is L
  VARIANT 224: note = Ancestral polymorphism is R, Derived polymorphism is C
  VARIANT 226..282: note = Derived polymorphism lacks residues 226 to 282
  VARIANT 241: note = Ancestral polymorphism is V, Derived polymorphism is M
  VARIANT 256: note = Ancestral polymorphism is W, Derived polymorphism is R
MKTMITGLFLSTLSLGFFFSTDIVSAVHAVTTSGGRTPGLTDDLDQGSLHKFYWLLAAISAVDLLAFVAVARGYVYKEKRLAHRRPRPRDPWRRPRPTPPAVILNISCISTFNGVILSSRLVLPIFNDAAYIYEAHVRRYFKISSYVSPSYSEHHCRVLQMTSLDACKSVERFINTHGPDALDRIIRAMLRSPVLAHVCKQSYNHLELGAAISWDDALRSGMRRFQHKYYNLFTCNCHSFVASCLNQIAYNGSLEWNVLNVAALVWFHGRWVDRMSTILATA

SEQ ID NO: 4742 - protein, 590 aa, Zea mays
  VARIANT 31: note = Ancestral polymorphism is G, Derived polymorphism is D
  VARIANT 291..590: note = Derived polymorphism lacks residues 291 to 590
  VARIANT 365..590: note = Derived polymorphism lacks residues 365 to 590
  VARIANT 415..590: note = Derived polymorphism lacks residues 415 to 590
MAMPVKLTPASLSLKAVCCRFSSGGHALRFGSSLPCWRRTPTQRSTSSSTTRPAAEVSSGKSKQHDQEASEATIRQQLQLVDVLENMGISRHFAAEIKCILDRTYRSWLQRHEEIMLDTMTCAMAFRILRLNGYNVSSDELYHVVEASGLHNSLGGYLNDTRTLLELHKASTVSISEDESILDSIGSRSRTLLREQLESGGALRKPSLFKEVEHALDGPFYTTLDRLHHRWNIENFNIIEQHMLETPYLSNQHTSRDILALSIRDFSSSQFTYQQELQHLESWVKECRLDQLQFARQKLAYFYLSAAGTMFSPELSDARTLWAKNGVLTTIVDDFFDVAGSKEELENLVMLVEMWDEHHKVEFYSEQVEIIFSSIYDSVNQLGEKASLVQDRSITKHLVEIWLDLLKSMMTEVEWRLSKYVPTEKEYMINASLTFGLGPIVLPALYFVGPKISESIVKDPEYDELFKLMSTCGRLLNDVQTFEREYNEGKLNSVSLLVLHGGSMSISDAKRKLQKPIDTCRRDLLSLVLREESVVPRPCKELFWKMCKVCYFFYSTTDGFSSQVERAKEVDAVINEPLKLQGSHTLVSDV

SEQ ID NO: 4743 - protein, 118 aa, Zea mays
  VARIANT 98: note = Ancestral polymorphism is H, Derived polymorphism is Y
MAKSLRSKREKRLRTLRREIAEPFYDKKEAAKLTAQAAALAAPPLQVRGPPPSQDAGSSRGASSASAMDVEMSDEGNNRSKTFLKPLGIISKKKVQLHLKIKKDKRKARKKGKFSFKK

SEQ ID NO: 4744 - protein, 395 aa, Zea mays
  VARIANT 155..395: note = Derived polymorphism lacks residues 155 to 395
MVFEQHEEEAVAPGAVHGHRLSTVVPSSVTGEVDYALADADLAFKLHYLRGVYYYRSGDGLATKVLKDPMFPWLDDHFPVAGRVRRAEAEGDGAPRRPYIKCNDCGVRIVEARCDRDMAEWIRDAAPGRIRQLCYDKVLGPELFFSPLLYVQWAQILSGKKPEATVLTPPNQPLQGQSPAAPRSVKQVGPMEDLWLVPAGRDMACYSFHVSDAVLKKLHQQQNGRQDAAAGTFELVSALVWQAVAKIRGDVDTVTVVRADAAARSGKSLANEMKVGYVESAGSSPAKTDVAELAALLAKNVVDETAAVAAFQGDVLVYGGANLTLVDMEQVDLYGLEIKGQRPVYVEYGMDGVGDEGAVLVQPDADGRGRLVTVVLPGDEIDSLRAALGSALHVA

SEQ ID NO: 4745 - protein, 322 aa, Zea mays
  VARIANT 28: note = Ancestral polymorphism is R, Derived polymorphism is C
  VARIANT 34: note = Ancestral polymorphism is A, Derived polymorphism is V
  VARIANT 44..322: note = Derived polymorphism lacks residues 44 to 322
  VARIANT 104..322: note = Derived polymorphism lacks residues 104 to 322
  VARIANT 112: note = Ancestral polymorphism is S, Derived polymorphism is G
  VARIANT 122: note = Ancestral polymorphism is P, Derived polymorphism is L
  VARIANT 134: note = Ancestral polymorphism is G, Derived polymorphism is V
  VARIANT 135..322: note = Derived polymorphism lacks residues 135 to 322
  VARIANT 242: note = Ancestral polymorphism is T, Derived polymorphism is I
MMVPLDPSDKPTSQRCIADGDTVVVYERHDAMRAVAVRAGGVLQNRFGVFRHDDWIGRPFGSKVFGTGCGGGGGKGGGKAGSGFVHLLAPTPELWTLVLSHRTQILYIADISFVVAYLELVPGCVVLESGTGSGSLTTSLARAVAPYGRVHTFDFHEQRAASAREDFEKNGLSSLITVNVRDIQGEGFPEEYCGAADAVFLDLPQPWLAIPSVGLMLKKDGVLCSFSPCIEQVQRACEAMKTCFTDIRTFEILLRTYEVRDVALKSLTSDEAYVGPLPQKRRMPTTPGENTDCPQRTSSILVRPCSSARGHTGYLTFARLCV

SEQ ID NO: 4746 - protein, 762 aa, Zea mays
  VARIANT 422..762: note = Derived polymorphism lacks residues 422 to 762
MPHRRRALNPTLPPPPPAATAFHLGGDEARLPLLADYALLHQPAASAVDAPASSEWSAGSAFTATSDAATTTASSTATAPPGSSQSQLLAAGGRDSDTWVRRAREGYYLQLSLAIRLTSQAFLAGAPPAPDLLFGCSPVVVADHHAAAGDGADDSEAISYRLWVNGCLSWGDKIAHGFYNILGIDPHLWAMCNVAEEGRRLPSLAALRAVGASESSLEVVLVDKGADSVLLDLERRALDLVRSLAVLVSDHMGGALRSEDGDLYLRWKAVSKKLKKRQKCVVVPIGGLSIGFCRHRAILFKVLADFIGLPCRIAQGCKYCSAPHRSSCLVKVDSERRYVREYVVDLVVEPGSISCPDSSINGQLLSTVPSPFKTSSAVGSGNYTTPVAAWNQSTAGERRNMVSSNPQCSVARCRVVENSSAQVARSKEDLVPKCGQITQNGNCNGVSVLQVSMQLKAMDIGAENGNKENVPGADLPKPMSIEPPFAVDWLEISWEELELKERVGAGSFGTVYRADWHGSDVAVKVLTDQDVGEAQLKEFLREIAIMKRVRHPNVVLFMGAVTKCPQLSIVTEYLPRGSLFRLINKAANGEMLDLKRRLRMALDVAKGINYLHCLNPPIVHWDLKTPNMLVDRNWSVKVGDFGLSRFKANTFISSKSVAGTPEWMAPEFLRGEPSNEKCDVYSFGVILWELLTMQQPWSGLGPAQVVGAVAFQNRRLPIPKDTSPELAALVEACWDDDPRQRPSFSSIVDTLKKLLKALLGGS

SEQ ID NO: 4747 - protein, 131 aa, Zea mays
  VARIANT 34: note = Ancestral polymorphism is G, Derived polymorphism is D
MMAMGYFRAPRRLYGRKPAEREHRALLVDEDDQGEAAAAAGAVPKGYFAVYVGAESRRFVVRTSYLSHPAFRELMERAAEEFGFAQAGGLRIPCREEDFQATVAALEQSRRRGGRARGSPAAGPTRWARAS

SEQ ID NO: 4748 - protein, 491 aa, Zea mays
  VARIANT 78..491: note = Derived polymorphism lacks residues 78 to 491
  VARIANT 99: note = Ancestral polymorphism is G, Derived polymorphism is D
  VARIANT 385: note = Ancestral polymorphism is A, Derived polymorphism is S
METKRVAIVGAGVSGLAACKHILERGCRPVVFEASAVTGGVWACVPDSTALQTSRPMYQYSDFPWPDTVTDEFPDHRQVMSYLDAYARRFGVLDCVRFGRRVLGMEYHGVAEDDVAAWEEWGGNGEAFGCAGAGEWHLKVADAEGRLETHKADFVVLCIGRFSGVPNMPTFPPGKGPEAFEGQVMHSMDYAKMATEKTREMIKGKRVTVVGYLKSAIDIAAECAEVNGTDHPCTMVRWLFSKFAESYYAIPMKKFGMVPDHSLFQALATCLVAILPKGFYERLDERSIVLKRSKTFSFSREGVVVDGEVLSSLVKSDVVIYATGFRGDLKIMDMFTSEYFRSVAVGSACTTVPLYRECINPRIPQLAVLGYSESIASLHTSEIQSKWLAHFMDGGFRLPSVAAMQKDVLEWEKWMRRYAGGRYLRWSCIGVLHIWYNDQLCLDMGCDPRRKKSFLEELFGVYGPGDYADLHPAPRKTRSTLCLNKVGIVPS

SEQ ID NO: 4749 - protein, 160 aa, Zea mays
  VARIANT 52: note = Ancestral polymorphism is Q, Derived polymorphism is H
  VARIANT 78..160: note = Derived polymorphism lacks residues 78 to 160
  VARIANT 99: note = Ancestral polymorphism is G, Derived polymorphism is D
  VARIANT 100: note = Ancestral polymorphism is R, Derived polymorphism is C
  VARIANT 102: note = Ancestral polymorphism is V, Derived polymorphism is M
  VARIANT 123..160: note = Derived polymorphism lacks residues 123 to 160
METKRVAIIGAGVSGLAACKHLLERGCRPVVFEAGTVVGGVWARVPDSTALHTPRPMYQYSDFPWPDTVTEVFPDHRQVMSYLDAYARHFGVLDCVRFGRRVLGMEYHGVAEDDVAAWEEWGGNGQAFGCAGAGEWRLKVADAEGRIEVNACITLVASSR

SEQ ID NO: 4750 - protein, 342 aa, Zea mays
  VARIANT 22: note = Ancestral polymorphism is V, Derived polymorphism is I
  VARIANT 42: note = Ancestral polymorphism is T, Derived polymorphism is A
  VARIANT 43: note = Ancestral polymorphism is D, Derived polymorphism is E
  VARIANT 71: note = Ancestral polymorphism is Y, Derived polymorphism is F
  VARIANT 141: note = Ancestral polymorphism is G, Derived polymorphism is R
MDYAKMGTKKAREMIKGKRVTVVGYLKSAVDIAAECAEVNGADHPCTMVVRTKHWIIPDYFAWGVHISLLFLNRFAELLIHKPGEGFLLCLLATLLAPLRWLFSKFAESYYAIPMRKHGMVPDHSLFQALATCLIAIQPKGFYERLEEGSIVLKRSKTFSFCREGVVVEGEVSSSSLVESDVVIYATGFRGDLKIKDMFASEYFRSVAVGSACTTVPLYRECIHPKIPQLAVLGYSESIANLYTSEIRAKWLAHFMDGGFRMPSVAAMQKDVLEWEKCMKRYAGGRYFRRSCIGLLHIWYNDQLCRDMGCDPRRKKGFLEELFGVYGPADYADLHPDRKKDD

SEQ ID NO: 4751 - protein, 164 aa, Zea mays
  VARIANT 158: note = Ancestral polymorphism is S, Derived polymorphism is I
  VARIANT 124: note = Ancestral polymorphism is D, Derived polymorphism is N
  VARIANT 97: note = Ancestral polymorphism is P, Derived polymorphism is S
MQQHSKDTCAASSLSSPSSSSEVKRLFMASIIQSNEGSSAPTRALVVEDIKVDCVILMHMLHKLQCEATAVENGKEAVDLFVEGKTFDIVLSDKDMPVMSGPEAVAKIRAMGATEVRIVGVSADFGGREAFMRAGADVFVPKPVKLETLRSMLELVTSKKNMSG

SEQ ID NO: 4752 - protein, 219 aa, Zea mays
  VARIANT 172..219: note = Derived polymorphism lacks residues 172 to 219
MYGRRASQLLKEIDSSEAGQLVPFNSDVFDQVIRECNEHNSQFQSLIRKMVEQNLDIETTRNEDHYGAAIHHLSLLRNKRCLMAYMYNRAEVIQSFRWKIGPVLPHDIQEKLHFSEKEYFKNHSAAIKSYISEMDIDLTVDMVPPKDPYIQVRVLEDIGEVSLGDHSVSLTKNSLHFLRRTDAEQFISQDGALPSFSPAMLPDALFATMKRRVLYQGAS

SEQ ID NO: 4753 - protein, 256 aa, Zea mays
  VARIANT 16: note = Ancestral polymorphism is K, Derived polymorphism is T
  VARIANT 22: note = Ancestral polymorphism is V, Derived polymorphism is M
  VARIANT 23: note = Ancestral polymorphism is N, Derived polymorphism is K
  VARIANT 33..256: note = Derived polymorphism lacks residues 33 to 256
MGLDFVLSEARKHEIKMILSLVNNYDSFGGRKQYWHEHDNVNDFEQSHLKAPEFELAVESLPYAHVIEVRLEEKTKAPADTEAAPEDINDIIELPNVPTKVPERPKAPEKNKGHFVILQAAVRNNGGLVKEAKAIIRLFPIWVACLLYAAATLDRRIERHFQVPPAALHSFISITIVVIIPIYDRVLVPVSRRYSGKPSWITMLQRIGTGMFLSLLSMVIAALVENRSCDLEAATWRLYPSYGRAIRCYLVDLRSI

SEQ ID NO: 4754 - protein, 149 aa, Zea mays
  VARIANT 45: note = Ancestral polymorphism is R, Derived polymorphism is W
MSRNSAEDGGAYNGTNNVEEPHIARLVAFLFLVSFVSMFAIMPFRNSLVIRNHLTFPTGVRGPHLINTMHTLHGANKQGYSACAPHHLHARGNHDIIRDPNVVHEDDAGHLIPSRQPQRLQDAHRDIHGTLSYGPIVGRHASLTTKVAL

SEQ ID NO: 4755 - protein, 227 aa, Zea mays
  VARIANT 2: note = Ancestral polymorphism is W, Derived polymorphism is C
  VARIANT 21: note = Ancestral polymorphism is T, Derived polymorphism is S
  VARIANT 30: note = Ancestral polymorphism is G, Derived polymorphism is R
  VARIANT 36: note = Ancestral polymorphism is T, Derived polymorphism is M
  VARIANT 37: note = Ancestral polymorphism is R, Derived polymorphism is C
  VARIANT 48: note = Ancestral polymorphism is G, Derived polymorphism is V
  VARIANT 56: note = Ancestral polymorphism is G, Derived polymorphism is D
  VARIANT 62: note = Ancestral polymorphism is S, Derived polymorphism is Y
  VARIANT 77: note = Ancestral polymorphism is A, Derived polymorphism is T
  VARIANT 171..227: note = Derived polymorphism lacks residues 171 to 227
MWHDYSPPSPPLPPPDPPSPTTTCEGDLHRKGDFHTRCEVSEEVELDVDVYIMGNGSLVLLSGASLTCEKYGCVISANFSGEVHLSRGVRVTAGRVSLVATNITVADTVVVNTTALAGDPPDRTIGVPTGTHGNGGGHGGHGASCFVKQGQTQEDSWGGHAYAWSDLEHPWSYGSKGGSTGVEKDYGGAGGGIVWLFAEDLVMNGTVLANGGDSNEKGEVVLEGTSL

SEQ ID NO: 4756 - protein, 217 aa, Zea mays
  VARIANT 52..217: note = Derived polymorphism lacks residues 52 to 217
MAIGVPSMELHRSSPLLSGGRGGNTCLQKKPFFVQAKRLVGMEKASTRPGTQESGQTKKRAPLVRGTVSPPLPVPGNIPRPPYVGTEYVPEIAKEIQMHDKEGIVHMRAACELAARVLDYAGTLVKDGDIINIDVTVYLNGYHGDTSKTFLCGEVDEASKRLVKVSTLFCGADLSTLFCGADANLALAAYYFCPPCFSCVLKARLSAGLPVWGPLKG

SEQ ID NO: 4757 - protein, 420 aa, Zea mays
  VARIANT 283..420: note = Derived polymorphism lacks residues 283 to 420
  VARIANT 257..420: note = Derived polymorphism lacks residues 257 to 420
  VARIANT 186..420: note = Derived polymorphism lacks residues 186 to 420
  VARIANT 184: note = Ancestral polymorphism is R, Derived polymorphism is C
  VARIANT 67: note = Ancestral polymorphism is G, Derived polymorphism is R
  VARIANT 62: note = Ancestral polymorphism is S, Derived polymorphism is F
  VARIANT 55: note = Ancestral polymorphism is S, Derived polymorphism is F
  VARIANT 11: note = Ancestral polymorphism is S, Derived polymorphism is L
MSVGLVALLFSSFSPLPEGIESTDALPCPSLHLTFMEAMGLLRGPFTEFLASLPSLPLALVSDFFLRFTRRVAANADVHRIVFNSMSCFASVICKALAASPPASFEPETMIQVPNMPVHAAVRAEEVPNGVTKRADPDNPFMRFFMDEIGDSDVRSWGVLSNSLDVLDAAYVSALELFYEAGARAWLVGPLFMAAGDMLNGEKKEQDPEGCLSWLDERAAHPGSVVYVSFGTQAHITYAQLDELVHGLVQSGHPFLWVVRFDTWSPSVDVGPNNRIIRGWFPQRSILAHKAVGGFVNHCGWNFVMESLAAVKPMLAWPMITEQHLNARHVANILDAGVRIALKAGVDVVRSVEVEEKVWELMDAECKAAKQMRERVAWAQQAAKSAVSHGGTSAMALLKLVEDLHETYDDGVVGKCANSV

SEQ ID NO: 4758 - protein, 322 aa, Zea mays
  VARIANT 227..322: note = Derived polymorphism lacks residues 227 to 322
  VARIANT 117..322: note = Derived polymorphism lacks residues 117 to 322
MRFRLQEYASLQNTVQLSLCFLQSGCFLQSGSVCRDIDVWSVPMDLKDSLSKFKQQQERCQSSLASIAASTSKPKHRAQPAHAPNVPARPSQPIKFSNDTERLQHINSIRKSPVGAQIKLVIELLYKTRQAFTAEQINEATYVDIHGNKAVFDSLRNNPKVSYDGRRFSYKSKHDLKGKDQLLVLIRKFPEGLAVVEVKDAYSNVLEDLQALKAAGEVWLLSNMDSQEDIVYPNDPKAKIKVDDDLKQLFREIELPRDMVDIEKELQKNGFKPMTNTAKRRAAAQINGVKPKAKPKKKQREITKRTKLTNAHLPELFQNLNT

SEQ ID NO: 4759 - protein, 77 aa, Zea mays
  VARIANT 36: note = Ancestral polymorphism is F, Derived polymorphism is L
  VARIANT 23: note = Ancestral polymorphism is A, Derived polymorphism is V
  VARIANT 8: note = Ancestral polymorphism is I, Derived polymorphism is V
MNTKKNVVLCCLLFVLVLHADHALAKCGYTTPLIPFCKAWMCKAECWTEAKLTGGKVTQQKCMRGGIKGWCYCEFCI

SEQ ID NO: 4760 - protein, 192 aa, Zea mays
  VARIANT 39..192: note = Derived polymorphism lacks residues 39 to 192
  VARIANT 119: note = Ancestral polymorphism is P, Derived polymorphism is L
  VARIANT 175: note = Ancestral polymorphism is L, Derived polymorphism is R
MIGRPLRRSTAAAAIGGISMPSGSNKLYSGSVDGSVRIWDYNSGKCVDVIKMGGKVSCMITHGPWVLIGIPKFVEALNTKTGMKLRFQGPSSLVCSMAITNEMLFAGTGDGRIMAWRFPAKDSNTEPVLILSGHQRPVISLSILARRLYSGSLDKSIKGLRTLFGMHRVGKTPVLFCSLHNSNCVRLLDLPS

SEQ ID NO: 4761 - protein, 115 aa, Zea mays
  VARIANT 61: note = Ancestral polymorphism is R, Derived polymorphism is L
MAAVNLLAESAAAAKVFESQLAESLLEGDGQLAFKKLATATLETLMPRIEGKGEFGQARWRLVYAPQIPSLLSVDPTVDPLKSLANNISFATEVEVQLGKRLQQELVVAAASYKD

SEQ ID NO: 4762 - protein, 382 aa, Zea mays
  VARIANT 167: note = Ancestral polymorphism is M, Derived polymorphism is R
  VARIANT 322: note = Ancestral polymorphism is L, Derived polymorphism is R
  VARIANT 342: note = Ancestral polymorphism is P, Derived polymorphism is L
  VARIANT 351: note = Ancestral polymorphism is T, Derived polymorphism is S
MERMLARLMRRRSSVPLSGLLHHGGAPAPLQAAGATGASPLILSHQQQQQHTAASAVLPGLKIRDSASQLIGRTPMVYLNKVTEGCGARVAAKLEFLQPSFSVKDRPAISMLEDAEKRGLITPGKTTLIEPTSGNMGIGLAFMAALKGYELVLTMPSYTSLERRVTMRAFGANLVLTDPAKGMGGTVRKATELYERHPSAHMLQQFQNPANVKVHYDTTGPEIWEDTLGQVDIFVMGIGSGGTVTGVGKYLKEKNPNAKIYGVEPAEANVLNGGKPGPHLITGNGVGFKPDILDMDVMEKVLEVKGEDAVKMARELAVKEGLLVGISSGANTVAALELAKRPENKGKLIVTVLPSLGERYLSSALFDELRKEAQAMEPVAVD

SEQ ID NO: 4763 - protein, 168 aa, Zea mays
  VARIANT 139..168: note = Derived polymorphism lacks residues 139 to 168
  VARIANT 109..168: note = Derived polymorphism lacks residues 109 to 168
  VARIANT 100..168: note = Derived polymorphism lacks residues 100 to 168
  VARIANT 57: note = Ancestral polymorphism is G, Derived polymorphism is D
MAPARALPAPLVVHGRRRQLRRRRKYCKLCYLKGSSMVPTIQAQGDVGLLDRRCLAGYDFSRGDVVVFRLSTDHGMKMVQRMIALPGDWIQIPEKRDIRQVPSGHCWVEGDNAGNSWDSRHYGPVPLDLMEGKITHIIWPPHRVRRVDRMVPEGRIMPLSATPRRKQQ

SEQ ID NO: 4764 - protein, 223 aa, Zea mays
  VARIANT 139: note = Ancestral polymorphism is Y, Derived polymorphism is S
MDRLLTEGVDQDEKKSIVENMIKLVDLYYAALDGHKVDVDRHLRVKAYPHFMEKKGFESYHSSSILGRIYDETEEIIAQQCDEQIQITTLPCFSEVEATPECTSLWEHRYQEYLTKSRGLFDLGKEEKNDEFQKLYQHYKHLLYDADELEETSRDLSDVFMEACAIYRIVYERAWCTRSVSRCRFVWNVAGAALCHLHATKYAAQRGEKTALCPLSVIRQLYI

SEQ ID NO: 4765 - protein, 755 aa, Zea mays
  VARIANT 518: note = Ancestral polymorphism is E, Derived polymorphism is G
  VARIANT 504: note = Ancestral polymorphism is A, Derived polymorphism is V
MQPPGPPLATPQPLPPAVAAELAQLESRLGQVAGEPARHELAELGEVAAVRVLRRIARSQEQVRTLTGYIVSAAVQETFALNAQAVPTAESRACNSSAPSLSDGSVQGPQCASELRMEEVTAGLSNYRMAICEGQGQEDHAVMMAIDNPPDCIPPGVGTKIALKEIASPHITDNKLRNTASPQMCALEDLEFSKRFLILSYLCRNNLEDEVVLTVDYIKSLKFLSMVHFESQIWRKFGQKNFQASNRAATDRAKNFDSDPTTTKLYHCNIEIRGESIFFVLKEFLTGELPCPACPTAPTSLVVPEKVYKDPGKETKKKDSEQGDIKKCTSPVRCYFICTKSGWRGDEAYIPIDKCRKLFMHIHTAPTIANYMKRFHLILSKTLTLDVDLSTIDVILIDDEPCRDEHGNIVMLDGKRLIHTDGTGFISENLAKKCPSRIIKGKKSKVYMHQGETTISNNTIVIRPSMVKVKADPKLCRMKSLSSLEIVSTSHQSNRTSTSRILIALLHYGGVKAEYFMELLHNAIEGVNNARYSFRHALKLAYGYANMEDSMLERMIHSGIPLEEPYLLSRLSFMAKQEMKVFREGKLPIDECYYLMGTTDPTGTLKPNEVCVILDSGQYSGDVLVFKHPGLHFGDIHILTARQIDGLEKNFIGYSKNAILFPTSGQRSLADEMANSDFDGDEFWVSRNNMVSSFLFVFINILFYHCNATSVGGDLRGLLWEVAGRSAAGFVPMVSSVMSRGSSMEMRKKKGGVRV

SEQ ID NO: 4766 - protein, 150 aa, Zea mays
  VARIANT 109..150: note = Derived polymorphism lacks residues 109 to 150
  VARIANT 89: note = Ancestral polymorphism is W, Derived polymorphism is C
  VARIANT 63: note = Ancestral polymorphism is G, Derived polymorphism is S
  VARIANT 21: note = Ancestral polymorphism is V, Derived polymorphism is I
MAPTRALPALWLSMAAAASYVVGEKYCRLCYLKGSSMVPTIQAQGDVGLLDRRCLAGYDFSHGDVVVFRLSTDHGMKMVQRLIALPGDWIQIPEKRDIRQVPSGHCWVEGDNAGNSWDSRHYGPVRAFSLTIILSRFSSICSVSFFNKNW

SEQ ID NO: 4767 - protein, 214 aa, Zea mays
  VARIANT 33: note = Ancestral polymorphism is D, Derived polymorphism is N
MDRLLTEGVDQDEKKSIVENMIKLVDLYYAALDGHKVDVDRHLRVKAYPHFMEKKGFESYHSSSILGRIYDETEEIIAQQCDEQIQITTLACFSEVESTPECTSLWEHRYQEYLTKSRGLFDLGKEEKNDEFQKLYQHYKHETSRDLSDVFMEACAIYRIVYERAWCTRSVSRCRFVWNVAGAALCHLHATKYAAQRGEKTALCPLSVIRQLYI

SEQ ID NO: 4768 - protein, 196 aa, Zea mays
  VARIANT 165: note = Ancestral polymorphism is S, Derived polymorphism is Y
  VARIANT 120: note = Ancestral polymorphism is E, Derived polymorphism is K
  VARIANT 118: note = Ancestral polymorphism is K, Derived polymorphism is N
  VARIANT 90: note = Ancestral polymorphism is R, Derived polymorphism is C
MEEVTAGLSNYRMAICEGQGIASQANQMPMQYGDRDRIQELVSIVPHGVRMLAESLENGRASELQNYVQNGIPEQWMVPADQRMESTSSRLQHVLKCLQGVGPFGHHLGPECAIMIPKPEPNVVVENLFRQIASPHITDNKLRNTASPQMCALEDLEFGKRFLYSLIFVGMAFVCATTAKTSSFHLAGITWKMKLY

SEQ ID NO: 4769 - protein, 200 aa, Zea mays
  VARIANT 33: note = Ancestral polymorphism is Y, Derived polymorphism is C
  VARIANT 86: note = Ancestral polymorphism is G, Derived polymorphism is D
  VARIANT 95: note = Ancestral polymorphism is D, Derived polymorphism is Y
  VARIANT 133: note = Ancestral polymorphism is P, Derived polymorphism is S
  VARIANT 135: note = Ancestral polymorphism is E, Derived polymorphism is G
  VARIANT 137: note = Ancestral polymorphism is S, Derived polymorphism is P
  VARIANT 145: note = Ancestral polymorphism is L, Derived polymorphism is H
MEDHSRIKNHALLLQTQYTSFGFYWALLFIPAYKFFGLMLMLNLIMFIGLMMHFLVCFSYFYMLLSFLPPTTFYMEGPWAAMATTGIFLAAAVTDWLDGYINRKLGTPFGAFLDPVADKLMLAATLVLLCTKPLESSLLNDGPWLLTVPSIAIIGRELQESRNLIRVLRFEALPLSGKEAIELLDILLRFLSFYLSFLIS

SEQ ID NO: 4770 - protein, 457 aa, Zea mays
  VARIANT 172: note = Ancestral polymorphism is T, Derived polymorphism is R
MANFGPHQLGDTRLVEPRVAAGRLLDFWNAWATEILVILSLTQQVALLFFSGIRRQQGRSLKRLFLWLAYQLADSTAIYALGTLSLISTLRQHRLVAFWAPFLLLHLAGPDNITAYSLEDNKLWKRHLLTLVVQVLGAGYVIYNHIAGGGILFSLGAALMTAVAVAKFCEKRWALRCANFGVIRESLEAEDAEQLGKCALYLEGRAPRGGFKGKVVEKEEFLMLRTHAVFRVCMSAMVDSSENPGSYIVDILRYLKEKEMRYMWTLVEMELSLMYDILYTKAPVLHTLPGYCIRVVSPLAVVASLLLFQFYGREEGDRTADVAITYALLGSAFLMETTALLSALWSTWTFFFLCATRWSGYGMPAVGVPDSLKDSVVTCICIEHMVKRAHINTPGMVRASWGTETLRSWQEEKGISIDSKFLGSELQEGIIIWHIATDVFLARRQAEIEGRDKVEEV

SEQ ID NO: 4771 - protein, 122 aa, Zea mays
  VARIANT 3: note = Ancestral polymorphism is P, Derived polymorphism is L
  VARIANT 11: note = Ancestral polymorphism is Y, Derived polymorphism is F
  VARIANT 14: note = Ancestral polymorphism is R, Derived polymorphism is H
  VARIANT 17: note = Ancestral polymorphism is E, Derived polymorphism is K
  VARIANT 20: note = Ancestral polymorphism is H, Derived polymorphism is R
  VARIANT 26: note = Ancestral polymorphism is G, Derived polymorphism is D
  VARIANT 27: note = Ancestral polymorphism is R, Derived polymorphism is S
  VARIANT 30: note = Ancestral polymorphism is R, Derived polymorphism is C
  VARIANT 41: note = Ancestral polymorphism is G, Derived polymorphism is D
  VARIANT 72: note = Ancestral polymorphism is I, Derived polymorphism is T
  VARIANT 73: note = Ancestral polymorphism is R, Derived polymorphism is K
  VARIANT 78: note = Ancestral polymorphism is H, Derived polymorphism is N
  VARIANT 87..122: note = Derived polymorphism lacks residues 87 to 122
  VARIANT 91..122: note = Derived polymorphism lacks residues 91 to 122
MRPIFVGNLDYDTRHSELDRLFYRYGRVERIDMKSAIDGFDIGQGKFTCDCRERYSGSDLRALCEEAAMMPTRELDPHNILTVKANQVRPQLAETEVAHIGQVALVTQPKWLETSMEPKYAY

SEQ ID NO: 4772 - protein, 158 aa, Zea mays
  VARIANT 122: note = Ancestral polymorphism is K, Derived polymorphism is M
MRLRSRAIFPLVRTTAITTSAVSSPPAVLSVGHALRERRRFTEDDVAAYAAVSGDRNPVHLDDAVARELSGFQRGRVVHGMLVASLFPSVIAASFPGAVYASQTLKFAAPVYVGDEVVARVKALNIRMIGTTNCSTTSRYLYAPASLAHTFALVKTST

SEQ ID NO: 4773 - protein, 82 aa, Zea mays
  VARIANT 40: note = Ancestral polymorphism is R, Derived polymorphism is Q
MAAAGSVVVTMVKENIKTQTHQLIDARSKPRFDGAVPEPRNGIRSGHVPGSKCVPFPQVLDSSQKLLPPDELRKRFEQEGNI

SEQ ID NO: 4774 - protein, 58 aa, Zea mays
  VARIANT 16: note = Ancestral polymorphism is E, Derived polymorphism is K
MLDQNLDLMVQFPSHEMGLEVGMCLGANVFRFLRFLTAHKSYCLQMSSVNGLSKKVIS

SEQ ID NO: 4775 - protein, 447 aa, Zea mays
  VARIANT 31: note = Ancestral polymorphism is P, Derived polymorphism is L
  VARIANT 48..447: note = Derived polymorphism lacks residues 48 to 447
  VARIANT 64..447: note = Derived polymorphism lacks residues 64 to 447
  VARIANT 90: note = Ancestral polymorphism is H, Derived polymorphism is L
  VARIANT 91: note = Ancestral polymorphism is R, Derived polymorphism is W
  VARIANT 98: note = Ancestral polymorphism is P, Derived polymorphism is L
  VARIANT 100: note = Ancestral polymorphism is G, Derived polymorphism is R
  VARIANT 107..447: note = Derived polymorphism lacks residues 107 to 447
  VARIANT 113: note = Ancestral polymorphism is T, Derived polymorphism is I
  VARIANT 170: note = Ancestral polymorphism is D, Derived polymorphism is V
  VARIANT 188..447: note = Derived polymorphism lacks residues 188 to 447
  VARIANT 189: note = Ancestral polymorphism is P, Derived polymorphism is S
  VARIANT 199: note = Ancestral polymorphism is V, Derived polymorphism is I
  VARIANT 240: note = Ancestral polymorphism is P, Derived polymorphism is S
  VARIANT 252: note = Ancestral polymorphism is Y, Derived polymorphism is N
  VARIANT 254: note = Ancestral polymorphism is G, Derived polymorphism is D
  VARIANT 257: note = Ancestral polymorphism is P, Derived polymorphism is L
  VARIANT 262: note = Ancestral polymorphism is A, Derived polymorphism is G
  VARIANT 354: note = Ancestral polymorphism is G, Derived polymorphism is R
  VARIANT 375: note = Ancestral polymorphism is P, Derived polymorphism is L
  VARIANT 380: note = Ancestral polymorphism is T, Derived polymorphism is I
  VARIANT 405: note = Ancestral polymorphism is S, Derived polymorphism is Y
MTTSQCGYFTDEYIQSLKGGKISIPPYRPRPEPLFSLARFDGDATSKRFIRSIRQYNCLFAFTSMGAQIDNSVNDGRGPPLFKICGQVHHRIGSLLPPDGSSPKFIQLYIYDTANEVQNRMKCLGDEINNQDNLDTDIVNGLIEMLDNHNPFVKKFRMARDRLSDNESEDFIIRLIGAKEGDPIQYNLPTTDQLAMLIVGDFSLDTFKRDIIIETRNNELKRISSLHPAYMALQYPLLFPFGERGFQVGILYNDLSPAQNNARRHMTIQEYYCYQFHYRKNQPNPYLCYGLLSSQAKVDARACIDENRLNYIIANQKNLRIESIQGITDAVSRGCISGDEIGKTIILSASHTGGRRYMIQNYHDSIAICRVHGPPDFFVTFTCNANWPEILDSMFERGQSPPDRSDVIVRVYHMKLEDLMHDIKMDLFLAHALQVRPLTYSTTHADI

SEQ ID NO: 4776 - protein, 470 aa, Zea mays
  VARIANT 76: note = Ancestral polymorphism is T, Derived polymorphism is M
  VARIANT 140..470: note = Derived polymorphism lacks residues 140 to 470
  VARIANT 201..470: note = Derived polymorphism lacks residues 201 to 470
  VARIANT 219: note = Ancestral polymorphism is L, Derived polymorphism is V
  VARIANT 258: note = Ancestral polymorphism is F, Derived polymorphism is S
  VARIANT 317..470: note = Derived polymorphism lacks residues 317 to 470
  VARIANT 330: note = Ancestral polymorphism is S, Derived polymorphism is Y
MEYTLLPDLEPHKKHVTIQVRVARKWLFRGANDNAPLQHIDMVLSDQEVSNVLGVIVQVHEMTPIHIQSQLTPVLTRSIIIEDLSNIPLKITLWADQATSFSLHDVYDPNTKKPIVVLFVGCLPKFYKGVYLSGGSACRWYFNPIIPEAEPYHTSHQTRTITLQLPHALNHPPTIEHKQAVESKSLYELTRINPYDFPKYQSKTNGGTRLAQNALKRQLHKMQFIIAMTVTGTNTHSGKYKLKFLASDGTETAEMFCFNNIARQIVGKSCEIVLRGVSEHSPIPPDLAQIISLKFTFRVTVDDLSFFQKNNHPNVLRINSIVTAHGRQQSLPLQARDLQEQGPSTPPNTLKLKLFEDSPSTALEKLTTTTPTDVSKKLIYPTTDSTSKLPANIDITDAENDDIDEGNIKHDAILDDKGKGPTATIESPPKRLYTTTQYPTCLNMDLCVLKKGRTQDLPTTEDFLRLSAAF

SEQ ID NO: 4777 - protein, 420 aa, Zea mays
  VARIANT 226..420: note = Derived polymorphism lacks residues 226 to 420
  VARIANT 206: note = Ancestral polymorphism is H, Derived polymorphism is D
  VARIANT 200: note = Ancestral polymorphism is D, Derived polymorphism is Y
  VARIANT 196..420: note = Derived polymorphism lacks residues 196 to 420
  VARIANT 168: note = Ancestral polymorphism is N, Derived polymorphism is T
  VARIANT 147: note = Ancestral polymorphism is L, Derived polymorphism is P
  VARIANT 108: note = Ancestral polymorphism is P, Derived polymorphism is L
  VARIANT 80: note = Ancestral polymorphism is P, Derived polymorphism is H
  VARIANT 76: note = Ancestral polymorphism is E, Derived polymorphism is K
  VARIANT 52..420: note = Derived polymorphism lacks residues 52 to 420
  VARIANT 46..420: note = Derived polymorphism lacks residues 46 to 420
  VARIANT 16..420: note = Derived polymorphism lacks residues 16 to 420
MNRGTGITGPAASKPESHEAKGLRHVRVDSKTSSTSDVSAADWEKKLDTTWQERLNGQDPLVILTAKDKMDAAAAEVLEPLVRKIRDEKYGWKYGCGSKGCKKPFHVPEFVHKHLRLKHPDLALESTSKVREDLYNQNYMKYVYVMLYLQLNNTDALVSTGLAALGYNFINIDDCWSYVKRGKQDQLLPDPKTFPSGIKYLADYVDGKGLKLGIYSDAGKFTCQVRPGSLGHENDDVAIFASWGIDYLKYPPMRDALNSTGHQIFYSLCEWGQYDPALWAGKVGNSWRTTDDITDTWKSMTDIADKNNKWASYAGPGGWNDPDMLEVDNGGMTLAEYRSHFSIWALMKAPLLIGCDVRNMTSETMEILSNKEVIQVNKDPLGVQGRKILGQGKYGCREVIFTVCFPTCSRQCCSHMVFLL

SEQ ID NO: 4778 - protein, 315 aa, Zea mays
  VARIANT 33: note = Ancestral polymorphism is D, Derived polymorphism is Y
MVGRMERQTASSSASCSSSSSSSSVCGGKKRPDILNMIRNAACLNSSSTDTGKGRSKLSTNKVTHGFHLVEGKSGHGMEDYHVAEYKYVKNHELGLFAIFDGHLGDKVPSYLKANLFSNIMKEPLFWSSPEEAIKNAYCSTNKYILENGKQLGPGGSTAVTAIVVDGKDMLIANVGDSRAVVCEMGSANQLTVDHEPDTTEERQRIEKHGGFVTTFPGDVPRVNGQLAVARAFGDQSLKAHLSSKPDTRHVPIDSSIEFVILASDGLWKVMKNQEAVDLVKSIKDPKAAAKRLTTEALARKSKDDISCIVIRFRC

SEQ ID NO: 4779 - protein, 229 aa, Zea mays
  VARIANT 214: note = Ancestral polymorphism is L, Derived polymorphism is P
  VARIANT 179: note = Ancestral polymorphism is S, Derived polymorphism is R
  VARIANT 125: note = Ancestral polymorphism is M, Derived polymorphism is K
  VARIANT 115: note = Ancestral polymorphism is D, Derived polymorphism is V
  VARIANT 114: note = Ancestral polymorphism is E, Derived polymorphism is K
MSVIPRCFTIHRPFSLMQLEQEHACSSCSSIPTNQQLEKSSAGVRIEPKGVNSSRSIDIDQQSEKHKSMSRVSASVERELVHEQPTDDDASALAYLVRRRCPNTYLFFYGHALEDRVVRMTFIAKPTYSSRRKYLNDLLDADLVSLSRGDRKRWHNMRAAAEAAAEAAAQAARLLLRLSLLTMQAMKTKPDGAAGSVCSLELQSLIYFLLILDLVNLGHCAYHAECLVF

SEQ ID NO: 4780 - protein, 246 aa, Zea mays
  VARIANT 136: note = Ancestral polymorphism is D, Derived polymorphism is V
  VARIANT 149: note = Ancestral polymorphism is Y, Derived polymorphism is C
MISHGIFVLIMKETTQTGLIGWKINRVVMSARTNQITLKLEQEHACSSCSSVPTNQQLEKSSAGVRIEPKGVNLSRSIDIDQQSEKHKSMSRVSASVERELVHEQPTDDDASALAYLVRRRCPNTYLFFYGHALEDRVVRMTFIAKPTYSSRRKYLNDLLDADLVSLSRGDRKRWHNMWAAAEAAAQAARLLLRLSLLTMRAMKTKPDGAAGSVCSLELQSLIYFLLILDLVNLGHCACHAECLVF

SEQ ID NO: 4781 - protein, 638 aa, Zea mays
  VARIANT 357: note = Ancestral polymorphism is R, Derived polymorphism is C
MNAWEATERENHVTERGLVPVSTGDVQVQHEHGGAAKADGFVRRDQSCRYASSDIPSDLLVKVGGVNFHVHKHPMVSRSGRLARLVDEASALHGPVAATVVELPDLPGGHGAFELAAKFCYGVVVDITAANVAALRCAAEYLEMTEEVEEGNLAFRAEAFLSYVVASSWRDSVVVLRACEGLSPWADDLHLVRRCSESVAAKACTNPRAVRWAYAGRTSSSPNKSPTAGTAGNSQQQPGPPADWWVEDICVLRIDHFVRVVTAVQARGMRPDLIGAAITRYASKWLSSAGLLANKDSPASRGGGGGGVLQMIVASEGDDAQTETEASEQRRIVESLISIIPPQKDCLSCSFLLRLLRLAVVLKAAPALVTEVEKHVGMQLDQAKLLDILVPSYPYARSEAAYDVDLVQRLVEQFVVQEQSGRDKEKQEQQSSRALRMASLMDSYLSEVSRDRNLSLGKFQALAESLPESARVCHDELYRAVDSYLKAHPTVTEHERKRLCRAVDCGKLSREARLHAAQNERLPLRVVVQVLLSEQAKMAGALGRAGKKEDDVNALRQEVESVNAKYMELQREVELLQRQVERMLPPSAAAKQHNVSGWSSGWKKLGRLGRIQVEQPVVTAATGETANRQLRRRRNSAS

SEQ ID NO: 4782 - protein, 361 aa, Zea mays
  VARIANT 240..361: note = Derived polymorphism lacks residues 240 to 361
MEVTPNHTLTVTGWAAMNESAGKVEPFVFKRRENGPDDVTIKVQYCGMCHTDLHFINNDWGITTYPLVPGHEITGVVTKAGRNVTGFRVGDRVGVGCIAASCLDCDHCRRSEENYCDRVALTYNGVFWDGSVTYGGYSRALVADKRFVVRVPDALPLDAAAPLLCAGVTVYSPMKHHGMLGHPGASLGVVGLGGLGHVAVKLAKAFGLRVTVVSTSPAKEAEARARLGADRFVVSTDDAQMRDAARSLDYVIDTVSAKHSLGPILDLLKVSGKLVLVAAPDQPVELPSFPLIFGKRTVSGSMTGGIRETQEMLDLCARHNITCDIELVSTDGINAALARLARNDVRYRFVIDIAGDSTSKL

SEQ ID NO: 4783 - protein, 273 aa, Zea mays
  VARIANT 146: note = Ancestral polymorphism is G, Derived polymorphism is E
MEDHGSHPLLQSSPAAAGGATLAYAWGYYQQQQPSAPFGEHQADSGEQQLDLTTAPELRRALVRALAELHASRAAHQAELRRVESEAARLAALVSSAAAERDELRRQCHSLLLLLHHQAQAAAAAAAVAPAPSLHAAASVLSAGGGGCSASASATAAAVVTNENAPDADDAELEMALARRLPEKGRLVEAVVSAGPLLQTLLLAGPLPRWRHPPPPAPADIPPFHPGGRHSPSRPATRPTPSRRPRRGRRLPRATAAVGLRRRWRRMRFLLFT

SEQ ID NO: 4784 - protein, 448 aa, Zea mays
  VARIANT 35: note = Ancestral polymorphism is A, Derived polymorphism is P
MAEADCSAARTRTAGLAAAAAAAAFLVLVVVAGSAVLPGARVRVLDGLRGRADDGDAGGPSRAVTGAVEDPEAVANDVHVSIRNSTARRNLGYLSCGTGNPIDDCWRCDSDWHSNRQRLADCGIGFGRNAIGGRDGKVYVVTDPSDDDPVNPREGTLRHAVIQEEPLWIIFKRDMVITLREELIMNSFKTIDGRGANVHIANGACVTIQYVTNVIIHGLHIHDCRPTGNAMVRSSPSHYGWRTMADGDGVSIFGSSHVWVDHCSLSNCADGLIDAIMGSTAITLSNNYFTHHNEVMLLGHSDSYVKDKAMQVTIAFNHFGEGLIQRMPRCRHGYFHVVNNDYTHWEMYAIGGSAEPTINSQGNRYLAPTNPFAKEVTKRVETAQTVWKSWNWRSEGDLLLNGAYFTPSGAGASASYSRASSLGAKSSSMVGTITSDAGALSCRKGAAC

SEQ ID NO: 4785 - protein, 337 aa, Zea mays
  VARIANT 174: note = Ancestral polymorphism is G, Derived polymorphism is S
  VARIANT 162: note = Ancestral polymorphism is G, Derived polymorphism is S
  VARIANT 135: note = Ancestral polymorphism is R, Derived polymorphism is H
MASGGEPAAPKVVLLLVPHVDESFHAALRSRFRVLDFFASPSSGEPLPAFLAAAAAAPEPPRAAVVVGAGPARVDAAFLDAVPSLRCVLSLAAGVDFIDLGECARRGVAVANSGSVFSADVADHAVGLLIDVLRRVSAAERFVRRGLWPVQGDHPLGSKVGGRRVGVVGLGNIGSQIAKRLQALGCTVCYHSRTPRDSVPYRYFANVRDLAADSDVLVVACALNEATRHIVGRDVLEALGTDGVVVNISRGANVDEAELVRALKEGRIAGAGLDVFESEPGARREFFSMDNVVMTPHVAVFTAESMSDLRDHAIANLEAFFSGQPLLTPVPPYSPVK

SEQ ID NO: 4786 - protein, 187 aa, Zea mays
  VARIANT 141: note = Ancestral polymorphism is T, Derived polymorphism is A
MKAAAVHSVPPPSAVTLVSVVARRALVPAALRGNARRGAALVASAAPDGQMRRSPGPAVAKLTDVMSRPVQVATPGQRLSEVDDAFFAARQYSGLLPVVDDDGRCVGVISNKDKAKAPNGMESTVAEVMTSPAITLTLYKTVLEAAALMLKEKVHRIPVVNEQQHVIGIVTRSDVFQALEATSKAWE

SEQ ID NO: 4787 - protein, 415 aa, Zea mays
  VARIANT 155: note = Ancestral polymorphism is G, Derived polymorphism is D
MMAEGPNFAGMIGGHDNGGDFCDMAYYRKLGEGSNMSVDNLNSMQTSTHGGSIAMSVDNSSVGSCDSHTRMLNHPGLKGPVVGNYSVGGHSIFRHGRVSHALSDDALAQALMDPRYPTETLKDYEEWTIDLAKLHMGMPFAQGAFGKLYRGTYNGEDVAIKLLERPEADPERAGLMEQQFVQEVMMLATLRHQNIVKFIGACRKPVVWCIVTEYAKGGSVRQFLAKRQNRSVPLKLAVKQALDVARGMAYVHGLGFIHRDLKSDNLLISGDKSIKIADFGVARIEVKTEGMTPETGTYRWMAPEMIQHRPYDQKVDVYSFGIVLWELITGMLPFANMTAVQAAFAVVNKGVRPAIPQDCLPTLAEIMTRCWDPNPDVRPPFTEVVRMLEHAEMEILSTVRKARFRCCMSQPMTTD

SEQ ID NO: 4788 - protein, 56 aa, Zea mays
  VARIANT 52: note = Ancestral polymorphism is W, Derived polymorphism is C
  VARIANT 46: note = Ancestral polymorphism is G, Derived polymorphism is C
  VARIANT 43: note = Ancestral polymorphism is H, Derived polymorphism is Y
  VARIANT 25: note = Ancestral polymorphism is R, Derived polymorphism is W
  VARIANT 18..56: note = Derived polymorphism lacks residues 18 to 56
  VARIANT 2: note = Ancestral polymorphism is C, Derived polymorphism is Y
MCATIQAQWLDDIPIHFRLLHCGVRLLQSSSNHAACLTVVFYHYTCCWTNLWTRGL

SEQ ID NO: 4789 - protein, 552 aa, Zea mays
  VARIANT 410: note = Ancestral polymorphism is R, Derived polymorphism is W
MVPSEPQTVVENKHSTSVGAEELLLTKDESTSTTVVQGAGSLMSPKGVQEEASFMGKGKGGEQQLGYQPNVYVSQPHTPFSGGYSNHLDQWEGYPYAVSAEGLDAAYPVTYGAYSPLSAIGDSHTYFSLLCPLSRPCYQPPASPNMRYSSPGTGISQFYPMHQYYSPDEVHYSVTPSFYQPFGSFNGVPMQPSSFPGFFGQGNIPLTSRMHQESMSNSGSHKAFQQGGKFGGSTQSWSTASCKFGTFKDEKCSPDFLNEQCRGPRATKTRKEVGSSSTEDKNKNVLPIADSDKYNHPGFVTEYKDARFYVIKSYTEDHIHKSIKYNVWASTPRGNRKLNAGYHEAKAKEDHCPIFLFFSVNSSGHFCGVAEMIGPVNFDKSVDYWQNERWNGQFPVKWHIVKDVPNNIVRHIILENNENKRVTNSRDTQEVKLKQGLQMLAIFKNHEAQTNILEDFDFYEQREKAMLDDRQQQKPECSDTGKQVQASAPVDIVTGMSDAFAQAVQLEKTNDKENKPRIEDADAADNAPAAPVKIEEDMLKTAEVGGLLKESG

SEQ ID NO: 4790 - protein, 161 aa, Zea mays
  VARIANT 20..161: note = Derived polymorphism lacks residues 20 to 161
  VARIANT 37: note = Ancestral polymorphism is H, Derived polymorphism is Y
  VARIANT 142: note = Ancestral polymorphism is F, Derived polymorphism is L
MARRVRCLRYRHLGQFAPLGGKQTAAQLPGDWISIGHSTQWLWYSVYATRLVRWGGGIKEQNQTLELVIMAWELIEVPGNLNPSLKDSSVDVVAAKIDPKLANTLIRQLSQVCPLENLRHVKRVRRRTECGGICTFILFFFFCPLRALLLEDMPSLPKSTR

SEQ ID NO: 4791 - protein, 381 aa, Zea mays
  VARIANT 91: note = Ancestral polymorphism is S, Derived polymorphism is A
MSLLGPPARGAICLLVVSSSIVVLSTAGGLGSDATSRSAAAYLSVDDDYGEEDESGDSSFSFPDPETSSASTGLVFGFYDDKCPDAEEMVSSMVRKLYHADPNVAAALVRLFFHDCFIHGCDASVLLDRVGGQRSERDAGPNQSLRGLGAVEAIKRGVEKACPGTVSCADILALAARDSLVLVGGPTYPVLTGRRDSAQSFYYDADGGGIPPPNATYAMTLDAFARRGQFTERETVALLGAHSIGKVRCRFIADRIYNFAGTGAPDDSIDPDMVGEMRAACGGGDGAAPMEMGYYRQGREVGFGAHYYAELLEGRGILRADQQLTAGSTVRWVRVYASGARGEELFRDDFAHAMVKLSALAPLTGSAGQVRITCSNPVRPN

SEQ ID NO: 4792 - protein, 277 aa, Zea mays
  VARIANT 120: note = Ancestral polymorphism is C, Derived polymorphism is Y
  VARIANT 121: note = Ancestral polymorphism is L, Derived polymorphism is I
MVPDPCGDLMVMPKTVAKDEVSCSVPTPPKVTPDKVCAVARKFADQPIQEMEPDVWAILTAISKKARLWPQKRKTKVQVQVQQQPVAATVAVKVFNIQQSGSSKSFEAECETLRRVRHRCLLKIVTYCSSVGPQGEEFKALVFEFMANGSLDDWIHPRSSNPTAENTLSLSERLGIAANIFDVLDYLHNHSHPSIVHSDLKPSNVLLADDMSAKIGDFGISRILPLGTVGKAMQNSESSIGIRGSIGYIALGNSTFCFCLVCGSLCPLSNCDVGASS

SEQ ID NO: 4793 - protein, 192 aa, Zea mays
  VARIANT 27: note = Ancestral polymorphism is G, Derived polymorphism is R
  VARIANT 116..192: note = Derived polymorphism lacks residues 116 to 192
MFSKSRMFDHTARTGPKAIVSEYAVTGNDAGRGTLIAALAEAAFLIGLERNSDVVEMASCAPLFVNGNDQRWNPDAIVFNSWQHYGCPNYWMRVFFKDSSGATLHPSTIQLPNYDQLVTSAITWNNPHDGNTYMKIKDVNFGSKVVSLNISVTRLETDIQTFGSIKTVLTSGWLRDENSFQQPDKVVPAAVQ

SEQ ID NO: 4794 - protein, 198 aa, Zea mays
  VARIANT 164: note = Ancestral polymorphism is T, Derived polymorphism is M
  VARIANT 14: note = Ancestral polymorphism is L, Derived polymorphism is P
MLAARRLSAATSPLLLRRLSAQTHPTASSAQPPPEVTDSGPGAWAGRAVTLSLLGLTGAVAASAVSDLSVFLSCSSQAIEKATQNQQIVNAIGKPIMRGPWYSASIAVNHAKHSVSCTFPVSGPQGNGLLKLKAVRLGDESWYSYVQPTEWEILIMDAILDVHTEDGKHTTMRVTIPDNTPAPPPADCTACKSHAAEK

SEQ ID NO: 4795 - protein, 167 aa, Zea mays
  VARIANT 36: note = Ancestral polymorphism is S, Derived polymorphism is R
MEQSGAKKSNKITEIVRMQRMLKKWRKLSVTPKEPSSPTGGGGGNAVGESKAKKFLKRTLSFTDAPPSGSPPKGHLAVCVGPAAQRFVIPTEYLKHRAFAALLREAEEEFGFQQEGVLRIPCEVPVFESTLRAVEKNKKDAAASCYCSAEYAADEVGRGTPNNPLCR

SEQ ID NO: 4796 - protein, 421 aa, Zea mays
  VARIANT 194: note = Ancestral polymorphism is G, Derived polymorphism is D
  VARIANT 35: note = Ancestral polymorphism is V, Derived polymorphism is M
MGLLPTDRMDSLFSPRCVWVTGPIIVGAGPSGLAVAACLREQGVPFVVLERADCIASLWQRRTYNRLKLHLPKQFCQLPRMPFPEDYPEYPTRRQFVDYLERYAAEFEIKPEFGTTVLSARYDETSGLWRVVTNGGAGGDMEYIGRWLVVATGENAEAVVPDIPGLAGFDGEVTHVSEYKSGEAYAGKRVLVVGCGNSGMEVSLDLAEHGARPAMVVRDAVHVLPREVLGTSTFGLAVLLMRWLPLWLVDWLMVLLAWLVLGNLARLGLRRPAAGPLQLKETHGRTPVLDYGALARIRAGDITVVPAVTRFAGKGGQVEVADGRTLGFDAVILATGYRSNVPQWLQGNDFFNKDGYPKTAFPHGWKGESGLYAVGFTRRGLSGASADAVRIAKDLGNVWREETKPTKRAGACHRRCISVVF

SEQ ID NO: 4797 - protein, 111 aa, Zea mays
  VARIANT 89: note = Ancestral polymorphism is S, Derived polymorphism is L
  VARIANT 13: note = Ancestral polymorphism is G, Derived polymorphism is E
  VARIANT 10: note = Ancestral polymorphism is R, Derived polymorphism is S
  VARIANT 9: note = Ancestral polymorphism is H, Derived polymorphism is Y
MFMRPDDLHRPFGKFGPVKDIYLPKDYYTREPKGFGFIQYFDPEDASNAKYHMDGKMLLGREIDVVFAEENRKKPSDMRARKKKVPGSLTSGEIFIAFPSCQQIKECKPHC

SEQ ID NO: 4798 - protein, 172 aa, Zea mays
  VARIANT 79: note = Ancestral polymorphism is G, Derived polymorphism is E
  VARIANT 63: note = Ancestral polymorphism is R, Derived polymorphism is C
  VARIANT 22: note = Ancestral polymorphism is T, Derived polymorphism is M
MKVLLDQQTFLALLRSVECLSTGRQVHAHVIVSGLHSRVYLWNSLIKMYNDAGDVETAELMFRSALVLDTVSCNIMISGYVNEGCTLMALWFFSDMASRGIVFYQYTVVALLTCCGRLKNEIIGSNHGTKNSETIKGKLSFSAKVLQAGGIDKVFREYFAVEKDEKPRKAFQ

SEQ ID NO: 4799 - protein, 408 aa, Zea mays
  VARIANT 23: note = Ancestral polymorphism is E, Derived polymorphism is K
  VARIANT 102: note = Ancestral polymorphism is N, Derived polymorphism is T
  VARIANT 111: note = Ancestral polymorphism is R, Derived polymorphism is Q
  VARIANT 261..408: note = Derived polymorphism lacks residues 261 to 408
MSALLDLLMGIFRQQTLGGAALELAALAAPLWLAALVGLLIGWAWRPRWAGVVVGDHNAQQAAQLPPPPAAAAVVPRNEAPAVVTRTVVAPAAPEDEQLAVNTRDLMHLWRLVQEKDGGPSWIHMMDRTLPTMRYQAWRRDPPNGPPQYRSSTIFEDASPEVVRDFFWDDEFRVKNSWDDMLLQYETLEQCAKTGTMVVRWVRKFPFFCSDREYIIGRRIWASGKTFYCVTKGVPRPSVPRQNKPRRVDLYYSSWCIRPVESRKGDGAMTACEVLLFHHEDMGIPWEIAKLGVRQGMWGCVKRIEPGLRAYQVARTAGEPISKHAAMAHVTTRFDADELVTEDSAEASSSSDNNKTAEVEKPKHWTNNIPKVLMIGGAVALACTFDGGLMTKAAIFGTARRFAGPGRR

SEQ ID NO: 4800 - protein, 85 aa, Zea mays
  VARIANT 39: note = Ancestral polymorphism is T, Derived polymorphism is I
  VARIANT 40: note = Ancestral polymorphism is V, Derived polymorphism is M
MLNISIGESGDRLTRTAKVLEQLSGQSPQPCCDIAARYTMRSFGIRRNEKITCYVTALNCTMSLLFSARQSMFYLQQASRHQTVR

SEQ ID NO: 4801 - protein, 301 aa, Zea mays
  VARIANT 33: note = Ancestral polymorphism is M, Derived polymorphism is I
  VARIANT 55: note = Ancestral polymorphism is R, Derived polymorphism is L
  VARIANT 115: note = Ancestral polymorphism is R, Derived polymorphism is Q
  VARIANT 243: note = Ancestral polymorphism is G, Derived polymorphism is V
MRPVFVGNLDYDTRHSELDRLFYRYGRVERIDIKSGLPALAFPPFAHPLVYLRLRPVLDSISSYCVPSHLVQYISDYFRLGHLLLIFIVLTCTFTSVGYAFVYFEDERDGNDAIRALDGYPFGPGRRRLSVEWSRGEQAGRRDGNKPEANTKPTRTLFVINFDPMNTRVSDIERHFTPFGNISSVRIRKNFAFVQFETMEEARKALEATHATTLLDRVISVEYAFRDDSEVSDRYGSPRRGGGYGRRGDSPVYRSRPSPDYGRPASPVYGSYDGPGPVRDRYRRSPAYRSRSPPAKRRAYD

SEQ ID NO: 4802 - protein, 194 aa, Zea mays
  VARIANT 167: note = Ancestral polymorphism is P, Derived polymorphism is L
  VARIANT 101: note = Ancestral polymorphism is E, Derived polymorphism is K
  VARIANT 87: note = Ancestral polymorphism is D, Derived polymorphism is Y
  VARIANT 85: note = Ancestral polymorphism is I, Derived polymorphism is F
  VARIANT 68: note = Ancestral polymorphism is H, Derived polymorphism is Y
  VARIANT 45: note = Ancestral polymorphism is Y, Derived polymorphism is C
MNRRLVLGHVCYHIVAARLNGYMATVTNLKNPVNKWRCGATPISYYYFIRLIGRKASHVALECALQSHPNMVILGEEVAASKLTIFDITKQICDVVQARAEKELFVYRKSMASMPKVFLLRISLLSFHHGHLHSEFLPPFIRKQLNFPSVLRQNSSSFLLEDVYRNPGPLQFEGPSVDSNPISLCVEDQDYMAE

SEQ ID NO: 4803 - protein, 106 aa, Zea mays
  VARIANT 1: note = Ancestral polymorphism is M, Derived polymorphism is I
  VARIANT 40: note = Ancestral polymorphism is R, Derived polymorphism is H
  VARIANT 44: note = Ancestral polymorphism is S, Derived polymorphism is I
  VARIANT 58: note = Ancestral polymorphism is S, Derived polymorphism is R
  VARIANT 60: note = Ancestral polymorphism is S, Derived polymorphism is F
  VARIANT 65: note = Ancestral polymorphism is C, Derived polymorphism is S
  VARIANT 73: note = Ancestral polymorphism is T, Derived polymorphism is I
  VARIANT 76: note = Ancestral polymorphism is K, Derived polymorphism is N
MDLPGWYLTYSYHLMSNCYSPQPLSVTSNLYTNNDCETSRMKISLHREVLGVRSIVRSSSVEWGSVAKKQPMTWHKDTRDSMWSSTLNITMHQDDWVPAFERGMGP

SEQ ID NO: 4804 - protein, 127 aa, Zea mays
  VARIANT 77: note = Ancestral polymorphism is A, Derived polymorphism is G
MAAGRGDAASMVAVGLVWGATNALMRRGALVWDRRARACPSGNVLRRWAELLLTWQYSAPFAANLSASAAFFALLGGAPISVAVPVTNAVTFAATAAAAAALGERVRPAPAVLGTTLIVLGVWVCIS

SEQ ID NO: 4805 - protein, 358 aa, Zea mays
  VARIANT 194: note = Ancestral polymorphism is Y, Derived polymorphism is N
MAYRELELSLLSAQELKSVNLMTRMHVYAVVSISGDPLTRQCTEPDPYGGRNPCWNATFRFAVPPTASGASLHVLLRAERLLGDRDVGEVVVPLADILAGATGAGPQPPQVASYQVRKVHRWEPRGVLNVSYRLGPVVAPVVKRVPDKAANFSAYAPVGVPQHDEAAQNKSPVMAYPVGVPQQASHPPAKPDPYRTPTPPRPRTATVHEASSAPAPPPMNGLGQPGPTHVYMGPQTQIIFGGAPTSTATSPARSIVSPRSRKEDRWRPSVLSQSHHDTESSSPFSSRSSSFSSSPLSPRPSTTTSPRPPAVSDDAEVATFRRSTSVSPYSSSPLAPVLPKPAISSPLPSVAPSLSTHH

SEQ ID NO: 4806 - protein, 505 aa, Zea mays
  VARIANT 95: note = Ancestral polymorphism is R, Derived polymorphism is C
  VARIANT 88: note = Ancestral polymorphism is T, Derived polymorphism is K
MAPSKVAAAVNGQKPMVPNIVQSSSTLPPVAGGDEEFAPSVWGDFFVTYAPPVSQASEQRMRERAERLKAQVRQAFDAASMDVAGLVTYVDTLERLGIDNHFRDLIGGALDRIRAEELPEHGGGLHIVALRFHLLRQHGIWVSTDVFDAFRDDASGFCSSLCSDDDPRGLLSLYNAAHMAVPGEVVLDDAIAFARGRLLDILRGSKVRSPVSEQITRALDIPLPRFTRRLETMHYIAEYEHEETHDGLLLELARLNFVLVRALHLRELKDLSLWWRDLYNTVKLPYARDRMVEIYFWTCGMLHEEEYSLARMFFAKTFGMVSLMDDTFDVHATLDECHKLKEAMQRWDESEVYILPEYLRMLYIQTLSNFREFEEILEPNKKYRMAYTKEAYKLCSQNYLKEAIWSSQKYQPSFKEHEELSIMTSGLPMLTILTLMGYGDEATPEAFEWVSSVPEMVRAGSQVTRFLNDLSSYKLGKHKKDMPSSVETYMVENGLTGDLKQVLPL

SEQ ID NO: 4807 - protein, 197 aa, Zea mays
  VARIANT 177: note = Ancestral polymorphism is P, Derived polymorphism is L
  VARIANT 172: note = Ancestral polymorphism is R, Derived polymorphism is W
  VARIANT 147: note = Ancestral polymorphism is A, Derived polymorphism is V
  VARIANT 133: note = Ancestral polymorphism is G, Derived polymorphism is S
  VARIANT 126: note = Ancestral polymorphism is R, Derived polymorphism is W
  VARIANT 125: note = Ancestral polymorphism is V, Derived polymorphism is L
  VARIANT 124: note = Ancestral polymorphism is S, Derived polymorphism is G
  VARIANT 123: note = Ancestral polymorphism is G, Derived polymorphism is R
  VARIANT 116: note = Ancestral polymorphism is E, Derived polymorphism is K
  VARIANT 111: note = Ancestral polymorphism is P, Derived polymorphism is S
  VARIANT 90: note = Ancestral polymorphism is T, Derived polymorphism is M
  VARIANT 26..197: note = Derived polymorphism lacks residues 26 to 197
  VARIANT 13..197: note = Derived polymorphism lacks residues 13 to 197
  VARIANT 6..197: note = Derived polymorphism lacks residues 6 to 197
  VARIANT 3..197: note = Derived polymorphism lacks residues 3 to 197
  VARIANT 2..197: note = Derived polymorphism lacks residues 2 to 197
MEQLVGVHHHHHSLSPRAPRTPTRPQPHPHPLLHHLPSNRFRDLHSQIHNHIHPAVPAASRVLRATPPFFLTLLASVYLLASVTIFSTPTPLLRLRLASPRPLILPKPAPPPPAPELFDLDVGSVRVCLTNVGAAVTSFLVPDKNGAGSLWYLPSVCLCSTMALTLLFHDARLVFLPGVLADVVLGFDSLDPYLVSS

SEQ ID NO: 4808 - protein, 453 aa, Zea mays
  VARIANT 18: note = Ancestral polymorphism is E, Derived polymorphism is V
  VARIANT 179: note = Ancestral polymorphism is R, Derived polymorphism is T
  VARIANT 288..453: note = Derived polymorphism lacks residues 288 to 453
  VARIANT 348: note = Ancestral polymorphism is I, Derived polymorphism is S
MMELSRRHGPLMFLRLGEVPTLVVSNAEAAELVMKTHDLAFCSRPTTSVTIDIVGCKGKGLGFAPYGDRWRQMKKIVVVELLSAAQVKRIESIRANEVGRLLQSIAAARGAVNVSAEVKALAPDLVARAMFGGNCAEKADFIRRYNEVSQLVSGFFLVDLFPSSRLVRWLSIGERRLLRSYGGIQRIIASIIESRKAASTSDDGDNCSLHDHPAEDLLGVLLRLQKEGSLAFPLTSEIIGAVMFDIFGGATTTLGSTMEWAMSELIKKPETMRKTQEDLRHVLGGPQRGVITNTDLVGLTYLPMVIKEVLRLHPPNPLLVPRESREDCQVMGYHIPKGTKVLVNAFAISRDSRYWNNPEDFSPERFQNSNVDYKGTDFEFTPFGAGRRRCPAIMFATSTLEIALANLLYHFDWALPDGVHPEMVDMSEQYGMGVTKRLDLHLRAIPYVYSTMA

SEQ ID NO: 4809 - protein, 529 aa, Zea mays
  VARIANT 165..529: note = Derived polymorphism lacks residues 165 to 529
MSLVCSVSKAYAHHQVTERVARSRRALRCSASQVWRRAAAARLSSLLVHVVYFVAMSCAGWGLLVALKVRAPNRRPRGIDMFFTAVSASTVSSMSTVEMEVFSSGQLLVLTALMFGGGEVFVSLVGLASKWSKMRKQIKNRSRRVESHDGDIELETTGDDADADSRSITSTVTEENDDIPLDAKILRRNAVRSLFFIVLAILVVVHTVGTVAVAAYVYAAPGARQTLRRKALNVWIFSVFTTVSTFSSCGFMPTNENMMVFSRDVPLQLLLVPQALVGNTLFPPVLSACVWAAAAATRREEVVEIARKGREAMGYYHLFPARRCWMLAGTVVCFLAVQVALVCAMEWGGALRGLSAGEKVSNALFLAVNSRHTGESTLDLSTLAAAILVLFVLMMYLPPYTTWFPFEEDSKREHSTEDQLRSTILSQLSYLAIFVIAICITERRKLKEDPLNFNVLSIVVEVVSAYGNVGFSMGYSCSRQINPDGLCADRWTGFAGRWSDSGKLILIVVMFFGRLKKFSLKGGKAWKLN

SEQ ID NO: 4810 - protein, 209 aa, Zea mays
  VARIANT 14..209: note = Derived polymorphism lacks residues 14 to 209
  VARIANT 77..209: note = Derived polymorphism lacks residues 77 to 209
  VARIANT 153..209: note = Ancestral polymorphism lacks residues 153 to 209
  VARIANT 157: note = Ancestral polymorphism is P, Derived polymorphism is L
  VARIANT 177: note = Ancestral polymorphism is V, Derived polymorphism is A
MAHGGCGEIISRLQNFDRSSVASVVTAADKGGATHVDIACDKDLVKLAMDVTNLPVDASVFECFSTYNEYGDIETKQPNSTIRKCARVQLVKNGKKIAAFVPNDGCLNYIEENVINSTKSSAPQKPSAPRPDSDIGDPQHIVAVLYIRVTIPWFLYPGRRQPVNQGDLIVLGADLIVMAISVVDGWTDADTKLMEHLLVNRVHFVLLSY

SEQ ID NO: 4811 - protein, 205 aa, Zea mays
  VARIANT 26: note = Ancestral polymorphism is E, Derived polymorphism is K
MASCSIHQGKTAADELEHWLAAGTGEQSRQDAGRRGQAGKGLSEGARRAQQGEATELGTERGQQAAGRGQQGSRRTRHGRGKRELWPGRCAAGRDLATWEEHAAEGEQGNGRAMAGIFGGKTQRARELGVAMEEQGAQSVGEEGEREKGAAGEGTRLGAQQENEQGGASAMGSQGLGCMWLAGARVGDELEGERAARKYPAAAEG

SEQ ID NO: 4812 - protein, 222 aa, Zea mays
  VARIANT 31..222: note = Derived polymorphism lacks residues 31 to 222
  VARIANT 128..222: note = Derived polymorphism lacks residues 128 to 222
  VARIANT 175..222: note = Derived polymorphism lacks residues 175 to 222
MTPSRSLPSGHRPPRQVQMFNDICLPNLHFQLLAARAEALFHLNLLDEADVAISSASKLNYTSSCSPDTKFCGFIANAYLFYVHAQVDMALGRFDHVVSSIDKARIIDPGKTEVVTMHNKVKSVARARSLGNELFNSGKFSEACIAYGEGLKQHPVNKVLYCNRVACRFKLEQWEKSIEDCNEALKIQPNYTKALLRRAASYGKVAYFVLQPFMFFNPFFLI

SEQ ID NO: 4813 - protein, 125 aa, Zea mays
  VARIANT 40: note = Ancestral polymorphism is G, Derived polymorphism is V
MSRAQAARSFRGKPCHGHNSKAARRWPSRLVDGFRRMLVGLFSFPPRPPKVTFSVVHDHRAAAAAGAGAPATATGGCGGGDASKRSSWSSSNLHPLNAHYDEAIADCVEFFNKSARVDLRSRPHF

SEQ ID NO: 4814 - protein, 459 aa, Zea mays
  VARIANT 228..459: note = Derived polymorphism lacks residues 228 to 459
MPLATLLLPSVSTPTAGDHRTHSRRHDHHHGSKRKKKPPPPPSPQPSLPLAPRTPPPPGAPSPKVRAAGKNNHAQYQYQQRRGQPTKNRAAAASSSWEQVKSLLSCRTATAAARVHDPSALARLRGASLCAMRDVVLSSASGDRDTAPLNRRRAPSSSAASGAGSSSHHSSLRGLSGCYECRAIDVEPMSRRRYPRPRELCACPQCGEVFTMADSLEHHQAIRHAVSELGPEDSGRNIVDIIFNSSWQKRGRPICHIDRILKVHNAPRTVARFEAYRDAVRSRSRCRAAARVAADGNELLRFHSAPLACALGLGGATALCCAGGASSPCGVCTAIRHGFAPWAGAHPLGVRTTASSARAHDCGCSASPSSVQQTQQPANDAAACRAMLVCRVIAGRVRRGGGGGATSNAADEDQEGPFDSVAVEDAVSSSMYGNLEELFVANPRAILPCFVVIYRVLDA

SEQ ID NO: 4815 - protein, 317 aa, Zea mays
  VARIANT 212..317: note = Derived polymorphism lacks residues 212 to 317
MKCDFSAMGYEDGDVSLDGQVVPKKDTFRYLGSMLQKDGDIDEDLTKCDDASTPAEGTFLNCYAGILEPIRADMRDAKLGVGKQEEDDFFTSEENVQRKKLNIELEETEEHIKKREVCNLTPGASFSTFMQVFSILCAFYLVVSFPCLVQIMTIQVIAEREHKIRSEVKEIQKVFFCNLCNKQYKLAHEFESHLSSYDHNHRKRFKEMREMQSSSGSRDDRQKREQQREEKELAKIAQLFSADAHRKQQKDKQEKSETEDAAPKNMAASSNQDQRQTLKFGFSKMAPSKVLVGSASKKPKVATKVSSVFGNESDEDS

SEQ ID NO: 4816 - protein, 245 aa, Zea mays
  VARIANT 212..245: note = Derived polymorphism lacks residues 212 to 245
  VARIANT 187..245: note = Derived polymorphism lacks residues 187 to 245
  VARIANT 179..245: note = Derived polymorphism lacks residues 179 to 245
  VARIANT 171..245: note = Derived polymorphism lacks residues 171 to 245
  VARIANT 149..245: note = Derived polymorphism lacks residues 149 to 245
  VARIANT 64..245: note = Derived polymorphism lacks residues 64 to 245
  VARIANT 54: note = Ancestral polymorphism is G, Derived polymorphism is R
  VARIANT 50: note = Ancestral polymorphism is G, Derived polymorphism is S
  VARIANT 17: note = Ancestral polymorphism is G, Derived polymorphism is R
MSEANEDKTSRDFKEMGSRLAGEVIAFLKKKMDKLSRYGGCKELKLSFVGHSIGNIIIRSALAEPALQPYLKNLYTYMSISGPHLGYWYNSNSLFNSGLWLLKKLKNAQCIHQLTFSDDQDPHNTYFYKLCKLKTLENFKNIILLSSPQDGYVPYHSARMELCPAASSDTSKKGQVFTEMLNNCLDQIHAPSSDTRTFMRCDVNFDRSNHGQSLNTMIGRAAHIEFLETDIYAKFIMWSFPDLFR

SEQ ID NO: 4817 - protein, 100 aa, Zea mays
  VARIANT 28: note = Ancestral polymorphism is I, Derived polymorphism is T
MAGRGTTTGAVAVGEERRRLPEAGLNRIILRWAFIDKAISGFGALALAWATIVLLGGFSTLIKQKDFWFVTVISFLEATRFVSSSQLENLQANSSHGSLI

SEQ ID NO: 4818 - protein, 782 aa, Zea mays
  VARIANT 88..782: note = Derived polymorphism lacks residues 88 to 782
  VARIANT 284..782: note = Derived polymorphism lacks residues 284 to 782
  VARIANT 291: note = Ancestral polymorphism is R, Derived polymorphism is Q
  VARIANT 299: note = Ancestral polymorphism is S, Derived polymorphism is N
  VARIANT 333..782: note = Derived polymorphism lacks residues 333 to 782
MGRLFSSAMDPEDQFIINAPEVVAAQHEKFEAMEQGSWQGHHRTNRPEPPATPPRRGCLPLGRRSSSFLTSRRRRCCTCRLFFARTLSMGFTFAQFAASITSVVLAVLRLSRQDYMDPADQSDSDHKSIRGSLNLFYGLVLAQGVSTFLADTMLPIDTSRVLKLSVTYQLGHSGLLVIKRYMLDTYMKCSSGSVREAMDMDLVSFAMEMARSTSVADRLVGVRVLTASSAWTTQGAPTAACVFWSPEMDGDEENVGSFRRTSARTRRMVTRMASALASSDNRAQDGYEVLRKVGRGKYSEVFEGFRVGSDERCVIKILKPVKKKIKREIKILQNLYGGPNIVKLLDIVRDDESKTPSLIFEHVNNTDFKAALDLMVLTFPGICVGTRLLITDSARTARYESVKTTTASTTTSNVSIELTWLGVKILKKIMDNPDNCKEVAKDADDQVISSIVDLTTVSDGDSSSSISWSPVAEEIIVEAVQVLHRLVRTTGDAGKALRRKISENLHVVRNMRKILEHPGSHTELLTDAIGVLACLALDETGKEGIGSSPRVIRKLVPYLVVETPSAPSNRVELAKSAVEALLVLAVDSQRIALRILEELKVEGMQQLVDMLSSDSTELRSMAARLLAVLRVINSVAEHAHYNRTNEGPSRAHCCLLESLVGLSVQICASIQASEFGDALRDANLTVDLLMHKLSRILAVYKSPDTEYPGIRRGTVELIIWMLRSSRRCVEFFLERRVDRAVKEVAETEERLEMFKTFCCGIGLAKHGEPVSYLVASALPSIA

SEQ ID NO: 4819 - protein, 441 aa, Zea mays
  VARIANT 178: note = Ancestral polymorphism is G, Derived polymorphism is R
MHGEASSQRNEWTAGFVVTKASPVMVRPSELELGRTPTPSLPAGDYATVPLSSFDRRVPPMPATSLLVFERTIDEPVETIKRALSRALAHYRPMAGRLDGAGGIACTDEGVTFVGAAASCALKEATTRALQEMDLAVCYPGLLCRDAEPLLLVQVTEFACGGFVVGVTSNHVAADGLGMAQFLKALGELARGTSPPSCIPVRSWDESLPVSSAIPAAKGSMEHHDPQHLATLDIVIPSDLISRIKADDCCSVLDAVMAVLWRCRTRATMSPCDAESPAPLKFACNMRAHAGAPAGYYGNCIRVQVVRATAGVVASSGIGHLVGLIRRVKEMVPDLLSTPGSRAEADHCQGQHAPPPSLWYETFTVTDWRNLGLDAVDFGGGPPERVLLRHDRRAMVPSCVVCPRSRAKRHECDGVFVSSKFVKPQHVDALLAELAALVASG

SEQ ID NO: 4820 - protein, 206 aa, Zea mays
  VARIANT 135..206: note = Derived polymorphism lacks residues 135 to 206
  VARIANT 129..206: note = Derived polymorphism lacks residues 129 to 206
  VARIANT 96..206: note = Derived polymorphism lacks residues 96 to 206
  VARIANT 93..206: note = Derived polymorphism lacks residues 93 to 206
  VARIANT 74..206: note = Derived polymorphism lacks residues 74 to 206
  VARIANT 41: note = Ancestral polymorphism is I, Derived polymorphism is F
  VARIANT 37: note = Ancestral polymorphism is F, Derived polymorphism is I
  VARIANT 32: note = Ancestral polymorphism is P, Derived polymorphism is L
MCADIIVGNELIRGISGGQKKRLTTGEMLVGPTKVLFMDEISMGLDSSTTFQIVKCIQQIVHLGEATVLASLLQPAPEVFGLFDDVMLLSEGQIVYQGPQEYVLEFFERCGFWCPQRKGVPDFLQEVTSKKDQEQYWIQNEKPYHYVSVPEFVAKFKKFHMGKSLKKQLSVPFHKRKIHKYALVFSEKSVSTLELLKVYGPKNDFS

SEQ ID NO: 4821 - protein, 383 aa, Zea mays
  VARIANT 343..383: note = Derived polymorphism lacks residues 343 to 383
  VARIANT 321: note = Ancestral polymorphism is P, Derived polymorphism is L
  VARIANT 252: note = Ancestral polymorphism is R, Derived polymorphism is C
  VARIANT 178: note = Ancestral polymorphism is G, Derived polymorphism is R
MKKITVVELLSATQVKRIESIRAHEVGRLLQSVAAAAARGAVNVSAEVKALAPDLVARAMFGGNCAEKADFICRYNEVSQLVSGFFLVDLFPSSRLVRWLSIGERRLLRSYGGIQRIIASIIESRKAASTSDDGDNCSLHDHPAEDLLGVLLRLQKEGSLAFPLTSEIIGAVMFDIFGGATTTLGSTMEWAMSELIKKSETMRKTQEDIRRVLGGSRRGVITNTDLVGLTYLPMVIKEVLRLHPPNPLLVPRESREDCQVMGYHIPKGTKVLVNAFAISRDSRYWNNPEDFSPERFQNNNVDYKGTDFEFTPFGAGRRRCPAIMFATSTLEIALANLLYHFDWALPDGVSPKMVEMSEQYGMGVTKKLDLHLRAIPYVYSTMA

SEQ ID NO: 4822 - protein, 557 aa, Zea mays
  VARIANT 59: note = Ancestral polymorphism is R, Derived polymorphism is C
  VARIANT 261: note = Ancestral polymorphism is R, Derived polymorphism is T
  VARIANT 283: note = Ancestral polymorphism is T, Derived polymorphism is A
  VARIANT 502: note = Ancestral polymorphism is Q, Derived polymorphism is L
MAPSNIVVQSSSTPPVAGGDEEFAPSVWGDFFVTYATPVSQASEQRMSERAELLKAQVRQAFDAASMDVAGLITYVDTLERLGLDNHFRDLIGAALERIGAEELPEHGGGLHIVALRFRLLRQHGIWVSTDVFDAFREDAGGFCSSLCSDDPRGLLSLYNAAHMAVPGEVVLDDAIAFARGRLLDIISKGEVRSPVSEQITRALDIPLPRFTRRLETMHYIAEYEHEEAHDGLLLELARLNFVLVRALHLRELKDLSLWWRELYNTVKLPYARDRMVEIYFWTCGMLHEEEYSLARMFFAKTFGMVSLMDDTFDVHATLDECHKLKEAMQRWDESEVSILPEYLRLLYIKTLSNFKEFEEILEPNKKYRMAYTKEAYKLCSKNYLKEAIWSNQKYQPSFKEHEELSIMTSGLPMLTILTLMGFGDEATPEAFEWVSSVPEMVRAGSQVTRFLNDLSSYKLGKNKKDMPGSVETYMVENGLTGDEAAAAIAALLENRWRILNQTRMEIDHTLLPAAQVVLNMARANEIIYLHGRDAYTFGADLKDLVTTLFLKQVLPL

SEQ ID NO: 4823 - protein, 387 aa, Zea mays
  VARIANT 172: note = Ancestral polymorphism is A, Derived polymorphism is V
  VARIANT 276: note = Ancestral polymorphism is G, Derived polymorphism is S
MKLHQVWQLGIKDMKAVPLPRPRAATRRRAWMLAVAAFIFVALVWAYLYPPPRYTSPVRDWLPGRLPAEPAREFTDEERASRVVFRQILTTPPVRSKNSKIAFMFLTPGTLPFERLWEKFFEGHEGRYTIYVHASREKPEHVSPIFVGREIHSEKVTWGTISMVDAERRLLANALQDMDNQHFILLSDSCVPLHNFDYVYDYLMGANLSFIDCFYDPGPHGNFRYSKNMLPEVTEADFRKGSQWFSVKRQHALMIIADSLYYTKFKLHCRPGMEDGRNCYADEHYLPTVFHMMDPDGIANWSVTHVDWSEGKWHPKAYRAKDVTFELLKNITSIDISHHVTSDSKKVVTEKACLWNETKRPCYLFARKFYPESINNLLTLFANYTLI

SEQ ID NO: 4824 - protein, 139 aa, Zea mays
  VARIANT 61..139: note = Derived polymorphism lacks residues 61 to 139
  VARIANT 3: note = Ancestral polymorphism is K, Derived polymorphism is N
MAKLLSLTALFLFIHGMLPSNLYSPLFSFSFVEFTYYQMINWFGHKVEKLEASNFHITQAQAHHIAHSISSNWNSLVSLSLLVVSILSSMSSQAAFKIGTALVFTGFKAYEKWEDSIDSMVGDACTILLHFGSTKKSSS

SEQ ID NO: 4825 - protein, 238 aa, Zea mays
  VARIANT 222..238: note = Derived polymorphism lacks residues 222 to 238
  VARIANT 117..238: note = Derived polymorphism lacks residues 117 to 238
MSRPVGIGGSSQPPAQSSFPPPPPCSPGAPHLVASAAALLSETTATLVESAAPLPRDDDSVDVELLGLGLRVQSSTDHGSNSVSAFPSGQNNVFPPPMGSAAPFRTLMSACSMAVDELLASADYDGLVGSPASLRSARGKTLVPSNLDDLFSAEMAGAAASHSPRYADQGGSAFSPTRKAAMLNQFQQQQSLLSPRSTVVPEPMSPMSSRLLSALAQREKMQQQTLRIERTVREQIRP

SEQ ID NO: 4826 - protein, 249 aa, Zea mays
  VARIANT 58: note = Ancestral polymorphism is R, Derived polymorphism is Q
MAYPHFTRPAAIPTLQASSYHHTHEEQAMKMSASVAAASPTLRFSSATHPLHRPLRRRLPSVRCSLAAAAGPGVRAPPELVDSILSKVKGTDRGVLLPKDGHQEVAEVALQLGKYCIDDPVKSPLIFGEWEVVYCSVPTSPGGLYRTPLGRLVFKTDEMVQAVEAPDVVRNKVSFSVFGLEGAVSLKGKLNVLDSKWIQVVFEAPELKVGSLGFQYGGESEVKLEITYVDEKIRLGRGSRGSLFVFLRR

SEQ ID NO: 4827 - protein, 189 aa, Zea mays
  VARIANT 12: note = Ancestral polymorphism is L, Derived polymorphism is M
MARLLAARALALARPSGTPSALRFCPSRALSDEVEFVEIDLSEESPASSSGGEGEGDSATVQAQMGSRRLEDAIYGVLVRRAAPEWLPFVPGASYWVPPLPRPLGVASLLGAAVYTARGATAMTEEEAFSFTTVRGCPSAAYFVGGLSGFANQAVCMYSGLGWVALHRLLPKRAARGCEAPLMIVDVDS

SEQ ID NO: 4828 - protein, 296 aa, Zea mays
  VARIANT 83: note = Ancestral polymorphism is D, Derived polymorphism is H
  VARIANT 155: note = Ancestral polymorphism is S, Derived polymorphism is F
MTRLVPLQLLVVVVGAAAITVATASAAHVDSFSYPTFDATTTQDLVAATNTSILTSASLLFGHDADFNFNRTEGFILLSRTVDVWRAGPGGGPAREASFNTSFALSGAAPVAYVVLRDSYPPLHGTGGLRGFANYSASDAEDGATPRNASSGLASVEVGPVRSYGPDDPAVGLNVTVTPTGGTAPGGGGGGGGARAVWIEYDAAKHRLSVYVAAAGEPRPAAALLDARLGLAGRRTTETAMVGFFASAIQDVLVGVRDWNLTVDRLDTSEGGGRKEGAACWVFVLLAVLGSVAATA

SEQ ID NO: 4829 - protein, 565 aa, Zea mays
  VARIANT 221..565: note = Derived polymorphism lacks residues 221 to 565
  VARIANT 163..565: note = Derived polymorphism lacks residues 163 to 565
  VARIANT 123..565: note = Derived polymorphism lacks residues 123 to 565
MARRSSSSSSGTWRYLNPAYYLKRPKRLALLFFVFVAATFAFWDRQSLVSEYESEISRLEDDINRLHDQLRKAGVNLDENPVVSNKNSRKDLVVEIDPVNNERREKVKEAMLHAWNSYVKYAWGMDELQPQSKNGINSFGGLGATLVDSLDTLYIMGLKDEFQKARDWVAESLDFDKDYDASVFETTIRVVGGLLSSYDLSGDKVFLDKAKDITDRLLPAWDTTSGIPYNRINLAHGRAHNPGWTNGDSILADSGTEQLEFIALSQRTGDPKYQQKAENVIKQLQKIYPSDGLLPIYINPHSGTASYSTITFGAMGDSFYEYLLKVWIQGNKTEHVKHYRQMWETSMEGLLSLTKKTTPSNYYYICEKNGGSLSDKMDELACFAPGMLALGASGYGPEKSEQIMNLAKELARTCYNFYQTTPTKLAGENYFFHTGQDMGVGTSWNILRPETVESLMYLWRLTGNKTYQDWGWDIFQAFEKNSRIESGYVGLRDVNTGEKDNMMQSFFLAETLKYLYLLFSPPSVISFDEWVFNTEAHPLRIVPVSDNKGIGTPVRQFGRKQGKPE

SEQ ID NO: 4830 - protein, 993 aa, Zea mays
  VARIANT 825..993: note = Derived polymorphism lacks residues 825 to 993
  VARIANT 468..993: note = Derived polymorphism lacks residues 468 to 993
  VARIANT 442: note = Ancestral polymorphism is P, Derived polymorphism is S
MDLVAGAVGSIIRKLGELLLAEYQLQACLPEEIESLKNELESAHVALRTVAEVPPEHLDQQVQLWAREVREASYDMEDILDTFLVNDAPAEKKDGLGKRRRLGRRLLDNIAGAMEKMRKLFKKSKECHTIAGAIEKMKERLREVADRRDRYAVPVAAPAPARTLDPRLAYMHREAAQLVGMDRSKAEVMAMLLPLPSSRCPEDDIDVSASGGDKMKIVSVVGAGGLGKTTLAKAVYDELKPRYDYEAFVSVGRKPDLVQVFTSIFFRLDVHKHEAIREVKDLQLLTDGLRTFLQDKRYLIVIDDVWDTESWETIKLAFDQKNKQSRVITTTRNRQVASSEKVYELHPLPHDSSKKLFYMRLFGGEDKCPANHPEEASQRILNKCGGVPLAIITMASLLVGKSREDWLEVCSSRGFYRGGGKDNNKQVDDTVWILSLSYYDLPSYLKPCLLYLSVYPEDYEVERERLIWKWVAEGFIEKKAGSSSSLFEQGEEYFHELINRCMIQAVGDDKEVADAIFGCRVHDMVLDLIRDISNEENFITVSYDDGRRGATSSSSSRHVVRRLAHQNRRITEEDNPVSGSMRSLVACGCDMDGWVLHTSSNKLLRVLALEKCTPPSMDIGHLGKLLHLRYLGLHGTRIKTLPEEIGSLKFLQALDLEDTKISRLPQTVCLLTQLMYLRGATGVTTLPDGFLGQVTSLEELHICLPTKDDEYSQKKFMQDMGKQGEIRMLVLYGNRIELDPWMQSSLVQSLGGLYKLQTLVVRHYADGVAAAQGSWDTAKLRRRLRILNLDVLRFHRVPSCIDPARLPNLSHLQLLVVHLDEAGLRALGGLPELTYLALSLKPRSLNSSSCKATVADVVAADGFFLKLRSLKLYGWMVQLVPSEDSASVSLSIWNEGAEGSTRDCTAGRVAPAIMPDLIHLEFNVPIAALYKITNNGCSCYSLGWECLPSLHKIKALVDYDGTYTADFEKPVAEMMQAAKLHPNQPIIEMVTQL

SEQ ID NO: 4831 - protein, 1209 aa, Zea mays
  VARIANT 995..1209: note = Derived polymorphism lacks residues 995 to 1209
  VARIANT 860..1209: note = Derived polymorphism lacks residues 860 to 1209
  VARIANT 682..1209: note = Derived polymorphism lacks residues 682 to 1209
  VARIANT 675..1209: note = Derived polymorphism lacks residues 675 to 1209
  VARIANT 398: note = Ancestral polymorphism is S, Derived polymorphism is L
MAAKVRFGLLVAMFQAMSGDKSSAKKRGRLRAFLDRAYVPCGGRDDYFSALRLVLPGLDRERGSYGLKEAALAAVLVDALGIAKDSTDAVRLTNWRRGGGGRNAGNFSLVAAEILQRRQGITSGGLTIKEVNDALDRLATTENRSEKALILSNLIKKTNALEMKWLLMIILKDLKLGISEKSIFEEFHPDAQDLFNVTCDLKFVCEKLNDRSQRHKRQDIEIGKAVRPQLALRVRDSSVAWKKLHGKQVVAECKFDGDRIQIHKNGEEIHFFSRSFLDHTEYAPGMSKIIKENILVDRCILDGEMLVWDTVLNRFAEFGSNQEIAKAAREGLETDRQRCIDVVFDILYAGDTSVIHQSLTERHQILQKVVKQLKGHLEILIPRRGLNVPRPSDEPCWSIIAHNAEDVDKFFKETIENRDEGIVLKDLDSKWEPGDRNGKWLKLKPDYIHAGADLDVIIIGGYYGSGRQGGEVAQFLVGLAVPSDDNSYPKRFLSFCRVGTGLSDEERDALVTKLNPYFRKNEYPKKPPKFYEVTNNSKERPDVWIESPDKSVIISVTSDIRTIKSEVFAAPYCLRFPRIQRVRYDKPWHECLDVQAFVDIVHSNNGTIQRVADDNSLKNDDTKHSRTNKKVEKCVSIIPSHFMKTDVSGLKGETLIFANLIFYFVNIPSSYNLEYFHKLVVENGGSFSMNLNDSVTHCIAAEKKGIKYQAALRQGRIIHYEWILDCCKEKHLLHLHPRYILFIADFARHKFPEEIDSYADYYYWDIEIADLKQIFCNIDKVSGDSNMVIQYKKKHCIDERFCFFQGCCVYLHNAPLVNADYNVISDLALKRVKQDLTMHGGQVCSSIAPATHLVVVSVLQVYNFDNLYKSFPPAERRYLHDKRLHVVSNKWLEDSVEKQMKLSETAYSLKPDTLEELEIKRSEENVQPPEHKFEEHKEVERSHAENMPRKRSRPTSSRTARAAPRAVRRIRPRRGNQKAKIGDVESEESGPSECQDDENLDTDDTSKIEEGITNKNKGLPAPASKPAWRTGATKGNQHTKIDDSGSEESGPCETAQDDYISKMEVDNIDNDRGPPPGAQLFTLGEQEVKGVKLNTVEEKQDSPFQRTTAAEAMSSTPGEKIEQMADPLHAMLLDMLPLLGQKRTEDTSKAPLAKAEKDPPAIGSSTSNSEILLPDAGTSGVPAPEPSAAPPKKKKVSYRDVVSELLKDW

SEQ ID NO: 4832 - protein, 452 aa, Zea mays
  VARIANT 101: note = Ancestral polymorphism is L, Derived polymorphism is Q
  VARIANT 65: note = Ancestral polymorphism is Y, Derived polymorphism is C
  VARIANT 37: note = Ancestral polymorphism is T, Derived polymorphism is S
  VARIANT 17: note = Ancestral polymorphism is S, Derived polymorphism is F
MHGRYLIVIDDVWDIESWEIIKSALDEKNTQGRIITTTRNRQVASNEVVYELQPLSHDSSKKLFCMRLFQGEDKCPANHPEEASKRILDKCGDLKTCLLYQSVYPEDYEIEECLIWKWVAKGFIQKKAGSSSLFEQGEEYFYELINRSMIQAVESKKFAGIIYGCRVHDMVLDLIRDLSTEENFVTVSYVDDRRGTPSSLTRNVVRRLAHQNRRLTKETHQDNLMESSMRSLVACGCDIDGWVFVFHPSSKLLRVLALEKCRPSTDIRNLLWLEHSETVRYTKSWDGLGKLLHLRYLGLCGTRIYELPEEIRSLKFLQALDLLVPSEEDSTSVSFNIWKGDEDVVALGSRTKGECSRRVAPTTLVVMPDLIELGFYVPFRTLYLYKSRNGSSCDSLGWECFPSRYTKSMQLSTVRSTHSFASFLQLPFLLGLSAWIYSELLGYRASSSHEKV

SEQ ID NO: 4833 - protein, 200 aa, Zea mays
  VARIANT 99: note = Ancestral polymorphism is A, Derived polymorphism is V
  VARIANT 15: note = Ancestral polymorphism is V, Derived polymorphism is A
MLRNMADSAVQPSLVIVYFGGNDSIDAHCSGLGPHVPLDEYIGNMRKIAEHLKSLSEKTRVLFLSCPPLNEEMLRNSTSSTILSEIVRTNETCRLYSDVCVALCKEMHLKVVDLWHAMQKREDWKTACFTDGLHLSEEGSNIVVEEILKVLKEAEWEPSLHWKAMPTEFAEDSPFDLVSSSGDATVNPSEWTIHRKIQWN

SEQ ID NO: 4834 - protein, 88 aa, Zea mays
  VARIANT 31: note = Ancestral polymorphism is C, Derived polymorphism is S
  VARIANT 41: note = Ancestral polymorphism is P, Derived polymorphism is L
  VARIANT 52: note = Ancestral polymorphism is R, Derived polymorphism is L
  VARIANT 56: note = Ancestral polymorphism is K, Derived polymorphism is N
  VARIANT 68: note = Ancestral polymorphism is R, Derived polymorphism is C
  VARIANT 69: note = Ancestral polymorphism is R, Derived polymorphism is L
  VARIANT 74: note = Ancestral polymorphism is V, Derived polymorphism is I
  VARIANT 76: note = Ancestral polymorphism is R, Derived polymorphism is W
MKRNPCITSSRRKCRKAHFTRPRPPSAAFSCPPGCRRSSIPIRKDDEVQVVRGTYKGREGKVVQVYRRRWVIHVERITREKVNDSVPG

SEQ ID NO: 4835 - protein, 275 aa, Zea mays
  VARIANT 17: note = Ancestral polymorphism is Y, Derived polymorphism is C
  VARIANT 34: note = Ancestral polymorphism is V, Derived polymorphism is A
  VARIANT 35: note = Ancestral polymorphism is G, Derived polymorphism is E
  VARIANT 37: note = Ancestral polymorphism is A, Derived polymorphism is V
  VARIANT 41: note = Ancestral polymorphism is D, Derived polymorphism is E
  VARIANT 46: note = Ancestral polymorphism is V, Derived polymorphism is M
  VARIANT 58: note = Ancestral polymorphism is P, Derived polymorphism is S
  VARIANT 69: note = Ancestral polymorphism is P, Derived polymorphism is S
  VARIANT 121: note = Ancestral polymorphism is L, Derived polymorphism is S
  VARIANT 122: note = Ancestral polymorphism is D, Derived polymorphism is N
  VARIANT 138: note = Ancestral polymorphism is W, Derived polymorphism is C
  VARIANT 150: note = Ancestral polymorphism is R, Derived polymorphism is L
  VARIANT 155: note = Ancestral polymorphism is Q, Derived polymorphism is L
  VARIANT 190: note = Ancestral polymorphism is S, Derived polymorphism is F
  VARIANT 226: note = Ancestral polymorphism is S, Derived polymorphism is N
  VARIANT 237: note = Ancestral polymorphism is P, Derived polymorphism is S
  VARIANT 250: note = Ancestral polymorphism is G, Derived polymorphism is R
  VARIANT 252: note = Ancestral polymorphism is H, Derived polymorphism is Y
  VARIANT 267..275: note = Ancestral polymorphism lacks residues 267 to 275
MPACVAGLIPAVVLANYTKSQYNRFLNDSQFSGVEIASEGDWVVVVLSTSTGSGDYSPVMLNVRIQSLPCFEQEGMVWIWPRDDPPKATIPSLLPPSGFTVHAEIVMELPVEHGLLLDNLLDLAHAPFTHTSTFAKGWSVPRYVLNEDLRLVLGQQERMINGANVWNWPVSYDKLGVRYRLWRDTVERGFERLPFSNQAESGSQLAGGPLNFFLVKFIRETMARISYLGVCLCALLPDAAASIWKAKVDGQHHRLSLSLLWCLNVNYRWHHEMQL

SEQ ID NO: 4836 - protein, 67 aa, Zea mays
  VARIANT 55..67: note = Derived polymorphism lacks residues 55 to 67
  VARIANT 45: note = Ancestral polymorphism is A, Derived polymorphism is P
  VARIANT 29: note = Ancestral polymorphism is S, Derived polymorphism is P
  VARIANT 14: note = Ancestral polymorphism is A, Derived polymorphism is T
  VARIANT 3: note = Ancestral polymorphism is A, Derived polymorphism is T
  VARIANT 1: note = Ancestral polymorphism is M, Derived polymorphism is I
MKALEAALQVASVAVVRLLVVAKETVLTSTVQRAVVVSATVLCFAASRWLANFIQNFYFQDYIHAYK

SEQ ID NO: 4837 - protein, 54 aa, Zea mays
  VARIANT 31: note = Ancestral polymorphism is K, Derived polymorphism is T
  VARIANT 22: note = Ancestral polymorphism is L, Derived polymorphism is M
  VARIANT 13: note = Ancestral polymorphism is R, Derived polymorphism is K
MQILDIFCNQQYRLHSYMWFILHLYWLIWDKRLLFHNITTSRAVIILDFMCQYQ

SEQ ID NO: 4838 - protein, 211 aa, Zea mays
  VARIANT 182: note = Ancestral polymorphism is T, Derived polymorphism is A
  VARIANT 172: note = Ancestral polymorphism is A, Derived polymorphism is T
  VARIANT 147: note = Ancestral polymorphism is E, Derived polymorphism is K
MSFLSVHQLDGANQSPSYCSAPEDFIVDNCKNIYFAGHKTTAVTATWCLMLLAAHPDWQDRARAEVLEVCRGQTAMDIDVLRQLKIVYHYLEPLGLFSMEEGALYQAECCTQLALMLDGANQSPSYCSAPEDFIVDNCKNIYFAGHKTTTVTATWCLMLLAAHPDWQDRARAEVLEVCRGQAAMDIDVLRQLKIVYHYLEPLGLFSMEEAP

SEQ ID NO: 4839 - protein, 387 aa, Zea mays
  VARIANT 265: note = Ancestral polymorphism is V, Derived polymorphism is M
  VARIANT 240: note = Ancestral polymorphism is R, Derived polymorphism is P
  VARIANT 144: note = Ancestral polymorphism is R, Derived polymorphism is W
MASIRRPHSPAKQHLLRHHHPFATSSPPSSPLRHSSTSSSPRTHHHLAGGYPHPFLFFTRRPLPRFAAFFLLGSFLGLLHFLSHLPRQTPHLRPASSSPAVIPRHQLPIVRLNNDDDDDMNNNKLLVVVTPTRARAAQAYYLSRLGHTLRLVDPPLLWLVVEAGNPTPEAAAALRGTTVMHRYVGCCDKLNASSSGDADALRFRPHQMNAALELLENHRLDAIVYFADEEGVYSLDLFKRLRQVRRFGTWPVPVISEDRKDGVGMVLEGPVCKQNQVVGWHTSEHASKLRRFHVAMSGFAFNSTMLWDPRLRSHLAWNSIRHSDTAKQGYQATTFVEQLVEDESQMEGIPADCSQIMNWHVPAGSENLAYPRGWRVGTNLDVVIPLK

SEQ ID NO: 4840 - protein, 722 aa, Zea mays
  VARIANT 608: note = Ancestral polymorphism is W, Derived polymorphism is R
MRYGSTASKTSSPSDMMRSEVTEAAKLLNLWNEWGLQILVLVSFGLQVFLLVFGGVRRHSNSTALAFSLWSAYVLADSTATYTLGHLSVDSRSNEHQLVVFWAPFPLLHLGGPDNITAYALEDNALWLRHLQILAVQVLGAAYVIYKYISSSGKLLLLASLSMFFVGILKYGERIWALKCGNISSIRSSISIRKVKTDPYQLLTLGTSEEDLLLGAHSQFDICKGVFADIIMLPNPLVRSQPKPRSVISYLGEDLYKLVEMELSLMYDFLYTKAAVIHTSYGFCIHFISLFGTATTFLLFQLSISSSGNRYSRVDVAISYVLLVGALVLEIISVCRAVLSTWTCSLLHRRGRGWEWCLHIITSLGQRVHPASRRLWSGSLGQYNLFHLCTRNTNEIGSRLAMKLGLEDWWNMMHFSGTFPHTNSSLSIQDIKKLVLQALRSKEQALQHQDTDLNSRGSFILKRMEAYKDFARWSVNIDFDESILVWHIATEVFIRKSKAKHAKELLEATEVLSNYLMFLLVVKPNMLPGAARHNIHLTSCEQLEGHCRTRFGDKDSPLAPSPVSWNLCYIIKELFHHDGPSCSRIPRREKLAEVAWSFSQFALVWAAWASSIASLTIQLKNISLGSVKAPNPHGNSIRDSANMYAILLANELMSIELRWQDQRDTLELILGVWVEMLLYAADHCSQESHARQLSNGCEFITIVSLLAHHFKYYSGAFRDAAT

SEQ ID NO: 4841 - protein, 400 aa, Zea mays
  VARIANT 346: note = Ancestral polymorphism is P, Derived polymorphism is S
  VARIANT 200: note = Ancestral polymorphism is D, Derived polymorphism is N
  VARIANT 164..400: note = Derived polymorphism lacks residues 164 to 400
  VARIANT 28..400: note = Derived polymorphism lacks residues 28 to 400
MSSFEPQVDATTEPESQLKRKSSDIGWEWGWLVDPNDKNQVKCLFCGHESTGGMHRFKQHLGHVGSVVTKCKKSLVGSSDSVSKLGPMDTFARRIDPKANQAKARRQQNINEALWKERTHQVQQYVARWVYTHGIPFHACDSDEFKEMVEAISRFGPGFQPPSQHHYRETLLEEEHARTKSLLQDHEDEKNKYGCSVMTDAWTYMKMRSIMNICAHTTAGTSFIKSKEMSNVSHTSIGNLPRFKKRIDQAKSFTIFVYGHHRSLTCMRSFTLKIDIIRPGVTRFATAYLTLQSMMEKKDALRKMVVNSKWYDLPDVKSKKGKEATTMVLSIPFCKGVSLCLKVFEPLVKLLRLVDGDVKPSMGFLYGELINAKKAIKEAFGNVEIKYKEVMSIIEKKNER

SEQ ID NO: 4842 - protein, 243 aa, Zea mays
  VARIANT 16: note = Ancestral polymorphism is D, Derived polymorphism is N
MVSLSTWFRYAAHKFDYCISLSLKKYNVGQISSTQLTDVIFKNFFHGKLTYVCQTKGEEAMAPIVSPTGGAVLVRKLANLSPTSSIAGQVNLLNAVSCSHGCHVQQFPCMRSSVDSVPCREVFVGDVVLLKDPEKSGNFVIRRLAALEGYEMVSNDEKDEPFVLEKDQCWVLADNLVLKPKEARDSRLFGPVPMTDILGRVIYSLRTAVDHGLVENSGMATKLDGPVLAVELDVEELAKNNKA

SEQ ID NO: 4843 - protein, 750 aa, Zea mays
  VARIANT 438..750: note = Derived polymorphism lacks residues 438 to 750
  VARIANT 517..750: note = Derived polymorphism lacks residues 517 to 750
MGMGWRRALCTSVQRDDDPDRDASTKKRRPQYDAPSPRGTAAGFFSAVKSAAAGGGAASGSGSNPSTPALRCRTRPLQQPADSAPVTPPSAPAPARNHRVPLMQALSAPVSPRSPSRFALLKASLLPSKSRCGVCSRGVKSGGSSAVFTAECSHAFHFPCIAAHARSSSANGVLSCPVCASPWRQAPFLASLRLHCSFHDDKHRGGGDGRKTPPPAKLYDDDEPLLAPKAAANGGGFNPIPEADEDDEEEQGAAEFRGFFPCPRSRTTSGLAITVAPEAALVSSGRRHGKYVVAVKVKAPGLRSSAAAPRRAPIDLVTVLDVSQGMMGEKLQMLKRGMRLVVASLGPADRLSIVAFSGAAKRLLPLRRMTRTGQRSARQIVDRLVVCAAAATTATATQGQQSACMGDALRKATKVLEDRRDRNPVATVMLLSDTQQQQQQSAAPENSSRKQFGRPAVAPATRFTHVEIPIGPGDPPPLVSECEEEPPVEHAFAKCLGGLVSVVMQEVHLELAFPTGEITAVYSCGPGQQAVAISGGAGVSVRLGEMYAEEERELLVEVRAPLGSHPHSLSVRCTYRDPASQETVRGAVQPLLLPALHGERALSSSRRLHDLFVATRAVAESRRLAELQDLGTAIHLLSSARALVLQSPVTPQQHELVGSLDTELSDMRWRRGNSQHQHEEVVTPTSRSGRRRGDGDTTVTVGTPRGSAGAGEALTPTSAWRAAEQLAKVAIMRKSMNRVSDLHGFENARF

SEQ ID NO: 4844 - protein, 113 aa, Zea mays
  VARIANT 37: note = Ancestral polymorphism is G, Derived polymorphism is S
  VARIANT 27: note = Ancestral polymorphism is H, Derived polymorphism is D
  VARIANT 17: note = Ancestral polymorphism is G, Derived polymorphism is S
MKHFHFNKNQLSGTLTGLFNSNMSLIHILFDSNQLTGPIPEELGGISSLQVLLLDRNSLKGTVPPNISNLVNLNELNLASNQLTRQLPDLSSMTKLNVVDLSNNSFTVSAAPN

SEQ ID NO: 4845 - protein, 1111 aa, Zea mays
  VARIANT 221..1111: note = Derived polymorphism lacks residues 221 to 1111
MIGQCQPRVRSFNVSGSGQCGMVGWRIGILGLHVLLPVFLHLPGEAAEEGRVKEEMVAKRWREGKGQCCSVSLNLNTGAPTLLACSRCPYHSQRWTMDRPFHISHTLRCHFNIILVASRPIRLNPSLCLASSLLLDLLPVPGAGNGFCYQRDPASVKSIYSGQMGQNMLQPQVLCLCSIILTLFFTLLQPTAAQITAPWEVDALKAIRGSLIDPHGNLSSWNRGDPCMGNWSHVICYNATGSDGYFHVKELQLLSLNLSGILAPELGQLSQMKIMDFMWNSIGGTIPKEVGNITSLELMLLNGNQLNGSLPEEIGFLPNLNRIQIDQNHISGLIPKSFANLNKTKHFHMNNNSLSGQIPPELSRLPSLVHLLLDNNNLSGYIPPELSKLPNVLIIQLDNNNFSGSTIPSSYGNISTLLKLSLRNCSLEGPVPDVSGIPQLGYLDVSWNQLRGPIPSIQFSSNITTIDLSHNNLNGSIPGIFSGLPYLQRLSLDDNNLTGSVPSNIWQDIDLRGNKSLVLDFQNNALNNLSTPLSPPPNVTILLHGNPVCIGQNQLNISQYCQSGTYVARGGSADNSTVCPPCSSDFPFERIPMSPIPCSCVVPVYVGYRLKSPGFSNFIPYESQFQQYLTSGLSLSSYQLEVSTFMWEEGPRLKMDLKIFPNNTPFFTVSEVFRLNGMFTAWQIADSDIFGPYELISFNQGWYNTIIPQGTKSGLSTGAIVGVVMAAFVAAAILSSLVTIIILRRRSRQSSSNKRTAKRISMKIAGVKDFTFDELSHCTHDFNDSTLIGQGGYGKVYRGVLADGIVVAIKRAQQGSLQGSKEFFTEIELLSRLHHRNLVSLLGYCDEDDEQDSITISDLFYFPFSRAKVPLDFPMRLRIALGSSRGILYLHTEADPPIYHRDIKASNILLDSKFVAKVADFGLSRLAPLPETEGSAPGHVSTVVKGTPGYLDPEYFLTHKLTDKSDVYSLGVVFLELLTGMQPISHGRNIVREVLAANQSGMIFSVVDNRMGSYPAECVEKFAALALRCCQDETDSRPSMVEVVRELDMIWRMTPGTENIASSESGVMGMGSNSTSTPTASGSRMDDHYISSMEVSGSNLLSGVMPSINPR

SEQ ID NO: 4846 - protein, 523 aa, Zea mays
  VARIANT 499: note = Ancestral polymorphism is C, Derived polymorphism is F
  VARIANT 371..523: note = Derived polymorphism lacks residues 371 to 523
  VARIANT 277: note = Ancestral polymorphism is R, Derived polymorphism is C
  VARIANT 110..523: note = Derived polymorphism lacks residues 110 to 523
MGSRFASHQLSNGLYVSGRPEQPKEKAPTICSTAMPYTGGDIKKSGELGKMFDLHVEKSRKSGPLGNAPSRNTSFGGTASNSGPVSNAGGRSNYSGSLSSSVPGAGGSARAKSNSGPLNKHGEPTKRSSGPQSGGVTPMARQNSGPLPPVLPTTGLITSGPISSGPLNSSGAPRKVSGPLDSAASMKMRATSFAHNQAVTNLNTEDGYSIQGSFPKPILWAVILLFVMGFIAGGFILGAVHNAILLIVVVVIFGFVAALLIWNACWGSRGGIGFVSRYPDADLRTAKDGQYVKVTGVVTCGNFPLESSFQRVPRCVYTSTGLYEYRGWDSKAANTEHRRFTWGLRSMEVSIFMTWNSEIYFIIFSGNPKLQLLSFSRPWPLMFLLHLWQRHAVDFYISDFQSGLRALVKTGYGARVTPYVDESVIIDIDPDNKDMSPEFLRWLRERNLSSDDRTMRLKEGYIKEGSTVSVMGVVQRNDNVLMIVPPSEPISTGCQWAKCVLPTNLDGLVLRCEDTSNIDVVPV

SEQ ID NO: 4847 - protein, 370 aa, Zea mays
  VARIANT 74: note = Ancestral polymorphism is V, Derived polymorphism is D
  VARIANT 155: note = Ancestral polymorphism is V, Derived polymorphism is A
  VARIANT 167: note = Ancestral polymorphism is W, Derived polymorphism is C
  VARIANT 171: note = Ancestral polymorphism is C, Derived polymorphism is W
  VARIANT 185: note = Ancestral polymorphism is S, Derived polymorphism is C
  VARIANT 228: note = Ancestral polymorphism is P, Derived polymorphism is L
MNGGLSGSVDTLGMITEVSEVRPIQLTGKSSVYRNVFIKNLSGDMLKVTLWGNRALQFSYEPIYDQQKQDVIVVLFVGCLPKEYKACHWYFNPSITEAEPYYERIHNENIKIELPMLSNEPVTFPNPIEREDKELKVLLESDPDSLPDEGCKCTVTITRILDDQPWWYRACNACPNKPSMQSAVSSCRTCGSTDAILRYKLNFMASDGTAEMRMFCFDNIAKRIIGKPCASLLTSATSTSNIPPDLAAIVSLKFTFAVVYNEMSFQVSEKELFIKSVIASHGRDLTFPSPKLKIPVQPSTPTQLLGAAKQQVSPSSSLSKLSTAISPENSPQTEDNLQNEDQNILAFESPQKRARRKSLKFDCDKNLHDE

SEQ ID NO: 4848 - protein, 257 aa, Zea mays
  VARIANT 48: note = Ancestral polymorphism is A, Derived polymorphism is V
  VARIANT 58: note = Ancestral polymorphism is S, Derived polymorphism is R
  VARIANT 99..257: note = Derived polymorphism lacks residues 99 to 257
  VARIANT 167: note = Ancestral polymorphism is K, Derived polymorphism is N
MDMALPIVNATAAVLARVSAAFNGPLARAVVFGVHIDGHLVVEGLLIAVIVFQLSRKSYKPPKKPLTEKEIDELCDEWEPEPLCPPIKEGAKIDAPTLESAAGPLTIVDGKEVVNFASTNYLGLIGNEKIIDSCISSLEKYGVGSCGPRGFYGTIDVHLDYESKIAKFLGTPDSILYSYGISTIFSVIPAFCKKGDIIVADEGVHWAVQNGLHLSRSTVVYFKHNDMASLASTLEKLTRGNKRAEKIRCYIVVESIY

SEQ ID NO: 4849 - protein, 289 aa, Zea mays
  VARIANT 44: note = Ancestral polymorphism is P, Derived polymorphism is L
  VARIANT 45: note = Ancestral polymorphism is P, Derived polymorphism is L
  VARIANT 69: note = Ancestral polymorphism is R, Derived polymorphism is S
  VARIANT 94: note = Ancestral polymorphism is R, Derived polymorphism is C
MATSSSFTAVFFSSAFAACFAEVCTIPLDTAKVRLQLQRKAPLPLPPAAAAATAAAAGGTLATIMCIAREEGVAALWKGVIPGLHRQFLYGGLRISLYEPVCVIAIVVANPTDLVKVRLQADGKANTVKRSYSGALNAYATIIRQEGIGALWTGLGPNVARNAIINAAELASYDQFKQMFLKLPGFTDNVFTHLLAGLGAGFFAVCIGSPVDVVKSRMMGDSMYKSTLDCFAKTLKNDVRKMCIQLGHNLQQGILSCRLEDSFYEEMPALQVGIVWDKGMLIYMGGIYT

SEQ ID NO: 4850 - protein, 1003 aa, Zea mays
  VARIANT 516..1003: note = Derived polymorphism lacks residues 516 to 1003
MGAIAGPHPAAAAAACPSSTPIHGAAAPLWWLPHAHASAAKPPLPLPPPPPTDPLCFIEVPRDSSGPAAACPPRPRRHHQRQATTTRRRSPSDPSRSRRCSKSTTTMHAFKRILTSLIKPGGGEYGKFFSLPALNDPRIDKLPYSIRVLLESAIRHCDNFQVTESDVEKIIDWENTSPKLAEIPFKPARCILMDNTGVPAVVDLAAMRDMMPKLGCDPYKINPLIPVDAVIDHAVRVDVAGTYDALDRNEELEFQRNKERFAFLKWASNAFHNMQVFPPGSGTVHQVNLEYLARVVFNEDGILYFDSVVGTDSHTTMINSLGVAGWGVGGIEAVVAMLGQPMGMVLPGVVGFKLSGKLQDGVTTTDIVLTMTQMLRKHGAIGKFVEFYGVGVGELSLPARATIANMSPEYGATMGFFPVDQVALDYLKLTGRSDETVSMIEAYLRANKMFVDKHEPETERVFSSYLELDLSEVEPCVSGPKRPHDRVPLKEMKSDWHACLDNEVGFKGYAVPKEQQGKVVKFDFHGRPAEIKHGSVVLAAICSSTNTSNPSVMIGAGLVAKKACELGLEVKPWVKTSLTPGSVVATEYLKHSGLQDYLNQQGFHVAAHGCATCVGNSGDLDGSVSAAITENDIVAAAVLSANRNFEGRVNPLTRANYLASPPLVVAYALAGTVDIGFEEEPIGVGKGGKEIFLRDIWPSNQEIDEVVESSVQTHLFKKVYDSIMERNPRWNQLPVPKEALYPWDDRSTYIRKPTYLEGMSMTPPGPPTVTEAYCLLNLGDSITTDHISYSGKIPEGTPAAKYLLEYGVEPKNFSSYGGRRGNNEVVMRGAFANMRIVNKLLNGEAGPWTIHVPTGEKLYVYDAAMKYKSEGHDMVIIAGSEYGSGSSRDSAAKGPMLLGVKSVIAKSFERIHRSNLVGMGIIPLCFQAGEDADSLGLTGRERYTIHLPTSTAEISPGQDVTVTTHDGRSFTCTLRLDTQLEVTYFNHGGILPYMVRNLAAQMK

SEQ ID NO: 4851 - protein, 75 aa, Zea mays
  VARIANT 8: note = Ancestral polymorphism is A, Derived polymorphism is V
  VARIANT 10: note = Ancestral polymorphism is R, Derived polymorphism is W
  VARIANT 54: note = Ancestral polymorphism is C, Derived polymorphism is S
MAAATMGVVRVLCGAEKERVVGAHKAPGACPRCGGAVVAVDVESERRVLGLPLCLKSKRKYSCTRCLRRLVTLCG

SEQ ID NO: 4852 - protein, 198 aa, Zea mays
  VARIANT 184: note = Ancestral polymorphism is G, Derived polymorphism is D
  VARIANT 147: note = Ancestral polymorphism is T, Derived polymorphism is M
  VARIANT 115: note = Ancestral polymorphism is F, Derived polymorphism is L
  VARIANT 72: note = Ancestral polymorphism is G, Derived polymorphism is R
  VARIANT 68: note = Ancestral polymorphism is V, Derived polymorphism is M
  VARIANT 61: note = Ancestral polymorphism is P, Derived polymorphism is L
  VARIANT 57: note = Ancestral polymorphism is T, Derived polymorphism is M
  VARIANT 33: note = Ancestral polymorphism is G, Derived polymorphism is R
  VARIANT 24: note = Ancestral polymorphism is E, Derived polymorphism is D
  VARIANT 4: note = Ancestral polymorphism is S, Derived polymorphism is L
MATSAESPIAFTFYLHDGSPQAGEAAEDDEDIGRIICDCIGDDFSNYNRAIVETVQMGYGLAEVIYAVLNNGVQGRVAVKLARLPVSKAGEEDATAILGRIVARSKLFDVGCVLFYKEGDNGVSVRPGGLIQLAREALAVPLHMPLTIELDLHRCSGDEIVGGVLEFNPAIDGQHTERLVGQNGAELEVAISWSEYPW

SEQ ID NO: 4853 - protein, 167 aa, Zea mays
  VARIANT 7: note = Ancestral polymorphism is A, Derived polymorphism is E
  VARIANT 9: note = Ancestral polymorphism is C, Derived polymorphism is W
  VARIANT 13: note = Ancestral polymorphism is R, Derived polymorphism is Q
  VARIANT 19: note = Ancestral polymorphism is E, Derived polymorphism is K
  VARIANT 33: note = Ancestral polymorphism is T, Derived polymorphism is M
  VARIANT 43..167: note = Derived polymorphism lacks residues 43 to 167
  VARIANT 51: note = Ancestral polymorphism is D, Derived polymorphism is N
  VARIANT 52..167: note = Derived polymorphism lacks residues 52 to 167
  VARIANT 91..167: note = Derived polymorphism lacks residues 91 to 167
  VARIANT 134: note = Ancestral polymorphism is E, Derived polymorphism is K
  VARIANT 152: note = Ancestral polymorphism is R, Derived polymorphism is Q
  VARIANT 156: note = Ancestral polymorphism is E, Derived polymorphism is V
  VARIANT 158: note = Ancestral polymorphism is E, Derived polymorphism is K
MAAATPAACKGKRKRHLSEDDVWLLLHRYHPGTILTTLQEVAQHADGQRIDWRAVVAKSATGITSACEYQMFWRHFAYHHDVNESVDADDQPLDDDSDLELELEPDPNLTKETLCEASALAKNDYKSSPSPRKEKQPKATLPRVEAEEGRARKKREFEKKLVEDHKQ

SEQ ID NO: 4854 - protein, 72 aa, Zea mays
  VARIANT 58: note = Ancestral polymorphism is S, Derived polymorphism is F
  VARIANT 53: note = Ancestral polymorphism is G, Derived polymorphism is R
  VARIANT 44..72: note = Derived polymorphism lacks residues 44 to 72
  VARIANT 27..72: note = Derived polymorphism lacks residues 27 to 72
  VARIANT 20: note = Ancestral polymorphism is G, Derived polymorphism is D
  VARIANT 18: note = Ancestral polymorphism is E, Derived polymorphism is K
  VARIANT 16: note = Ancestral polymorphism is T, Derived polymorphism is S
  VARIANT 13: note = Ancestral polymorphism is L, Derived polymorphism is P
  VARIANT 12: note = Ancestral polymorphism is S, Derived polymorphism is L
  VARIANT 4: note = Ancestral polymorphism is K, Derived polymorphism is M
MDSKRRLQGPFSLRITNEFGETLVAYQVIPANWAPNSYYRSNIQYEAFGSAAGQATGSAIGLVITLLLDRTR

SEQ ID NO: 4855 - protein, 244 aa, Zea mays
  VARIANT 200: note = Ancestral polymorphism is A, Derived polymorphism is G
  VARIANT 195: note = Ancestral polymorphism is P, Derived polymorphism is T
  VARIANT 190: note = Ancestral polymorphism is I, Derived polymorphism is T
  VARIANT 69: note = Ancestral polymorphism is R, Derived polymorphism is H
  VARIANT 42: note = Ancestral polymorphism is S, Derived polymorphism is N
MSSEAVKVAVPESVLRKRKREEQWAAEKKEKSLAERKKSIENRKLIFTRAKQYAEEYDAQEKELVQLKREARLKGGFYVSPEAKLLFVIRIRGINAMHPKTRKILQLLRLRQIFNGVFLKVNKATINMLRRVEPYVAYGYPNLKSVRELIYKRGYGKLNKQRIPLSNNQVIEEGLGKHNIICIEDLVHEIMTVGPHFKEANNFLWPFKLKAPLGGLKKKRNHYVEGGDAGNRENYINELIKRMN

SEQ ID NO: 4856 - protein, 556 aa, Zea mays
  VARIANT 405..556: note = Derived polymorphism lacks residues 405 to 556
  VARIANT 299: note = Ancestral polymorphism is K, Derived polymorphism is M
  VARIANT 298: note = Ancestral polymorphism is G, Derived polymorphism is S
  VARIANT 166..556: note = Derived polymorphism lacks residues 166 to 556
MAAATGYSDAPTDEQLLAYAELPRHGRYMAEVFAVRILATAGGDPPPHGTITFYGGHCCSDFIYSWSPLEEGEDTSKQTCDSQLITKNDGIVDEYTKAYNATSNIKGLIASEASWQQSWRTNEFISSTVKKQSGSVAGHNKTSPFFGRSQPRNGLRQQRKLAFHSQRFLFQANHQGISQDSSRQQENVHPPYVSKYWLLYTTTKEIERLVLLDIRDMLQTMCNDIRLFPLPAIKEEHDNMVDVVREIFEEMSIPEDHEAEFVVSSLNHEQRHAYDVILSSVENISGGVFFVDGPGGTGKTCMYKALLSTVRRSGKIAIATATSGVAASIMPGGRTASDSLSSCILVPKQGNLVLTGPSWATSAYSPIAFTLYLHDGSPQAGEAAEDDEDIGRIICDCIDGDFSNYNRAIVETVQTGYGPAEVIYAVLSNGVQGRVAIKLARLPVSKAGEEDATAILGRIVARSKLFDVGCVLFYKEGDNGVSVRPGGLIQLAREALAVPLHMPLTIELDLHRCSGDEIVGGVLEFNPATNGQHTERLVGENGAELEVTISWSQYPW

SEQ ID NO: 4857 - protein, 133 aa, Zea mays
  VARIANT 23: note = Ancestral polymorphism is L, Derived polymorphism is I
  VARIANT 24: note = Ancestral polymorphism is P, Derived polymorphism is L
  VARIANT 26: note = Ancestral polymorphism is A, Derived polymorphism is V
  VARIANT 29: note = Ancestral polymorphism is V, Derived polymorphism is L
  VARIANT 40: note = Ancestral polymorphism is A, Derived polymorphism is S
  VARIANT 43: note = Ancestral polymorphism is A, Derived polymorphism is T
  VARIANT 44: note = Ancestral polymorphism is A, Derived polymorphism is V
  VARIANT 45: note = Ancestral polymorphism is A, Derived polymorphism is V
  VARIANT 54: note = Ancestral polymorphism is A, Derived polymorphism is T
  VARIANT 56: note = Ancestral polymorphism is A, Derived polymorphism is V
  VARIANT 65: note = Ancestral polymorphism is D, Derived polymorphism is Y
  VARIANT 102: note = Ancestral polymorphism is S, Derived polymorphism is F
  VARIANT 113: note = Ancestral polymorphism is R, Derived polymorphism is L
MEVTIAEKKPRAAGDGGGLVDRLPEVLLVEVLARVDVDGACSAAASCRSLYSAANAVLPALTSIDLSVSFILPFSPTARQTGFAGNGAVRSLTVNFSLLDDSAASVIAWGSLRDLLLLKCSFSMSFFVGHATI

SEQ ID NO: 4858 - protein, 91 aa, Zea mays
  VARIANT 3: note = Ancestral polymorphism is Q, Derived polymorphism is R
  VARIANT 6: note = Ancestral polymorphism is T, Derived polymorphism is M
  VARIANT 8: note = Ancestral polymorphism is A, Derived polymorphism is V
  VARIANT 82: note = Ancestral polymorphism is G, Derived polymorphism is C
MKQYQTAAKRLDNALLVLRRFISTGNELRTPVTKDEIVSEFSHDLPHFTYRWRGSSTSMSIWRTCICTHLWRRSANLSCPSGYRRTYRAQK

SEQ ID NO: 4859 - protein, 238 aa, Zea mays
  VARIANT 225..238: note = Derived polymorphism lacks residues 225 to 238
  VARIANT 184: note = Ancestral polymorphism is Q, Derived polymorphism is K
  VARIANT 163: note = Ancestral polymorphism is S, Derived polymorphism is P
  VARIANT 154: note = Ancestral polymorphism is A, Derived polymorphism is S
  VARIANT 140: note = Ancestral polymorphism is A, Derived polymorphism is E
  VARIANT 109: note = Ancestral polymorphism is N, Derived polymorphism is D
  VARIANT 108: note = Ancestral polymorphism is N, Derived polymorphism is S
  VARIANT 102: note = Ancestral polymorphism is A, Derived polymorphism is V
  VARIANT 94: note = Ancestral polymorphism is D, Derived polymorphism is G
  VARIANT 87: note = Ancestral polymorphism is F, Derived polymorphism is V
  VARIANT 75: note = Ancestral polymorphism is R, Derived polymorphism is G
  VARIANT 71: note = Ancestral polymorphism is R, Derived polymorphism is W
  VARIANT 49: note = Ancestral polymorphism is T, Derived polymorphism is I
  VARIANT 41: note = Ancestral polymorphism is T, Derived polymorphism is S
  VARIANT 27: note = Ancestral polymorphism is P, Derived polymorphism is L
  VARIANT 2: note = Ancestral polymorphism is T, Derived polymorphism is I
MTESLVQNKPGMASIKEMPVVQDGPPPGGFAPVRFAHRIPTSARGTRGTRSLSLMWLIFSYKAWGALLGRRLAERGIIVACIDYRNFPQGTISDMVSDASEAISFICNNVVSFGGDPNKTYLMGQSAGAHIVACTLLEQAIKESKGENTYWNVAQIKAYFGLSGGYNIQNLVDHFHERGVFIVQYFSADKLPSVALFSEHIIDCICLSVSRSLMLCSTFAKLIKEDMNKQPKMESSLT

SEQ ID NO: 4860 - protein, 124 aa, Zea mays
  VARIANT 48..124: note = Derived polymorphism lacks residues 48 to 124
  VARIANT 62: note = Ancestral polymorphism is A, Derived polymorphism is T
  VARIANT 63: note = Ancestral polymorphism is V, Derived polymorphism is M
  VARIANT 65: note = Ancestral polymorphism is V, Derived polymorphism is A
  VARIANT 71: note = Ancestral polymorphism is R, Derived polymorphism is W
  VARIANT 77: note = Ancestral polymorphism is A, Derived polymorphism is S
  VARIANT 90: note = Ancestral polymorphism is R, Derived polymorphism is H
MATAPSSRARAQPLASAFSSRSFPGGCSRFPYPRPTEVPPYAWEGEEEATGLPSDVSRGHFAVYVGERRCRFVVPIALLDRPEFRYLLWRAKEEFGFAGAGGTLVLPCEEVAFRSLTSALACTR

SEQ ID NO: 4861 - protein, 225 aa, Zea mays
  VARIANT 59: note = Ancestral polymorphism is Q, Derived polymorphism is K
  VARIANT 71: note = Ancestral polymorphism is S, Derived polymorphism is L
  VARIANT 72: note = Ancestral polymorphism is A, Derived polymorphism is V
  VARIANT 76: note = Ancestral polymorphism is T, Derived polymorphism is I
  VARIANT 90: note = Ancestral polymorphism is L, Derived polymorphism is F
  VARIANT 91: note = Ancestral polymorphism is H, Derived polymorphism is Q
  VARIANT 93..225: note = Derived polymorphism lacks residues 93 to 225
  VARIANT 106: note = Ancestral polymorphism is M, Derived polymorphism is I
  VARIANT 119: note = Ancestral polymorphism is C, Derived polymorphism is S
  VARIANT 134: note = Ancestral polymorphism is N, Derived polymorphism is S
  VARIANT 143: note = Ancestral polymorphism is G, Derived polymorphism is R
  VARIANT 153..225: note = Derived polymorphism lacks residues 153 to 225
  VARIANT 155: note = Ancestral polymorphism is C, Derived polymorphism is Y
  VARIANT 164: note = Ancestral polymorphism is P, Derived polymorphism is A
  VARIANT 171: note = Ancestral polymorphism is A, Derived polymorphism is V
  VARIANT 178: note = Ancestral polymorphism is L, Derived polymorphism is I
  VARIANT 194: note = Ancestral polymorphism is S, Derived polymorphism is Y
  VARIANT 201: note = Ancestral polymorphism is G, Derived polymorphism is D
  VARIANT 205: note = Ancestral polymorphism is S, Derived polymorphism is F
MCKQMEIDCLSGDVGRSTEIHFSMGNFLFCLMGDMSYTLHHHDSCWKAPLHCSEMTDEQMIAFIVHRVRASAVFLTAFPSLLRKYVKALFHTWARGLGAMPLVSFMFLRDLCIQVGSNCLDTCLKGIYKAYLVNCKLSKSISGSKQQHIQFLGNCVRELYSLDPQSAYQHAFIFIHQLGVILRGALTERGPKKSYQKIMIGNTYSALSFGPVLCADIVPRKNSDL

SEQ ID NO: 4862 - protein, 65 aa, Zea mays
  VARIANT 64: note = Ancestral polymorphism is Y, Derived polymorphism is S
  VARIANT 11: note = Ancestral polymorphism is F, Derived polymorphism is L
  VARIANT 4: note = Ancestral polymorphism is G, Derived polymorphism is C
  VARIANT 2: note = Ancestral polymorphism is L, Derived polymorphism is F
MLGGRPLFVLFGSSIVQYSFSNGGWGAALADIYARKADVLLRGYIGWNTRRAVQVMDKVFPKVYM

SEQ ID NO: 4863 - protein, 150 aa, Zea mays
  VARIANT 143: note = Ancestral polymorphism is R, Derived polymorphism is C
  VARIANT 116: note = Ancestral polymorphism is S, Derived polymorphism is L
  VARIANT 115: note = Ancestral polymorphism is F, Derived polymorphism is L
  VARIANT 114: note = Ancestral polymorphism is A, Derived polymorphism is E
  VARIANT 98: note = Ancestral polymorphism is G, Derived polymorphism is R
  VARIANT 80: note = Ancestral polymorphism is G, Derived polymorphism is R
  VARIANT 79: note = Ancestral polymorphism is S, Derived polymorphism is Y
  VARIANT 67: note = Ancestral polymorphism is V, Derived polymorphism is M
  VARIANT 60..150: note = Derived polymorphism lacks residues 60 to 150
  VARIANT 55: note = Ancestral polymorphism is R, Derived polymorphism is H
  VARIANT 43: note = Ancestral polymorphism is A, Derived polymorphism is V
  VARIANT 39: note = Ancestral polymorphism is E, Derived polymorphism is K
  VARIANT 38: note = Ancestral polymorphism is P, Derived polymorphism is S
  VARIANT 31: note = Ancestral polymorphism is S, Derived polymorphism is C
  VARIANT 7: note = Ancestral polymorphism is P, Derived polymorphism is R
  VARIANT 4: note = Ancestral polymorphism is D, Derived polymorphism is N
  VARIANT 2: note = Ancestral polymorphism is P, Derived polymorphism is T
  VARIANT 1: note = Ancestral polymorphism is M, Derived polymorphism is I
MPADKAPGLELKDALMVTPASSVEELEKLYSFAVSGSPEEKLAASKILCGASLLRGWNIQEHVVQMVLKLLSTFLPLDSGSEGRYVQHMPMLHALVSGISSIDTVHILSLYGLEFSVIANSPLRIDLSCVLDHVVSELTAFLRKVLAYSS

SEQ ID NO: 4864 - protein, 316 aa, Zea mays
  VARIANT 26: note = Ancestral polymorphism is I, Derived polymorphism is S
  VARIANT 101: note = Ancestral polymorphism is W, Derived polymorphism is R
MALEKIASIVQVTPFNVTSDSYATFIQNVRVALAGAKPDTVVGPKSKVSRPVLAKEASSSGLQPPKWIHVVLNGKGGAAPTVAIRSDNAYIVGFTNSKGTWYQLSRTGAQEKLVDDNPVMAGFDGNYNTLIGGSDKLLTLNVAKFSVAAAAATFWNHKAGNTSYGDDCGSDEEEESGMLRAGDPLKVAVATLAVAICEAARFVPVSTVIGKGWGEQRVSVTAKEVSYIMDWGDLSRALLKWKSGGYKDDKPFQPFKGIGINNGEEALAVVALLKLMSGSQSLLAWLKCFWGLLVKKLKREDMNYEKPKTAAIVNPL

SEQ ID NO: 4865 - protein, 363 aa, Zea mays
  VARIANT 292: note = Ancestral polymorphism is K, Derived polymorphism is M
MRDMGEKRRHGHGHGHGHLVGFGAGGVVGHAAEHEEKRMEQKKLDMSSMSMDTLPHLTTPLGNITTLDLSNNNLQSIPESIIARLLNVVVLDVRSNQLKSLPNSIGCLSKLKVLNVSGNLLQELPATIEECRALEELNANFNQLTRLPDTLGFELHGLRRLSVNSNKLAYLPSSTSHMTALRSLDARLNCLRALPDGLENLGGLEALNVSQNFQYLRELPYGIGLLVSLRELDVSYNSIAALPDSMGCLTKLARFSAAGNPLVCPPMDVVEQSLDAMRAYLSARMNGTAKAKKKSWVPKLVKYSTFSAGMMTPGRTKVHGNNTDGLHMSDYRSLDGGGVASSAFLSMLSPRRLFSPRRNSAKH

SEQ ID NO: 4866 - protein, 313 aa, Zea mays
  VARIANT 195..313: note = Derived polymorphism lacks residues 195 to 313
MSVQSKVVALGALIFLVSYGSCTRIVNFNASHITTDPYWVAARATWYGAPTGAGPYDNGGACGFKNVNLPPFSAMTSCGNQPLFKDGKGCGSCYQIRCVNHPACSGNPETVMITDMNYYPVAKYHFDLSGTAFGGMAQPGRDNELRHAGIIDIQFRRVPCIYPGQTVTFHIEHGSNPNYLAVLVEFEDGDGDVVQVDIMEANSGWWMPMRESWGSIWRMDSKRRLQGPFSLRITNESGETLVAYQVIPANWAPNSYYRSNIQYEAFGSAAGQATGSAVGLVISSAARLHTLITRIIGLICLVLLYHLQGIEVP

SEQ ID NO: 4867 - protein, 210 aa, Zea mays
  VARIANT 175: note = Ancestral polymorphism is H, Derived polymorphism is Y
  VARIANT 129: note = Ancestral polymorphism is S, Derived polymorphism is P
  VARIANT 108: note = Ancestral polymorphism is H, Derived polymorphism is Y
  VARIANT 67: note = Ancestral polymorphism is A, Derived polymorphism is P
  VARIANT 6: note = Ancestral polymorphism is P, Derived polymorphism is L
MLTLLPLRLPFSLPVAATLPNAALLLPASTRVSLRQITQGASMNAAAASSAPDAAAAATGEEGAKEAVDVLVQYVVLRRDLADAWPLGSVVAQGCHAAVAAVWAHRDHPDTAAYCAPDNLDRMHKAWISLSIVSTWNLNHCLQSHGHGLMVTLEVKGETQLNNLAEKLAAAGVRHKLWIEQPENIPTCIATAPCPKSQVSSFFKKLKLCK

SEQ ID NO: 4868 - protein, 298 aa, Zea mays
  VARIANT 188: note = Ancestral polymorphism is K, Derived polymorphism is E
MAVDLMGCYAPRRANDQLAIQEAAAAGLRNLELLVTSLSTQAAAPHRAADQPFGEIAGQAVSKFRKVISILDRTGHARFRRGPVEPPPPTPPPPPVVPGPAPLAAVSVAQPPQSLTLDFTKPNLAVSAATSVTSTSFFSSVTAGEGSVSKGRSLMSSGKPPLSGHKRKPCAGAHSEATTNGSRCHCSKRRKNRVKRTIRVPAISSKVADIPSDEYSWRKYGQKPIKGSPYPRGYYKCSTVRGCPARKHVERATDDPAMLVVTYEGEHRHTPGAVQGPSPLATASPVPVAVSAGNGLVV

SEQ ID NO: 4869 - protein, 74 aa, Zea mays
  VARIANT 13..74: note = Derived polymorphism lacks residues 13 to 74
  VARIANT 18: note = Ancestral polymorphism is S, Derived polymorphism is L
  VARIANT 58: note = Ancestral polymorphism is G, Derived polymorphism is W
MAASAAFGAKASQTMSSSKAMLDHQRNDDIKKKGKSELYQDVVLSSGSYCWWGLLIQGDVGLQEEKAQPGAQEI

SEQ ID NO: 4870 - protein, 129 aa, Zea mays
  VARIANT 1: note = Ancestral polymorphism is M, Derived polymorphism is I
  VARIANT 8..129: note = Derived polymorphism lacks residues 8 to 129
  VARIANT 27..129: note = Derived polymorphism lacks residues 27 to 129
  VARIANT 46: note = Ancestral polymorphism is E, Derived polymorphism is D
MDSKRRLQGPFSLRITNESGETLVAYQVIPANWAPNSYYRSNIQYEAFGSATGQATGSAVGLLISSATRLHTLITRIIGLICLVLLYHLQGIEVVDVALWEMYTCIWCWIAGLSCLVLAVVGAHSFELF

SEQ ID NO: 4871 - protein, 516 aa, Zea mays
  VARIANT 161: note = Ancestral polymorphism is G, Derived polymorphism is R
  VARIANT 216: note = Ancestral polymorphism is Y, Derived polymorphism is C
  VARIANT 256: note = Ancestral polymorphism is L, Derived polymorphism is R
  VARIANT 274..516: note = Derived polymorphism lacks residues 274 to 516
  VARIANT 299: note = Ancestral polymorphism is W, Derived polymorphism is G
  VARIANT 303: note = Ancestral polymorphism is P, Derived polymorphism is L
  VARIANT 473: note = Ancestral polymorphism is C, Derived polymorphism is R
MDRDIAIAGNHHHLIDIAPDASMGEASGATDGSAERLGVGTGGGGGGNEKKWLRKLTSATVNTAVLRDLISRTPMLWYLGERTGTILRPCARREPVEALHAVRAVAIGPFHRADRGLPFPDDAKLPFMRYLQDQCGLDVDGYVEALCLERDRLRCEFADDGSDGPAVEILDDEAKLLEMLLLDSCFILVVSLMLSKAGTGDDADSVTRAASISKDYFILNMAVAQHADDIKLDMLVLENQVPFRAIKLLAASCPGLKLRNSVEELVLGCFDDICPKRARRAAYSAAAGEFHHVLHLFHWSRVPKDKYFVLSTPRKLLKIKKESERLFPCSMELRRSAVWFREASSSCGDLDMWFWRHPASPVAVMTVPCFHVHEYSAAVLHNLLAFEKHFYWAHGACVTAHVARMEGLIRCPQDAAMLRKRGVLASTRRTDTELVALFRELGEETVGARLPDDYGEMLDAVAGHRGRLVSGWCGGFVLHFFPSPWVAVSLAVAAALIFVPSMLQTVYTMFGYFKSN

SEQ ID NO: 4872 - protein, 341 aa, Zea mays
  VARIANT 147: note = Ancestral polymorphism is S, Derived polymorphism is L
  VARIANT 158: note = Ancestral polymorphism is L, Derived polymorphism is R
  VARIANT 163: note = Ancestral polymorphism is P, Derived polymorphism is S
  VARIANT 190..341: note = Derived polymorphism lacks residues 190 to 341
  VARIANT 201: note = Ancestral polymorphism is G, Derived polymorphism is D
  VARIANT 210: note = Ancestral polymorphism is A, Derived polymorphism is V
  VARIANT 221: note = Ancestral polymorphism is A, Derived polymorphism is T
  VARIANT 288: note = Ancestral polymorphism is P, Derived polymorphism is L
MAAATGYSDAPTDEQLLAYAELPKHGRDMAEVFAVRIPATVGGNLPPRGSIVFYGGHCCSDFIYSWSPLEEEEDTSKQICDSQLQSWVPLIILITSLRKIYAMVGNVLFTIARTDLHHYMALPPFIHHLESEKKGNLVLTGPSLATSAYSPIAFFLYLHDGSPQAGEATEDDEDIGRILCDCIGDDFSNYNRAIVETVQTGYGPAEVIYAVLSNGVQGRVAVKLARPPVSKAGEEDATTILGRIVARSKLFDVGCVLFYKEGDNGVNVRPGGLIQLAREALAVPLHMPLTIELDLHRCSGDEIVGGVLEFNPATNGQHTERLVGENGAELEVAISWSQYPW

SEQ ID NO: 4873 - protein, 387 aa, Zea mays
  VARIANT 299: note = Ancestral polymorphism is G, Derived polymorphism is R
MEKISVSVRFRHPNLVAANISPDSSGGGIDHEWRIDDSRVSLLHRAAGPVLGASFAFGQADDREFLTRVSYMEIYNEEINNLLTLEGQKLRIHESLDYVEAEHRQRVRGARVPQEEEEGRQRQGDREEDGEGAAQRQEPPQKKQFWAPAPLTTKSWADVEDDDHYFATTASPRPVWGTAGEPAKEEDDVDDVVRAALQEVATLGNKVEKEMEDMAFFFAELALMQYGYGLVTRLPSLVAASAVYAVRLTVKRAPSGPTPSSTTLLCTRCSEERPAKGSGSWSSPVGSVPAGGQPRADNGSTIIEIALKIAFRKFSLDHGIMASSENSTRNERNIKLKVLVLNGSYHGDTLGAMEAQAPSSYISFSSVAMWFSVPTAVFFVPAFSLVA

SEQ ID NO: 4874 - protein, 109 aa, Zea mays
  VARIANT 3: note = Ancestral polymorphism is R, Derived polymorphism is C
MARNLSVTLFILTAYVAATAAPTVCAVKSPASTTTTRKHEAAKEETDAPAKAPAAAATEGPAAGAPMTWPDGGPEFVKMVIKNPFFKSAPPSGSEDGLPIDPTPEGSMN

SEQ ID NO: 4875 - protein, 341 aa, Zea mays
  VARIANT 248: note = Ancestral polymorphism is R, Derived polymorphism is C
  VARIANT 234..341: note = Derived polymorphism lacks residues 234 to 341
  VARIANT 157..341: note = Derived polymorphism lacks residues 157 to 341
MFYYVVVKSYIYYVLLGNIAMAKNVSRAAWNTVYEKGLVDVLLEHKDNPKFKSQNGWTAEGWNSITNKFNERYPLAHYSKQQMQDKDKELKSHYKAVRDSRKESGVGWNDSLCMIVAEPELWEKLILAHPKVAKYQKKPFPLYYSLEALHEGSVATGDLNFTSTQQMPPPSFIHVRPLNAPPGGPLAAPPSGPLDIAFASATAHSNRSTSEQSHSPLHPNTNPFSMDFQEISNEAQSRHVEGGNGRKRKQSQIGAAIESFVDFKRSATSKTLEGIEAVSMEKCLDKLDRIDGFTDEDRSYAMEVFESAINREVFMKSKNHNARLLWLKRKISACRALTTIM

SEQ ID NO: 4876 - protein, 539 aa, Zea mays
  VARIANT 446..539: note = Derived polymorphism lacks residues 446 to 539
  VARIANT 430..539: note = Derived polymorphism lacks residues 430 to 539
  VARIANT 25..539: note = Derived polymorphism lacks residues 25 to 539
MASTDDQASVERVFADKAVSSWREQLTLRAFVVNALLAVMFSVIVMKLNLTTGIIPSLNVSAGLLGVFFVRMWTAAAERMGFLRQPFTRQENTVIQTCVVSAYGVAFSGGFGSYLFGMSEKIAKQATEAKDANNIKDPHLGWMIGFLFLWFYTAGDECGFKNFPTLGLEAYNNRFFFDFSPTYVGVGMICPYIVNVSVLLGGILSWGLMWPLIAKKKGSWYPANLEDSSLHGLQAYRVFISIALILGDGLYNFIKVLIRTIAGFISMVQVQQNSKSMLPVSDNGSSMSSTEAVSFDDERRIENFLKDQIPKSVAYGGYVAVAAISIGTLPQIFLQLKWYYILVACVVAPVLAFCNAYGSGLTDWSLASTYDKLAIFVFGAWAGLSHGGVLVGLATYGVMMSIVSTTSDLMQDFKTGYLTLASPRSMFISQVIGTGMGCVIGPCIFWLFYKAFGDIGESGTEYPAPYAIVAMTHLDKLIQKMVDIIETQEVVCEEEAIGVTKEARFMHEGSKLNRGSDLDNWIHSLMIRFIILVRFDSDG

SEQ ID NO: 4877 - protein, 134 aa, Zea mays
  VARIANT 131: note = Ancestral polymorphism is A, Derived polymorphism is V
  VARIANT 48: note = Ancestral polymorphism is A, Derived polymorphism is T
  VARIANT 38: note = Ancestral polymorphism is A, Derived polymorphism is V
MVPSLLAAMSTSPFLASSGSSRRPLGAAHTRRAGLRVAALKYDPAKVAPQNDRVLVRLEQIPEKSAGGVLLPKSAVKFERYLMGEILSIGAEVSEVEAGKKVLFSDINAYEVELGTDDEKHCFCRESDLLAVVE

SEQ ID NO: 4878 - protein, 313 aa, Zea mays
  VARIANT 27: note = Ancestral polymorphism is E, Derived polymorphism is K
MAALLCSLLVGVALMLGMHLSAATMDKDIELIWGASHTYFFMDGETESLALSLDDQQGSCFRSKDMYLYGTISMEIKLVDGNSAGVVATACRRSPKAPGRITTRSTWSSSATKPGSQSRSTPTSSSTASAAGSSSSTSRSTPPPTTTPTPSSGTPSTSGSKWTGRRSARSRTTRSTAWRSRRGSSSGCTAACGTRTSGRRRAGASRPTGRRRPSSPTTGTTPSPGASRRPACRGAAPSPRTRRASTWTSGRWTTCGRRATSTWSTTTAPTTRGSTSPSSPQNARCNDRGYDGSIDRSRACAFALLVTRANSSV

SEQ ID NO: 4879 - protein, 277 aa, Zea mays
  VARIANT 6: note = Ancestral polymorphism is S, Derived polymorphism is R
  VARIANT 124: note = Ancestral polymorphism is N, Derived polymorphism is S
  VARIANT 170: note = Ancestral polymorphism is E, Derived polymorphism is D
MASAFSSRACALLALLLGLCTAGAAAGRVDDGLEVTWGDGRGSVSPDGQVLTLSLDRTSGSGFRSKDTYLFARADVQIKLVPDNSAGTVTTFYFISEGPWDVHDEVDLEFLGNASGQPYTLHTNVYASGNGSREQQFHLWFDPTADFHTYSIQWTQQHILVLVDGTPIREFKNHADRGVPYPSSQRMRLYGSLWDAEDWATQGGRVKTDWSRAPFVAQYRNFTAAPPATAAAGQYGQQMDAEAQQAMKWARDNYMVYDYCADTKRFSQGAPPECSMA

SEQ ID NO: 4880 - protein, 156 aa, Zea mays
  VARIANT 127: note = Ancestral polymorphism is R, Derived polymorphism is C
  VARIANT 123: note = Ancestral polymorphism is R, Derived polymorphism is W
  VARIANT 118: note = Ancestral polymorphism is R, Derived polymorphism is C
  VARIANT 111: note = Ancestral polymorphism is C, Derived polymorphism is Y
  VARIANT 110: note = Ancestral polymorphism is G, Derived polymorphism is W
  VARIANT 108: note = Ancestral polymorphism is G, Derived polymorphism is D
  VARIANT 96: note = Ancestral polymorphism is G, Derived polymorphism is R
  VARIANT 93: note = Ancestral polymorphism is G, Derived polymorphism is S
  VARIANT 87: note = Ancestral polymorphism is R, Derived polymorphism is W
  VARIANT 73: note = Ancestral polymorphism is G, Derived polymorphism is D
  VARIANT 68: note = Ancestral polymorphism is V, Derived polymorphism is M
MTELFDTVVTSLLHLPEVLDCLAAADGDRRLAGHHATHGHGHGRIHGLGGGGRAPVDIVERPREYAFVLDVPGLSKLDIQVTLEEDRVLVMKGGSGKRKRDEEEDMNGKGCRYIRLERGAARRSFVRKFRLPEDFVGKVDNWWGVAALLWRVRLLG

SEQ ID NO: 4881 - protein, 133 aa, Zea mays
  VARIANT 24: note = Ancestral polymorphism is A, Derived polymorphism is T
  VARIANT 50: note = Ancestral polymorphism is P, Derived polymorphism is S
  VARIANT 69: note = Ancestral polymorphism is E, Derived polymorphism is K
  VARIANT 96: note = Ancestral polymorphism is R, Derived polymorphism is C
MATKPGRAAAAVLLLTLLAALHVAAHNNNTENRNPGGGGGDPGAFFTRMPRFSGGGVPGGGGFFGGWGEGGLGYRRGAVVPPSTVCPQDGPCRGKRLTCPSRCFRTFSYGARTGAAAEAAASTAPSAAPPPAE

SEQ ID NO: 4882 - protein, 142 aa, Zea mays
  VARIANT 19..142: note = Derived polymorphism lacks residues 19 to 142
  VARIANT 34: note = Ancestral polymorphism is S, Derived polymorphism is C
  VARIANT 40: note = Ancestral polymorphism is R, Derived polymorphism is P
  VARIANT 43: note = Ancestral polymorphism is R, Derived polymorphism is C
  VARIANT 53: note = Ancestral polymorphism is R, Derived polymorphism is W
MVETRRSSAAAAEKRMSPSPSSSFVPSRSAPRRSPRGHRRRPCPAGPRRILWRERHPRGAPARSMTRQRSHRKIKESISRLPLLQRVQSGGRSRSNSNPQCHGRSCSRSAHREFKAEEGAGATATRSAMGEAALRVLTGVVT

SEQ ID NO: 4883 - protein, 210 aa, Zea mays
  VARIANT 84..210: note = Derived polymorphism lacks residues 84 to 210
  VARIANT 114..210: note = Derived polymorphism lacks residues 114 to 210
  VARIANT 120..210: note = Derived polymorphism lacks residues 120 to 210
MAKEIKSTEDEGYDDYSYEVFFRRRLFDFIVMWNATSIRNVETRALDPSAAIEETSSFLEEGVGEEGQGRGGGTTPTQVASHAQKYFIRLNSGGKDKRRSSIHDITTVNLTDDQPPSPSQSSLITSQSNAPAPAPAAGICQVPLAPDAKRHGAGTLPFSSLNRTSVVPAYRMEFHDQQGLQCGPLHDQLLTSREQLGLLSRSSQTEANPT

SEQ ID NO: 4884 - protein, 165 aa, Zea mays
  VARIANT 57: note = Ancestral polymorphism is E, Derived polymorphism is K
  VARIANT 69: note = Ancestral polymorphism is Q, Derived polymorphism is E
  VARIANT 71: note = Ancestral polymorphism is A, Derived polymorphism is T
  VARIANT 73: note = Ancestral polymorphism is G, Derived polymorphism is R
  VARIANT 78: note = Ancestral polymorphism is P, Derived polymorphism is L
MYLYASLGNSGSLPTLLPDEVRKLKQLSVLPLVESTKILPYDQLMQELDVSNVRELEDFLINECMYSVQFAAGRDLTPDQLNNMIEILSDWFGTSDSLLHQIQEKIKWADTMSDVNKKHRKEFEDRVEEAKKSIKADIDIRGHDDYLSESVGIMDFEEDRVRPKR

SEQ ID NO: 4885 - protein, 179 aa, Zea mays
  VARIANT 103..179: note = Derived polymorphism lacks residues 103 to 179
MAERGAEHLGRPSGAPSARAPRPPLAAPERPTGRRAEQRVERHQRARNHAQDAAAPEAACPCSPDSEPAPTEDQPRNPAVRSSSRVSGFKKVINYTKRVAEEQRYKRALSREEVLEGLVYLHEQGVIHRDIKDANILSTKEGLVKLADFGVATKLTEADINTHSVVDTPYWMAPEVAID

SEQ ID NO: 4886 - protein, 148 aa, Zea mays
  VARIANT 57: note = Ancestral polymorphism is A, Derived polymorphism is V
MAAAEGQWVLMATGRTPTNIAVIKYWGKRDEALILPINDSISVTLDPDHLSATTTIAVSPSFPSDRMWLNGKEISLLGGRFQSCLKEIRKRARDIEDKEKDVKIKKEDWGKLHVHIASYNNFPTSAGLASSAADLACFGKVSSVIIII

SEQ ID NO: 4887 - protein, 195 aa, Zea mays
  VARIANT 103: note = Ancestral polymorphism is S, Derived polymorphism is F
  VARIANT 92: note = Ancestral polymorphism is G, Derived polymorphism is R
  VARIANT 8: note = Ancestral polymorphism is R, Derived polymorphism is T
MEVQVQQRGSPAPAAELEVSLREFTMSDAEAFMSWASDPRVVRFQRRDAYEHVDQARRYIADHILPHPWYRAICVGAGAPLPVVGSISVKPGPTEDGRPFRASVGYRLARAHWGRGIATRAVRAAAAAVFAAWPWLLRLEAVADVDNPASQRVLEKAGFAREGVLRKYVLLKGQPRDMVMFSIVVETEQDKPDGP

SEQ ID NO: 4888 - protein, 298 aa, Zea mays
  VARIANT 20: note = Ancestral polymorphism is A, Derived polymorphism is V
  VARIANT 119: note = Ancestral polymorphism is T, Derived polymorphism is S
  VARIANT 165: note = Ancestral polymorphism is I, Derived polymorphism is T
  VARIANT 222: note = Ancestral polymorphism is Y, Derived polymorphism is H
MAAATAHLLAFLSVLTTMAALSSVAAGGRMTDQLDILWGPTQLLNGSNGGDDQTIGLSLDRVMGSGFRSKTSYLFARIDIDIKLVPGNSAGTVTTVYLMSEQQWKTHDEIDLEFLGNLTGQPYTLHTNIFANGSGGREVQYRLWFDPTLDFHTYSIIWSSDEILILVDNKAIRRFRNHWDVGIPFPVYQPMRLNGVLWDADDWATQGGRVKTDWSQAPFTAYFRNYRANGCEPSGSAWVCGQGPAPGGGDWLDGGAAGLDDMKRQEQLKEAEDMYMIYNYCTDSKRFPGGFPTECGLA

SEQ ID NO: 4889 - protein, 160 aa, Zea mays
  VARIANT 50: note = Ancestral polymorphism is P, Derived polymorphism is R
MAQHRQRSFQSFARTWLPLAVMILMCFAASTTAQQQPPPLPQPTTTGTVPLPSVPACLPAQATLSPCVSYLIGNSSSPPTECCAQIRAMFQSQAPCLCAALASAGPAQQLGSALGQLLPTSCDLPADACSAGTTSAAPAGPASGTTSAAEPPAAATEPNA

SEQ ID NO: 4890 - protein, 125 aa, Zea mays
  VARIANT 8..125: note = Derived polymorphism lacks residues 8 to 125
  VARIANT 20: note = Ancestral polymorphism is P, Derived polymorphism is R
  VARIANT 45: note = Ancestral polymorphism is S, Derived polymorphism is L
  VARIANT 56: note = Ancestral polymorphism is D, Derived polymorphism is N
  VARIANT 65: note = Ancestral polymorphism is A, Derived polymorphism is V
MATTATNRRVIHKEYVKGYPREEHMELLRGAEVPLRPTGAELAGSVLVRNLYLSYNPLHAAQDVALAAGYERPWCYDPYMRPLHHGLRAAAKGDEPRRRRCRRRPEQSRCRRRHRCARGTSSARG

SEQ ID NO: 4891 - protein, 209 aa, Zea mays
  VARIANT 146: note = Ancestral polymorphism is G, Derived polymorphism is D
  VARIANT 108: note = Ancestral polymorphism is F, Derived polymorphism is L
  VARIANT 41: note = Ancestral polymorphism is S, Derived polymorphism is F
  VARIANT 11: note = Ancestral polymorphism is P, Derived polymorphism is S
  VARIANT 4: note = Ancestral polymorphism is R, Derived polymorphism is Q
MASRARLPGSPASIAILILSFFQGRASVTEPVSVSGAVLASVAQGRYAASCSPSPTAARDTVWPGLLSGSGTPPLETTGFALAPGQSRPLYAPQGWSGRFWGRSDCTFDASGKGSYTTGDCGSGEVECRGAGASPPATLAEFTLDGDGGKDFYDVSLVDGYNLPMLVQPAAAGCPDTGCLVDLNERCPDELRADGGRACHIAFSPNFGL

SEQ ID NO: 4892 - protein, 486 aa, Zea mays
  VARIANT 297..486: note = Derived polymorphism lacks residues 297 to 486
MTTLYCNFNHGYILLAVQAHVPSLHPPPCVPGQETSTCESVSGSNLSLLLLGLYLIPIGDGAARACLPALGGEQFDTSDPVEQRQESSFFNWYTFSVSTGGFVGLVFIVWVENSKGWDVGFAVCALSVLLGMLIWIAGLPLYRNQLPTSSPITRILQVLVAAFKKRNVALPANPSELKQISQDDAGSLEILHRTDGFRCLDKAAVDTGRTGGWILCSITQVEETKIILRMVPIFLSAVLGYIPVPLILNFTVQQGNTMDTRLGALHISPATLFIIPTLFQMVILVVYDRFIVPFLRRITGYVGGVTHLQRIGIGFLSTIVATGVAAIVEASRKKVARDSGLVDATAGIPISVFWLTIQFFLLGIVDVTSFVGLLEFFYSEASTGMKSIGSSIFYCILGVSAWLGSLLIQVANRVTRHRDGTGGWLDGTNLNKGKLDRFYWLLAVLELVSLLVYVFFASRYVYGNDQRVVADEDNNTAPSDGTINVI

SEQ ID NO: 4893 - protein, 72 aa, Zea mays
  VARIANT 57: note = Ancestral polymorphism is C, Derived polymorphism is R
MADYNQDGADPCEKLITTREGIETIDLYSSSNGRFANAEGAFIYPMYGHGELPQAFCRCAAVKGVISISTNY

SEQ ID NO: 4894 - protein, 270 aa, Zea mays
  VARIANT 146: note = Ancestral polymorphism is Q, Derived polymorphism is R
  VARIANT 173: note = Ancestral polymorphism is L, Derived polymorphism is P
  VARIANT 197..270: note = Derived polymorphism lacks residues 197 to 270
MPQPAAFVSVRPSDGQPTPSNVSNKKMKHSGEALILDGVGEVAVTIGRNSQQPLSTTPPPVQMDLRCIPLSKGKENLEIFQPVDHTKLGSRSQCPLPRHVNLPVNMLPVTYPQSHNYQQDDFHKTVARTLSQGSTPMSMDFHPLQQTLLLVGTNVGDIGLWDVGTKDRLVASLVKDPAVSVNRIIWSLDGTLFGVAYSRHIVQIYSYNGGDDIRQHLEIDAHIGGVNDIAFGFYLAWATQHFHSLCFLNFFLHRHPKEVIEANGYHEFTS

SEQ ID NO: 4895 - protein, 365 aa, Zea mays
  VARIANT 4: note = Ancestral polymorphism is Q, Derived polymorphism is L
  VARIANT 25: note = Ancestral polymorphism is R, Derived polymorphism is Q
  VARIANT 40: note = Ancestral polymorphism is A, Derived polymorphism is T
  VARIANT 218: note = Ancestral polymorphism is A, Derived polymorphism is S
  VARIANT 227: note = Ancestral polymorphism is K, Derived polymorphism is M
MAALAPSIVVPTDAELLQAQADLWRNSLCYLKSMALKCATELGIPTAIYSLGGAASLPDLIASLSLPQAKLPFLGRLMRLLSSSGVFAVVESPEAVYSLTPLSYLLVDGIAADNNHMDHAPFLLTVTSAHYIDLAIDLADWFKKEAKTPPFDHKHAASLFEESMERKAPGFHKMSILGLLVHDNFATSIAVREYQDVFQGVKSVTDCCYHGDGTTGKALAKAFPLIKITVLDLPQEIRKIPADGVVNYVGGDMFKSIPRAQMVLLKMVLHHWSDEDCVKILANCRKAIPSREEGGKVVIADIILDPASGPVMFQTQLLMDVCMMLMKGGRQRDVNDWRDLIQKAGFSDYKLLKKFGARGVLEIYP

SEQ ID NO: 4896 - protein, 775 aa, Zea mays
  VARIANT 617..775: note = Derived polymorphism lacks residues 617 to 775
  VARIANT 14: note = Ancestral polymorphism is L, Derived polymorphism is P
MNTFSSHNARTALLLLALSFSLAVASDPMFSCGPSSASRAYPFCDRSLPAARRAADLVSRLTVAEKVSQLGDEAAGVPRLGVPPYKWWSEGLHGLAFWGHGMRFNGTVSAVTSFPQVLLTTASFDESLWFRIGQAIGREARALYNLGQAEGLTIWSPNVNIFRDPRWGRGQETPGEDPAVASKYAVAFVRGIQGSNPAGAAAAPLQASACCKHATAYDLEDWNGVARYNFDARVTLQDLADTFNPPFQSCVVDGKASCVMCAYTVINGVPACASSDLLTKTFRGAWGLDGYVSSDCDAVAIMRDAQRYEPTPEDTVAVALKAGLDLNCGTYTQQHGMAAIQQGKMTEKDVDKALTNLFAVRMRLGHFDGDPRGNALYGRLGAADVCTADHKNLALEAAQDGIVLLKNDAGILPLDRSAVGSAAVIGHNANDPLVLSGNYFGPACETTTPLEGLQSYVRNVRFLAGCSSAACGYAATGQAAALASSAEYVFLFMGLSQDQEKEGLDRTSLLLPGKQQSLVTAVASAAKRPVVLVLLTGGPVDITFAQSNPKIGAILWAGYPGQAGGLAIARVLFGDHNPSGRLPVTWYTEDFTKVPMTDMRMRADPATGYPGRTYRFYRGKTIYKFGYGLSYSKFSRQLVTGDKNLAPNTSLLAHLSAKTQHAATSYYHVDDIGTVGCEQLKFPAEVEVLNHGPMDGKHSVLMFLRWPNATDGRPVRQLIGFRSQHIKAGEKANVRFHVSPCEHFSRTRADGKKVIDRGSHFLMVGKEELEISFEA

SEQ ID NO: 4897 - protein, 917 aa, Zea mays
  VARIANT 308: note = Ancestral polymorphism is P, Derived polymorphism is L
MEESGGSCGKREDAAPPWRPSDSTAFGRFAAAASPPEASPSASANGAAARVSSLHGVRRKPSVARLTAGIIQTYLQCDPEFKYSEVLNPKRFLTNPSTPAHNDGLDNANWDLILYVNLELVNKMSNRRFIVKEMLGQGTFGQVVKCWDTETNDYVAVKVIKNQPAFYHQAIMEVSLLRTLNQKFDPDDQHNIVRMLDYLSFQNHLCIAFEMLGQNLYELLKRNHLRGLKLKYVQAFSKQILDAMVVMREAGIIHCDLKPENILLAPSVTTAAEVKVIDFGSACLEGKTVYSYIQSRYYRSPEVLLGYPYTTAIDMWSFGCIVAELFLGLPLFPGASEYDVLQRMMKILGGQPPDELLREAKNTARFFKHVGSIYPGNEAPTGLCSAYKSLSEEDVEVQRDSKKPQMGKWYFPHLKLDKLICTYPWNNSELTETEKMDRLGLVDFLKGLLEFDPNKRWSPLQALYHPFITGKSFTGPYEPVPETTRIPVVRAAAIDHNPGGGHWLHSGLSPQVGSVNRYLPSNNAYPPKVPFSYGSSYGSFGSHGSYTANAGFGNSYGSIGDVNAINMYYSPLSSSGLTQIGSSPDVRLRMLLPHDRGIRLSPGSLGPMSLGASPSQFTPPNYQMQIPANSVGKHGSGSPASGGIHGSPLGKSAGVGPYNMRRNLPMPPHDYVSQHGHGRCGDGVSFSHFDACARGHTGHSHSAAGPSSYHSGWRPQIGSRSGISLEASSSHVLSQAPSQSFDFSPSSALDPANWDPNYSDESLLQDNSLSAELSSNLHFGDATGQGSGSIRSANFQGHVFATSNPVPTNQRADQLFHVSSQGLSAHSSVPVNYGGYNPPNYPPQNLRPRRGQPILHQRYNQATSSPMRPMGSHHSGQPAWPSFGMGDGVPWGGTGGHSFTTSGLSSSLARKDYGSIF

SEQ ID NO: 4898 - protein, 349 aa, Zea mays
  VARIANT 1: note = Ancestral polymorphism is M, Derived polymorphism is I
  VARIANT 44: note = Ancestral polymorphism is S, Derived polymorphism is L
  VARIANT 53: note = Ancestral polymorphism is A, Derived polymorphism is V
  VARIANT 286..349: note = Derived polymorphism lacks residues 286 to 349
  VARIANT 291..349: note = Derived polymorphism lacks residues 291 to 349
  VARIANT 297: note = Ancestral polymorphism is A, Derived polymorphism is V
MAAKSGYTRRLPLTGETAPPPPSAVLYVANCGPAVGVTDADVRSTFGAFGEVAGVQAADDSGARIIVRFHEPAAAEAAMAALHGRPCDLLAGRVLHIRYSVPVKPKARPGGSVPVAHAASELGIPGIYMVQEFVTAAEEQELLSAVDSKTWKRLAKRRVQHYGYEFLYETRNVDSKQFLGELPTFVSTVLEKIASFPGVKDCATRLVDQLTVNEYPCGVGLSPHIDTHSAFEEMIFSLSLAGTCIMEFRKYTKGTWRAPSVVDGVDEDSSQEPECIRKAIFLPPRSMLLMSGEGRYAWHHYIPHHKIDAVGGQVIKRNSRRVSFTFRKVRMGPCDCEYKQFCDAHSKRC

SEQ ID NO: 4899 - protein, 829 aa, Zea mays
  VARIANT 111: note = Ancestral polymorphism is R, Derived polymorphism is C
MRQWAEAASCYATARGRGVTATRQRHRLMFPAPRCAVSLSQAHTNASGTSTCGGVGGGGGMKALRHPTASQVRRLCKQGRLDGARLLLLDALPSPPPPPLYNALLIAYVARALPEHALRLYALLNHAARPTPRSDHYTYSCALTACARTRRLRLGKSVHAHLLRRARSLPDTAVLRNSLLNVYASCVRYRGDGSVDVVRRLFDAMPKRNAVSWNTLFGWYVKTGRPQEALEMFVRMLEDGIKPTPVSFVNVFPAVAKEDPSWSFVLYGLLVKHGMEYVNDLFVVSSAIVMFSELGDVQSAWRVFEYAAKKNTEVWNTMITGYVQNGKFAEAMGLVIRLMVSKEVPLDVVTFLSALTAASQSQDGRLGQQLHGYLIKGMHTTLPVILGNALVVMYSRCGNVQTAFELFDRLHEKDIVSWNTMITAFVQNDFDLEGLLLVYQMQKSGFAADLVTLTAVLSAASNTGDLHIGKQAHSYLIRHGIEGEGLESYLIDMYAKSGRIEIAQRVFDDYGNAKRDEVTWNAMIAGYTQTGHPEQAILAFRAMIEACLEPTSVTLASVLPACDPLGGGLCAGKQIHCFALRRCLDTNVFVGTALVDMYSKCGEISTAEHVFADMTEKSTVSYTTMISGLGQHGFGKSALSLFYSMQEKGLKPDGVTFLAAISACNYSGLVDEGLALYRSMETFGVVVTPQHRCCIVDMLAKAGRVEEAYEFVQELGEEGDFVSIWGTLLASCKAQDKQELVNLVTERLICIEKKYGHAGYSVLLSHIFAAEGNWSSADSLRKEMRLRGLSKMAGSSWIKVQHAALQSYPKNGHEHSLLHVVDYGRDEII

SEQ ID NO: 4900 - protein, 177 aa, Zea mays
  VARIANT 24: note = Ancestral polymorphism is T, Derived polymorphism is I
  VARIANT 42: note = Ancestral polymorphism is E, Derived polymorphism is D
MFNMSRDPLVVGNVVGDIVDPFITTASLRVFYNNKEMTNGSDLKPSQVMNEPRVHVGGRDMRTLYTLVMVDPDAPSPSNPTKRENLHWLVTDIPETTDASFGNEIVPYESPRPIAGIHRFAFVLFRQSVRQTTYAPGWRSNFNTRDFAAIYGLGSPVAAVYFNCQRENGCGGRRYIR

SEQ ID NO: 4901 - protein, 197 aa, Zea mays
  VARIANT 50: note = Ancestral polymorphism is R, Derived polymorphism is C
MSRCMDKGQVQPKSAMAADVVSLGDSWLGYAICKELLEPVKNAEEQDWFRRLSDRWKWVGAAMWSFPAAKRMSNVAVVVPKSGSSLWADLQHRAPQDSRPTKSVAEPEAHLLHSSTSGSTSACRVLGAYPSAKTSSPEHLRTPLYLESPVPPEAPRDSNKRRTKLDTNLVRGVPPPEILERCEFLEPLSGKALEDYR

SEQ ID NO: 4902 - protein, 542 aa, Zea mays
  VARIANT 37: note = Ancestral polymorphism is A, Derived polymorphism is G
  VARIANT 26: note = Ancestral polymorphism is E, Derived polymorphism is G
MLLHKGVAADEDLDEASRALLMKVLGDATQDAVRRQAKMLSGSLVSPALERELSMRSDCRTGHADPRLRPVASPSPRPSLLASERSRQLNLQHSTVSSRSGLHADGLHHAAEEPEEPTLALARLPFNRSSRTTLPAARHRPSQEQRHSNLSLHWFSVAGTSRHGTVTGSTPFANRRDSIYRSSGRGDQWALESSSRRRSVSRELSLGQSSRLHGRATIPRHVGADSSSSVPLFERLDSGLSVSMASLHGVERAGRGVATPERSSSSNTVATIRSRIRTSSTPFTERSLRRSAVQGRTPRSRGRQQGSDDVSSEDMYRSMYSGSRSSSCAASRSPTPPAPAPAPRAFANPYYYSPPVVTRGVAPPVYAPEQVSRSTRRRRRQEVLDKRVARLRMLKDKIGAVFHHRHDHHHHHHLGGGQEEGPSSRSRSVVRGAGHNSPWQFLTSMFHRAMEGKDKSTRIRTAVGVPAEKRRGGGGNMRALFDAVRRHLKGKRRAPAAGIKLRRKASLSRVRAKKMHWWQRLRRRRGMAGLTAGSRPRRRLGH

SEQ ID NO: 4903 - protein, 172 aa, Zea mays
  VARIANT 38: note = Ancestral polymorphism is Q, Derived polymorphism is L
MGQAWGNLQDRLQGRRWKEHQVRKITDKVFDRLTEDAQKRDKEALRFEEVYIAVLCVYNDINKYLPGPHHDPPSKEKLRAMMEEYDVNLDGLLDREEFAEFIRKLTADSLCSISVKLLITLVAAPALAMATKRATEGVPGVGKVVRKVPNALYASAITLGVVLLQRSTEGVE

SEQ ID NO: 4904 - protein, 304 aa, Zea mays
  VARIANT 26: note = Ancestral polymorphism is P, Derived polymorphism is L
  VARIANT 85: note = Ancestral polymorphism is F, Derived polymorphism is I
  VARIANT 233: note = Ancestral polymorphism is S, Derived polymorphism is R
MAATATLQVTSRGSTFLSLPPPIASPVYLSSPPTSTVAARHHLRVLSRLYLLLQRRSTLPVWAIFVALVDHVTAVADSNSTRKYFATTVMDFQQRFALESVAGISRDAPTHHPFHAPARKAFNHTSSCHLFCTLNRRCLVLDNFGKPAIIAPDSINPWWSLLEEAVKSAGNKLGKLEIFPASTNSCYFRQIRLPAFGFSSMTNTPILLHETMTIMWFVSLVLVWPSDAIKFLSKNEYLKGIGIYEPIIYRSNLLILKDIFRTAVTLQIPTDSDKTCEVGKSSYANEKGKMKWNSNFGGRTSVKT

SEQ ID NO: 4905 - protein, 122 aa, Zea mays
  VARIANT 74..122: note = Derived polymorphism lacks residues 74 to 122
  VARIANT 72: note = Ancestral polymorphism is R, Derived polymorphism is H
  VARIANT 68: note = Ancestral polymorphism is S, Derived polymorphism is F
  VARIANT 57: note = Ancestral polymorphism is H, Derived polymorphism is Y
  VARIANT 52: note = Ancestral polymorphism is L, Derived polymorphism is H
  VARIANT 45: note = Ancestral polymorphism is C, Derived polymorphism is Y
  VARIANT 28: note = Ancestral polymorphism is P, Derived polymorphism is S
  VARIANT 25: note = Ancestral polymorphism is S, Derived polymorphism is F
  VARIANT 19: note = Ancestral polymorphism is R, Derived polymorphism is M
  VARIANT 8: note = Ancestral polymorphism is G, Derived polymorphism is S
MLFSCCCGSPQPSSCRMRRVRRWTFTSPGSARPRTGSSLPRSCLCPDQHWPLGCEWHVRCHFTTFALSGFVRAQVIVQDVMPTCNFLLQFHVIEFKLLAPDTGDADSSLDRPWQKKKAEIKQ

SEQ ID NO: 4906 - protein, 174 aa, Zea mays
  VARIANT 166..174: note = Derived polymorphism lacks residues 166 to 174
  VARIANT 113: note = Ancestral polymorphism is G, Derived polymorphism is R
  VARIANT 101: note = Ancestral polymorphism is K, Derived polymorphism is I
  VARIANT 87..174: note = Derived polymorphism lacks residues 87 to 174
  VARIANT 56: note = Ancestral polymorphism is R, Derived polymorphism is W
  VARIANT 55: note = Ancestral polymorphism is E, Derived polymorphism is K
  VARIANT 26: note = Ancestral polymorphism is R, Derived polymorphism is W
  VARIANT 22: note = Ancestral polymorphism is T, Derived polymorphism is M
  VARIANT 21: note = Ancestral polymorphism is G, Derived polymorphism is C
  VARIANT 20: note = Ancestral polymorphism is C, Derived polymorphism is Y
  VARIANT 2: note = Ancestral polymorphism is A, Derived polymorphism is V
MASPVVVVAALLAAALAAFCGTDPLRTGSMVDFPGFEPHLVDLPDPTEMPMHADERERLRGAEVRFHGGKIQEEKILFNEMKEKGVKSGYREIIDLMSKHKSDLEGFKLDVYGSGEDSQEVQSTARRLDLSLKFFSREGIMLIIHSMGTRFSKIRALVMSCAQQQQRLLQWGNS

SEQ ID NO: 4907 - protein, 233 aa, Zea mays
  VARIANT 11: note = Ancestral polymorphism is K, Derived polymorphism is N
  VARIANT 16: note = Ancestral polymorphism is C, Derived polymorphism is R
  VARIANT 30: note = Ancestral polymorphism is K, Derived polymorphism is M
  VARIANT 36: note = Ancestral polymorphism is I, Derived polymorphism is M
  VARIANT 63: note = Ancestral polymorphism is V, Derived polymorphism is L
  VARIANT 106: note = Ancestral polymorphism is L, Derived polymorphism is H
  VARIANT 116: note = Ancestral polymorphism is R, Derived polymorphism is S
  VARIANT 130: note = Ancestral polymorphism is E, Derived polymorphism is D
  VARIANT 137: note = Ancestral polymorphism is V, Derived polymorphism is I
MRATDVMIAGKVAVVCGYGDVGKGCAAALKQAGARIIITEIDPICALLALMEGLQVLTLEDVVSEADIFVTTTGNKDIIMVDHMRKMKNNAIVCNIGHFDNEIDMLGLETYPGVKRITIKPQIDRWVFPETNTGIIILAEGRLMNLGCATGHPSFVMSCSFTNQVLAQLELWKEKNSGKYEKKVYVLPKHLDEKVNALHLGKHGAKLTKLTKSQADYIRVPIEGPYKLAHYRY

SEQ ID NO: 4908 - protein, 119 aa, Zea mays
  VARIANT 55: note = Ancestral polymorphism is G, Derived polymorphism is W
  VARIANT 57: note = Ancestral polymorphism is V, Derived polymorphism is G
  VARIANT 100: note = Ancestral polymorphism is C, Derived polymorphism is R
MHAFLTWHLDFFCLLLLLVFVLLYYYCYLLLRNSGVRRERAWLGDSLPHAFIGEGFVDGANLLVSRIGVIGVSVMAVLSGFGAVNMPYSYLSLFIRETRCNRHQNLGTAVIAIHGDMYC

SEQ ID NO: 4909 - protein, 162 aa, Zea mays
  VARIANT 4: note = Ancestral polymorphism is S, Derived polymorphism is P
  VARIANT 10: note = Ancestral polymorphism is F, Derived polymorphism is C
  VARIANT 23: note = Ancestral polymorphism is I, Derived polymorphism is T
  VARIANT 102: note = Ancestral polymorphism is K, Derived polymorphism is T
  VARIANT 103: note = Ancestral polymorphism is S, Derived polymorphism is R
MLKSLQSAVFKKSGSVDPVTITITIFLRHFDIGIDVALLSQYISLMFIGMLVVISVRGFLANVMKFFFASSRVGSRSTTNVVLVLSEIMARYFISSILLIRKSLANEYRYSGDHYCGVLGGDIQFDFYHRWFDAIFLASAFLSLVLISAQYTTRQTDKRPID

SEQ ID NO: 4910 - protein, 594 aa, Zea mays
  VARIANT 244..594: note = Derived polymorphism lacks residues 244 to 594
  VARIANT 204..594: note = Derived polymorphism lacks residues 204 to 594
  VARIANT 190..594: note = Derived polymorphism lacks residues 190 to 594
MAGGEGEMRSLALTPTWSVATVLTLLVAGSLLIERSIHRLSNWLKKTHRNPLYKAMEKMKEEMMLLGFISLLLAATSRIISGICIDSKYYNSRFSPCTKEEVQESINAEHAIAHARKHLLEVILHHSPRRNLKTSYHNHEGCREGYESFVSHEGLEQLHRFIFVMAVTHVTYSCLTMLLAILKIHKWRKWEDEAFRDNHESFSQIAYESATRRQPALTKSYSFRSWSQNNVVMWLVCFIAQFGQSVVRADYLILRKGFIMTHNLPPTYDFHNYMIRSMEEEFEKIVGVSGLLWGFVVAFMLFNVDGSNLYFWIAILPVTLVLLVGAKLQHVIATLTAEGAKMSTYGPRIQPRDDLFWFKKPEFLLWLIHFVLFQNAFELASFFWFWWQFGYDSCFIKNHLLVYCRLILGFAGQFLCSYSTLPVYALVTQMGSKYKAALIPRRIRETIHGWGKATRKKRRRRRGDDSTVRTETSTVCSLTDDDEDFEDDDDHHHHGPSYDTPRAGGRPPYLKIETHRQSGSGHDGPRPGGTPCFHPSGSGSGHAMLLRQASVSAPSSPSYRGGNNVTRSASMPGIAALRTTGSGTPTRVSHEEPT

SEQ ID NO: 4911 - protein, 421 aa, Zea mays
  VARIANT 374: note = Ancestral polymorphism is R, Derived polymorphism is Q
  VARIANT 372: note = Ancestral polymorphism is R, Derived polymorphism is Q
  VARIANT 172..421: note = Derived polymorphism lacks residues 172 to 421
  VARIANT 44..421: note = Derived polymorphism lacks residues 44 to 421
MSKNINGEDQFDGVEEIETNATDEVEEVKRCGRTKLINVWNIPRGHRIVVNCNELNQPIGEEAGVLAKFLGMVARNGSLCSLSFKDWRLLIGKKDRNNKQINKEAILNQVKKRFLYPARMETWVLQTIGERWRQHKSNLKSIFYPHKNQDANNSNAPDGVLADQWVAFVNNWMTPKAQDLSETNRINCTRRKAVHTFGTKSFARNREDLRENDPEMKYPHRAVLYIHTHTSNISKNRNAHVGELKALLSQQPDLADTSNGKVAWEGDALNKILGAEKPGHVHGLGLVPNPKQVFDALTSRSMKNLNVTTWDETSSEDVVALRLELEKLQNHVQKQDDTILDLQHALEQQKGQHGCVDAPLSPPKDVHNTMKRKRIYCQLRSEDSSMLDELNNTMGDENEDDEYEELQAQYKCSKIQDKILT

SEQ ID NO: 4912 - protein, 134 aa, Zea mays
  VARIANT 38: note = Ancestral polymorphism is G, Derived polymorphism is D
  VARIANT 53: note = Ancestral polymorphism is G, Derived polymorphism is R
  VARIANT 57: note = Ancestral polymorphism is V, Derived polymorphism is I
  VARIANT 72: note = Ancestral polymorphism is L, Derived polymorphism is V
  VARIANT 83..134: note = Derived polymorphism lacks residues 83 to 134
  VARIANT 86: note = Ancestral polymorphism is L, Derived polymorphism is I
  VARIANT 93: note = Ancestral polymorphism is I, Derived polymorphism is T
  VARIANT 95: note = Ancestral polymorphism is T, Derived polymorphism is I
  VARIANT 104: note = Ancestral polymorphism is G, Derived polymorphism is D
  VARIANT 120: note = Ancestral polymorphism is A, Derived polymorphism is V
MICAEDRPTINHGRWPMISAPASSHAVNGRWPRIRPIGGEGAANISTLPSKLGGEKVVYDATKKIFSSSSGLAEDILFLFTDWLSLLREIVNIETRIVILMWTGNSVTRPFRVAGTDTLAPGYQQRLEKHSGET

SEQ ID NO: 4913 - protein, 137 aa, Zea mays
  VARIANT 37: note = Ancestral polymorphism is G, Derived polymorphism is S
  VARIANT 24: note = Ancestral polymorphism is D, Derived polymorphism is V
  VARIANT 10: note = Ancestral polymorphism is A, Derived polymorphism is P
MQGSYGYDGAASRDPKPRLRWTPDLHQRFVDAVTKLGGPDRATPKSVLRLMGMKDLTLYQLKSHLQKYRLGIQGKKSTGLEPASGGVLRSQGFGSTTAHPPPGVPDQGKNTREIALSDALRYQIQVQRKLQEQTEAR

SEQ ID NO: 4914 - protein, 598 aa, Zea mays
  VARIANT 205..598: note = Derived polymorphism lacks residues 205 to 598
  VARIANT 169: note = Ancestral polymorphism is G, Derived polymorphism is C
MDFMKVFDQTVREIKREVNLKVLKVPEIEQKVLDATSDEPWGPHGSALSELAHATKKFAECQMVMNVLWTRLSERGANWRHVYKALTIIEYFIANGSERAVDDILDHYSKISVLSSFEYVEPNGKDAGINVRKKVETIVGIINDKEKIKAVRDKAASNRDKYIGLSSTGITYKSSSASFGSNYSSGERYGSFSGTKEADSYGDSYRDKESVKTSTSNSGSRKFGSKLRKDAKPDRRNEDYSSPSSLRPPSNTNNTEDDFDDFDPRGSNGKTTAKSNEVDLFGPNLMDDLIDASAATPATDNAAEPQVDLFADADFQSATASTETAANTDVKVNVDLFAEKASFPAAFPPQAGFIPPPSAGTSSEVNTSVSKKAAPEPFDPFGAIPLNNFDGPDPFGGFSSNAGSSTAAAPTHGSTGNISTSNQNLHAASDFAAFVSNNEGAAKDPFDLSSSANVGKTPLAAPKIDASDFGAFVSSTEEAAKDPLDLSSGSNLGKTGQAPAAASKPSAKKDNFQVKSGIWADSLSRGLIDLNITAPKKVNLADIGIVGGLGDGSDEKALPSWTMGAGSGLGMSGIPPSTQQAGGIESLANYNKHHFGFK

SEQ ID NO: 4915 - protein, 492 aa, Zea mays
  VARIANT 345: note = Ancestral polymorphism is L, Derived polymorphism is V
  VARIANT 303: note = Ancestral polymorphism is E, Derived polymorphism is Q
  VARIANT 295: note = Ancestral polymorphism is R, Derived polymorphism is W
MAGKKRKSGSEKPTKHRLPLGADADAVAEASKRRRSGATKQHQADEEASIPPSLSAKILREARKQQEEEMRADSSDEQRPSAVEATAGPSTSSSFPVPAADGENEGDDVDEFDGFDALSEYDGGEVEINEEDEKALAAFMSKDKAAERTLGDIILQKIREKDAEVATGEGRPRVKLDNSIIELYKEVGKFLSRYTSGKIPKAFKRIPSMECWADVVQLTEPENWSPNAVYQATRLFSSNMNTKNAERFYEAILLPRVRNDIRKNKRLHFALYQSLKKALYKPAAFNKGILLPLCRERNCTLREAVIIGSIIQKVSIPFLHASVALVKLAEMEYCGTTSYFIKLFLDKKYALPYRALDAVLAHFMRFVDDERIMPVIWHQSLLAFVERYKNELEKKDKEKLARLLDHQKHYLVTPEIRRELRGSCNRGEKDTNLHTYILSVELSGYFFNMFSYCHLSPSLPSLSRKTNGTYHKCQWRKISQILQHRFLHFICF

SEQ ID NO: 4916 - protein, 515 aa, Zea mays
  VARIANT 230: note = Ancestral polymorphism is R, Derived polymorphism is L
MICYMLWLAACCLLLLYSVRFRSGWSHGNGPRSYPVIGCLVDFYKNRWRLLDWYTELLAASPTQTIVVDRLGARRTVVTANPVNVEHILKSNFGNYPKGKPFTDILGDLLGTGIFNVDGELWYAQRKLVSHEFSARALRELEFAVLEDEARERLVPALGLAAARGDVVDMQDLLRRFSFDVICRVSLGVDPGCLDPALPAPRLAAAFDAAAGIIARRGAAPVAAVWKAKRALDVGSERQLREEIAVIHEAVMDLIHIRKKECGLRVNGGDGRRSDLLSRMIECGYPDEAIRDMVISFIMAGRDTTSSALTWFFWLLTRHRDVEREVLREITGGGASHAAAGGQGKMRALHAALCETMRLYPPVAWDSKHAAAGDVLPDGTRVERGDRVTYFQYGMGRMESIWGADAGEFSLRRWLSIIPEENAAPAPPAAVAGLSPFKYPVFQAGPRTCLGKEMAFVQMKFVASTVLRRFELVPVDEGRVPVFLPLMTAHMGDGLNVTVRSRSGEHVASAASSGN

SEQ ID NO: 4917 - protein, 1105 aa, Zea mays
  VARIANT 154..1105: note = Derived polymorphism lacks residues 154 to 1105
  VARIANT 112..1105: note = Derived polymorphism lacks residues 112 to 1105
  VARIANT 59..1105: note = Derived polymorphism lacks residues 59 to 1105
MASSPQPPPPFAAQNPTAQGSGQGPPGSGVGALPGAFANLQISRGAAPPPGAPRGLTPQQAPPTLAARPGPPPSAARPAFPGSPPAPPFVRAPTPSTSASPPFGGQPGVMSQPPPPFGGPPGASSQPPPPFGVPPGVVSQAPSLFGGPPATASQASSPFVGHSVAASQAAPFGAPPVAGSHPPPFGGPPGAGPQPAPPLRQTFAGQPGPMAAAAAWTQPPPPSFGAPQQPPPPFGSRPAGQPLFATQSAPAAQQLPFMGPPRVNAPAFGPPSWQTQGAGSGAMQPPLRMPGIPGSMQPNTLGPPGTPTIPYSPHAGTQVSTPSKIDPNQIPRPMRESSVIIYETRQGGQATIPPAASSEFIVKDTGNCSPRLMRCTVNQIPCTGDLLTTSGMPLALMVQPFSLPHPSEEHIQLVDFGEMGPIRCSRCKAYINPFMKFVDQGRHFICNLCGFRNDTPRDYMCNLGPDGRRRDADDRPELSRGTVEFVATKEFLVRDPMPAVYFFLIDVSMNAIQTGATAAACSAISQAISDLPEGPRTMVGIATFDSAIHFYSLKRAQQQPLMLIVPDVQDVYTPLQTDLILPVSECRDNLEQLLESIPSMFENNRVADSAFGAAMKAGFLAMKSTGGKLLVFQSVSIFAFYFRKFCLLLEAHKLLQPVDNTLKTMALEFAEYQACYVCVDVFLTTQSYVDIASISVVPQTTGGRVYYYYPFSALSDPAKLFNDLRWNISRPQGFEAVMRVRCSQGLQVQDYYGNFCKRVPTDIDLPAIDSDKTVMVTFKHDDKLPENVECGFQCALLYTTVYGQRRIRVINLSLSCTNLLANLFRYADLETQFSCFLKQAANGIPTSPLPRIRDEATNTCINILQSYRKHCASVTSSGQLILPEALKLLPLYTLALVKSLGLRTDGRLDDRSYWISVASSVSVVLAVPLVFPRLIPIHDLTSRASYHDDDDSLIPSPLMLNSENVQEDGVYLLENGEDGLIYVGNMVNPATLEQIFGVSSLAALPAQASLFTISLILCLKAAVLIPCVARLALEQFDNELSRKVNEVVNEIRRQRCSYLRLRQCRRGEPSGDFFRSFLVEDKAPGVFSYVEFLVHVHRQIQSKMT

SEQ ID NO: 4918 - protein, 358 aa, Zea mays
  VARIANT 316..358: note = Derived polymorphism lacks residues 316 to 358
  VARIANT 285: note = Ancestral polymorphism is P, Derived polymorphism is L
  VARIANT 237: note = Ancestral polymorphism is W, Derived polymorphism is L
  VARIANT 233: note = Ancestral polymorphism is F, Derived polymorphism is S
  VARIANT 206..358: note = Derived polymorphism lacks residues 206 to 358
  VARIANT 201: note = Ancestral polymorphism is P, Derived polymorphism is L
  VARIANT 187: note = Ancestral polymorphism is D, Derived polymorphism is H
  VARIANT 183..358: note = Derived polymorphism lacks residues 183 to 358
  VARIANT 182..358: note = Derived polymorphism lacks residues 182 to 358
  VARIANT 166: note = Ancestral polymorphism is E, Derived polymorphism is K
MRWLPRLLSHSIEVGRASAAGRSNPSLVKAGSHGFASGGWDGSPAVPREWLRKLWVDVLKKQKEDARRWGIGASPGNAGSGAEPSLCAFANSVEAAGATREAPSRSYQYEYRGLAGVPLYCFALILSWVLLRTRRPFVAEITDAMGNEIFKVRRPFWWINSSIYAEVDGKEIGVVHRRWHLWQRIYDLYLGNRQFAVVENPGFWNWTFSLVDEDDKLLAQIDRNWRGIGFEPFIQYWALPLPDDTAMMVLSHKSQQIHVALFTDAGQYAIRFGDDVQSDKFAHLPFIISGYVGAHFSQLVNVSQKLQTKELHVVRQLTLPERVVALALAISLDSDYFSRRGGCVFTPFRGLPFLIATE

SEQ ID NO: 4919 - protein, 733 aa, Zea mays
  VARIANT 6: note = Ancestral polymorphism is L, Derived polymorphism is P
  VARIANT 591..733: note = Derived polymorphism lacks residues 591 to 733
MVLLRPWHILFFLTCFSPSFVHPMEPGTYRCSNVSIPYPFGVAGKSPSLSRGFKVVCGHSGPLLSIGNSMLGILDISLLDGLVSILASASSQQCIGGEANSSVNLEGTVFTFSDTRNKFTALGCNVVAMLLNGSTGYSGGCASFCSSGNSIIDGSCSGVACCQAPVPKGLKKLDLEFSNINITNSGIDYGPCGQAFIVEQNSYVFSLPDLNYTVDTKPQYRHVVLEWSVNGSSCEEAKLSGSYACAENAYCYNSSNGIGYRCNCSSGFEGNPYLQGPNGCTDINECITRNPCTNRCSNTIGGFQCTCPAGMSGDGLKEGSGCNGVSTLVIAIVAGLALLVLLLILGFWTHWLVKKRKLAKTRQRYFMQNGGLMLKQQMFSEEAPLHIFTSSELDKATSNFSDDNIVGRGGFGTVYRGILSNQVVVAIKKAQRVDQTQTEQFINEMIILSQANHKNVVQLLGCCLETEVPLLVYEFITNGALFHHLHNTSVPMSWESRLSIAVETASALAYLHLAAKMPIIHRDVKSSNILLDDNFTAKVSDFGASRPIPHNQTHVTTLVQGTLGYMDPEYFQTSQLTEKSDVYSFGVVLIELLTRKKPIMDDIAEDIRSLALQFSMLFHGNKLLEIVDPVVAEEAGVRHVETVSKLALRCLRLKGEERPRMIDVAIELEALRRLMKQHFILKNESLLQESCCNEEMSIDAPSSLFLGVDGISDDEGMEIIPLTCPSKILTSYP

SEQ ID NO: 4920 - protein, 856 aa, Zea mays
  VARIANT 217..856: note = Derived polymorphism lacks residues 217 to 856
MPSRSPACRPRGRNRRSAADAVARPLALALILVSTLPRAAHSQDLALPPVQPRGVRRTMTCDNIPEPFGTRSRGASRLPGFEVTCGPNREAMLSIGGDAYMIDFVSVSGSYVVVFAEPITQVCYDGKGKPTPDTGTGAKSSEGTTTTFTWSLEGTPFTFSKSNKLVNFGCNRTLMANFFIVPGDSSPLYTSCTTTCNTLQISGSCLGEACCEAPMDQVNGAKAFSLSFERTTANGTGEEDGTCSAAFFLDKDETVFTFSGDEVRPLKTALLPPGERRMVLDWAIGSTSCEQTQSYTFEKLCKYGTCVDAPTGAGYLCKCPSGYDGNPYVSDGCQDINECRNYNSNNCTYQNLCNNTLGGYTCSCPENNIGDGYRTGTGCNTTLATPVSPSQQPQGINVCDHPEKNPCTYIKYCIDLEGVVSCACPEGMSGDGRKNGRGCCFSCQKHFPLDTVLGVSLVLMVTTTTAASCYCWAVKKRELGRKRAELFRKNGGLLLQQRFSTITSQGEDQYSSKIFSAEELKAATDNYSESRILGRGGQGTVYKGILPDQTVVAIKKSKVFDESQVEQFVNEIAILSQIDHPNVVKLLGCCLETQVPLLVYEFISNGTLFQHIHNRNATRPLTWEDCLRIAAETADALAYLHSASSIPIIHRDIKSSNILLDGNFVAKIADFGASRSVPFDQTHITTLIQGTIGYLDPEYFQSSQLTEKSDVYSFGVVLAELLTRQKPISAARPEDSCNLAMHLVVLFNKGRLLQEIEPHILAEAGEDQCYAVAELSVRCLNVKGEERPAMVVVASVLQELRRSFTIDQAVGIKDESIQENSEQEEKHLHESRSIPSLQSSEVSTQCSMEAKMSSFC

SEQ ID NO: 4921 - protein, 312 aa, Zea mays
  VARIANT 223..312: note = Derived polymorphism lacks residues 223 to 312
  VARIANT 218..312: note = Derived polymorphism lacks residues 218 to 312
  VARIANT 205..312: note = Derived polymorphism lacks residues 205 to 312
  VARIANT 175: note = Ancestral polymorphism is L, Derived polymorphism is Q
  VARIANT 167: note = Ancestral polymorphism is E, Derived polymorphism is V
  VARIANT 142..312: note = Derived polymorphism lacks residues 142 to 312
  VARIANT 127: note = Ancestral polymorphism is V, Derived polymorphism is I
  VARIANT 124: note = Ancestral polymorphism is S, Derived polymorphism is F
  VARIANT 83: note = Ancestral polymorphism is R, Derived polymorphism is W
  VARIANT 75: note = Ancestral polymorphism is D, Derived polymorphism is H
  VARIANT 70: note = Ancestral polymorphism is S, Derived polymorphism is F
  VARIANT 57: note = Ancestral polymorphism is P, Derived polymorphism is S
  VARIANT 55: note = Ancestral polymorphism is A, Derived polymorphism is T
  VARIANT 53: note = Ancestral polymorphism is Y, Derived polymorphism is N
  VARIANT 52: note = Ancestral polymorphism is I, Derived polymorphism is T
  VARIANT 50: note = Ancestral polymorphism is W, Derived polymorphism is S
  VARIANT 42: note = Ancestral polymorphism is G, Derived polymorphism is R
  VARIANT 33..312: note = Derived polymorphism lacks residues 33 to 312
  VARIANT 31: note = Ancestral polymorphism is P, Derived polymorphism is T
  VARIANT 27: note = Ancestral polymorphism is T, Derived polymorphism is M
  VARIANT 22: note = Ancestral polymorphism is T, Derived polymorphism is K
  VARIANT 1: note = Ancestral polymorphism is M, Derived polymorphism is V
MKTLTQALAKASAVIEKTVSTKVQEVTGPRPLQDYELLDQAGSGGPGLAWRIYTARPRDGAPSAPYPVVSVWVLDKRALAEARARAGMSKVAEDAFLDLVRAKEQWLAKEQWLAAVADGHAHASALVNAHLSRRQASFLSAWAADLGVLKDMPGIRDKANSKFVLREEQYSGMLLSAYKEMRLLLLEFLSIALKEGVELETSLNWGGELYDGESNELQSIGLQSGDAYSPPENWCAERLGSQRPGNLPLHKAEREEAARKQEELQAQLQAQQAALEENQSLLRQAQEEVKGMHTKFEETNALLRAVLKLQKD

SEQ ID NO: 4922 - protein, 113 aa, Zea mays
  VARIANT 60: note = Ancestral polymorphism is P, Derived polymorphism is H
  VARIANT 58: note = Ancestral polymorphism is G, Derived polymorphism is D
  VARIANT 57: note = Ancestral polymorphism is D, Derived polymorphism is G
  VARIANT 45: note = Ancestral polymorphism is A, Derived polymorphism is T
  VARIANT 42..113: note = Derived polymorphism lacks residues 42 to 113
  VARIANT 16: note = Ancestral polymorphism is W, Derived polymorphism is G
MGYIGDKVNQGEQMNWQVLLDNVDVKTLQLKQLRDQTGLMNQEPALFASTILENILDGKPDATISLKEKIQLHFTSLLFMEQIGTDELMWSWDLTQHAAGEFSFAMVQANDVL

SEQ ID NO: 4923 - protein, 107 aa, Zea mays
  VARIANT 28: note = Ancestral polymorphism is D, Derived polymorphism is Y
  VARIANT 98: note = Ancestral polymorphism is P, Derived polymorphism is L
MEGRNHSNEPAALLARRAGDKAAPTTDYSITIVAGSKQAAGAHVRARQGAVAAAVAGQLPRGSCKVEATVQGPRHGGNGSGGAGVLLMRRNGPSRVLPYSVARAVVV

SEQ ID NO: 4924 - protein, 239 aa, Zea mays
  VARIANT 157..239: note = Derived polymorphism lacks residues 157 to 239
MVAFMASSGAMKASSRPTFVTPRSFFNWGKSARETETPPPQLQFSYHDVEPPFPMSLVAKTHLRDRELRCCYKATVDGFSATDFHRRCDFKGPCVVVGYTDGGFRFGGFSPEGYRSTDDYYDTLDAFLFYWAESTEVSAPPVVLPKVGGSGAALFDYSRGGPQFGADGLLIGPPLTAVMGVFTGPDSSAGVGDLRSARSRLGLSYARRPDGKESLFGDEGRAQLVEVLVFCNPQIASLY

SEQ ID NO: 4925 - protein, 166 aa, Zea mays
  VARIANT 68: note = Ancestral polymorphism is R, Derived polymorphism is Q
  VARIANT 65: note = Ancestral polymorphism is V, Derived polymorphism is A
  VARIANT 64: note = Ancestral polymorphism is T, Derived polymorphism is I
  VARIANT 61: note = Ancestral polymorphism is V, Derived polymorphism is I
  VARIANT 17: note = Ancestral polymorphism is V, Derived polymorphism is L
  VARIANT 16: note = Ancestral polymorphism is R, Derived polymorphism is C
  VARIANT 9..166: note = Derived polymorphism lacks residues 9 to 166
MPPKLDPSQVVEVFVRVTGGEVGAASSLAPKIGPLGLSPKKIGEDIAKETAKDWKGLRVTVKLTVQNRQAKVSVVPSAAALVIKALKEPERDRKKVKNIKHSGNISLDDVIEIAKTMRNRSMAKELAGTVKEILGTCVSVGCTVDGKDPKDLQQEIDDGEVEIPSA

SEQ ID NO: 4926 - protein, 394 aa, Zea mays
  VARIANT 28..394: note = Derived polymorphism lacks residues 28 to 394
  VARIANT 39..394: note = Derived polymorphism lacks residues 39 to 394
  VARIANT 68..394: note = Derived polymorphism lacks residues 68 to 394
  VARIANT 91..394: note = Derived polymorphism lacks residues 91 to 394
  VARIANT 94: note = Ancestral polymorphism is R, Derived polymorphism is W
  VARIANT 281..394: note = Derived polymorphism lacks residues 281 to 394
  VARIANT 301..394: note = Derived polymorphism lacks residues 301 to 394
  VARIANT 318..394: note = Derived polymorphism lacks residues 318 to 394
MSSSKEDLRGDVFGSAAAVATAGSRADWCSLGRAPGCDQSHEQVDPEALDRSFFIRVMAARSPNVRLQKAIDRKNQSSMLKCPHSAPPKRQRARFARLSAETEAAGKAPAEPKPRVKRICAMRASPIRTKTARVECPSERKKALTTPRSKAVRPRQELFHSVKHQKESLAAASRKGTVVKSLFMSTTPKKEPVQTPAADKSKGAVFEVCSKLRKLNLACWEVPSRYMSQPQPKNMKTAKKSEETTVAKSEKRELESKTNSKKKILGRSVKRANAGPDGENRNGCSTAVDENSLADTAGSHQERKVVLQELRIEVDASRCGNSDDNKENVSSAPSEEELDNSSHYGSEIRLLENNDNVPLKENVALKVAKLQKKVHQEQARKLKKTTNPRHTIYT

SEQ ID NO: 4927 - protein, 219 aa, Zea mays
  VARIANT 6: note = Ancestral polymorphism is R, Derived polymorphism is K
  VARIANT 11..219: note = Derived polymorphism lacks residues 11 to 219
  VARIANT 37: note = Ancestral polymorphism is R, Derived polymorphism is C
  VARIANT 38: note = Ancestral polymorphism is T, Derived polymorphism is M
  VARIANT 74: note = Ancestral polymorphism is L, Derived polymorphism is P
  VARIANT 77: note = Ancestral polymorphism is E, Derived polymorphism is G
  VARIANT 84: note = Ancestral polymorphism is H, Derived polymorphism is L
  VARIANT 86: note = Ancestral polymorphism is E, Derived polymorphism is K
  VARIANT 93: note = Ancestral polymorphism is R, Derived polymorphism is Q
  VARIANT 95..219: note = Derived polymorphism lacks residues 95 to 219
  VARIANT 124: note = Ancestral polymorphism is K, Derived polymorphism is E
  VARIANT 132: note = Ancestral polymorphism is D, Derived polymorphism is A
  VARIANT 138: note = Ancestral polymorphism is S, Derived polymorphism is L
  VARIANT 189: note = Ancestral polymorphism is Q, Derived polymorphism is L
MESAIRDHPLWANATDQEIGHALEGLEKYVMTKLFDRTFGTSTEDVVSDMDISEKIGLLQQFVKPHHLDIPKVLHNEASWLVTHSELEASTMRFQSLMFVISSKDGSTWCISHFNSILCLIKMKPPKLYYLDINLLASIFKRASIVKHSALFSPSVINYALILAVKELQKINSFKAPREKLLCIMSCCLVINNLLLNILSGADEFLPILIYVTIKASNS

SEQ ID NO: 4928 - protein, 101 aa, Zea mays
  VARIANT 41..101: note = Derived polymorphism lacks residues 41 to 101
  VARIANT 48: note = Ancestral polymorphism is R, Derived polymorphism is W
  VARIANT 68..101: note = Derived polymorphism lacks residues 68 to 101
  VARIANT 86..101: note = Derived polymorphism lacks residues 86 to 101
MGDPNADSDHPILKMEQDAQIGKGSRGDVTILPTLVVNNRQYRGKLERKAVLKAICAGFEETTEPNVCLSDDIETNECLNDNGGYWQDKSWSNIEVCRSTL

SEQ ID NO: 4929 - protein, 191 aa, Zea mays
  VARIANT 45: note = Ancestral polymorphism is S, Derived polymorphism is F
MTSSSSTNTSDGAKPSSCRRGHWRPGEDEKLKQLVNKYGAQKWKSIAEKLEGRSGKSCRLRWFNQLDPRINKRPFTEQEEERLLNAHHAHGNKWALIARHLPGRTDNAVKNHWHVVMARRCRERSRHHARAASSSSPLSINLSPRETLDVDIGDRVRHKHRRKDYHAGDSADKPLKKDVPFIDFLGVGMSS

SEQ ID NO: 4930 - protein, 451 aa, Zea mays
  VARIANT 324: note = Ancestral polymorphism is S, Derived polymorphism is A
  VARIANT 244: note = Ancestral polymorphism is L, Derived polymorphism is V
  VARIANT 240: note = Ancestral polymorphism is A, Derived polymorphism is V
MPQVMVVARNFMDMVAALPAGKLDMLYDSAFICEAVLRSLPPLAKKYALQMLYVLAPVTAAAMEEWVLDEYAAKHKVAIDKLLQLRVFVEVRDRRRDVSYKMNQKFQGNMQKYLVDGGSLPREPLPLSVTGRLPTPADLEAYALDQWECFLLQLINSSQVEKGSSFSSSMMKTFQRGLLSSRDGEASKLTENGFQFLLMETNAQLWYIMREYISSAEERGVDPTELISFLLELSFHKLGAAYSLNTLTDVQRIAIRDLAELGLVKQQQGRKDSWFIPTQLATNLSASLSDSSSNKEGFVVVETNFRMYAYSTSKLHCEILRLFARVEYQLPNLIVGAVTKESIYGAFENGITAEQIISFLRQNAHPRVADKIPAVPENVTDQIRLWETDLNRVEMIPSHLYEDFPSKEWFEQCCDYARDNGYLLWEDPKRMRLIVRGEFHPEMREFLRRQR

SEQ ID NO: 4931 - protein, 315 aa, Zea mays
  VARIANT 34: note = Ancestral polymorphism is K, Derived polymorphism is N
  VARIANT 35: note = Ancestral polymorphism is C, Derived polymorphism is S
  VARIANT 43: note = Ancestral polymorphism is T, Derived polymorphism is R
  VARIANT 93: note = Ancestral polymorphism is E, Derived polymorphism is K
MASEVVRPSDAELLQAQADIWRLSLSYLTPLSLKCAVVLGIPRAIYRHGGAASAAELITALSLPSAKLPFLRRLLRLLAASGVFTVDRQSTEEERYRISPVSYLLVEGIPHEDHMNHTSFVLTCTSSRYIEPAIGLAEWFRKDTATSPFEELHGATLFHESMGSLDADFHDMASDALDTHDNFGVEMALREFRDLFEGIQSMTYCCGNFGDDKGARAIAKAFPHIKCTVLAPPKIIAAKPADGVKINYVEGDMFSFIPPAQTVVLKLLMDIGMMTMTKGRQHDEKEWRQLFTKAGFSEYKILKEFGTRVAFEVYP

SEQ ID NO: 4932 - protein, 363 aa, Zea mays
  VARIANT 258: note = Ancestral polymorphism is P, Derived polymorphism is S
MASEVVRPSDAELLKAQADIWRLSLSYLTPLSLRCAVELGIPTAIYRHGGAASAAELVTALSLPSTKLPFLRRLLRLLAASGVFTVDKQSSEEERYRISPVSYLLVDGIPHEDHMNHTALVLTCTSTRYIEAGIGLAEWFKRDVVTSPFEELHGATLFHESMGSLDADFHDMASEALDAHDNFGIEIAMREFRDLFEGIQSMTYCCGNFGDDKGARAIVKAFPHIKCTVLAPPKIIATKPADGAMINYVEGDMFSFIPPAQTVVLKLVLHHLTDEECVKLLAQCRKAIPSRKDGGKVIIGDIMIDHSGPMLETHLLMDIGMMTMTKGRQRDEKEWSELFTKAGFSEYKILKEFGARVAFEVYP

SEQ ID NO: 4933 - protein, 417 aa, Zea mays
  VARIANT 175: note = Ancestral polymorphism is R, Derived polymorphism is T
MAAFTVHTSAATSPYSPAGTAILLRSRSRAYPTATIRVSCSKTVVIGVAADSGCGKTTFTRRLASVLGGGAEPPRAGRNPGSNTLVSDTTTVICLDDYHSLDRVGRKAKGVTALDPRFVDFDLMYEQVRAIKEGRAVEKPVYNHVTGLLDPPELITPPNILVIKGLHPMFDERVRDLLDFSIYLDISNEVKLAWKIQVRCVVETWESVVGTALRASRPPSRQGSPTSKLTLVKACRQPCICTPKIRKSKCRAECSSSSCCCAEPQKQYADAVIEVLPTQLIPGDDECKVVRVKLIMKEGVEHFAPVHLFDEGSTVYWIPCGRKLSCSYPGIRFAYGFDTYFGHEVSVVEMDGQFDKLDELIYVETHLSNLSTKFYGEVTQQMLRHADVPGSNNGTGLFQTIVGLKIRDLYEQIVARR

SEQ ID NO: 4934 - protein, 334 aa, Zea mays
  VARIANT 277: note = Ancestral polymorphism is I, Derived polymorphism is T
  VARIANT 263: note = Ancestral polymorphism is D, Derived polymorphism is Y
  VARIANT 233: note = Ancestral polymorphism is C, Derived polymorphism is R
  VARIANT 205: note = Ancestral polymorphism is C, Derived polymorphism is S
  VARIANT 201: note = Ancestral polymorphism is Y, Derived polymorphism is F
  VARIANT 196: note = Ancestral polymorphism is G, Derived polymorphism is E
  VARIANT 194: note = Ancestral polymorphism is N, Derived polymorphism is I
  VARIANT 193: note = Ancestral polymorphism is F, Derived polymorphism is V
  VARIANT 107: note = Ancestral polymorphism is E, Derived polymorphism is D
  VARIANT 52: note = Ancestral polymorphism is L, Derived polymorphism is I
  VARIANT 32: note = Ancestral polymorphism is D, Derived polymorphism is N
MQKDFFRLGSPVTKPALKLEQFLALAVVQAGDALIHLYNHFISDFETKISLLKFAHFTVVVSHQYLDKNAGINYLEGVISKLRDTRESRVEEPILYVKMQIATFLLEKGNQKDCKNLLEEGKTTLDSMVDVDPSVHGTYYWDLYEFQNLALDLSLAALLGENIYNFGELLAHPIIHSLLGTQAEWIFHMLQAFNSGNLSLYQEICKAHSNALSAQLALVQNERNLLEKINMLCLMEIIFSRSSENRTIPMRDIAEQTKLPVEDVEYLLMKSLSARLIEGIIDQVDGVVHVSRVKPRVLGIDQVKCLHDRLDTWIGKVDTILLSVEAETPDLVSS

SEQ ID NO: 4935 - protein, 237 aa, Zea mays
  VARIANT 1: note = Ancestral polymorphism is M, Derived polymorphism is I
  VARIANT 9: note = Ancestral polymorphism is V, Derived polymorphism is G
  VARIANT 17: note = Ancestral polymorphism is A, Derived polymorphism is V
  VARIANT 118: note = Ancestral polymorphism is M, Derived polymorphism is T
  VARIANT 186: note = Ancestral polymorphism is P, Derived polymorphism is S
MILWYNFVVHFEQNTAANTVSFVSTCRNLFSSSKVTALYSIEMAMGLINANPIIHEKKERRIRQAPETTDENAVESIDQLEIFDILLNDFPYINVVKLAFSFICESSILAIWLLRSLTFLHHIRDIKDPEHPYSLEQLNVVTEDSIELNDESNHVRVIFTPTVEHCSMATIIGLCIRVKLVRSLPPYYKVDIRVAPGSHATEAAVNKQLNDKERVAAALENPNLLDMVEECLSPTFD

SEQ ID NO: 4936 - protein, 758 aa, Zea mays
  VARIANT 6: note = Ancestral polymorphism is R, Derived polymorphism is W
  VARIANT 308..758: note = Derived polymorphism lacks residues 308 to 758
  VARIANT 399..758: note = Derived polymorphism lacks residues 399 to 758
MPPPRRLHLDATFLFLPVFLFATWRPVAAAALSTFAMAKADTTTIVCALLPSAASPLLVDLNCTAAGGDHARQVTYPSSHPFAALAGGENFLCAVRPSGERAGDIDMRWWDLSGDGSSSSKRVYMGPPLRALSSGEYRVCGVLSSGELHCWRWRGLNISRDLRFAAAAVGDGFVCGILKGTPASIRCFGNDTAAAAVAGAPADGSFDVVAACGHRACALSTTGVLACWGHDPPTVAPDDAATGYAALALGEAGVCGLRTNSTIRCFGDGVAVPPAGLARAQFLDFNATNRLVFGRVLPGPCLPMSSCQCGVLPGSANLCDDGRCVCVDCAFELNVARPNASLVPVKGGRGRKTMWIAIAAGTTAFFVFFVALQFALVLRCRRRRRRRRNEQDTSGGAQQSLMPPRVGSSRSRGPGSVVVENFMLDMLHASTDGFSDDSRIGTGSFGSVYRGTLPDGREVAIKRAEDSAKASSSVARHRDRETAFDSELTALARANHKNIVCLLGCCADSGERVLVYEFMANGTLHDQLHSRSPLAAVVSSWRGRLTIALGAARGIEYMHVYAVPPIIHRDVKSANILLDDAWTAKIADFGLSSVLDPGAGTPQEPLYTGGTVGYMDPEYYRLQHLTDKSDVYSFGVVLLELVSGCRVVQRYAESVTPKNVVEFAVPHILADDVARVLDPRLPAPTPGEAEALAYVGYLAADCVGPVGCERPSMTEVVVALERALVACGAAAPLSRASTGRRSVLSRSGTDQFDLTDTD

SEQ ID NO: 4937 - protein, 355 aa, Zea mays
  VARIANT 36: note = Ancestral polymorphism is D, Derived polymorphism is Y
  VARIANT 108: note = Ancestral polymorphism is N, Derived polymorphism is K
  VARIANT 113: note = Ancestral polymorphism is W, Derived polymorphism is R
  VARIANT 148: note = Ancestral polymorphism is W, Derived polymorphism is R
  VARIANT 196: note = Ancestral polymorphism is A, Derived polymorphism is S
  VARIANT 246: note = Ancestral polymorphism is M, Derived polymorphism is T
  VARIANT 248: note = Ancestral polymorphism is A, Derived polymorphism is D
MAGAVSSGTGKIQVKFLVDIEKKKVVFAESGKEFVDVLISFLTLPLGTIVRLLGKESSLGCFDELYKSVESLDESHFQTKACKNMLLSPLSDAGTLCEDLVVRIDNTKPRRIRVCRQPKCVKSTLYYSSVPDVPCGQCGEHLALGWKWSKEDRKAKDDGVFVRGGMSYAITNELQVMPTSTDSFLFLLRDMGIEDATMLEDRTLQLGSEEIKNLLKQILTSDQPLTALIFNPCHESTRKDESIVTMNAYVSPETDSNPDPNLIKVKLFVANANQSVVHAEVGEEFCNLLFSFLTLPLGHVVKLLGVRSSISCIDNLYRSLKFNLDDCMNSDEIRDMVVSPRLPPFFSCTNPLFPK

SEQ ID NO: 4938 - protein, 159 aa, Zea mays
  VARIANT 17: note = Ancestral polymorphism is D, Derived polymorphism is N
  VARIANT 19: note = Ancestral polymorphism is G, Derived polymorphism is S
  VARIANT 25: note = Ancestral polymorphism is A, Derived polymorphism is V
  VARIANT 32: note = Ancestral polymorphism is R, Derived polymorphism is W
  VARIANT 36..159: note = Derived polymorphism lacks residues 36 to 159
  VARIANT 81..159: note = Derived polymorphism lacks residues 81 to 159
MTFSVGTPPQKLSALADTGSDLIWVKCGACKRCAPQGALLPTTLTASAPPFSTLRCSSNLCNDLPAHQYSAAAGAECSYKYSYGLASDPHHYTQGYRGARRSRSALTTLPCQASSSAAPTCRRAGTARALASSASAAGCCPSYRSSRLAPSPTASITMQ

SEQ ID NO: 4939 - protein, 111 aa, Zea mays
  VARIANT 22: note = Ancestral polymorphism is G, Derived polymorphism is R
  VARIANT 91: note = Ancestral polymorphism is P, Derived polymorphism is L
MARQLVVLALLFVIAGVAHGAGECGRASADRVALRMAPCISAADDPQSTPTSSCCSAVHTIGQSPSCLCAVMLSGTARAAGIKPEVAITIPKRCNMADRPVGYKCGDYTLP

SEQ ID NO: 4940 - protein, 454 aa, Zea mays
  VARIANT 207..454: note = Derived polymorphism lacks residues 207 to 454
MAAKATGHVGTEAMEVSVEVANGDDDAARLDDDGRPRRRGTMWTASAHIITAVIGAGVLSLAWAMAQLGWAAGTAMMLLFAGISYYTSTLLAECYRCGEPGTGKRNYTYTEAVRAILGGAKFKLCGVIQYANLVGIAVGYTIAASISMLAIKRADCFHDRGHRNPCRSSSNPYMILFGAVEIVFSQIPDFDQIWWLSIVAAAMSFTYATIGLALGIAQTVANGGFKGSLTGVNVGDGITPMQKDTIKAPPPSEVTVMKKATMVSVATTTVFYMLCGCMGYAAFGDDAPDNLLTGFGFYEPFWLLDVANAAIVVHLVGAYQVFCQPLFAFVEKRAAARWPDSRFMTRELRLGPFVLGVFRLTWRTAFVCLTTVVAMMLPFFGDVVGLLGAVSFWPLSVYFPVEMYKAQRRVRRWSTRWLCLQTLSAVCLLVSIAGAVGSTAGVINAVNLHRPFSG

SEQ ID NO: 4941 - protein, 143 aa, Zea mays
  VARIANT 12: note = Ancestral polymorphism is D, Derived polymorphism is Y
  VARIANT 25: note = Ancestral polymorphism is A, Derived polymorphism is T
  VARIANT 26: note = Ancestral polymorphism is A, Derived polymorphism is T
  VARIANT 38: note = Ancestral polymorphism is A, Derived polymorphism is V
  VARIANT 39: note = Ancestral polymorphism is A, Derived polymorphism is V
  VARIANT 46: note = Ancestral polymorphism is G, Derived polymorphism is D
  VARIANT 50: note = Ancestral polymorphism is D, Derived polymorphism is N
  VARIANT 54: note = Ancestral polymorphism is A, Derived polymorphism is G
  VARIANT 65: note = Ancestral polymorphism is A, Derived polymorphism is V
  VARIANT 72: note = Ancestral polymorphism is A, Derived polymorphism is T
  VARIANT 76..143: note = Derived polymorphism lacks residues 76 to 143
  VARIANT 77..143: note = Derived polymorphism lacks residues 77 to 143
  VARIANT 78: note = Ancestral polymorphism is A, Derived polymorphism is T
  VARIANT 81: note = Ancestral polymorphism is C, Derived polymorphism is S
  VARIANT 84: note = Ancestral polymorphism is D, Derived polymorphism is G
  VARIANT 95: note = Ancestral polymorphism is E, Derived polymorphism is G
  VARIANT 105: note = Ancestral polymorphism is S, Derived polymorphism is F
  VARIANT 134: note = Ancestral polymorphism is L, Derived polymorphism is F
  VARIANT 135: note = Ancestral polymorphism is A, Derived polymorphism is S
  VARIANT 136..143: note = Derived polymorphism lacks residues 136 to 143
MYDEACSVLEEDGKEHMAFDLYRVAAALYIKMEKYSDVAALFLRLGSAADKCNAINSQCKAYLSAIIIYLYAHDFQQAQKCYNDCSEVQAFLNSGQNRCTTKLLSAYEEGDAEEIKRIAQSSAFNHLDHVVIRLSWKLPTGDL

SEQ ID NO: 4942 - protein, 105 aa, Zea mays
  VARIANT 43: note = Ancestral polymorphism is V, Derived polymorphism is A
  VARIANT 76: note = Ancestral polymorphism is A, Derived polymorphism is V
MDRAGNGRADFAGTGLAAVATAMSYLLPTVCGTPLDLFTTWQVTLAFGLMSAGLLLVMYGVRAPGARPPVLVRRAAGALLWYAAGPERLLPLTLLLVLQAWFDFF

SEQ ID NO: 4943 - protein, 1063 aa, Zea mays
  VARIANT 5: note = Ancestral polymorphism is R, Derived polymorphism is W
  VARIANT 807..1063: note = Derived polymorphism lacks residues 807 to 1063
MVEMRQRRKPLVLASTQALLDSLPGDRPPPPPQEPVRLKAGVLRFPSGGGGAEFGELASFVGIPAPTLRRLAVVTGTPVLVKNTDNNVGRIVKAVLFGNPSLDKSCSEHTDQVVSGHAMGFLPCRTFPATGFTSMDEDVGYVSPLLAFNLGLPVSCLKLLIQREGQPFKFCSRAEEMDATASSGSDLSLHLDLLPCPQVPKYALHLRVSVVRIPDCGVLASLKINSSFGGSEYQDMVDQALNEYFKFDRFLARGDVFGIQNSWKCGSSCCLACNKQDNKLNPRNMIYFKVTGMEPSDEPILRVNCNETALVLGGAASAAIPPYSFFASSGNSVPLHSEVVEHLASVIAPALCPSDILPKIKFSTFLYGPPGCGKRTVVRHVANHLGLHVVECSCHDLMTSSESGAPTALATTFKEAQKYSPCIILLRHFDAIGNASSNEGPQSEQSGIASNIESVIKQYIGQRWVAKDSLPGKDVNGSSYLVEPECVSSLQIILVATADSSEGMQQSIRRCFRYEIDMKTMNEEQRNKLISETLQGIPKVADESICDKFLKDLAAQTSGFMPRDILALVADAGVSFAHKIAAGNDSKAISKHTEVLPESSSATQNEEHHFSKEDIMSSLERAKKRNRAALGTPKVPNVKWEDVGGLEDVKKVILDTIQLPLMYKHLFSSKLRKRSGVLLYGPPGTGKTLLAKAVATECSLNFLSVKGPELINMYVGESEKNVRDIFEKARSARPCVIFFDELDSLAPARGSSADSGGVMDRVVSQLLVEIDGLSDNSQDLFIIGATNRPDLLDSALLRPGRFDKLLYVGVNTEASYRERILKAQTRKYKLHKNVSLLSVAQRCPPNFTGADIYALCADAWFHAAKRSVETFETDPSRSNDASAEEVIVEIDDFITCQQRCLLVRARQVGRCEQNPYVIVSSGAILRGSAHGRGLGGLAGSFVPPNGFTCSASAQPAPPPLPLALPSGKEGGRRGCRTVNSSTRGTVPLASSPGSDPLPPPRKGFCKNCFSGLSSPSLKSFPRDDPKKPCHLTAFLGYKAGMTHIVVRSRSLAPSSTRRKLVRL

SEQ ID NO: 4944 - protein, 253 aa, Zea mays
  VARIANT 106: note = Ancestral polymorphism is P, Derived polymorphism is H
  VARIANT 138..253: note = Derived polymorphism lacks residues 138 to 253
MPSNTTATQARKKSSCSLRKYASVIRVIAHTQIRKMKGLKQKKAHLMEIQVNGGTIADKVDYGYKFFEEVPVDAVFQKDEMIDIIGVTKGKGYEGVVTRWGVTRLPRKTHRGLRKVACIGAWHPARVSYTVARAGQNGYHHRTEMNKKVYKIGKAGQESHDASTEFDRTEKDITPMGGFPHYGIIKGDYLMIKGCCVGPKKRVVTLRQSLLKQTSRLALEEIKLKFIDTSSKFGHGRFQTTDEKQRFFGKLKA

SEQ ID NO: 4945 - protein, 191 aa, Zea mays
  VARIANT 11: note = Ancestral polymorphism is A, Derived polymorphism is V
  VARIANT 26: note = Ancestral polymorphism is T, Derived polymorphism is M
  VARIANT 31: note = Ancestral polymorphism is L, Derived polymorphism is P
  VARIANT 40: note = Ancestral polymorphism is L, Derived polymorphism is P
  VARIANT 83..191: note = Derived polymorphism lacks residues 83 to 191
  VARIANT 100: note = Ancestral polymorphism is G, Derived polymorphism is V
MSFLVPDKNGAGSLWYLPSVCLCSTTVLTLPFHHARLVFLLGVLADVVLGFDSLDPYQSTCASRFERKGYKLVAIKLIVPSKGFAEKHYHDLKERPFFNGLCDFLSSGLVLAMVLEGEGVIKYGRKLIGATDPHKSEPGTIRSDLGVVVGRNIIHGSDGPETAKDEIALWFEPKELVSYTSNAEKWVYGVN

SEQ ID NO: 4946 - protein, 130 aa, Zea mays
  VARIANT 1: note = Ancestral polymorphism is M, Derived polymorphism is K
  VARIANT 5: note = Ancestral polymorphism is D, Derived polymorphism is G
  VARIANT 33: note = Ancestral polymorphism is R, Derived polymorphism is Q
  VARIANT 81: note = Ancestral polymorphism is G, Derived polymorphism is V
  VARIANT 82: note = Ancestral polymorphism is A, Derived polymorphism is V
  VARIANT 83: note = Ancestral polymorphism is L, Derived polymorphism is R
  VARIANT 96: note = Ancestral polymorphism is T, Derived polymorphism is A
MCFNDNDQKLWEEDPHEYVRKGYDIIEDLYSPRTAAMDFVSELIRKRGKNNLQKFIHFIVDIFRRYDEAPADLKPYRQKDGALLAIGTLRDKLKQTDPYKTELESMLVRHVFPEFNSRVGHLALHWSIMI

SEQ ID NO: 4947 - protein, 211 aa, Zea mays
  VARIANT 57: note = Ancestral polymorphism is G, Derived polymorphism is R
  VARIANT 55: note = Ancestral polymorphism is G, Derived polymorphism is R
  VARIANT 20: note = Ancestral polymorphism is A, Derived polymorphism is V
MRHSVELISTQTLYLYLTMAGTKLVSLGLLVLMGIGLANAARVARYSSADGTGNGEGQGGGYVNGGGSGSGSGTGSGDSSPYGTYASAGGGGAGGGASQYGGSGYGSGSGSGSGSSTYSQGGYYSGYGESSNAGGSGGGGGGGQAGGYGNSNAQGSGSGTGSGSSYANRYWDGSSEGGANANGNGGGTGNSQNGGGGGGSGEGTGYGNAYP

SEQ ID NO: 4948 - protein, 106 aa, Zea mays
  VARIANT 96: note = Ancestral polymorphism is R, Derived polymorphism is C
  VARIANT 58..106: note = Derived polymorphism lacks residues 58 to 106
  VARIANT 40: note = Ancestral polymorphism is G, Derived polymorphism is R
  VARIANT 37: note = Ancestral polymorphism is R, Derived polymorphism is W
  VARIANT 35: note = Ancestral polymorphism is R, Derived polymorphism is C
  VARIANT 21: note = Ancestral polymorphism is S, Derived polymorphism is F
MTAREPRGFGFIQYFGPEDASDANGRGRSYDGRLRSRSPRLNDSPGVDHDPKAETTRQHLSESTIQGYLNVYYVLGIPKYLMSEVGCEPMNLDVGCADQCAGAYVV

SEQ ID NO: 4949 - protein, 539 aa, Zea mays
  VARIANT 508..539: note = Derived polymorphism lacks residues 508 to 539
  VARIANT 372..539: note = Derived polymorphism lacks residues 372 to 539
  VARIANT 325..539: note = Derived polymorphism lacks residues 325 to 539
  VARIANT 283: note = Ancestral polymorphism is L, Derived polymorphism is P
  VARIANT 64..539: note = Derived polymorphism lacks residues 64 to 539
MVAETAAIGGETPGQSLNGTVKSTTRAGTFVTLPDGSEGFLPREEEALALFTLIGQSAMEIGKQIRVKVLNVAHVQATLIMKGVEDDEDDLKTLNMELKRDWSRGTNAFELASVGTKRSLHSCIRGKGPKCRLILQFLLRKLKAIRRKLLQKMRKVGIQDSTSVANVVEDQTVGSESSPTISVELSSNGTPDRSIVSPVSETADKPTEPKESSAVEEVLVTASSEAGKEPAADTEAVPALSEKTGAEQLREATGAGMMDCKKALAKTGGDIDKAQEFLRKKGLAAADKRAGRATAEGRVGSYIHDSRIGVLIEVNCETDFVSRVQYISIDDAPKEVVKKETELEMQREDLLTKPEQIRAKIVEGHVKKRLGEFTLFEQTFIKNDKVTISEWLKQTITTTGENMKVRRFARYNQVTTPLTFGTHVSRKPAIAVSTSFAKQLRDETGVGMMGCKKALAESDGDLQKAQEFLRKKGLSSADKKSSRLAAEGLIGSYIHDSRIDCMIEVNSETDFVARNDKFMELVNDLVMQILWSTISNAWG

SEQ ID NO: 4950 - protein, 103 aa, Zea mays
  VARIANT 88: note = Ancestral polymorphism is D, Derived polymorphism is A
MNWKRNKVAGRCRKEETRERLIQQAAAADPDGGGSVPRGCVAVLVGGREDGAEPEERVVVDVRALLDMAAREFGYGQKGVLRIPCAADELRRAVAADRHRWTR

SEQ ID NO: 4951 - protein, 425 aa, Zea mays
  VARIANT 38: note = Ancestral polymorphism is T, Derived polymorphism is I
  VARIANT 92..425: note = Derived polymorphism lacks residues 92 to 425
MSWSAVQIVGNFAPVGEQSPTSSSTTLAKAGGSKARVTEIFVVTVSGSKVPCLAFGTRKASFLLEVPLSVVASLFDEGHSGGHAVDIGIVIEEHLNPVVHACKDARMSFRLITLLIKSELQTSQSRLVGRIDSVRVRLAMVNKGKGISLPRHVVLHVVHPQRPLLRSILSVHLTSSKSLVGITRVISEIHQERKAGERTSGAAGPSIDKMEKAPGEAFSRRNPSGPVNQTDSYAQQPHEIVSMSLKEIVGMQLLCCEVVEKTDAVVYRGKVSAHLSGSNCLGCAARSDLRKWAAAEKFQPSSKSSGHLNATGQKAHSLVDSEKPSNQRPAVIVKSHTTRLPVGNPDGTIIIRTDQYNIDDLRIDYMYAKFFVIKSIGEADVHKSIKYGVWSSSSSGNSKLDSAFRDADRISRRHSTKCPVFLFFS

SEQ ID NO: 4952 - protein, 463 aa, Zea mays
  VARIANT 34: note = Ancestral polymorphism is H, Derived polymorphism is Y
  VARIANT 43: note = Ancestral polymorphism is P, Derived polymorphism is L
  VARIANT 194: note = Ancestral polymorphism is I, Derived polymorphism is S
  VARIANT 404: note = Ancestral polymorphism is R, Derived polymorphism is W
MLSLSHPHPHPAASTTAPRHQRTAPVWHRRRASHIAASAILLPGGGSTGGRGGPGDRRLPFTPPPMAPPGQLYQPFHPPPSPLPPSLRNLDLSERLQILRDRMGLWHEYAPLISSLSRDGFNPSSIQEATGISGVEQNCLVVASQVRDSLLDDRAAAFPPDLLPYFDSLGGPEVLYELRFLNARQRADAARHAIGYRLEPKGVRELARAMKGFPRWRGEEGWEAFSKDSPADCLAFARFRQSREAIDVQDRVAELERALQVVETESGRARVELELERARRKAAGEEEVDEEGEEDDAAASLRPGVTVVRLRYGEVAEATTVILLPVVRETDGVAAMESAPRRAKTDVGLGVVEVDRAWARWAVVPGWGPVAEAADDAVVVELADGRRLPWRMSDEEPVLVIANRSKKEVVEEGVYVLEREGRLVVERGKKLAEQGIAAAAAEVVIVVRPPKDEDDMVSDEEWD

SEQ ID NO: 4953 - protein, 193 aa, Zea mays
  VARIANT 89..193: note = Derived polymorphism lacks residues 89 to 193
  VARIANT 12: note = Ancestral polymorphism is L, Derived polymorphism is H
MAGTKLISLGLLVLIGIGLANAVRVARYSSADGTGTGEGQGGGYVNGGGSGSGSGTGSGDSSPYGAHASAGGGGAGGGASQNGGSGYGSGSGSGSGSSTYSQGGYYSGYGESSNAGGTGGGGGGGQAGGYWNSNAQGSGSGTGSGSSYANRYWDGSSEGGANANGNGGGMGNSQNGGGGGGSGDGSGYGNAYP

SEQ ID NO: 4954 - protein, 192 aa, Zea mays
  VARIANT 2: note = Ancestral polymorphism is A, Derived polymorphism is T
  VARIANT 39: note = Ancestral polymorphism is G, Derived polymorphism is R
  VARIANT 43: note = Ancestral polymorphism is G, Derived polymorphism is R
  VARIANT 110..192: note = Derived polymorphism lacks residues 110 to 192
MADKKLIPLGLIILMSIGLANAVRVVRYSNADGTGTGQGEGGGYVNGGGSGSGSGTGSGDSGPYGTHASASGGGGGGGTSQYGGSGYGSGSGSGSGSSTYSQGGYSGYGESSSAGGTGGGGAGGQAGGAWNSNAQGSGSGTGSGSSYANRYWYGSNEAGASANGNGGGTGNSQNGGGGGGSGAGSGYGNAYP

SEQ ID NO: 4955 - protein, 192 aa, Zea mays
  VARIANT 3: note = Ancestral polymorphism is G, Derived polymorphism is D
  VARIANT 14: note = Ancestral polymorphism is L, Derived polymorphism is H
  VARIANT 81..192: note = Derived polymorphism lacks residues 81 to 192
MAGKNLIPLGLIILMTMGLANAVRVVRYSSADGTGTGQGEGGGYVNGGGSGSGSGTGSGDSGPYGAHASASGGGGGGGTSQYGGSGYGSGSGSGSGSSTYSQGGYSGYGESSSAGGIGGGGGGGQAAGAWNSNAQGSGSGTGSGSSYANRYWYGSSEAGASANGNGGGTGNSQNGGSGGGSGAGSGFGNAYP

SEQ ID NO: 4956 - protein, 79 aa, Zea mays
  VARIANT 32: note = Ancestral polymorphism is A, Derived polymorphism is V
MVARAPLWQASVAGLAGRWSTTWSSSSTMYSVMRMQLKTQDLNDTIVTPKVCSMKCLQHPEVSICESLQAKTNDSYSRS

SEQ ID NO: 4957 - protein, 60 aa, Zea mays
  VARIANT 15: note = Ancestral polymorphism is G, Derived polymorphism is D
  VARIANT 18: note = Ancestral polymorphism is A, Derived polymorphism is V
  VARIANT 23: note = Ancestral polymorphism is T, Derived polymorphism is M
  VARIANT 25: note = Ancestral polymorphism is A, Derived polymorphism is P
  VARIANT 44: note = Ancestral polymorphism is P, Derived polymorphism is R
MQRSRCDRITSRRSGDDVVARDMGAEVVVLRWWQDRKETKKQEPGLFNNMTESLRRGRVR

SEQ ID NO: 4958 - protein, 41 aa, Zea mays
  VARIANT 13: note = Ancestral polymorphism is E, Derived polymorphism is G
  VARIANT 14: note = Ancestral polymorphism is I, Derived polymorphism is T
  VARIANT 20: note = Ancestral polymorphism is V, Derived polymorphism is A
  VARIANT 21: note = Ancestral polymorphism is F, Derived polymorphism is S
  VARIANT 22: note = Ancestral polymorphism is D, Derived polymorphism is V
  VARIANT 23: note = Ancestral polymorphism is C, Derived polymorphism is Y
  VARIANT 24: note = Ancestral polymorphism is Y, Derived polymorphism is H
  VARIANT 25: note = Ancestral polymorphism is E, Derived polymorphism is K
  VARIANT 32: note = Ancestral polymorphism is G, Derived polymorphism is V
MGTEIYLNLTVREIANMWDVFDCYEYGIATSGKNSAEHLAH

SEQ ID NO: 4959 - protein, 167 aa, Zea mays
  VARIANT 69..167: note = Derived polymorphism lacks residues 69 to 167
MEVLALTVSTTMMAAGSGALPPSYEESRDRSPSGQTNNCWTKFAGTVYSSAGIALQEKREKRIAETPIQHMKGDEGNQEPTSKRKGTTTKLTLGTQSINQSAVEAQAEVNDWVGEREERGSRRGKEIRREEAVPAADRAIGRPRRRRWVAEEREVASAVAELRLVGG

SEQ ID NO: 4960 - protein, 454 aa, Zea mays
  VARIANT 160: note = Ancestral polymorphism is R, Derived polymorphism is C
MEASGSRVRRGSPVPKRRRGVGVATGFGSTAQSLNDDILRSVFSRLDDHFDLARCSAVCGSCSVFFADGKMTNFDGRNRIIETAHLMRDMYYKRNPPARGSSSNISVKSYFEMLAMDEHASAFSRGPAEAFQWIGHPMRATLCRMKSGLILTGVGDKILCLWSAESCKFMNEYNVPNSKTLVDFDFDENKIVGLTSSQICIWRRSEPRSIFQSGGASFNHGLCMSFADPEVVIGCEDGRAFVYDMYSRSCSRIYRLHSSPVTCLMITDDQLIVGGSTFGNVAIADQTSGQKLGVLKSDHGPLAIRSLSSCTNSHMIFAGSSAGYAHCWDLRTLRPLWEKRVSPNVIYSTRHLPGDTATLAVGGIDGVLRVICQRTGDIIRSLVVDADLPAEATSRSRQQIEKKRVRRIDPDAQLDGIPRRLRPQITSLSVGMKKIVTTHGENYIRVWKFRMKSS

SEQ ID NO: 4961 - protein, 470 aa, Zea mays
  VARIANT 58: note = Ancestral polymorphism is C, Derived polymorphism is Y
  VARIANT 64: note = Ancestral polymorphism is K, Derived polymorphism is N
  VARIANT 92: note = Ancestral polymorphism is G, Derived polymorphism is V
  VARIANT 105: note = Ancestral polymorphism is V, Derived polymorphism is F
  VARIANT 167: note = Ancestral polymorphism is K, Derived polymorphism is I
  VARIANT 401..470: note = Derived polymorphism lacks residues 401 to 470
MAKPEGPTIGVKLFVDKEKKKVLFAESDKEFVDVLFSFLTMPLGTIVRLLDKQSQMGCLDQLYKSVEDLNLEYFQTSACKAMLLKPLNAASGHCCRLKINVDGSFPRVVYVCKDTSCSALSDNAFSSFPGTVCKCGKVMEFVGRCPKYDGDTETAAAACSEDGVFVIGCLKFIVTDDLQVAPASTSLMMSFFEKFGVLDPAVLEQQVLQFSSEKIKCLLKRLLTSKQPLTDHYFEALVPQDDASLEALVQNLHPKQENEDQEMPGNQKIRVLQTKDNSALLYDEVGVDFVDSLFGLLSIPLGSAIKLYCQCSAKGCLGNAYRSIDGSVKEFVREECQSLLLDPKVPPFFGCCASKILQVDELAPRELTMEACFVCFKSLWFSGCNRSHEFAYSLRCNEVFCANKVKSIKLCEANPKRQNGGSGQTNFVVKEIKLKVMELQRAVLVLSRNILSSVLLHPKKTKKLHHYRRM

SEQ ID NO: 4962 - protein, 165 aa, Zea mays
  VARIANT 89: note = Ancestral polymorphism is A, Derived polymorphism is V
  VARIANT 84: note = Ancestral polymorphism is A, Derived polymorphism is V
  VARIANT 78: note = Ancestral polymorphism is L, Derived polymorphism is R
  VARIANT 72: note = Ancestral polymorphism is E, Derived polymorphism is D
  VARIANT 69: note = Ancestral polymorphism is A, Derived polymorphism is V
  VARIANT 41: note = Ancestral polymorphism is A, Derived polymorphism is G
  VARIANT 18: note = Ancestral polymorphism is A, Derived polymorphism is T
  VARIANT 17: note = Ancestral polymorphism is D, Derived polymorphism is N
  VARIANT 14: note = Ancestral polymorphism is V, Derived polymorphism is M
MASGVLSQLYHQGVEVDALVRVETDRMRATLQEARRRHARGVVAAVGRAAEARLRAAEAELERARRRGADLEERLRQLAGEGQAWLGVARSHEAVAAGLRATLDKVLQQPAGGGECGVAEDAQSCCFVASPSGLVAGDSLLYALSLSPPQAAERHSQTTPRLLRG

SEQ ID NO: 4963 - protein, 511 aa, Zea mays
  VARIANT 183: note = Ancestral polymorphism is P, Derived polymorphism is L
MAKPEGPTIGVKLFVDKEKKKVLFAESDKEFVDVLFSFLTMPLGTIVRLLDKQSQMGCLDQLYKSVEDLNLEYFQTSACKAMLLKPLNAASGHCRRLKINVDGSVPRVVYVCKDTSCSALSDNAFSSFPGTVCKCGKVMESIGQCPKYDGDTETAAAAACSEDGVFVKGCLKFIVTHDLQVAPATTSLMMSLFEKFGVLDPAVLEQQVLQFSSEKITCLLKRLLTSKQPLTDHYFEAPVPQDDASLEALVQNLHPKQESEDQEMPGNLKIRVLQTKDDSALLYAEVGVDFVDSLFSLLSIPLGSAIKLYGQCSAKGCLGNVYRSIDGSVQEFVREECQSLLLDPKLPPFFGCCASKILQVDELAPRELTIKACFVCFKSLGFSGCSLCHGYYNSNYVFVKCGNMVKSIKLCEANPKQKGGCEKGEVYVSRKANFLVTDDLRVLPLSLASTVKIVSDSKIQTSNLVVKEITLTKSKVMELQRAVLLLSRNILSSVLLHPKKNKKLHHYHRMY

SEQ ID NO: 4964 - protein, 102 aa, Zea mays
  VARIANT 31: note = Ancestral polymorphism is L, Derived polymorphism is P
MQRLTWENKYRERVQSAIQKCNASEKRRLGLLESEKRRVQSRLLQIQLAVKTASNQRKSERSKLNEQLEEKLQKHLARLCFTPLVIFMSSKQQENSEKVEFT

SEQ ID NO: 4965 - protein, 314 aa, Zea mays
  VARIANT 67: note = Ancestral polymorphism is A, Derived polymorphism is D
MATSMLSTVKVSNVSLKAAQRDIKEFFSFSGDIVHVEMQSFDELSQVAYITFKDKQGAETAMLLTGATIVDMAVIVTPANDYELPSSVLAALEPKDTKPSALQKAEDIVGTMLAKGFILGRDALDKAKALDEKHQLTSTATARVSSFDKRIGLSEKISVGTSVVNDKVKEMDQKYQVSEKTKSALAAAEHSVSTAGSAIMKNRYVLTGAAWVTGAFSKVTSAANEAGAKAKEKIAVEQEHKNAEGGPAQANISETHEAHRGLDGGFSRLHDSETPEDIPISTASVPAVTDEEPSKASPPAGVPEKPEAAHELVL

SEQ ID NO: 4966 - protein, 405 aa, Zea mays
  VARIANT 78: note = Ancestral polymorphism is E, Derived polymorphism is D
  VARIANT 143: note = Ancestral polymorphism is A, Derived polymorphism is S
MGKGRAPCCAKVGLNKGSWTPEEDMRLVAYIQKYGHANWRALPKQAGLLRCGKSCRLRWINYLRPDLKRGNFSAEEEETVIKLHGLLGNKWSKIASCLPGRTDNEIKNVWNTHLKKRVSPSGGEEEHGAAGSNKNKKKKKKKAAGGAEEPLPSPTPSPSPSSSTTTTANCSSGDSGEQQSNTSKEADDDELDLENLEMMPMLDDDPITFGFDMLVDPVPAPYGPAVSAFASASRPTSPCASSTSPPPPPGCAPLGVDDLLVLPEIDIDQELWSIIDGNGDGGGDGGGSACAVSAETSAPCCQSNAPEPTTNGACATSHHGAAEEEGKEWWLEDLERELGLWGPVDVEDYHYQYPTGPHGLVANHPDPLPAMVDDPVSCYFQAGPASAVLQEPGYSVTSSSNLMGL

SEQ ID NO: 4967 - protein, 156 aa, Zea mays
  VARIANT 108: note = Ancestral polymorphism is R, Derived polymorphism is Q
MKMTCGRTSPVVAAVLVALAVVAAAVGPAPKRRGQEIHLFEATVRFPDDGVDELDYNYRLLAKVLGRSHAWLMDLSILHSPPRLKQLYLPVFYPVFFLLDDLSVEAARRATYDSELGVFSALITNNQGRRLSKVPGVLKVTRLEDPPSLPETDGHL

SEQ ID NO: 4968 - protein, 645 aa, Zea mays
  VARIANT 253: note = Ancestral polymorphism is R, Derived polymorphism is C
MPRKSHKARGAAAHAAVGLTAGPRPPLKATAPNPSAAAELPQVVVAEAEGLKVPDAGASAAADALERLHVAPAPDGDPPPPEPVHEPAAPPQPPPAEASSSGRSAAGGSWEEEAVRKLRELAEVSRDETELTEEEVRANDQRQEDEICALEAIFGDAVVILDRKGGQRSFQVLVHIEVPDYIDVSTKLSYGDGTLNYAATHDDDDLFYKFRVEHLPPILLTCLLPTSYPSHRPPFFTISTYWLDKGMISPLCRMLDMLWEEQQGMEVTYQWVQWLQSCSLSHLGFTNEVVLRKSYVTCYADGEDKRACPDYASPDVIIPRMMRYNDNKHHEAFLHAIHDCMICLSECPGVDFIKLPCHHFFCWKCMQTYCKMNVKEGNVVKLLCPDTKCEGAVPPNVLKRLLGEDEYERWEGLLLQKTLDAMKDVVYCPRCQTACLEDVGNEAVCSSCLFSFCTLCRNRRHIGEQCMSPEERLMILEKRQESGNVQGDQMKVLQELRSLKEIMKDSKQCPKCRMAISKTEGCNKMHCENCGEYFCYQCNRAITGYEHFRGSCVLFPQEELDRWEMQMNQRVGRQIVAHAHAAIHGQNGQAHPCPTCRQPSPKIGNNNHLFCWACQKHFCALCHKAVQKPAQHYGPKGCKQHTADP

SEQ ID NO: 4969 - protein, 173 aa, Zea mays
  VARIANT 126: note = Ancestral polymorphism is T, Derived polymorphism is I
  VARIANT 123: note = Ancestral polymorphism is I, Derived polymorphism is V
  VARIANT 88: note = Ancestral polymorphism is Y, Derived polymorphism is F
  VARIANT 81: note = Ancestral polymorphism is I, Derived polymorphism is T
  VARIANT 69..173: note = Derived polymorphism lacks residues 69 to 173
  VARIANT 31: note = Ancestral polymorphism is T, Derived polymorphism is S
  VARIANT 8: note = Ancestral polymorphism is M, Derived polymorphism is V
MSTELKAMEGSICHEFETGLPAAAVWEVYGSLLFGKLMPQLLPEVVSKVELVEGDGGAGTVLLVTFPPGTPGSETFREKFIKVDDENYIKETVVTEGGLLDHGFRKYMVRIEIVGREEKTSIVRSTIQYEVDHEHAGSHAPPVFSTDGLATIAEAITKYIKEKRGSESVISPK

SEQ ID NO: 4970 - protein, 277 aa, Zea mays
  VARIANT 269: note = Ancestral polymorphism is I, Derived polymorphism is N
  VARIANT 262..277: note = Derived polymorphism lacks residues 262 to 277
  VARIANT 247..277: note = Derived polymorphism lacks residues 247 to 277
  VARIANT 109: note = Ancestral polymorphism is D, Derived polymorphism is Y
  VARIANT 58..277: note = Derived polymorphism lacks residues 58 to 277
MMYISLLSNQKVLFINRGHNMYAQASLLSSVLIAVGYSKCREFSHRVKSVSMAKFTSQEVSALQEGGNERAKEIYFKYWDLQGPVIDSSDVHRLRNFIKNVYVERRYPDQRIGEHLVQAKIQGNQDSYGNNNAYSSPGVLRSAYVRTYEDNHDLKRTKESISENQNNSNGHPVSSTVDQNNNSTMAREKVDLRSHLRPDDLLKTDGKSENNQKVVISSASSAAQASKEINSNKVFLPIKLPDPPRSQKATSSNTSTEAHVMQFLYALVIFYSALPSP

SEQ ID NO: 4971 - protein, 516 aa, Zea mays
  VARIANT 236..516: note = Derived polymorphism lacks residues 236 to 516
MTLMVGLGPPLLAVSNPVSGFTFPLRVSSRLSPRRVAVESAIPFTPVPLPCNREQKPPFQNEDEPAAGAVPSRAPPAPGHLLRVGSRASERHPRLSSPSASPTRRLLASEVKSSTPYHHREFQPIHFRGLLPSALFKPSATATPTTPPAASPASSPSPPTIHASKRRRRETEATGNTPLRGGRGPAPRRRSSTPPPLSLPAAEFDPLDPDADPPPKLLTADEVRLCKQALKALDKKVGKPATLTKEFRSLPDIRTELQSVQKFSVARKQENRGRNRYTDVLPFDQSRVQLESSTGNDYINASHIEIAGRNLTKFISTQGPLANTIEDFWQMVYENHCPVIVMLTKFDGLKCDEYLPLSKGQAVFGKFTIKITKFRKDGQLLLRGVEIRQDESDEVRSLLHIEYPEWPDHGVPNSSADVRRILKRLYHIPRERPIVAHCSAGIGRTGAYTTIHNTIERILLGEQGAADLVETVKKFRSQRPGMVQTEEQYKCCHHAIRDELEDLVSSSKIEPLSRNG

SEQ ID NO: 4972 - protein, 318 aa, Zea mays
  VARIANT 39..318: note = Derived polymorphism lacks residues 39 to 318
  VARIANT 208: note = Ancestral polymorphism is E, Derived polymorphism is K
  VARIANT 259: note = Ancestral polymorphism is G, Derived polymorphism is R
  VARIANT 262: note = Ancestral polymorphism is P, Derived polymorphism is L
MIWMPPHHGRRSGSSDPDARALRRVDLLDHVGARPQVRRRDHEVAAGTCLSCSPLPSTPTSLATDRVGTAPWLPRSMGASSPSAGPGSTELRSAAAATSSVVAAAVANLPMDGFDQTVNVKVVMATNRADTLDPALLWPGRLDTKVEFPCPDWRQKRLVFQVYTAKMDLSDEVDLEDYVCRPDKISAADVEVLMSCAGQSSQNHEKAKKVLLIVKPHYGFGEKGRPTVGEEGVVMSIILFYIITNELVELLVALGMILRINLSILKLTVLVWGDSMGDLMSNVALPVNGGDGMQIAMSGCYAGPMFNTLAGLGTLLLD

SEQ ID NO: 4973 - protein, 300 aa, Zea mays
  VARIANT 79..300: note = Derived polymorphism lacks residues 79 to 300
  VARIANT 162: note = Ancestral polymorphism is I, Derived polymorphism is T
  VARIANT 170..300: note = Derived polymorphism lacks residues 170 to 300
  VARIANT 196: note = Ancestral polymorphism is W, Derived polymorphism is C
MKARTRDMVVSLLAARYSGSGKISIFCVMFSRNFIFSVAVETRYLNASIRELGDHFQTKRDGENGVDASIEKRTPKLLQFTFQELKSATLNFRPGNILGEGGFGYVFNGWIEPNSTAPAKPGTGVTVAVKSLKPDALQGHREWVVKVDFLGQLHHKHLVKLIGYCIEDDQRLLVYEFMARGSLENHLFRRALPLPWSNRMKIVLGAAKGVAFLHGGPKPVIYRDFKTSNVLLDVEYNAKLSDFSLAKAGPQGDKTHVYTRVVGTYGYAAPEYVMTDAFFLGPSPMGNNGDDQRLGLSRGS

SEQ ID NO: 4974 - protein, 297 aa, Zea mays
  VARIANT 85: note = Ancestral polymorphism is K, Derived polymorphism is N
  VARIANT 272: note = Ancestral polymorphism is S, Derived polymorphism is R
MGRSPCCCHDAGVKKGPWTEEEDRTLVEHIKRHGGHVSSWRDLPKAAGLNRCGKSCRLRWSTIATHLDGRTDNEIKNYWNTHIRKKLVRMGIDPVTHQRLPPEDIIASPMAILSAAASLGGLHSALMQVQALQLLLQAVNNDGGRSAAAGGLIMPDILNAAADNAILINNASRSSVVPSLQDQTNLPAASHANYYGSPDHHLSSNIASFADQQHDDASAPVVGCAYAEPLAAALVSAAYPQEVAAAAEGWPVQGFAELLSGPIEMQVQTKARTCSLEEDDQDDFWKDMLLESSRLPL

SEQ ID NO: 4975 - protein, 179 aa, Zea mays
  VARIANT 89: note = Ancestral polymorphism is G, Derived polymorphism is D
  VARIANT 100: note = Ancestral polymorphism is R, Derived polymorphism is S
MAAAGSYAALSSCLLALALLAATASAQEKETHLRVFWHDVVTGGPNVSTIVQVAEAPSSNASATGFGTVIVIDDPLTEGPNLTTSRLVGRAQGMYVSAGRDSLSLMMAMNFVFVDGAYNGSSLAILGANPAERTVREMPVVGGTGVFRFARGYCQARTQWIDNRTGDAIVEYNLHVRHD

SEQ ID NO: 4976 - protein, 910 aa, Zea mays
  VARIANT 683..910: note = Derived polymorphism lacks residues 683 to 910
MASSSTCVLKKNYRCDRSLQQFYTGGPFAVGLAPGGDGEGGAEAEAFLACACGGEVRVVSSADASAIGEPVDGDSEAITALALSPDSRLLFAAGHSRLIRAWDLASRACIRSWKGHDGPIMAMACHVSGGLLATAGADKKVCVWDVDGGFCTHFLRGHTGVVTSVMFHKDPKRLLLFSGSEDGTVRVWNLETKKCVAVLKEHFSAVTSLALSDDGQTLLSAGRDKIVTAWDIRKYSSKKTIPTYEMIEAVSFIGPGSEFLACLGIELANKKEKDTAYFLTVGERGVVRIWCLESCLCVFEQQTSDVTVNSENKETRRGFTSAVMLPNEQGLLCVTADQQFLFYCPKRTDDGTFELSLYRRLIGYNDEILDLKFIGEEEQYLAVATNLEQVRVYDVASMSCSYVLAGHTEIIVCIDTCVSASGKTLVVTGSKDNTVRLWDAERKSCIGIGKGHLGAVGSVAFSKKTKDFFVSGSSDRTIKVWTWDNTLGDAEDEVPLKAKAVVAAHDKDINYLTVSPNDGLVCSGSEDRTACIWKLPNLVFSVALKGHKRGIWSVEFSPVEQCVMTSSGDRTIKIWSVADGSCLKTFEGHTSSVLRASFLSRGTQVVSCGSDGLVKLWTIKTNECIATYDKHDGKVWALAVGRKTEMVATGGTDAVLNLWHDCTMEDKQEDFRKKASETFCDTLVFIIASKMLAFGKTEQEVLRGQELENAVSDSDYAKAIQLAFELRRPHKLLDLFSQLARRADAEDPIEKALLGLPKDGLRVLLEYAREWNTKPKFCHVAQFVLFRVLRSFSPTDILEIKGISELLEGLIPYSQRHFSRVDRLVRSTFLLDYTLTRMSVVDPDVDAGSIKDEMNGSSVENGELAEPRPASPVPEKSSKKRKSGKSSKKGKEKVMKLASSGLGKGVSVEA

SEQ ID NO: 4977 - protein, 171 aa, Zea mays
  VARIANT 11: note = Ancestral polymorphism is Y, Derived polymorphism is N
  VARIANT 27: note = Ancestral polymorphism is K, Derived polymorphism is N
  VARIANT 29: note = Ancestral polymorphism is R, Derived polymorphism is H
  VARIANT 59: note = Ancestral polymorphism is R, Derived polymorphism is C
  VARIANT 73: note = Ancestral polymorphism is E, Derived polymorphism is D
  VARIANT 81: note = Ancestral polymorphism is R, Derived polymorphism is H
  VARIANT 101: note = Ancestral polymorphism is P, Derived polymorphism is L
  VARIANT 103: note = Ancestral polymorphism is G, Derived polymorphism is R
  VARIANT 130: note = Ancestral polymorphism is A, Derived polymorphism is P
  VARIANT 133: note = Ancestral polymorphism is R, Derived polymorphism is H
MACFADVGVLYWHLDPKKSESEEELAKIRRDRGYSYMDLIEICPDKLENYEEKVKNFFREHMHADEEIRYCLEGSGYFDVHDKDDKLIRIRIREGDMIIVPAGIYHRFTLDIAKYTKLMRLFIGEPVWTPLNRPQEDHPARQEYVKNVSAGTGFALAANFLANTNLPSKPF

SEQ ID NO: 4978 - protein, 176 aa, Zea mays
  VARIANT 5: note = Ancestral polymorphism is T, Derived polymorphism is I
  VARIANT 46: note = Ancestral polymorphism is P, Derived polymorphism is R
  VARIANT 101: note = Ancestral polymorphism is F, Derived polymorphism is L
MAGPTTTLLLLLLCSAGLASGATAADDSGFTTFKVYFHDIVAGTSPTAIRIAQGAASNTSSTSFGAMVAIDDPLTTGPTRAAGTEVGRAQGTYTFADQQTFGLLMVMDFVFTAGEHKGSTLSILGRNEVLSDVREMSIVGGSGKFRMARGYVQAHTIDSGFKSGETVVQYTVNVRA

SEQ ID NO: 4979 - protein, 129 aa, Zea mays
  VARIANT 91..129: note = Derived polymorphism lacks residues 91 to 129
  VARIANT 101: note = Ancestral polymorphism is Q, Derived polymorphism is R
MARPRSLRPLTISAGTIDFTRAGPSSSAATLPKYPRHGLPASSSNDQSSFGALFPNRSANVMGIFTCQSSANEGIANVGVQFQDSSVHGLQKLPFKSMTHQHPTLPGDRICVTCMNVGGLNLQCCYNLT

SEQ ID NO: 4980 - protein, 142 aa, Zea mays
  VARIANT 129: note = Ancestral polymorphism is R, Derived polymorphism is W
  VARIANT 107: note = Ancestral polymorphism is Q, Derived polymorphism is R
  VARIANT 92..142: note = Derived polymorphism lacks residues 92 to 142
  VARIANT 84: note = Ancestral polymorphism is A, Derived polymorphism is V
  VARIANT 72..142: note = Derived polymorphism lacks residues 72 to 142
  VARIANT 29: note = Ancestral polymorphism is Q, Derived polymorphism is L
MRAKSGRCGPRRISAEKRVLQFQSFFVQQKNTRSRRQKKLKAYDLSALSESLLEPGAPKQKPEAKLNCKSRQTFVLREAAHLKAVLVKMQFQLDPFVAIHQHLLATQPPAAAKGDVVKQGKDSKNKKRRKKGASSSSQAMDI

SEQ ID NO: 4981 - protein, 632 aa, Zea mays
  VARIANT 35: note = Ancestral polymorphism is P, Derived polymorphism is L
MPPNAQDVHGSSGGLAMTAPAASKMDCFLTAVCTPLNLQFIDVSYRVKQTERSSKAAPGGRISHSGSGAAAPEERTILKGITGEARPGEVLAVLGPSGSGKSTLLSILGGRLAGHHGGTVLAGGRPPCRAVQRRTGFVAQDDVLHPHLTVRETLAFCAMLRLPRSAPAAAKAAAAEAVIGELGLGACADTIVGNAFVRGVSGGERKRVSIGHELLVNPSLLVLDEPTSGLDSTAAARLVATLSALARKGRSVVLSVHQPSSRVYRMFDSVLLLAEGSCLYFGAGRDAMDYFASVGFAPGFHVNPADFMLDLANGFAQADYNAVTTQQQGGSSVKQSLISSYNKVLAPRVKASVVAAEPPPPPHVQSGGEAAESCSTSWCNQFTVLLRRSLKERRHEAFASLRVFQIMAPALVAGAMWWRSSPLAVQDRLGLLFFASIFWGVFASFNAVFAFPQERPVLARERASGMYALSSYFLARTAGDLPMELALPTAFTVVVYLMAALNPSPVAFALTLAVVLAYVLVAGGLGLAVGALMMDAKRASTLVTVIMLAYLLTGGFYVHSVPRFMVWTKYTSFTYYCYRLLIAVQYSGHLKRLLPPEAVHGEVGPGACVAALVAMFFGYRLLAYVALRRVRK

SEQ ID NO: 4982 - protein, 472 aa, Zea mays
  VARIANT 25: note = Ancestral polymorphism is A, Derived polymorphism is V
  VARIANT 188: note = Ancestral polymorphism is R, Derived polymorphism is G
MAVSQLHLVVMVILVSAVASAPAVAAQYLGVNYGTLGDNLPPPHRGMELARSAGAVSVRFYDANATLLAAAAASGLDFVPSFPNELIPSLAGSQRAADALVAATLLPFRGNPRLRYLFVGNEFLSNPTAKPNWALIVPAMTNAARALRRHGLAHVKVSTTLSMNDLGNTVLPPSAGAFRPEIAEAVMGPMLAFLQRTGSCLFLDAYTYFTWSANHTIFPLPYALLEPSPGFAYHDPGTGLSYANLLDQMLDTAAAAMCRLGYCGVGLALAETGWPTAGDLDQFGANVRNAATYNRNLARRLASGAGTPRRPGVPVPAMVFALFNEDLKWGPDTERHWGLFYPNGSAVYEVDLTGRRPLASYPPLPPATNDQPYRGPLWCVVRTAGINETAVREQVAAVCDDDEAEDALCDPVRPGGACFLPNTVAAHASYVFSAHWNRFSEDYGACYFDGWGMETTIDPSHGSCKFPSIHLK

SEQ ID NO: 4983 - protein, 754 aa, Zea mays
  VARIANT 114..754: note = Derived polymorphism lacks residues 114 to 754
  VARIANT 105..754: note = Derived polymorphism lacks residues 105 to 754
MLGSKTKSGSAEAKSNGKPDKEKKGGGGGTPPTPKDSKPRKPAVPKASAAGHGTPRAADKSPGSGSADRKAPTPKAAASRLATTPEKGKPAKPPQEQHAQLAAIREELVKAKEQLVENEKEKCKVFAELERAKKVADEANAKLQDALDVQRRAIEAQEADKLPARESEQASIHGQQEADDAVLRSTVEQLEKARYELADAIDAKNEALSQVDDAVRASEVKAQEVEHLTVEVTRLKGLVDSKVDGNRKKTAERIQNLEEENFALKLELEKKKAAEEKAVRLERMIDELKSDVDDARNFGSKSKQLADEWQKKAQLLEVRLEEADQSNILKGESLNSAMEELDSTSSLLRDRESEVAALRDKVRFLEDELTKLKSDIVVSGQRADAAEKETTDLWTEIEGLRLKLHTVEEEKMEALNSDKNTSSEIETLNEQKNQLADELEASKDELEKIKKAMEGLASALQEMSAESREAQEKYLLKQDEMERAQAQVEELNLSLKNIKENYELLLDEANYEKVCLTKAVERLEAEAKRAHEEWQSKELSFVSSIKNSEEEIVAVRVQMDRTLEVVKEKENENTELQEKLQQLESQLMEANRIREEGNTETIRWKENILDQENELQNIKQENDDLQAKESAASEKIKELSSQLTNAKDGTINSNTKDGDNEKGGTEEDDEPVVVVAKMWENSKFADYDSAKEENDGDSQVDLESNKGDAGLDSNGLHSTKENSGRASPTKQHQQYKKKPLLKRFGGLLKKKSEN

SEQ ID NO: 4984 - protein, 172 aa, Zea mays
  VARIANT 42: note = Ancestral polymorphism is S, Derived polymorphism is C
  VARIANT 21: note = Ancestral polymorphism is C, Derived polymorphism is R
  VARIANT 14: note = Ancestral polymorphism is G, Derived polymorphism is D
  VARIANT 4..172: note = Derived polymorphism lacks residues 4 to 172
  VARIANT 1: note = Ancestral polymorphism is M, Derived polymorphism is V
MDEWRCRRHPPSAGGGVCPHCLRDRLLRLCPDCACPRPCACSCASSSPSSSSSGASALGRVHSLIERERRVERSRSVAAHGAVGDQRRPRSGVWAWVSFRKPPPPPPPAAGCRDVEQEYDEAVALARSRSVTTTAPASERRPRWGRLIAGKIKALRSRKPRPGGDWRDSVRP

SEQ ID NO: 4985 - protein, 173 aa, Zea mays
  VARIANT 133: note = Ancestral polymorphism is R, Derived polymorphism is G
  VARIANT 10: note = Ancestral polymorphism is T, Derived polymorphism is M
MAIMLSCSRTLEKALMMMTMALATIAGASIITTTTNLTHQNLGSYPVWPLVTANAGVQPIPADDEPALRLELDSNGEGLATLAFPPGAWWHGPGCRRRAGGGAPRWDAPWTSLPTAPRAPERHEEDAALFKARYPDTRTNATDVEVTPHDHVNPSEIKVVLCPKPASVVAGHL

SEQ ID NO: 4986 - protein, 458 aa, Zea mays
  VARIANT 306: note = Ancestral polymorphism is S, Derived polymorphism is F
MDVAAHRLGACLPLVPVAWADMAPLPSQTHRKDNGAAEGPRSGYWNFVDHYLHDMAPSLPPLVATKPTIPSRVRPKSRAVARLPQGLLPRSFPPGSSAPLQARAQHLADDTFVFTFVLKACAGLGWHRAGAQLHALVVQKGFEFHAYVHTALINVYVMSRCLVEARKVFDEMLVKNVVSWNVMITGFAGWDEVENVVSWTGLIDGYTRACLYAEALTLLHHMMAGGINPSEIIVLAVIPAISNLGGIVMGEMLNGYCEKKGIMSDVRVGNSLIDLYAKIGSVQNSLKVFDEMLDRRNLVSWTSIISGFAMHGLSVEALELFAEMRRVGIKPNRITFLSVINACSHGGLVQQGLAFFKSMVYEYNIDPEIKHFGCIIDMLGRAGRLCEAEQIIEGLPMEVNVTVWRILLGCCSKYGEVEMGERAIKMISDLERESGGDFLQVLRTAVGHILARVQGFLV

SEQ ID NO: 4987 - protein, 256 aa, Zea mays
  VARIANT 60: note = Ancestral polymorphism is M, Derived polymorphism is K
  VARIANT 62: note = Ancestral polymorphism is C, Derived polymorphism is F
  VARIANT 65: note = Ancestral polymorphism is C, Derived polymorphism is Y
  VARIANT 98: note = Ancestral polymorphism is S, Derived polymorphism is L
  VARIANT 101..256: note = Derived polymorphism lacks residues 101 to 256
  VARIANT 127..256: note = Derived polymorphism lacks residues 127 to 256
  VARIANT 141: note = Ancestral polymorphism is C, Derived polymorphism is Y
  VARIANT 168: note = Ancestral polymorphism is R, Derived polymorphism is W
MAIDDESPLRVNTRGGAMGGGERDGGENQRWPPWLKPLLGTSFFGQCKLHADAHKSECNMYCLDCMNGALCSQCLAYHRDHHAIQIRRSSYHDVIRVSEIQKVLDISGVQTYIINSARVVFLNERPQPRPGKGVTNTCEVCERSLLDTFRFCSLGCKIVRTSGDFRIRKKHAIVAKKKREKKHAPQQKQHRGAADSADDDDDDSSTSTSGGSDKSSVVQSFTPSTPPATTANSFRAGKRRKGVPHRSPFGSLVVEF

SEQ ID NO: 4988 - protein, 491 aa, Zea mays
  VARIANT 98..491: note = Derived polymorphism lacks residues 98 to 491
MAAAPVGAQNRCVFVGNIPYDATEEQLVQICEEVGPVVSFRLVIDKETGKPKGYGFCEYKDEETALSARRNLQGYEINGRQLRVDFAENGRNTDRNREKGRGGPGMTSNVDSQKQLAGTSVVGEANLHQPVGLPPAIHAASVMAGVLGGAQTANVQNGLPVQYGLGNDPLTHYLARMSRHQLHEVMVELKFLATQNKEQSKTLLQGIPQLPKALFQAQIMLGMVTPQMMHMAKSQQPSGSLSQSSSHLNEPYPQTDAMIPLVSRPSSLPTNIPPNPTVLQEQTATLHSIPQHQHASQPLVKMFPHGHQSGIAAQSPMLHQPLDGSSSVPTQSLVTSVGLTSQVQLPLVPQHPGPSVMPTSVPQLPLTHPHLAQVAVAPETLPNEISTLAEFTHPSKLRKLEDGTSVPGIVNSSHAVYTVPLQAVGPSGPSGSYSAGSVSLQQPGNEEQLTPDVESALLQQVLQLTPEQLSSLPPEQQQQVIELQKMLSVSK

SEQ ID NO: 4989 - protein, 770 aa, Zea mays
  VARIANT 254: note = Ancestral polymorphism is A, Derived polymorphism is V
  VARIANT 518: note = Ancestral polymorphism is R, Derived polymorphism is W
MVRNLRAESDRMHALACICRTALCVDLFAKESVRRGQKPVPGTDVISLFEDVRVKEDLNSVTSKNLFREELVASLVESCFQLSLPLPELKNSGTESRVIGALAYGTGYGALNWTEPALDVVEVCRPCVLWDCDGRTYAIDCYLKLLVRLCHIYDTRGGVKTIKAGASQDQILNETRLRNLQLQLIRDLREVHTPRISSRLIWAISEHFDLEGLDPLLADDPEDPLNIVISNMHKILFNTDSSATTSNRIQDVQAVLICAQRLGARNARAGQLLTKELEEFRASTSADSMTKHQSRYVLQVIKYVTNHPDNRWVGVGDATGDYPFSHHKLTVQFSEASAAQDRKLEGLVHKAIRELWRPNPSQLILLQTRGIGALHKELPKACALTGSSDPCYIEAYHLADPTDGRITLHLKILNLTELELNRVDIRVGLSGALYYMDGFSRTVRHLRNLVSQDPVQSSVTVGVSHFERCSLWVQVLYYPFYGSSGSTDYEGDYAEEDSQMMRQKRSHRPELGEPVVLRCQPYKFPLAELLLPLECSPVEYFRLWPSLPAMVECTGTYTYEGSGFKATAAQQYDSSPFLSGLKSISSKPFHQVCSHFIRTVAGFQLCYAAKTWFGGFVGMMIFGASEVSRNVDLGDETTTMICKFVMRASDESITREIKSDLQGWLDDITDGAVEYMPEDEVKSVAAEQLKISMERIALLKAARPKVPPAKTDQEEEEERKQSEELDGFGNPKGPSTLSKLTAEEAEHRALQAAVLQEWHQLCKERAMKAQ

SEQ ID NO: 4990 - protein, 406 aa, Zea mays
  VARIANT 97: note = Ancestral polymorphism is R, Derived polymorphism is P
MASSPLAISGTQPTWVPYEPTKDCSQGLCSMYCPQWCYFIFPPPPPFDVGGPSPDDSSGPVFSPLVIAIIGVLAIAFLLVSYYTFISRYCGTFRSFRGRVFSSSSGGGGGARGSGGGGGGGGGQGQSRSQESWNISPSTGLDETLISKIALCKYRRGDASSVHATDCPVCLGEFRDGESLRLLPKCSHAFHQQCIDKWLKSHSNCPLCRSNITFITVGAGQMLPTPQDAAGRRGPGEGVGRDAAAAAAAAAHEVVVAMDDLEIMCEEQQSMAGSTDGDEREASGGPEGPDEADSKAEEIREERPPPPPMKLWGPSSSEPDPISHDVRMSIADVLHASMEDERMAARDGGAGTSRRWCHGENSKGGRSSSRRALQDGTDTKRLPPAGRSCFSSNSKSGRGRGPDHPM

SEQ ID NO: 4991 - protein, 176 aa, Zea mays
  VARIANT 151: note = Ancestral polymorphism is D, Derived polymorphism is N
  VARIANT 125: note = Ancestral polymorphism is G, Derived polymorphism is R
  VARIANT 104: note = Ancestral polymorphism is V, Derived polymorphism is M
  VARIANT 103: note = Ancestral polymorphism is D, Derived polymorphism is G
  VARIANT 87: note = Ancestral polymorphism is G, Derived polymorphism is S
  VARIANT 80: note = Ancestral polymorphism is H, Derived polymorphism is N
  VARIANT 20: note = Ancestral polymorphism is A, Derived polymorphism is P
  VARIANT 17: note = Ancestral polymorphism is Y, Derived polymorphism is H
  VARIANT 16: note = Ancestral polymorphism is E, Derived polymorphism is K
MTHIAVERNRRRQVNEYLAPLRSLMPGLLRPPGRDPASAGSSGAGVTADAAARSEGAAPHEARPPAFARFFRYPQYAWRHAAAREDGVVAVEDEASGDCAVADVEVGLVVDAHASLRVMAPRRPGQLLRLVAGVQALGLAVVHLNVATAPDAMALYTLSLRVRTTSTHVRFLMSIA

SEQ ID NO: 4992 - protein, 194 aa, Zea mays
  VARIANT 30: note = Ancestral polymorphism is R, Derived polymorphism is W
MAPTSSTELAHVKHITLHQFLKQQQLLQHRLKPAVMWGWPATAAAIGRHVPDDVADDDDGLGGAWPPRSYTCAFCRREFKSAQALGGHMNVHRRDRAKMRGGHHGSAAAQAPQLGGAASQATDETPHAAPAAKYAVLYPILNSNAAAGVLIPSGDVLLSGPVALQAAAHDLCHVSDDDDEEDSDVDLELRLWWP

SEQ ID NO: 4993 - protein, 205 aa, Zea mays
  VARIANT 51: note = Ancestral polymorphism is L, Derived polymorphism is F
  VARIANT 54: note = Ancestral polymorphism is T, Derived polymorphism is M
  VARIANT 71: note = Ancestral polymorphism is Q, Derived polymorphism is H
  VARIANT 91: note = Ancestral polymorphism is A, Derived polymorphism is V
  VARIANT 106..205: note = Derived polymorphism lacks residues 106 to 205
  VARIANT 126: note = Ancestral polymorphism is E, Derived polymorphism is K
  VARIANT 150..205: note = Derived polymorphism lacks residues 150 to 205
  VARIANT 154..205: note = Derived polymorphism lacks residues 154 to 205
  VARIANT 165: note = Ancestral polymorphism is R, Derived polymorphism is P
  VARIANT 166..205: note = Derived polymorphism lacks residues 166 to 205
MRSLAIAPAAPAVAGGAREVQLAQQQQSAEAHAGAGSSGVTADADKKAVVLALTGELGHKTDGETIEWLLQQAEPAIVAATGTVTTTTMPANFSSLAISLRSADASHPSSASRPAAYHHLLPQQHKVAAMLAWHHHHHQQLLPPHPQQQQQAPQDPGVEEFMRKRYREGTDDLFMDPTTRQHHPDDSGGEAEDHKAHVTLAATAM

SEQ ID NO: 4994 - protein, 435 aa, Zea mays
  VARIANT 44: note = Ancestral polymorphism is Q, Derived polymorphism is L
  VARIANT 51: note = Ancestral polymorphism is A, Derived polymorphism is D
  VARIANT 59: note = Ancestral polymorphism is H, Derived polymorphism is Y
  VARIANT 62: note = Ancestral polymorphism is S, Derived polymorphism is L
  VARIANT 295..435: note = Derived polymorphism lacks residues 295 to 435
  VARIANT 387: note = Ancestral polymorphism is A, Derived polymorphism is T
MLDLFVYWHAVAPRDTAWESVPLVLHDERLITVRVGWPPHEPEQPRDLVEDVTRILGHHLGSVSSFCLHSSLSPDVDTLGCWMDLLLDRRVDYLQLVPGRIDRAQLPLQRLKTDMLGTMVIGFFNILPLVLTDNNHWCDSIHNLATSERDPCGLIMDVEYLMDGRISLEEGLLDEAERGVGMNRQRLCADALRMLSPVAQLPGSKIDGEYDPLMLDLFVYRRAVAPRDTAWESAPLVLHDERLITVRVGWPPHEPEQPRDLVEAVTRILGHHPGPVSSFRLHSSLSPDVDTLGCWMDLLSEKGVAELIIFNLYQDVSTAQLPLQRLKTDILGTMRDDDIPSDGDDDSLWSLPCVPVCIKASLSQLALVGYRGGQSERALIKSFLKAAENLVSVTLYIHPILQNSLLLPTDAISEIKDYPRASTRRCRFIVATTNT

SEQ ID NO: 4995 - protein, 309 aa, Zea mays
  VARIANT 213: note = Ancestral polymorphism is A, Derived polymorphism is G
MAGLDLGTAATRYVHQLHHLHPDLQLQHNYAKQPEPSEDDPNGGGGGNSNNGGPYGEHDGGSSSSGPAGDAPGGSGGNGEMVVRRPRGRPPGSKNKPKPPVIITRESANTLRAHILEVASGCDVFESVSTYARRRQRGVCVLSGSGVVTNVTLRQPSAPAGAVVTLHGRFEILSLSGSFLPPPAPPGATSLTIFLAGGQGQVVGGNVVGALYAAGPVIVIAASFANVAYERLPLEEEEAQAAPPGLQMQPPGGGVDGAGGMGGGPFPPDPSAAAGLPFFNLPLNNMSGGGSPLPPGADGHGWAGARPPF

SEQ ID NO: 4996 - protein, 306 aa, Zea mays
  VARIANT 136: note = Ancestral polymorphism is T, Derived polymorphism is I
MADKKKVEVKETKVEVKTAVYKVYVHCGQCARDIQTQFTEFQGVEEVKVDAGAGKVTVKGFGFDVEKLRKKVEKGCRKKVELIPPAPPKDDMVVDVKTKKEELKVITVKLPLHCPDCAVRVKEVLLENKSIYEAKTDLGKNTCTIEGVIEEDKLVKYIYERMRKKGVVDKVEKKVIIKEEKVLVKKADKEKEKKEKEKEKEKEKAKEKVKEAVDKVKEVIAPYFIPCTHPNFVDYSHPWHRGGGGYCSSYGDGYGYGYGGGCGGYPPYGFSYTHSELKGYHDTSFLHCTHPNEFISEENPYACAVM

SEQ ID NO: 4997 - protein, 154 aa, Zea mays
  VARIANT 127: note = Ancestral polymorphism is F, Derived polymorphism is S
  VARIANT 124: note = Ancestral polymorphism is G, Derived polymorphism is D
  VARIANT 111: note = Ancestral polymorphism is S, Derived polymorphism is G
  VARIANT 102: note = Ancestral polymorphism is N, Derived polymorphism is Y
  VARIANT 101: note = Ancestral polymorphism is P, Derived polymorphism is L
  VARIANT 32..154: note = Derived polymorphism lacks residues 32 to 154
  VARIANT 27: note = Ancestral polymorphism is G, Derived polymorphism is V
  VARIANT 23: note = Ancestral polymorphism is L, Derived polymorphism is H
MCCKPIEGCVVVADDNGVEAPFLVHVGVEDRQRPVLLQALEVWTLPIAHCDPARSFAYSWHINSRVPANMQRMRFARYADSTTIWSNFDFPFGNALENKLPNIEIIVADISKFEKISRWMKEDGLLFVHLFCHKTFPYHFEVTRSSLRCSATMA

SEQ ID NO: 4998 - protein, 410 aa, Zea mays
  VARIANT 267: note = Ancestral polymorphism is R, Derived polymorphism is K
  VARIANT 356: note = Ancestral polymorphism is T, Derived polymorphism is M
MGTKYPSTKEPYIYTSNSRTMCIYQKQKERRVQAQALLLSSSSMASSSCSPVFKILIVVALVAAALSSYGAAEYICIQPCWELPHCDAWCRDAKFAKGGDCVDFGSGLTCCCRRPHQFELYCGLAGDRSDQTRCRYTVAPHLFLSEAWNGYRKPPSEQKYSEDVGHIHQGLNFEPTREELDSLSKACSRLWELDMNRIVPGKDYIIDCGEGKKVYQKGDMASESLFSWLGDDVLRKPTYSRFCALLDNYNPHQDKHEEIVFVEEIARTSLIKYLHRYLVQKGVVPQDYEDFKKMLTSLWFDLYGRGGNSSCSTAFEHVFVGEIKGPGQGESEPDSEIQLLIVQFEWHGVLKSVSNTLIGVSPKFEVALYTLCFFVGGEDNRVDIGPYSVNVKCYRLGNNKIGSTFPIAEN

SEQ ID NO: 4999 - protein, 952 aa, Zea mays
  VARIANT 603: note = Ancestral polymorphism is G, Derived polymorphism is R
MEKACTLLVYFDKGSPSMANEIKAELESGDGPAKADAMRRAILLLLNGESLPHLFITVVRYVQSCDDHAVQKLLLLYLETVDKRNAATGKILPEMILICQNLRNNLQSPNEYIRGVTLRFLCRLTEPELLEPLVPSILANLEHRHHFVRRHALSAISAIYSLQQGDQLIPDAPELVERALASEQDPAARRNAFLMLLAAGQDRAVGYLFNNADRVAEWPDLLQMAAVDLIRKVCRSKGRADKGRYIRVIISLLSASSAAVVYEGAGALVSLSSAPTAVRAAANTYCQLLSSQSDNNVKLIVLDRLHELCSSHREVMVDMVMDVLRALASPNVDVRRKVLDLVLDLLTLRNVEEVVLYLKKEVVKTQAAEVKGDEYRQMLVQAIHNCAKKYPEVAALVVHLLMDFLGDPNVAAALDVVLFVREIIETNPKLRVSMIQRLIDIFYQIRASHVCSCSLWILGEYSLSLPEVESAISTIKQCLGDLPFYTVSEERETTDSSKPSQPVVSSVTVSSRRPAVLADGTYATQSAATEIAVSAPASALGSLASTQNLRSLILSGDFFLAAVVACSLTKLVLRLEEIQPAKVEVNKVSTEALLIMVSILQLGQSSYLPHPIDNDSYDRIVLCVRLLCNTGDDVRKVWLQSCRQSFVNMLAEKQFRETEEMKAKAQITYAQPDDLIDFYHLKSRKGMSQLELEDAVQDDLKAATGQFTKDADDTDKLNRILQLTGFSDPVYAEAFVTVHHYDIVLDVTVVNRTKETLQNLCLELATMGDLKLVDRPQNYTLAPESSKQIRANIKVSSTETGVIFGNIVYETSNVMERSVVVLNDIHIDIMDYISPATCADVAFRNMWAEFEWENKVAVNTVIQDEKEFLNHIIKSTNMKCLTPPSALDGECGFLAANLYAKSVFGEDALVNISVEKQADGKLTGYIRIRSKTQGIALSLGDKITLKQKGGNS

SEQ ID NO: 5000 - protein, 383 aa, Zea mays
  VARIANT 211: note = Ancestral polymorphism is G, Derived polymorphism is S
  VARIANT 210: note = Ancestral polymorphism is N, Derived polymorphism is Y
  VARIANT 203: note = Ancestral polymorphism is Y, Derived polymorphism is N
  VARIANT 198..383: note = Derived polymorphism lacks residues 198 to 383
  VARIANT 180: note = Ancestral polymorphism is T, Derived polymorphism is I
  VARIANT 171..383: note = Derived polymorphism lacks residues 171 to 383
  VARIANT 32: note = Ancestral polymorphism is R, Derived polymorphism is C
MAAARRLSELLQEQQEPFLVEAARARRPRRVRGASAAAEEAGGGLGYCPTAVCRRLLRLCSHGFKKRSTSGLRSALTRVLCSRAMRWVLRWDGLGGGCLSRAASSTALQRPRLWDHGRTQRQRRRTRHQVHRCRHHLREEQGLEEEEVLVVGRCIDPTIDGWRFGSRGLPQLFGTLTLDTASFMVSSVPSGEVSSSSQHGCDYRIMGGPNGNTVVLATKSTVVNTTGERAIFDFLFLALLAVARSLDDSLMCFLNRKNTNMSRCPSLPPCPVAATLVAEPESCALYVSHNILLNTIFLTAPKIGVDPSGCVELAKHVRLNSPNLVLSGLMIIGMLDYSSTPKNFKALANCREEVCKELGIPEEQGELFVGMSSDFEQAVREIL

SEQ ID NO: 5001 - protein, 415 aa, Zea mays
  VARIANT 391: note = Ancestral polymorphism is R, Derived polymorphism is S
  VARIANT 209: note = Ancestral polymorphism is A, Derived polymorphism is G
MAMEEPPQLFLCPISMELMEDPVTVLTGVTYDRSSIERWFFKYGKATCPATMQRLNSFDLTPNHTLKRVISTWLDHASSPSSSSSSTPLCNKLEREKLPSVFASIEATPFKVTALKNLRRCMDGDVAAQKDFVAYGGIQVLGRVMTQALAESCAGGDFSSFRTCEEAGAVLATLPLSDDASVELVLKPECMKPVVAVLQRGSAESRLHAMAILAKISRAIGADRDWTPGVDVDDLVKSLLELLSDGASAKLSYRALDVLLDVTARSRGARRAKAVEVGAVCVLVELLPDAERRIAERALLLLKRLCKCPEGRLAFVEHALAVSAVAQTLLRVSRLASGLAVSVLWLVACAVTPAERVLDDMLMSGGVAKLLALLQVENSASTKEKAAKLLSVHGAFWRQYPCFPTDLRDYLKFLN

SEQ ID NO: 5002 - protein, 417 aa, Zea mays
  VARIANT 73: note = Ancestral polymorphism is P, Derived polymorphism is L
MAAAGEVAGASSGTRTKRLKIAVIHPDLGIGGAERLIVDAACQLAAHDHDVHVFTSHHDKKRCFEETLSGLFPVTVHGDFLPRHVFYRFHAVCAYLRCIFVALCVLLRWPFFDVILVDQVSVVIPLLKLMASSKIIFYCHFPDLLLAQHTTMLRRLYRKPIDMIEESTTGMADLILVNSKFTAATFARTFSGLHARGIEPGVLYPAVSVEQFHEPHAYKLNFLSINRFERKKNLDLAISAFALLRSAAWTLPGDALQEATLTVAGGYDKRLKENVEYLEELKRLALTEGVSGQVNFVTSCSTSERNELLSNCLCVLYTPKDEHFGIVPLEAMAAHKPVIACNSGGPVETVVNEVTGFLCDPSPAEFSKAMLKLVNDHDLAVRLGEQARDHVVQKFSTKTFGDLLNSYVLNIYHERME

SEQ ID NO: 5003 - protein, 218 aa, Zea mays
  VARIANT 196: note = Ancestral polymorphism is R, Derived polymorphism is S
  VARIANT 177: note = Ancestral polymorphism is P, Derived polymorphism is L
  VARIANT 125: note = Ancestral polymorphism is P, Derived polymorphism is R
  VARIANT 112..218: note = Derived polymorphism lacks residues 112 to 218
  VARIANT 81..218: note = Derived polymorphism lacks residues 81 to 218
  VARIANT 79: note = Ancestral polymorphism is Q, Derived polymorphism is K
  VARIANT 74: note = Ancestral polymorphism is T, Derived polymorphism is M
MDPTPNIELIHALQHQDGISILSGRKSAAYCEMQSPASEASVERRAAQEESHLATSSEILAAADKLAECQQTITILSKQLQALKMPTSLGPPDTPSICIPRTSSAKSDYKPQSLVSILIEASTSPSPTPTTPTPQVLSKEDEGKVRATATSTTRSAARQEENGAGDKDSLQIVVVHPVFAAEPRPDDGGSADPTKRRRKRDTNLLGRIVFRKRAEGGS

SEQ ID NO: 5004 - protein, 624 aa, Zea mays
  VARIANT 550..624: note = Derived polymorphism lacks residues 550 to 624
  VARIANT 158..624: note = Derived polymorphism lacks residues 158 to 624
  VARIANT 110..624: note = Derived polymorphism lacks residues 110 to 624
  VARIANT 108..624: note = Derived polymorphism lacks residues 108 to 624
MGFFIPPPKVYKPAAEVDLGPDSDEHYISPNVKAPRVAGFLVKMLAWVLETPVLGWIVLGVLKRDNLVYKYSSTHRPSSSSPPQLVSDAEIPEPPLFTATHTWQAAIQEQSVRVTESRLSPAERVQEAVACVPAAAQAQLEPAAGFRRWTVRDFHRAYRSGQATPTMVARRFLAAVEECSGPDLNMGFFISCDPADVLRQAEDSTRRYQQGAPLSAMDGVLVAVKDELDCLPYPTSGGTRWLGSARRCAADAACVAQLRACGAVMAGKANMHELGAGTSGINPHHGATRNPYNVGRVSGGSSGGSAAAVCAGLCPVALGADGGGSVRMPAALCGVVGFKPTAGRLSNSGLLPLNWTVGMPGILAATVEDTLIAYAAIADQSKPSPLQQPELNLPMLTRTRSMPSIRLAKYAKWFDDSSEDIRSLCGKALQMLRTHYGWESVDVTVPEIEEMRLAHYVTMGSECTASLAAKYLDSMDRSEVGWDVRIALSAYGSFSSRDYLSAQRLRCRQMYFHEKIFETADAIVTPMTGVTAYALQDDALSTGELDYINGAALVRYSIAGNFLGLPAITVPVGYDRGGLPVGLQFIGRPWSEATLLHLAYAMQEACGKKVLRKPKVHYDLLTKE

SEQ ID NO: 5005 - protein, 285 aa, Zea mays
  VARIANT 242: note = Ancestral polymorphism is V, Derived polymorphism is A
  VARIANT 213..285: note = Derived polymorphism lacks residues 213 to 285
  VARIANT 211: note = Ancestral polymorphism is S, Derived polymorphism is Y
  VARIANT 207: note = Ancestral polymorphism is P, Derived polymorphism is L
  VARIANT 196..285: note = Derived polymorphism lacks residues 196 to 285
  VARIANT 194: note = Ancestral polymorphism is P, Derived polymorphism is L
  VARIANT 187: note = Ancestral polymorphism is R, Derived polymorphism is I
  VARIANT 168: note = Ancestral polymorphism is E, Derived polymorphism is V
  VARIANT 62: note = Ancestral polymorphism is R, Derived polymorphism is Q
MMSLSFAAARRRRSAGPEKARAEQRGYPEESPAEEGLHPAARDKPHEAVAGSQLELELQRARQQVTIENYPGEIFINISPTKCWNMVRERLNMEIRRQLNMGRDNLPTLQPTWFVKGSIWEVMAMKCYDAAPKSVPPFQMKEILGDYDAIHVRRGDLLKNRKDRFGIERSLHPHLDRDTRPEYIIKRIAQWIPPGRTLFIASNERTPGFFSPLSDRYKLAYSSNFSSILEPIIENNYKLFMVERLMMQGAKTFIKTMREFDSDLTLCDDPKKNTKVWQKPVYTDD

SEQ ID NO: 5006 - protein, 133 aa, Zea mays
  VARIANT 108..133: note = Derived polymorphism lacks residues 108 to 133
  VARIANT 77..133: note = Derived polymorphism lacks residues 77 to 133
MASPPPFDLCGDLDDDDIDKPVTAVPKDRRLPAAAPTPNGLNDHLLRFTRSLQRPTQNHNPSPNLPPPPPPAATEEQVEKVKLVGRRLCKLATTTTATQQVDEEEAEWENQDDGESILDILDDLTTRFDSLSV

SEQ ID NO: 5007 - protein, 86 aa, Zea mays
  VARIANT 9: note = Ancestral polymorphism is A, Derived polymorphism is T
MASPTAAAAPAEFTQMEAARQSLIAISQSVPEVGAPVVSPPSGGRGMDENGHEDVAERRYRAKLISISNQSPDARPTTCPRNNGAA

SEQ ID NO: 5008 - protein, 35 aa, Zea mays
  VARIANT 11: note = Ancestral polymorphism is T, Derived polymorphism is I
  VARIANT 17: note = Ancestral polymorphism is N, Derived polymorphism is D
  VARIANT 18: note = Ancestral polymorphism is M, Derived polymorphism is V
  VARIANT 24: note = Ancestral polymorphism is R, Derived polymorphism is T
  VARIANT 28: note = Ancestral polymorphism is E, Derived polymorphism is K
MLLLVPSSVLTAKELFNMYDCSERLYKEIFESAIQ

SEQ ID NO: 5009 - protein, 201 aa, Zea mays
  VARIANT 32..201: note = Derived polymorphism lacks residues 32 to 201
  VARIANT 37: note = Ancestral polymorphism is R, Derived polymorphism is S
  VARIANT 39: note = Ancestral polymorphism is R, Derived polymorphism is S
MAMLRCMYMCMCMVWGISDVYRMGCLRAASMQIFKLRWRLPRRGLYTLLEVQVDRKRRAGADQSLNRSVLSTKRNNTMVSTDIFLKSTRYPNRKVALGRVLSQDPKTKVGDVALGKEFWMVRVSLVSMRDEQLIRPYNNFKVLRQVGNNPIAWPSSCVSSSLHLTRHYSPHYCIWLKYSNSFCRLKRLTDNMGRIIASGLL

SEQ ID NO: 5010 - protein, 204 aa, Zea mays
  VARIANT 15..204: note = Derived polymorphism lacks residues 15 to 204
  VARIANT 69: note = Ancestral polymorphism is F, Derived polymorphism is S
  VARIANT 107: note = Ancestral polymorphism is P, Derived polymorphism is S
  VARIANT 158: note = Ancestral polymorphism is L, Derived polymorphism is W
  VARIANT 160: note = Ancestral polymorphism is V, Derived polymorphism is M
  VARIANT 168: note = Ancestral polymorphism is E, Derived polymorphism is G
  VARIANT 169: note = Ancestral polymorphism is Y, Derived polymorphism is C
  VARIANT 175: note = Ancestral polymorphism is H, Derived polymorphism is Q
  VARIANT 177..204: note = Derived polymorphism lacks residues 177 to 204
  VARIANT 194: note = Ancestral polymorphism is G, Derived polymorphism is W
MVDNAWMTVPTFRDWNMKNRALLDYSMHFSKIHEMPTVPSPSTAAPTPTDDRWCRPLHACDHSTMGGKFDHVDRLFQSMESAYINSLSNTSDVKELIPEFFYMSEFSENSNSYHLSDGEPIGDVALSPWAKFANTTLIGLALQRTTFAYYYVAQLHNLKVMIEALESGYVSSNLHNWIDLIALTTLVCERQMLGIVVQSCVGKE

SEQ ID NO: 5011 - protein, 78 aa, Zea mays
  VARIANT 15: note = Ancestral polymorphism is F, Derived polymorphism is L
  VARIANT 37: note = Ancestral polymorphism is P, Derived polymorphism is R
MLLNYIVIHQRDVYLYSSNFGLGSTGRTNHADVAMLPNGEWPQWCRICGGSGLDYCLRCHGTGEYREPMGFHFTVQRK

SEQ ID NO: 5012 - protein, 1540 aa, Zea mays
  VARIANT 1154..1540: note = Derived polymorphism lacks residues 1154 to 1540
MERGGLHYWPALAGILPNKQVQQLFIQGGFLDDPSGSTILHHMQEWQDLYSPCFWMVTFALIQLMFIMSILAQFLFKKFRWWRQRLKGSAPESNKQHQEHKITDIKLDISYKACKACCLLILGSHVLRAVFLQLHERISDCKYPPFIICEGLQVLSWIILSLAVFSFQKAKSTKIPKVIRTWWIFSFLQSVAIVVFDLRSILATHEDIGFEEWIDMCMLVVCTYLFAISVRGKTGIRFTDSSVTEALLNPSVGQQAEVKRPCPYGRANILELVTFSWMNPVFSIGYKKPLEKNEVPDVDGKDAAEFLSDSFKKIIGDVEHRHGLSTLSIYRAMFLFIGRKAIINAGFAILSASASYVGPSLINDLVKFLGGERQYGLKRGYILAVVFLSAKVVETIAQRQWIFGARQLGMRLRAALISHIYQKGLRLSCSSRQKHTSGEIINYMSVDIQRITDVIWYTNYIWMLPIQLSLAVYVLHTNLGVGAWAGLAATLAIMACNIPLTRMQKRLQAKIMVAKDNRMKATTEVLRSMKILKLQAWDMKYLQKLESLRGEEYNWLWRSVRLSALTTFIFWGSPAFISSITFGSCILMGIPLTAGTVLSALATFRMLQDPIFTLPDLLSVFAQGKVSADRVAKYLEEEELKCDAVTQVPRNDTDYDVEIDHGIFSWELETTSPTLTDVELKVKRGMKVAICGIVGSGKSSLLSCILGEMPKLDGTVRVSGRKAYVPQTAWILSGNIRENILFGNTHDKEKYENIIQACALTKDFELFANGDLTEIGERGINMSGGQKQRIQIARSVYEDADIYLFDDPFSAVDAHTGSQLFKDCVMGILKDKTVLYVTHQVEFLPAADLILVMQDGKIVQKGKFDELLQQNIGFEAIVGAHSQALESVINAESSSRIQSGNQKSADSEDEFDTENETDDQLQGITKQESAHDVSQDISDKGRLTQEEEREKGGIGKKVYWTYLRAVHGGALVPVTIAAQSFFQIFQVASNYWMAWASPPTTATTPTVGLGLLFSVYIALSMGSALCVLFRSLLVSLIGLLTSERFFKNMLHCILRAPMSFFDSTPTGRILNRASNDQSVLDLEIANKLGWCVFSIIQILGTIGVMSQVAWPVFAIFVPVTVICFLCQRYYIPTARELARLSQIQRAPILHHFAESLAGASSIRAYAQKDRFRKANLGLVDNHSRPWFHNVSAMEWLSFRLNMLSNFVFAFSLTLLVSLPEGFINPSIAGLAVTYALNLNSQLASIIWNICNTENKMISVERIMQYSRIPSEAPLIVDHYRPPNSWPDAGTINIRSLEVRYAEHLPSVLRNISCTIPGRKKVGIVGRTGSGKSTFIQALFRIIEPRGGTIQIDNVDILKIGLHDLRGRLSIIPQDPTMFEGTVRGNLDPLNEYPDHRVWEILDKCQLGDIVRQNPKKLDSIVVENGENWSVGQRQLFCLGRVLLKRSNVLVLDEATASVDSSTDAVIQGTIREEFRKCTVLTIAHRIHTVIDSDLILVFSEGRIIEYDTPSKLLENESSEFSRLIKEYSRRSHGFSGTANN

SEQ ID NO: 5013 - protein, 327 aa, Zea mays
  VARIANT 152..327: note = Derived polymorphism lacks residues 152 to 327
  VARIANT 130..327: note = Derived polymorphism lacks residues 130 to 327
MTSPPRVSMEITDDMLKSMEVGLAFRDYNGRISSMDFHSKATNYLVTASDDESIRLYDTQNAVCLKTINSKKYGVELVCFTDNPNIVLYSSKNGWDESLRLLSLNDNRFLRYFKGHLDRVVCISFCSEKENFLSGSLDRTVLLWDQRAEKSQGLLRVQGRPAVSYDDQGMVFAVAYGGHIRMFDARKFEKGPFEIFSVGNNDSEAHVIKFSSDGRRILLTTKAGRVHVLDSFHGNSIASCNVKPVVTNSTLEASFSPDGNHIISGSGDGSVYAWNVRSGKVARWGSTDDEPPLVRWAPGSLMFVTGSSELSCWVPDLSKLGSFTISK

SEQ ID NO: 5014 - protein, 552 aa, Zea mays
  VARIANT 435..552: note = Derived polymorphism lacks residues 435 to 552
  VARIANT 303: note = Ancestral polymorphism is P, Derived polymorphism is L
  VARIANT 229: note = Ancestral polymorphism is S, Derived polymorphism is F
  VARIANT 193: note = Ancestral polymorphism is R, Derived polymorphism is C
  VARIANT 167: note = Ancestral polymorphism is P, Derived polymorphism is L
  VARIANT 132: note = Ancestral polymorphism is T, Derived polymorphism is M
  VARIANT 128: note = Ancestral polymorphism is T, Derived polymorphism is M
  VARIANT 63: note = Ancestral polymorphism is V, Derived polymorphism is I
MASQPKKISSEPISLVGPTPADIEATAQLEKLLREAGMYESAEESAVRAEVLRDLQGIVDLWVKQLMLKHGYPDAMVDEATAFVLPFGSYRLGVLGGGSDIDALVVGPSFVDRDQDFFGVLAGVLAETEAVTELHPVPGAHVPVMKLRFRGVQVDLVYASVNLPVVPRNLDLSDRHVLRGLDHVTARSMNGVRVADEIVRLVPDAAAFRTTLRCVKLWAKSRGVYSNVSGFLGGVAWAILVARVCQLYPNAVPSMLVSRFFKVFSHWRWPIPVMLCDIEHDDELGLPVWDVRRNLPDRSHLMPVITPAYPCMNCTYNVSRATHRVIKEQIQAGDVACQKIAAGGGRDWGALFQPSPFFSTHKSYLQVDAAVAGGAEELREWKGWVESRLRQLVAKVERDTFGELLCHQNPRAYDAEPHGLRRASSFFVGLSKPQQQHKPHPPEGYPPFFDLRATVLEFQQDVYSYKFWRPGLELVVKHVRRNKLPAYVMQKIGGRNIHELKRKRADDDSSPSSPPLCSSSSASSGDGDSVQGPSSRAELHPRKAMLFDPSPS

SEQ ID NO: 5015 - protein, 130 aa, Zea mays
  VARIANT 24: note = Ancestral polymorphism is G, Derived polymorphism is W
  VARIANT 66: note = Ancestral polymorphism is G, Derived polymorphism is R
  VARIANT 69..130: note = Derived polymorphism lacks residues 69 to 130
  VARIANT 74: note = Ancestral polymorphism is D, Derived polymorphism is Y
  VARIANT 76..130: note = Derived polymorphism lacks residues 76 to 130
  VARIANT 92..130: note = Derived polymorphism lacks residues 92 to 130
MAIRILSLTASASGCERNWSCFEGKKAKANNNNKVDPLLAADAVSAQGWIVEGGDEESSNVNIVTGLTWQQIADAWGPKEVTKLRKSARLAQPRDIEEEQLPSKNEEEEPINEEEIEFESDQDEVITTGY

SEQ ID NO: 5016 - protein, 119 aa, Zea mays
  VARIANT 36: note = Ancestral polymorphism is P, Derived polymorphism is L
MGACWCGLLIKMGMVAGSHNRNEFVMIRHDGDAPGLAKPTKSANGQVCQICGDSVGVSATGDVFIACNECAFPVCRPCYEYERKEGNLCCPQCKTRYKRHKDNLTQALMFLSHFIRDIH

SEQ ID NO: 5017 - protein, 268 aa, Zea mays
  VARIANT 24: note = Ancestral polymorphism is S, Derived polymorphism is Y
  VARIANT 29: note = Ancestral polymorphism is R, Derived polymorphism is H
  VARIANT 44: note = Ancestral polymorphism is G, Derived polymorphism is V
  VARIANT 80: note = Ancestral polymorphism is R, Derived polymorphism is T
  VARIANT 105..268: note = Derived polymorphism lacks residues 105 to 268
  VARIANT 228: note = Ancestral polymorphism is A, Derived polymorphism is S
  VARIANT 239: note = Ancestral polymorphism is H, Derived polymorphism is P
MADMVSEVAGQWATPALRWTAIMSGFVLRHFVDLIGNGVKTDKGFKEIHLNSVAKNVSEFYGQGVTGQQVYNHLRKWRSRWVKVCKLKDISGALWDEDNFVISLEEGHYAAYIKDHPKDDDYLNRPIENYMHMQIIFGSWVAIESIDCSKLTGKGKTLEKGTPSDSNDSKPNLAKRKRFMTNEDVVVFNGMKDVVSNVVATVRESVHAEAAPGIYNVVINCPRYSREALMYALNHMMEHKATSLVFLDMTPDDRDLWLKTFLAKHYHI

SEQ ID NO: 5018 - protein, 370 aa, Zea mays
  VARIANT 4..370: note = Derived polymorphism lacks residues 4 to 370
  VARIANT 42..370: note = Derived polymorphism lacks residues 42 to 370
MGLQNLTLSYNNLSGPVPAALNGSAIQRLWLNIQQGDAKLSGTLDVVATMTGLQELWLHGNDFSGPVPDAIAVCKELYTVRLNNNQLLGLLPPGLAALPALRELKLDNNNLLGPVPALKAPTFTFSGNEFCAAKPRDACAPEGKVTMLNLPGYGLNGTVSQSLANVTTLSDVNLARNNLTGRVLDSLTRLASLQTPVNDLYGALPAFSPTVDVNVTGNLSFNTTAPPTDAQPNGESPRPRPTPGAPAGAGGNNSAGGIPGSGKKASSAVLLGTTIPVAVSVVALVSVGSMFLCKRRASGPPQAGSVVVHPRNSSDPDNLAKIVVATNDGSCSGTSHSGSSSSQAGDVHMVEAGSFVIAVQVLRGATRNFA

SEQ ID NO: 5019 - protein, 165 aa, Zea mays
  VARIANT 95..165: note = Derived polymorphism lacks residues 95 to 165
  VARIANT 92: note = Ancestral polymorphism is S, Derived polymorphism is L
  VARIANT 83: note = Ancestral polymorphism is R, Derived polymorphism is S
  VARIANT 81: note = Ancestral polymorphism is I, Derived polymorphism is T
  VARIANT 74..165: note = Derived polymorphism lacks residues 74 to 165
  VARIANT 64: note = Ancestral polymorphism is E, Derived polymorphism is K
  VARIANT 30..165: note = Derived polymorphism lacks residues 30 to 165
  VARIANT 27..165: note = Derived polymorphism lacks residues 27 to 165
MVGKNSMKIARDLVMQEVVNDLNPSGQNLQNKEDLQGTLIDGIKEVVLSPADALSLIAAGEDPEKQRLLVWKKQFDIIEAIARGLLYLHRDSRLRVVHRDLKASNILLDADMKPKISDFGMARMFGGDQNQFNTNRVVGTFGYMSTEYTMEVFSPSSLTSTASES

SEQ ID NO: 5020 - protein, 85 aa, Zea mays
  VARIANT 47..85: note = Derived polymorphism lacks residues 47 to 85
  VARIANT 37: note = Ancestral polymorphism is G, Derived polymorphism is R
  VARIANT 35..85: note = Derived polymorphism lacks residues 35 to 85
  VARIANT 11: note = Ancestral polymorphism is D, Derived polymorphism is N
MRDGMHANCIDIGELVGLKGEEQLSKIGFEKKILSMGYQACGALELWNYPSFFRDLIPQNLDRTNRSDRIDLAALEGMKFGSNLY

SEQ ID NO: 5021 - protein, 1537 aa, Zea mays
  VARIANT 897: note = Ancestral polymorphism is G, Derived polymorphism is R
MPPKKRAAAAASSKKPQPSQPSQPAKFGILHFFERQTQASQNAKRQKPDPPAPPPPPPPPPEKEPSEVSPEVTKTLAPKRVRFSPGMLIKQSQDDGVAEVVTWKISPVNHRLGTTKSKQFLGMAPHPYSSEKNSSLDAMKKWHSSPLGLSRCTTLGSNSGVLGSAIVGCDGVGDTQSPFRTPPSLSYGCNEVTFLFLEQQVSSGVTSEGGAEPSGAGQHKKALLDLLDQVEDAIMEEELPADPGNKGGQTTNEDITNNSRSPVADTDLTIPSKKTIHVPPFNSFLVLEVSEKHKADDSSCDRYPVKVLRLLNEHSGTECAVHLCDEWFDSIVGPGDTVNVIGEFSNHGKCIVDHDNNLVIVHPEQLISGTRAASSFQCLRRSVLDERLKSNEYSTSALTGTLLHQVFQAGLLNDAPSWQFLEQQAKEVLLKNIETLYACGVNESNMYSTLIEAIPKMLNWFKCFLKGSKCSDVDFGHNEVRKTVGVTEVMDIEEMAWAPRYGMKGVIDASVRSRVESHNGGSYDRIMPLEFKTGKATSGQAAMEHSAQVMLYTLLMTERYLNEDIDLGLLYYLHTDQTLGIKVKRTDLIGLIMRRNELATEILKASMSQSFPPMLQSPSTCNRCRHLISCTIYHKAHGGSGTTSGLGDLFDNLVNHLTVTHHNFLKHWDRLIDLEARASQVKKNILQPHNSNYGSGSSAVPYFVLDIKNGHSIDSSGKSKRYIYNFVQQKMQPETADQLDAQFDSIDFSLKVGDFVVLSTQSGRIAVANGCIREIISHSHITVSLPRRLRIPDSNSLSEQEDLTREIWRIDKDEFSSSFGIMRLNIVQLFAQNPQNSHLRKLIVDLEAPRFDSGGLFSQDPALSYIRSLPNLNNDQQRSLHKILGAKDYALILGMPGTGKTYTMVHAVKSLLIRGESILLTSYTNSAIDTLLMKLKTEGVDFIRIGRPEAVHPDVRAHCLSTTEAQSVDAIKARMEQVQVVGVTCLGMYHPLLAHKKFDTCIMDEAGQITLPVSLGPLMLATKFVLVGDHYQLPPLVQSSEARENGMGISLFWRLSEAHSQAISALRCQYRMSSGIMELSNSLIYGNRLCCGSLEIANAKLKFSGREPMQLKLKEILNPDRAVIFANTDQIPALEAKEHRTVNNPTEAHIISWIIKELLRRGVAQDAIGIITPYNAQVNIIQQYTDCLVEVHTIDKYQHASCIPIPISYTFVLWSPYFDTRKSCFIEAFAWSSSTEEFNLFQGRDKECIIVSFVRSTANSRASGSSLLGDWHRINVLLTRAKKKLIMVGSRGTLSTIPLLRLLVDKVAEIGGLAIRSCSALTPSHVLAVPAFDNHPAPTHRRVGTALLTLRRRRPRGRSTANSPPPRAVSPFPPYPVGSFGFDALKETSVDVSAAGAYPLRVPLVAPFTIASSRLAALSNVVVRVELRSGAVDWGEVPVLPSVTAGDQPAALGAAGRACVAMPRRGRSGRCVSQSATHTSPRLPGHAHGPPAPPQPLYPSYICFHALAPPPPSSPVPLYSMAEQDGNAGQRPPDSVP

SEQ ID NO: 5022 - protein, 343 aa, Zea mays
  VARIANT 215..343: note = Derived polymorphism lacks residues 215 to 343
  VARIANT 201: note = Ancestral polymorphism is Y, Derived polymorphism is C
  VARIANT 196: note = Ancestral polymorphism is G, Derived polymorphism is S
  VARIANT 178: note = Ancestral polymorphism is L, Derived polymorphism is Q
  VARIANT 157..343: note = Derived polymorphism lacks residues 157 to 343
  VARIANT 156: note = Ancestral polymorphism is G, Derived polymorphism is R
  VARIANT 154..343: note = Derived polymorphism lacks residues 154 to 343
  VARIANT 143: note = Ancestral polymorphism is K, Derived polymorphism is E
  VARIANT 141: note = Ancestral polymorphism is E, Derived polymorphism is K
  VARIANT 133: note = Ancestral polymorphism is C, Derived polymorphism is Y
  VARIANT 116..343: note = Derived polymorphism lacks residues 116 to 343
  VARIANT 108..343: note = Derived polymorphism lacks residues 108 to 343
  VARIANT 98..343: note = Derived polymorphism lacks residues 98 to 343
  VARIANT 94: note = Ancestral polymorphism is G, Derived polymorphism is S
  VARIANT 65: note = Ancestral polymorphism is G, Derived polymorphism is S
  VARIANT 63..343: note = Derived polymorphism lacks residues 63 to 343
MRRLEFAFLFKVSTPPRRSGGRRRSMIGRSETHKRWLRRELGITKDVTSLVQIIKFVQLHAHLNGGAESFLNVKSCKGSKSGASSRCAGCQGSGFKVQIRQLGPGMIQQMQHPCNECKGSGETISDKDTCPQCKGDKVVSEKKVLEVVVEKGMQNGQKITFPGEADEAVMTPYLILPLEISSLFSSRRSIPSSRKGDDLFYEHTLTLIESLCGFQFVLTHLDNRQLLIKPNPGEVVKPDSFKAINDEGMPMYQRPFMKGKLYIHFSVEFPDSLSLEQCKALEAVLPPKPISQYTDMELDECEETMPYDVNIEEEMQRRRQHQEAYDEDDDVPGGGQRVQCAQQ

SEQ ID NO: 5023 - protein, 549 aa, Zea mays
  VARIANT 90: note = Ancestral polymorphism is V, Derived polymorphism is E
  VARIANT 88: note = Ancestral polymorphism is V, Derived polymorphism is D
MMLPSAELSSSNGGGASGLAALPVFLGRKNKYVRMDDVLPSEHEGDDGGGGGGGGGAVHVRGRQSSRRYVFACSVFASLNSVLLGYDVGVMSGCILFIQRDLHINEVQQEVLVGCLSFISLLGSLTGGRTSDAVGRKWTIGLAAVVFQAGAAVMTLAPSFQVLMVGRLLAGVGIGFGVMIAPVYIAEISPAASRGSFTSFPEIFINLGILLGYISNYAFSGLPDHINWRVMLAVGILPSVSIAFALLVIPESPRWLVMQGRADEARAVLLRVTDTEDEAKERLAEIEAAAAAATTGAAGKHGDRNRTVWQELSRPSPVIARMLVTGVGIQCFQQITGIDALVYYSPTIFRDAGIATERQLLAATVAVGFFKTAFIALAIVLIDRVGRKPLLYVSTVGMTGCLAALSAALFLQARGSVSRGAGVGVAILTVCGDVAFFSVGIGPICWVVSSEIFPLRLRSQAAALGAVANRVTSGAVAMSFLSVCRAISVSGAFAAFAAISALSVLFVHRFVPETSGKTLEQIESLFGGGGDGDELRELELGDVEQLVHK

SEQ ID NO: 5024 - protein, 389 aa, Zea mays
  VARIANT 21: note = Ancestral polymorphism is R, Derived polymorphism is L
MSHRKFEHPRHGSLGFLPRKRSSRHRGKVKSFPRDDPKKPCHLTAFLGYKAGMTHIVREVEKPGSKLHKKETCEAVTIIETPPLVIVGLVAYVKTPRGLRTLNSVWAQHLSEEVRRRFYKNWCKSKKKAFTKYALKYENDAGKKEIQLQLEKMKKYASVIRVIAHTQIRKMKGLKQKKAHLMEIQVNGGTIADKVDYGYKFFEKEVPVDAVFQKDEMIDIIGVTKGKGYEGVVTRWGVTRLPRKTHRGLRKVACIGAWHPARVSYTVARAGQNGYHHRTEMNKKVYKIGKAGQETHDASTEFDRTEKDITPMGGFPHYGIVKGDYLMIKGCCVGPKKRVVTLRQSLLKQTSRLALEEIKLKFIDTSSKFGHGRFQTTDEKQRFFGKLKA

SEQ ID NO: 5025 - protein, 350 aa, Zea mays
  VARIANT 257: note = Ancestral polymorphism is H, Derived polymorphism is Y
  VARIANT 237: note = Ancestral polymorphism is T, Derived polymorphism is M
  VARIANT 234: note = Ancestral polymorphism is A, Derived polymorphism is V
  VARIANT 180..350: note = Derived polymorphism lacks residues 180 to 350
  VARIANT 137: note = Ancestral polymorphism is N, Derived polymorphism is T
MHSPNPYRPLLPTAHGPMPNQAQLHFRRRRWPATALPRARRIWLRLPSPPSPPCATPPRRAVKTPVFFSSRRRSSSLPPSPRSCFLPMAWIWMVLAAGAVLLWAISLGRIFSSAAPSCVPLSPQFMPPLRGDRRTRNVMLVVAHPDDESMFFAPTILFLKSKGHNIHILCMSRGNADGLGDTRKEELYHACETLKIPHEQVEVLDHPKLQDGFHEKWDHELVSELVMEHVQLWVIDMIVTFDSYGVSGHPNHRDVHYGICKFLHANRQGNVEAWELASLNILRKYSGPVDIWLSSLISVSRSKQSIYTLVNSSPSRSYEAMAAHRSQWVWFRRVFVMLSSYTYINMLQKI

SEQ ID NO: 5026 - protein, 131 aa, Zea mays
  VARIANT 38: note = Ancestral polymorphism is G, Derived polymorphism is S
MSEEKHHHFFNHHKKDEEQPAGEYGYSETEVVTATGEGEYERYKKEEKEHKHKQHLGEAGAIAAGAFALYEKHEAKKDPEHAHRHKITEEVAAAAAVGAGGYVFHEHHEKKKDHKDAEEASGEKKHHHLFG

SEQ ID NO: 5027 - protein, 387 aa, Zea mays
  VARIANT 374: note = Ancestral polymorphism is K, Derived polymorphism is N
  VARIANT 81: note = Ancestral polymorphism is A, Derived polymorphism is S
MALQAALLPSTLSSVPKKCSIAVAAKDTAFLSVSQKKVQAASLSVRTRVATTAPVATPGSSTAAKDGKKTVRQGVVVITGASSGLGLAAAKALAETGKWHVVMACRDFLKAAKAAKGAGMADGSYTIMHLDLASLDSVRQFVDSFRRAGMPLDSLVCNAAIYRPTARTPTFTADGYEMSVGVNHLGHFLLARLLLDDMQKSDYPSRRLIILGSITGNTNTLAGNIPPKAGLGDLRGLAAGLRGQNGSAMIDGSESFDGAKAYKDSKICNMLTMQELHRRYHEETGITFASLYPGCIATTGLFREHIPLFRLLFPPFQKFVTKGFVSEAESGKRLAQVVSDPSLTKSGVYWSWNKDSASFENQLSQEASDPEKAKKLWEISEKLVGLA

SEQ ID NO: 5028 - protein, 212 aa, Zea mays
  VARIANT 103: note = Ancestral polymorphism is R, Derived polymorphism is S
  VARIANT 150: note = Ancestral polymorphism is P, Derived polymorphism is L
MHPVPVPSQPFTATPAKKLVSRSTAVRKAIHFVNLRTAGRSSGNLAMNSVPKPALGSETSWREDFAVGDKDAVVIVDHGSRRQESNLMLNDFVEMFRAKTSYSIVEAAHMELAEPTIKDAFGKCVQQGASRVIVSPYFLSPGRHWKQDIPALAAEASKEHSNIPYIVTAPLGLHELMVDIMNDRIKYCLRHVAGDVDECTVCAGTGKCRLYS

SEQ ID NO: 5029 - protein, 689 aa, Zea mays
  VARIANT 80: note = Ancestral polymorphism is D, Derived polymorphism is E
MERIVYDVVEGDYGEFIKVLRRVLAEYEPAGDRQSVLDYQHAPHPVLPRQRSPRRPARWILITLRVRDEGHETTLAVRDDNVYLIGFSNRRGKWFEFGFGGGDGGCRSAQVLPADWSSTFLECDVGYGGMMVGGAMRLVGLGLGMCFARDAVRRLSSYEQEPGVQVDDRTKRHLARLIVMVCEAARMIPHCETVLDDWDRSSAAITERQVHLLWNWGRMSHAVLIWDWWSRHGSWNGIPPPWPPELLAPQVDVRNVGQALQIVQLLLNWSEAGPTALPSWQPPPPPQETAGEGDDSSDNLGRYWNGGATIPHVLGQQAGQCRLEIFGVRAGFYMRGAATISVFDGKRGQVIYSNNDDDKLDGDDDIAGRRRTMLGSLDHENGDCDSHHGRHFSEWRMFAQLRSFYNRAGVGFGGWWNRHSETKTIVTSKRENGSTTLVQFDQGHDLVLTGPYRAISAYGSVSVEIDSSTTTDSSNSYIELGISTAEIDYVRIDVSKKDTRRSSDDDGRTTTTLLWDCYNEEGDDVAYDTVLTRTISTSHGPVDVTYAVLSNAVEATVQVRLILLAGQGDGIILVHGRITAGYQDLRARSVLFCQDAEEKVAVVTGGDGSHVVPLSRSVVAVPLTSLLLIEAALHTSVASSNHTAKAEGHPLPEPIVARFRPEPAGQDEVQRFGIDGGHVEIKVIWALDF

SEQ ID NO: 5030 - protein, 413 aa, Zea mays
  VARIANT 167: note = Ancestral polymorphism is R, Derived polymorphism is W
  VARIANT 134: note = Ancestral polymorphism is D, Derived polymorphism is Y
  VARIANT 125: note = Ancestral polymorphism is A, Derived polymorphism is V
MPATDLQGSSPSTHAHSSPFPSFGRTLLSLRRDAPAAAMPPPRGAGPELGDFHAHVAVRLAGLSAPGGEEFMSVAWVRRLLEAFLLCQEEFRAAVAEARRRGGGVTAPADAEKLVAEVGERAVRALDVCNAARDGVDQARRWERLAGLAASALLAPAEGQVHEGQLWRARKALSDLSLLLADDAAAASAGAGGGLASFLASHRNRSFGRARASPSRASPSAHLRSLSWSVSRTWSAARQLQAIGAGLAAPRATEASCGFAAPAYAMGCLLHLAAWALVAAVPCPDRAAALQAHHLPAAPPRAAFPWAPPLLALQERLAEEGRRKDRRSSCGLLREIHALDKCAQRLAEAIDAAPVPLTGEREAELREAAAELAAACSAIKDGLDPLERQVRELFHRIVRSRMAGLDPPMANAD

SEQ ID NO: 5031 - protein, 382 aa, Zea mays
  VARIANT 107..382: note = Derived polymorphism lacks residues 107 to 382
  VARIANT 196..382: note = Derived polymorphism lacks residues 196 to 382
  VARIANT 213: note = Ancestral polymorphism is P, Derived polymorphism is L
  VARIANT 263: note = Ancestral polymorphism is R, Derived polymorphism is H
  VARIANT 308: note = Ancestral polymorphism is T, Derived polymorphism is I
  VARIANT 370: note = Ancestral polymorphism is W, Derived polymorphism is C
MPRIPPLPPARPREPPASHPQPAHTHTCPPHSFVSLLSDPDHRRTTRAMEPDADEDYMGDLSRFLPPSPSSSPPKNLGRRKQPSTQAQAQPRAKRGKGVSWQERRRQERERKQREEDARTMAGLAEAIPESNVGFRMLKQMGYDPDSRADAGAEPVSIEIRRSRAGLGAEEPVLALTPALAPVEKPREVSERERRQQEEMAAELREDSRNGLPEHLVRLGRPDLVAEQHHAALGVGERIHGRDEVVDILLIIESMPISVSTSRKISIFISRIQMSLSSKMVHDDYIPPLLHGIIGILYNIFSDLWPQTLDCLAVLIRKHKELVWGQFVLFIATHQSKGLTVKNQEKLEAATQPQCCVDVILLPNYCQKICQISYGSDGKVLM

SEQ ID NO: 5032 - protein, 170 aa, Zea mays
  VARIANT 37: note = Ancestral polymorphism is F, Derived polymorphism is V
  VARIANT 22: note = Ancestral polymorphism is D, Derived polymorphism is N
  VARIANT 20: note = Ancestral polymorphism is A, Derived polymorphism is D
MPVIRMIPTSVLLGYFAYMAIDSLPVNQFWERIQLLFITERRRYKVLEGPHASFILQRDWIEPRHMTRRSSKATLSRVSAMHLLVHDLLEVVRMNVPHIGTGIGVEADKFHQHWRHDCHSYPVHTASSPSFIVTLAVPIPEHGCQGRAVRDKFAMLGQSQEPRGCSHRSC

SEQ ID NO: 5033 - protein, 520 aa, Zea mays
  VARIANT 43: note = Ancestral polymorphism is R, Derived polymorphism is L
MAAVAGVSEPPMVEQVITEFFAKSLHVILESRSPYDSSRNFTLPSPPSSPLAGSQPRDRWFNLALRDCPAALENFDLWRQSNLEPLVIDIVLLQRDNTRTASVEASRIIERWVIKYETSRSGNVIKNTDKNARSSCSQDHSLYRRAYIGSTVLFRSLYLVVRLLPAYHLFEELNSSGRIYGIAPACFPVTRRHSWSTGHGVRPPASPFLMSSEPHGRLQPCMPTDNSPTAYIHPHITSSSEKKRNTVNEECYSSPPLSPSPSHPPSSYPRNPFFRYGSAPLSIPTVRAGGGGSRLPPSPRRKDKQQCSSQNENLTHSPNDKSIVSKDLVKLSEFHNAKYLQKVLSFGNDDLMYFRGLKLTHTSSKLFIMDELDERELVFAWEDKDTIIDQLNRIDLSDWEDHESSQELGGSLTRSPDAAIGILMRVLKNAPGLRERLLTVPSAGTVPQEPSSLQRVVTEEHGSGASSSAVVPSALLRSRTAADALQELNRYKQIRESILSRSRGHPCSTELEENPADGDP

SEQ ID NO: 5034 - protein, 372 aa, Zea mays
  VARIANT 50: note = Ancestral polymorphism is W, Derived polymorphism is C
MADNNGGNSNSGGTNANTTAEVQIQIPGPPKTEAPAAQEGPSESSKAKNWKRWLVVAADAILLIVGQTSATLLGRYYYSQGGNSKWLSTFVQTAGFPLLFFGLFFFPSKSSGSPVGKTAMIYAVLGLIITADNMMYSHGLMFLPVSTFSLICASQLAFNVFFSYVLNSQKLTGLIMNSVVLLTLAALLLGANHETHGPITGGVSGGKYLLGFLLTVGASGTYSLILSLMQLTFENVIKKQTFSAVLNMQIYTALVATFASLVGLFASGEWMDLREEMDRFQSGQFSYLMTLVWASVSWQLASVGVVGLVFEVSSLFSNVISTFALPIVPLFGVMAFHDRMNGVKIIAMLISIWGFLSYLYQNYLDDKKVRNA

SEQ ID NO: 5035 - protein, 261 aa, Zea mays
  VARIANT 246: note = Ancestral polymorphism is R, Derived polymorphism is M
  VARIANT 112: note = Ancestral polymorphism is T, Derived polymorphism is R
MACHQRSTSLPSMPRSTDSSSVGQEQELQALKVGASSPSATIETTRDGLRRLGDLYSRVEKTLHLPSNQLALRRRLTQQQQGKTAAEEELDRSLALIDLCGATQESLAELRTRVQDLRLAFRRGDAADGGAGIQLKAESFVRLARKARRPPLKKTTAGNGKATAEDGCRVVRLMAEARETAARLLESVSRLLPEQIGSLNPNASRWSLVSKRFRKREAVCEVEERQLQALERGVGDLADGVDVLFRRLIQCRVALLNILSS

SEQ ID NO: 5036 - protein, 315 aa, Zea mays
  VARIANT 172..315: note = Ancestral polymorphism lacks residues 172 to 315
  VARIANT 48..315: note = Derived polymorphism lacks residues 48 to 315
  VARIANT 34: note = Ancestral polymorphism is R, Derived polymorphism is W
MTRLEDEFHHVLSARALDLEALSSLSSLSMASDRRRIAVESMVASSLRVEFLCAQVLLAEAWVYTLWGFLPKKTCSGDVYTLEGLLLAEACSVVNQVEMVMRTFCLIPMFCSLGSATRFLKIPLVVNAYRKTKKKPGAYVFGCSPLVIPGCFIQWRESCYKKYNMFIRKAYWSSLQEGAVNPLGLGFVMATLISSYGLAVWYGSKLIVERGYNGGMVISVIMSVMIGVMSLGQATRSVTAFAEGQGAAHRMFKIIERKPDIDIDDNTGIILEDVKGDVQLKDMYFNYPTRPEFSLQVPSGTTMALVGDSAVGNRP

SEQ ID NO: 5037 - protein, 156 aa, Zea mays
  VARIANT 17: note = Ancestral polymorphism is T, Derived polymorphism is A
MAAYYNGGASTDIQASTDGLQTLYLMNPSYAGYADDGGGASTPGATSMMLLNSAVTTMTPASFAHHHQQQRRRRRAIGVSATSQGQVLLSSKYLKAAQELLDEVVSVSKVVVDDASKTAVAAAKSLAAAKKEEDCEGISTEDGAGTKSGSGSGAAE

SEQ ID NO: 5038 - protein, 291 aa, Zea mays
  VARIANT 63..291: note = Derived polymorphism lacks residues 63 to 291
  VARIANT 94..291: note = Derived polymorphism lacks residues 94 to 291
  VARIANT 136..291: note = Derived polymorphism lacks residues 136 to 291
MRAPMEGRPNPRTRSCSFTDTHRRVISFSSTGPGGEEAARRETPEETRKRLEELDALLEGLVEPKMRPPTPPPPPVLTYLRATAIRHRIEDMEQSSVFCSGFRCHIVFKASRLNESTISNRMTPNMAACIAVESISILEKLHSKGFVHGDVKPENFLLGQPGSPEYKKLYLTDLGLGEQLDMRVSMLIWGALGDTKSFLVCKKKMSTSLEMLCCYCPAPFKQFLEIVTNMKFDKEPNYAKLISLFDGLIEAPASRQIRNDGALKVGQKRGRLVADLEEDEQPKRKVPLQCG

SEQ ID NO: 5039 - protein, 132 aa, Zea mays
  VARIANT 11: note = Ancestral polymorphism is A, Derived polymorphism is V
MATKPGRAAAAVLLLTLLAALHVAAHNNNNENRNPSGGGGDPGAFFAGMPRFSGGGVPGSGRFFGGWGEGGLGYRRGVVVPPSTVCPQDGPCRGKRLTCPPRCFRTFSYGGKNGGGGGGCSFDCTERCAATC

SEQ ID NO: 5040 - protein, 150 aa, Zea mays
  VARIANT 110: note = Ancestral polymorphism is D, Derived polymorphism is Y
  VARIANT 89..150: note = Derived polymorphism lacks residues 89 to 150
  VARIANT 68: note = Ancestral polymorphism is T, Derived polymorphism is I
  VARIANT 50: note = Ancestral polymorphism is D, Derived polymorphism is V
  VARIANT 16: note = Ancestral polymorphism is S, Derived polymorphism is L
MRDCLQPVHVILGFDSVFLGRSDIKCVQLNGAMNITEKGRAIDIFTHDADYRVFLMSLKAGGVALNLTVASHVFLMDPWWNPAVENQAQDRIHRIGQFKPIKSTRFVIKDTVEERILQLQQKKQLVFEGTVGDSSDAMSKLTEADLKFLF

SEQ ID NO: 5041 - protein, 70 aa, Zea mays
  VARIANT 20: note = Ancestral polymorphism is V, Derived polymorphism is L
  VARIANT 22: note = Ancestral polymorphism is L, Derived polymorphism is V
  VARIANT 27: note = Ancestral polymorphism is L, Derived polymorphism is S
  VARIANT 43: note = Ancestral polymorphism is G, Derived polymorphism is S
  VARIANT 50: note = Ancestral polymorphism is L, Derived polymorphism is P
  VARIANT 52: note = Ancestral polymorphism is T, Derived polymorphism is M
  VARIANT 59: note = Ancestral polymorphism is D, Derived polymorphism is N
MAKEVKSTEGEGDDNYSYEVSLDEDFLTSLEYGMPPASGMGLGIDRLVMLLTNSSSIRDVIAFPVLKIQQ

SEQ ID NO: 5042 - protein, 176 aa, Zea mays
  VARIANT 61: note = Ancestral polymorphism is L, Derived polymorphism is F
  VARIANT 41: note = Ancestral polymorphism is A, Derived polymorphism is S
MKLLQALCPLVILLACSTSNASVLQDACKSFAAKIPDTGYAYCIKFFQADRGSAGADKRGLAAIAVRIMGAAAKSTASHIAALRASEKDKERLACLSDCSEVYAQAVDQTGVAAKGIASGTPRGRADAVMALSTVEDAPGTCEQGFQDLGVRSPLASEDAGFRKDASIALSVTAAL

SEQ ID NO: 5043 - protein, 404 aa, Zea mays
  VARIANT 43: note = Ancestral polymorphism is E, Derived polymorphism is K
MCAPDQASTCVSELLEQVQSLGVSTVPSSQLHRITSIPKGFGETNTHHIRSPGSTSESSKLLDVYPLELRFPLEPNKCTECPVTLTNRTDCYVGVWITPAKPHTCHGFYFSYLWWQFPSSSFFQIMDPHSTLVVTLVMDPLQLGLGLQDTEDKFQVLMIVMESQKDLENLNPSISSSTDNDMLRRVEELGGEVHRAILRAVSCDPASCKPEVVHSVPMVISAKTLENVLSIDVDLDMCWILASHRAGYVSIWNYNTQGRVTALKVTKEAGMLHSLTRTRSATTSCVYSAKFITRKKLFATGDGYGYICIYAYTMDKVKKFEAYHGKPVSLLAVHSTYPFLLSSSSCDRSIKLWAWDQQWACTRTFDAHTSGVQHVRFNPADVNTFVSVSCGGACVKFLSSVDNH

SEQ ID NO: 5044 - protein, 107 aa, Zea mays
  VARIANT 43: note = Ancestral polymorphism is A, Derived polymorphism is D
  VARIANT 39..107: note = Derived polymorphism lacks residues 39 to 107
  VARIANT 34..107: note = Derived polymorphism lacks residues 34 to 107
  VARIANT 32: note = Ancestral polymorphism is A, Derived polymorphism is T
  VARIANT 27: note = Ancestral polymorphism is Q, Derived polymorphism is E
  VARIANT 20: note = Ancestral polymorphism is G, Derived polymorphism is R
  VARIANT 16: note = Ancestral polymorphism is R, Derived polymorphism is H
  VARIANT 15: note = Ancestral polymorphism is G, Derived polymorphism is E
  VARIANT 8: note = Ancestral polymorphism is T, Derived polymorphism is K
  VARIANT 3: note = Ancestral polymorphism is E, Derived polymorphism is K
MTKGMVITEVLGSVGRVLDGPPELVLQPLRLAVEIKSEKGGLAPRNGTIKIDLETNKIMDYIKFDVGNVVMVTGGRNTGRVGVINNREKHKGSFETIHVMLGAFCYV

SEQ ID NO: 5045 - protein, 233 aa, Zea mays
  VARIANT 24: note = Ancestral polymorphism is P, Derived polymorphism is L
  VARIANT 73..233: note = Derived polymorphism lacks residues 73 to 233
  VARIANT 133: note = Ancestral polymorphism is K, Derived polymorphism is E
  VARIANT 135: note = Ancestral polymorphism is P, Derived polymorphism is R
MSTRARGGGRQLQFPVGRRRRYAPVVDAECGCRPRRPRLLSLPSFLRRPCSQLMDGVKAAATTTTTRGGVGEQYSSCASTSTAASSAATRSTGGYASAYSSDYYYCYPSRVAYGAGAAAKAQQATKKKKKEKEKRGEKAEAEADGLGVAVEKESSDPRADFRDSMVQMVLEMGLCDWDGLRGMLRRLLALNAPRHHAAILTAFAEVCAQLAGAAAAAAPPAHPSPPAPCQYRR

SEQ ID NO: 5046 - protein, 398 aa, Zea mays
  VARIANT 278: note = Ancestral polymorphism is L, Derived polymorphism is R
MGRKGGPLASIFSSSRQSKPGGTAAAAPTPPWPWPSCATKPQTASFRRQGSDNGDGRKCTTAAGRRFDDAAAAAAPGVGGRLRPPRGAAAPGDEMYKTVNSVYFDAADSCRSFFFFDDDGGGGDAADDDVLDDDGSFSTMTASEEWSEAVIRSLGRTSTGRFFFDAGPAAPVAASTNSILAASKSSKPLYEAPPSKLPRAVMSPPVAGVVLTDDDGVSEAETETEVPSSSSSLLEESVAVALDSDDPFRDFRASMHEMVAAHGLRDWAALQEMLLWYLRINGKHNHALIVGAFVDLLVGLATSSAASHSATTATTTTTTTTACCCSSTFSSSSTSSGGGGTTTTAAVAASMMDEQCGISAGASCSSVSSDLEEEAAAGERSSNNGHCTSCDALDYSCS

SEQ ID NO: 5047 - protein, 205 aa, Zea mays
  VARIANT 102: note = Ancestral polymorphism is C, Derived polymorphism is Y
  VARIANT 132: note = Ancestral polymorphism is C, Derived polymorphism is Y
MDPVWLEWFHREGAELANRRRRLDLILDDDEEEEDRVALALAPYVDRHYNDPVYYRLISPRTRPRSPSPSSHAGDDDNKRACILGLKEVVPTAKNDDNCAICLNPLADIAGPDPDHKKDDAAATSMLRAMPCSHIFHQHCILQWLHRNAVCPLCRYQLPTTFKDEDTEEEDEDEDEDEEEEEEEETNNSNSRLNQIRRRLQILYN

SEQ ID NO: 5048 - protein, 393 aa, Zea mays
  VARIANT 337..393: note = Derived polymorphism lacks residues 337 to 393
  VARIANT 109: note = Ancestral polymorphism is T, Derived polymorphism is I
  VARIANT 102..393: note = Derived polymorphism lacks residues 102 to 393
  VARIANT 7..393: note = Derived polymorphism lacks residues 7 to 393
  VARIANT 6..393: note = Derived polymorphism lacks residues 6 to 393
MIDPTERRWNPGLLPLHPHLHCSTRGAEAIYPPRSPPVAVGAAQQSILLTPPATAPGGDPFQLALTSSFICQYVIFRRGIGLDRTSNFFFMEKVDMIIARAWRRFLEKTRLQKLFSRKKTSKPKIDSKKNDDLASEIEDKELYVEHIRLETMDLSFGNLFGKVTIQEPTFEEVIVLYRRKCPKGQDDRAIHVKHFKNIPMADMELVLPEKKNPSLTRMDWVQFIVSVVIGLVTLVSSLEMPKADFWVVIAILSALAGYCAKIYFSFQQNMATYQNLITQSMYDKQLVSGKGTLLHLCDDVIQQEVKEVIIAYYILMENGKATSDDLDLQCEELIQEEFGLQCNFEVMDAVQKLERFGVITRDSIGRICCVPLKRANEIIGATTEELVMKARQS

SEQ ID NO: 5049 - protein, 215 aa, Zea mays
  VARIANT 40: note = Ancestral polymorphism is A, Derived polymorphism is T
MAAVLPLPGCLVFLKLISLHIWLSPAPAPPFSLRSDLPRARKLLRAGCLPVELPRSGLPLPVPNPNAQPCFSPRRSQVSGCLRAKLPLATPPLCSSRPAPALAPARLSVLSSARLPSPPASLRLLRSDDPCSPSHVVLSLMAHGALAHAQLISMAAASRSLLALLCLAPCCRVSAPASRAAPSSLSVVSSIPVVIALPCSLVVHPCCSLLVIASA

SEQ ID NO: 5050 - protein, 201 aa, Zea mays
  VARIANT 106: note = Ancestral polymorphism is D, Derived polymorphism is V
  VARIANT 151: note = Ancestral polymorphism is L, Derived polymorphism is H
MDPVWLDLEWFHMDGAELANRGRRPDHLDDEDDLYVALALAPYVDRHRPRTRPRSPSPSPSPPSHEEAGDDAATARNNKRACIPAYSEAILGLKEVVPTAKHDDDDCAICLNPLADIAGPDHKKDDASATSMLRAMPCSHIFHQHCIFQWLHRNTVCPLCRYQLPTTFEDEDTEVEKDEEEMDNSNSRLNQIRRRLQILYN

SEQ ID NO: 5051 - protein, 101 aa, Zea mays
  VARIANT 27: note = Ancestral polymorphism is A, Derived polymorphism is T
MASSSFFFFDAEPVYDYEPSLLPTMDACALCAKPLGRDCDIFMYRGDTPFCSEECRGEQMRLDAVRARQAARSAGRRQQQQQYSSRTESRHQETMEVSVAT

SEQ ID NO: 5052 - protein, 262 aa, Zea mays
  VARIANT 83: note = Ancestral polymorphism is Q, Derived polymorphism is R
MPQTPSTRWCPTPEQLMILEEMYRSGVRTPNAAEIQQITAHLAYYGRIEGKNVFYWFQNHKARERQRLRRRLCARHQQQYAQQQATAAAPASSPNSSATVPSLAAGGSSAGVHPAVMQLHHHQHPYATNFMPHQLGYMGQQVATVPPVLNPAAAGMVDLAAARAGGGNKATAAGSGAYGGGAGLYNSCSSNQLEEWEATDAMEHCDASCGAASGSSDEGGALQLPPCCRRPLKTLDLFPTKSTGLKDECSSSKSSSCSTSTN

SEQ ID NO: 5053 - protein, 382 aa, Zea mays
  VARIANT 20: note = Ancestral polymorphism is G, Derived polymorphism is E
  VARIANT 163..382: note = Derived polymorphism lacks residues 163 to 382
  VARIANT 183: note = Ancestral polymorphism is S, Derived polymorphism is Y
  VARIANT 240: note = Ancestral polymorphism is S, Derived polymorphism is C
MMARAAAGGKDRDGVGGGRGGLVKIRPYQIKFRGALLAKNLGSWLGKFTIGRNQALRAKEIDPKSLIVEAYEKGLMIAVIPFTSKILEPCQSSIAYRPPNPWTMGILSLLAEIYNLPNLKMNLKFDIEVLFKNLTVDILMELVNVTKFFQMPKYLLPAHVCHWCGTWKGDKICSSCKKARYCSEKHQALHWGTGHKNDCLQIISSSAASNSVLPTVGKVPANTSWPKFEIKIDYEGIFDSDSGDENNSKLLVMQRHGKPDAMMESWMDQFEADSDNKCWTSFQERVSRAPNQVLRYCREPNAKPLWALSSGCPSNVDIPSCSYCKDPLCYEFQARIIKFDVDNVVMVTGGRNTGRVGVIKNREKHKASFETIHVLLGAFCYV

SEQ ID NO: 5054 - protein, 337 aa, Zea mays
  VARIANT 148: note = Ancestral polymorphism is D, Derived polymorphism is Y
  VARIANT 81..337: note = Derived polymorphism lacks residues 81 to 337
  VARIANT 51..337: note = Derived polymorphism lacks residues 51 to 337
  VARIANT 45..337: note = Derived polymorphism lacks residues 45 to 337
  VARIANT 33: note = Ancestral polymorphism is T, Derived polymorphism is I
  VARIANT 20: note = Ancestral polymorphism is E, Derived polymorphism is K
MIVISITESATEKKEKALVEKKKSIESRKLIFTRAKQYAEEYEAQAGKQARPEKFEIPAKIKLTLQPWTSSLRGGHQEGIRDGPCPVVQPKKAEDYRNSLQQEAQAKAQALHFEDELARKRMPVTARDMHSRYIPQQDYFSEGLYTFDIGQNDLAGLQKLYDQGARKFWIHNTGPLGCLPQNIALFGKDPSQLDELHCVAKHNRAAKLFNLQLHALCTKLRAEFDGASITYVDIHTIKYSLIANYSRYGFEHATQACCGYGGPPLNYDGNVPCGHTVSLDGKMVTAKGCSDTTEFVNWDGIHYTEATNFYIASQILTVKYSDPPFVDKMSFVIKPRF

SEQ ID NO: 5055 - protein, 194 aa, Zea mays
  VARIANT 145: note = Ancestral polymorphism is S, Derived polymorphism is L
  VARIANT 93..194: note = Derived polymorphism lacks residues 93 to 194
  VARIANT 75: note = Ancestral polymorphism is R, Derived polymorphism is W
  VARIANT 66..194: note = Derived polymorphism lacks residues 66 to 194
  VARIANT 30: note = Ancestral polymorphism is G, Derived polymorphism is S
  VARIANT 22: note = Ancestral polymorphism is A, Derived polymorphism is T
  VARIANT 17..194: note = Derived polymorphism lacks residues 17 to 194
  VARIANT 16: note = Ancestral polymorphism is V, Derived polymorphism is M
  VARIANT 9: note = Ancestral polymorphism is G, Derived polymorphism is S
  VARIANT 2: note = Ancestral polymorphism is S, Derived polymorphism is L
MSLPAMLLGETVLEIVQASQFARDIVMAAGATNREPPRTPKPAPRTKKPAAGEPTPLRARRAWEKQSHRGGAATRGIDTATPPSRNCVRSQIQFKPVSSVAVGRPSVSAIHVSPKNRSWAKKAVMFLNPMFHTSTSAATDLCATSSPSKKQKRHKFLVKSPPSALGSKLRMHGKALPALSPCFTGPLPIAGADA

SEQ ID NO: 5056 - protein, 170 aa, Zea mays
  VARIANT 54..170: note = Derived polymorphism lacks residues 54 to 170
  VARIANT 56: note = Ancestral polymorphism is N, Derived polymorphism is I
  VARIANT 71: note = Ancestral polymorphism is E, Derived polymorphism is D
MAPTVMMASSATAVAPFQGLKSAASLPVARRSTRSLGNVSNGGRIRCMQVWPAYGNKKFETLSYLPPLSTDDLLKQVDYLLRNGWIPCLEFSKLGFVYRENSTSPCYYDGRYWTMWKLPMFGCTDATQVYKELQEAIAAYPDAFHRVIGFDNVRQTQCVSFIAYKPPGSE

SEQ ID NO: 5057 - protein, 318 aa, Zea mays
  VARIANT 57: note = Ancestral polymorphism is D, Derived polymorphism is N
  VARIANT 66: note = Ancestral polymorphism is L, Derived polymorphism is F
  VARIANT 193: note = Ancestral polymorphism is D, Derived polymorphism is N
  VARIANT 206: note = Ancestral polymorphism is A, Derived polymorphism is S
  VARIANT 223: note = Ancestral polymorphism is E, Derived polymorphism is K
MGVGAMEASSPAGDDVGGTGIEDLPADVLALVLRRLDGASLAAVGCASSGLRSLATDPATWRALCFAMWPSVRDLPCTGRVDGGHRALFADAFPFPCSVSPPTPPQPLPARLVSAVDLRHAGVCVLSRVVETDAASDWFLGAPFRVDALLQEGFTSPAAAAIAPADLELSWVLFDPATGRALNASSRRAVAVDRKWLTGDTVARFAVVLGGGVALDAAVTCDERRGHVREVSLRVEDADGAGVSGRDGLAAVAAAMAAPRRGCRGAAEDVARLRYEEFVRGKRARKESKARREGILDLCCSGVGAAAFLGFLVMLTFR

SEQ ID NO: 5058 - protein, 456 aa, Zea mays
  VARIANT 164: note = Ancestral polymorphism is V, Derived polymorphism is A
MYLRPNAFTVGRPTCPSRSSTASDVKRGVSCGLVVVPETSSPVSTPTPRTRLLLACCFCGSRPSDPAPPMPPQPNGGKVTPNLAMDAEATRLLNLTVLQRLDPAVEDILITAAHVTLYDFNIDLNQWSRKDVEGSLFVVKRNSQPRFQFIVMNRRNTGTDDFLACVLGRWGPMMLFSTDNLVEDLLSDFEYELQPPYLLYRNASQEVNGIWFYNQQDCEAVASLFGRILNAYAKVPPKPKVPSTKSEFEELEAVPTSAAIDGPLEPPPASAAVVLDTPDESLISYFSGAASIGSVSNAQPSGRVHPSTESIPSSHVPLIVPSAASTHQLPPSVASTASPLPVHGTNAHTSRPTNLVTPDFFAPPPSSSAPLAPPGASVVPTAPPLHPTSAASIQRSQYGTPLLQPFPPPTPPPSLNPSHSDRLTVTRDRVKDALQRLVQSDEFVDLVCRELQRSLV

SEQ ID NO: 5059 - protein, 605 aa, Zea mays
  VARIANT 128..605: note = Derived polymorphism lacks residues 128 to 605
MGLEPLDRQFPCLLQAQAKQHRTAAPPLPFLFLRILLPFRRPSLFSLVATKTTDADADALRQVPGSVGSFAGEEHPPGDPVLFWCGFIAEVLLWDFPVAKMIRLPMYAAFSLLATASAAYYAFSSREQFYPAMVYLSTSKICFVLLLNTGLVAMCVAWQLARRLFLGSLREAEVERLNEQSWREVIEILFAVTIFRQDFSVSFLAMVAALLLVKALHWLAQKRVEYIETTPSVPLLSHIRIVSFMVFLLTVDCLFLSNSLRSLIQKREASVAIFFSFEYTILATSTLSTFVKYIFYVSDMLMEGQWERKAVYTFYLELISDLVHLSLYMLFFIAIFLNYGVPLHLIRELYETFRSFRIRIADYIRYRKITSNMNERFPEATSEELDASDATCIICREEMTTAKKLLCGHLFHVHCLRSWLERQHTCPTCRAPIVPADNGRAASSRQHGAQAGVQPAAGTATPSSEGAPGENMSRRQAKLEAAAAAASLYGRSFVYPPANTLNSRSGSPQPTSSAPQSEASSSNHQSQKDQETQLQNSSDGLVPLPFSADGVVGSGTSTRDLENSLQKAQENFIKSQIEMLQIQLQMVQRGAAGLSSSENTEHTED

SEQ ID NO: 5060 - protein, 299 aa, Zea mays
  VARIANT 216: note = Ancestral polymorphism is K, Derived polymorphism is T
MLSRDKQVMAAPMAAADGGLRRLFEKPLPENPTLLEALSAWNRNVHHPSSKPIDTASFTEIFGELHFQEKQQPDRGALLPPSPSPPPTPLPPSRTLSWLDIAAEAEKSKDDSSLDALLRPKPATTVATVKRSASFCTKKGSSASLLLCTEGLGSESTVDADDMFKDGDAEAEAEAAAAALKGTDTADGSDAEEAVKEERQPKTFPPPIPSIGRGGKPYVCFRSFREDGRFVLLEVVIPGKELLQATREGGRLRLQFANAAAAAAGGVGVVDEAVHGGDDDGDPRGKNACIDDDDHDDER

SEQ ID NO: 5061 - protein, 151 aa, Zea mays
  VARIANT 74: note = Ancestral polymorphism is A, Derived polymorphism is T
MDLGLSVAGRTGSGGGRGGWRGSGGGASAAAWTRLVSSGVEDELVAASGGGGGGGGGRAGARAGGLPLGHFLEACFLCRKPLPSNRDIFMYRGDIPFCTEDCRREQIEMDEEMERKESKPKNVAPRGAPSPKDVDSPPRPPKARAGSILAG

SEQ ID NO: 5062 - protein, 442 aa, Zea mays
  VARIANT 325..442: note = Derived polymorphism lacks residues 325 to 442
MCVVPCSSSSSTILLLLLICSLVLLCCSGSGSGDLHNYFEPYTLGSLFNETDGHLFHVNPNTTIGNVSAGGLQGSHTTNDLPFNLSDKGWFFLPQPIFLWKYTYRDDGVSFHEASFDITFTISGIYQPKSSLVFAIQPSLDDDVGYIKYPIPMSPPQIGTSASHTSPVSGTGGSHVSAQASVVYGTILDPRNASLVQIDIVESPGSSSTTGSRYSVWVGYDHVEHSISVAVDSTHGTPSTATANGVLRLSSIMPQFASLGFYSTMGQLQLLGDWSLTAERLPYSYYYPSSSNSTSTSTGNNGKTIILSSVLGSAAAVAITATVAYVYFNSKYRKWKKEQDKLAKTMQRLPGVPTQVDYADIRKATKNFHDTTKLGKGGFGAVYRCTLPAASLRTGRGMEVAVKKFMRDVEDQRYDDFLAEVSIINRLRHKNIVPLVGELTNL

SEQ ID NO: 5063 - protein, 369 aa, Zea mays
  VARIANT 150: note = Ancestral polymorphism is Y, Derived polymorphism is S
MRSGYKPIELDGKCSGRRCWSYNKGEPLLIYEYMTNGSLDQHLFRRGSTGQQQEDDTSVSQWHTRYGIARDIATGLHYVHHEHEPMVLHRDIKASNIMLDSTFRARLGDFGIACTVAVNRSSVTGVAGTFGYIGPDYAMRHKATRQTDIYAFGVLILEIVTGRKNGDVVPDDDHITDWVWRLHREGKLLEAAHGVLTAEDDHRELGLGLDDDVVDEAERLLLLGLACTNPNPSDRPSMVEVVQVLTKSAPPPDVPLERPPFVWPPVDWRSRNSVYSTAVSCWDGSSAASTDTASAGIWNGGDTSTSGHHVTIDRQSDRRPEAPSSTSGHSRAHAPDHCRATLSTARVPSIPASSVLPATSTPSTSSAPS

SEQ ID NO: 5064 - protein, 368 aa, Zea mays
  VARIANT 40: note = Ancestral polymorphism is A, Derived polymorphism is S
  VARIANT 236: note = Ancestral polymorphism is R, Derived polymorphism is T
  VARIANT 242: note = Ancestral polymorphism is R, Derived polymorphism is T
MARPARKALIGAPSAARSRGLRRHAFPRSAVALFLALLVALSLAVLYRAAVSRSLGTSWSWGWDSLALPSFATSQEEEGAEGDDLDSEDLKLERVLKKASMRDNTVILTTLNAAWASPGSLIDLFIDSFRSGVRTNLLLKHLVIVAFDWKAYEECVKIHPYCFALGTDGVDFSEEKRFLTSGYLEMMWRRLDFLRLVLEKGYNFIFSDADIMWFRNPFPHFYPDVDFQIACDHYVRNATDLRNIANGGFSYVKSNERSIEFYSFWYSSRLRYPGYHDQDVFNAIKHDPYIVHIGLTFKFLSTKYFGGFCEPSRDLNEVCTMHANCCIGLQSKIHDLKIMMEDWRSYLSLPPNLKRLQISTWRVPQNCR

SEQ ID NO: 5065 - protein, 300 aa, Zea mays
  VARIANT 292: note = Ancestral polymorphism is W, Derived polymorphism is G
  VARIANT 274..300: note = Derived polymorphism lacks residues 274 to 300
  VARIANT 251: note = Ancestral polymorphism is P, Derived polymorphism is Q
  VARIANT 234: note = Ancestral polymorphism is G, Derived polymorphism is D
  VARIANT 222: note = Ancestral polymorphism is A, Derived polymorphism is T
  VARIANT 221: note = Ancestral polymorphism is A, Derived polymorphism is T
  VARIANT 219: note = Ancestral polymorphism is S, Derived polymorphism is Y
  VARIANT 187: note = Ancestral polymorphism is E, Derived polymorphism is K
  VARIANT 183..300: note = Derived polymorphism lacks residues 183 to 300
  VARIANT 140..300: note = Derived polymorphism lacks residues 140 to 300
  VARIANT 138..300: note = Derived polymorphism lacks residues 138 to 300
  VARIANT 118: note = Ancestral polymorphism is S, Derived polymorphism is L
  VARIANT 114: note = Ancestral polymorphism is V, Derived polymorphism is A
  VARIANT 109: note = Ancestral polymorphism is P, Derived polymorphism is S
  VARIANT 105: note = Ancestral polymorphism is F, Derived polymorphism is C
  VARIANT 98: note = Ancestral polymorphism is P, Derived polymorphism is L
  VARIANT 93: note = Ancestral polymorphism is W, Derived polymorphism is R
  VARIANT 74: note = Ancestral polymorphism is S, Derived polymorphism is L
  VARIANT 71: note = Ancestral polymorphism is A, Derived polymorphism is T
  VARIANT 63: note = Ancestral polymorphism is D, Derived polymorphism is A
  VARIANT 57: note = Ancestral polymorphism is G, Derived polymorphism is S
  VARIANT 28..300: note = Derived polymorphism lacks residues 28 to 300
MNPRYARSQQPPPPSPCVSVMETNRSARLQARFALRTSPRRVDDSDDDSERICRGRGGEEGEDLKLLVDWAVNLGFHLVQLLPINDTSVHGMRWDSYPYSSLSVFALHPLYLRVQALSDAIPVLRYTFVMLSNLFIEEIQQAKKQLDKKDVDYEAALSTKLSIARKIFNLEKEKVLNSSSFQQFLSENELDKLISEGTLHHDVIRFHYYVQYHLYIQLSEAATYARKKNVILKGDLPIGVDRNSVDTWVYPTLFRMNTTTGAPLDYFDKNGQNWGFPTYNWEEMSKDNYGWWRARLTQVI

SEQ ID NO: 5066 - protein, 279 aa, Zea mays
  VARIANT 134: note = Ancestral polymorphism is G, Derived polymorphism is R
  VARIANT 114: note = Ancestral polymorphism is G, Derived polymorphism is A
MVSSARALIGLLVAAASLAVALSDGGGMAAPVYGYAAGSPNGPENWGKLSPAYKLCGEGKQQSPIDIVTKQAVPAATLDTLNRTYGATNATLINDGHDITLALEGKVGTVTVNGKAYSFEKLHWHSPSDHTINGQRFPLELHLVHRSADGALAVIGILYQLGAPDSFYYQLKRQLGEMAQDRCDFAEEEESRVEAGLIHLRSLQKRTGSYFRYTGSLTVPPCTENVVWSVLGKVRQISQDQLQLLKAPLPGSDARPTQPLNGRTVQFYNPPNSTISFQI

SEQ ID NO: 5067 - protein, 114 aa, Zea mays
  VARIANT 78: note = Ancestral polymorphism is S, Derived polymorphism is P
MGNCLVIQDRKEIKIMSMGGGGGEVLKMPSPPGSLSKAADDVIVDADAAAAGAAAVVRVKLVISKQELKKMLDREGVSLDDVVSSLVLRNRELEEVCCGGWRPALESIPEGSDL

SEQ ID NO: 5068 - protein, 747 aa, Zea mays
  VARIANT 121: note = Ancestral polymorphism is C, Derived polymorphism is Y
  VARIANT 120: note = Ancestral polymorphism is R, Derived polymorphism is C
MAQCFQISGVAGAVAVNAAPHAELNCNVVNSECSSVSRLGAPGMSGLKAQYLSRAAARSEAKDTPAPAMHASLPKGLTAITATQQPAIPSYLKALQSPAKAAHQQPKPPQPITAKAVCYRCLSLEHLVRACRDPVRCRNCRGYGHRSHDCKMPISQTLSPASHHRKTPTIHVPASRLPVHAVPFNYPAAKASSSTPPTPPSSPATQTYLDAYAPKNMLASSSSCPPDFMLPSAGASKATCMEGPLGLGRAALPKAHCSSPPRRMVDICIDSRNGKAPVEPVFAPSLSPSLGRRSPPSGLESPVPQSAEEFIQNILRTAAPGIQFQMLPSSRGIKLLRFYSRADRDEVRLMSPLLADGLQLKLECPEETDNRFFRQPQWLTFAMIVDFPTEHWSEASIRRCFGACCEVAEVDPRCLTCDNFGPIRVLLELNHYLDLPSEIWVTTTDGVSRSGCIAQVLPLRVWPRADQLGPDGRLRRFFQHMPPPPAPPMLSEVPAALPHVPQQQNASPVRNAQQQANTTTSQTSSAFSTAQLLCLSAVLAQLTGPRTTETQSQLPPQQNTTPQSHCSSKRQPTSPTTFNATRHKRAGRPPRNNVPKPIQRKSSRLAAKANRNFVDMTNKAVRLKELRDTLQGCSTAVKGEVQKKGLLSFNGADLDTSSSQACSRGRIGVLSCECCWGGAARQGMIVCTFVAHGAVGTSVCTSLCVPWGSVFGSFVFSLLCAFIGLCFLVVPVSVCFSMMVSMCPKNE

SEQ ID NO: 5069 - protein, 769 aa, Zea mays
  VARIANT 155..769: note = Derived polymorphism lacks residues 155 to 769
  VARIANT 216..769: note = Derived polymorphism lacks residues 216 to 769
MDQTRLDQLLMLRNIRGKEIRKDGCSTIDLTNFATQDVAAMKIILSLLIWLMPRMLSWQANDIVATREVLTPGSLHKTVGHTPKHTRQRIAYFSERYKNITPVEREFRRECLRLYNRTPRRKEAKVDDNRKRRVMKADNLNQASIAREDPTYTPEFVHPIADATEPDGSTVYDLVIPEFVKTPLFPISTQTEDFTSPDMSIIPLKRKHHVPCGERQAILAHRNQQFEAAIARKVATSIEDTSGDACEGDDWTRCHTTMKITNNGDDGVIFEDDDDENEGYLFVGQYEDTDEDIEIDGTQDESTATDVLDSYDKVYNNILEETHMLKTVPNCEANLDGMQISQRLEYPWTKWMHTLRHIGQVMQMMKMRIRPGVFNPILHGKRLFQQFAVDTYIKIESSRLDFICKNQDRLRANLYQGLVDSMLDGDIRAEKVGKRTVLWTSFIGGHRDMRRRYMDAMTLRKYKLTCPEQYDLLISAEIPSNKYPELRKMVIKHMMHGSCGSLTLTAHAPRVVNHARIITLGLSVTQPCKGRIRTLFTDVMTMIVKKRSEGANWTIDGVVPYNPYLLRLFNCHINVEACGSIKAIKYLFKYIYKGHDRVSVVMRNASKADEDVDEIKQYRDAWWVTPPEALWRIYGFDLGQIPPPVMQLQLHLPNMHMVAFHERQMAERVLNRPGVDKSMLTSYFEANRLHEEARGIIYHDFPEWYTWQSAYNREAASKSRLRKKAYIQQLESCRLKLSQMEQDMQRARSQGIFLGVSTMQFLRQSPIFI

SEQ ID NO: 5070 - protein, 238 aa, Zea mays
  VARIANT 103: note = Ancestral polymorphism is L, Derived polymorphism is P
  VARIANT 102: note = Ancestral polymorphism is G, Derived polymorphism is D
  VARIANT 91: note = Ancestral polymorphism is R, Derived polymorphism is S
MGISKVTGISATAFLVTSVGLYQLGMRIIVLPFLATSIVASVVTVASHDAINLPWILGKNSVGRFPLWSVILFGPFLTLARTYAMVKRYMRKESVYDKIVDGLYLGGWPFLLKHLPPGNPSVIDCTCELPRISFVPADEYLCLATWDTRAPTPYQIEKAARWACGKRSEGKPVYVHCAFGHGRSACVVCAILVALGIAENWKEAENIIRERRKIKMNALHRKTLEEWSKQRDSQKKAK

SEQ ID NO: 5071 - protein, 340 aa, Zea mays
  VARIANT 261: note = Ancestral polymorphism is S, Derived polymorphism is P
  VARIANT 177: note = Ancestral polymorphism is H, Derived polymorphism is D
  VARIANT 124..340: note = Derived polymorphism lacks residues 124 to 340
  VARIANT 70: note = Ancestral polymorphism is F, Derived polymorphism is I
  VARIANT 65: note = Ancestral polymorphism is A, Derived polymorphism is V
MLANASISSSPSHDNPRHRLLYLRLPYSVNGTSDSDPRQRTMLRLRVPNDNKLPDDGSLLAGFRASLRAFLLAHKHRRRGYNNVAGVMSDLAGYLGRPRRRRRFPSCAVVGNSGILLGSGRGPQIDAHDFVIRLNNAPVAGFARDVGTRTSLTLAHSFVLHRCAVPSAATTPGCACHPNGRAAPLAMYVSRPEHLLHVLACNATSTPAAPFRLLLTDARLDALCARVAKYYSLRRFVAATGEPASVWTRRRDGRDPYFHYSSGLQAVVMALGVCDRVSMFGFGKKAGVKHHYHTNRSKETEVHDYEAEYQFYGDLQARPEAVPFLGEAPGFVLPPVKLYW

SEQ ID NO: 5072 - protein, 367 aa, Zea mays
  VARIANT 164: note = Ancestral polymorphism is K, Derived polymorphism is M
  VARIANT 173..367: note = Derived polymorphism lacks residues 173 to 367
  VARIANT 181: note = Ancestral polymorphism is I, Derived polymorphism is T
  VARIANT 204: note = Ancestral polymorphism is T, Derived polymorphism is N
  VARIANT 210: note = Ancestral polymorphism is M, Derived polymorphism is T
  VARIANT 220: note = Ancestral polymorphism is Q, Derived polymorphism is L
MEVEAAGPDRPEPPSPAKGTGENGAATTLQKVYRSYRTRRKLADSAVVVEELWWQALDYVRLEHSTVSFFDEPKPETAASRWNRVSLNASKVGQGLSRDGKALKLAFQHWIEAIDPRHRYGHNLHFYYDEWCQSQAGQPFFYWLDVGEGKDLDLPECPRALLKMQCIRYLGPQEREHYEYIIKEGKVIHKQSGEPLDTRGPKGTKWIFVMSTAKKIYAGQKQRGVFQHSSFLAGGATIAAGRFTAENGVIKSIWAYSGHYKPSAENLLNFMNFLEGNGVDLKEVEVRSSTREDYNEDPVPNDSQKFASATMEPTNLPQLVPPLNTTQGNEGDNAPKIKLGQPTKGPCRAVCRAPEPPKSPRRRFLRG

SEQ ID NO: 5073 - protein, 323 aa, Zea mays
  VARIANT 200: note = Ancestral polymorphism is P, Derived polymorphism is Q
  VARIANT 135: note = Ancestral polymorphism is G, Derived polymorphism is S
  VARIANT 66: note = Ancestral polymorphism is P, Derived polymorphism is T
MVSASSLLLPTSVRDLASCVSDGAVRVACTSPASTLTVSSSSSTTSSPPPATLSVAISYRATPQAPSSPPLLLRLTWSHSRHGPPTLSFAGPTASSPAVLLRRRRGTYCLPSSTSTSTHIPPLALFWDLTAARYSPASSPSPEPASGFYVVAVASAEVVLAVGDLAAEFIKAKFEGQIPWARSILPVSRTDRVVAAAPRPGGAVHTARVRFGEGAPEHEVAVGCCRAGAGRPGEEELWVSVDGKRAVHARRLRWNFRGNQTVFVDGAPVDVLWDLHGWWFQDPPGCAVVMLRARSALESRLWLEEEARAPGFALLVQALRTPP

SEQ ID NO: 5074 - protein, 366 aa, Zea mays
  VARIANT 58: note = Ancestral polymorphism is E, Derived polymorphism is V
  VARIANT 73: note = Ancestral polymorphism is M, Derived polymorphism is L
  VARIANT 130: note = Ancestral polymorphism is H, Derived polymorphism is Q
MALMQESSQDLLEAHDELFHHCLCFAKSLALAVAQDLRIPDAIHHHGGGATLHQILAEAALHPSKLRALRRLMRVLTVSGVFTVQYSSTVDASDGADVVYRLTAASRFLVSDSDEAGTASLAPFANLALHPIAISPHAVGICAWFRQEQHDPSPYGLAFRQIPTIWEHADNVNALLNKGLLAESRFLMPIVLRECGDEVFRGIDSLVDVGGGHGGAAATIAAAFPHVKCSVLDLPHVVAGAPSDACVQFVAGNMFHSIPPATAVFFKTTLCDWGDDECIKILKNCKQAISPRDEGGKVIIMDVVVGYGQSNMKRLETQVMFDLVMMAVNGVERDEQEWKEMFIEAGFKDYKIRPVAGLMSVIEVYP

SEQ ID NO: 5075 - protein, 126 aa, Zea mays
  VARIANT 33: note = Ancestral polymorphism is A, Derived polymorphism is T
  VARIANT 39: note = Ancestral polymorphism is C, Derived polymorphism is R
  VARIANT 74: note = Ancestral polymorphism is C, Derived polymorphism is R
  VARIANT 115: note = Ancestral polymorphism is G, Derived polymorphism is V
MVGLVGGSTARAEHVVANAGGEAEYVRRMHRHAPTEHQCTSTLVKHIKAPVHLVWELVRRFDQPQRYKPFVRNCVVRGDQLEVGSLRDVNVNPGLPATTSTERLEQLDDDLHILGVKFVGGDHRLQ

SEQ ID NO: 5076 - protein, 358 aa, Zea mays
  VARIANT 59: note = Ancestral polymorphism is P, Derived polymorphism is T
  VARIANT 40: note = Ancestral polymorphism is A, Derived polymorphism is S
MQMEGREGIAVVAAGGGHGSGQHGMFGAADIAMAEAHEAAAKGYQYQSSPSSPSTSLTPSPPPAAAGHAGDATAAPLAWSLGGGMPSEPAGDSGVRAAGQSQSEHANNMSSERRRGRPRGSGRRQILATLGEWYALSAGGSFTPHVIIVGTGEDVAARVMSFSQKGPRSVCILSANGTISNVTLRQPGSSGSTFTYEGRFEILQLMGSFTMAEEGRKRTGGLSVSLAGPDGRVVGGVVAGMLRAASPIQVIVGSFLPNSLKQHQRRMSAQQQLSPVPALPEPEAPPPVLTAATPISLAGPGNGFHDAPPPSAAPPQPHASAMNLNATGFPVAGWPASSPQQMVYRASPDINVSLTPQE

SEQ ID NO: 5077 - protein, 246 aa, Zea mays
  VARIANT 62: note = Ancestral polymorphism is S, Derived polymorphism is R
  VARIANT 141: note = Ancestral polymorphism is G, Derived polymorphism is D
MGLCYGKSAAVQEPAVAEENNKADGAAAGRGDGPPASPAKVSRTPKQLKLSFYLPSPLPPSSYKGSPANSSVASTPARDGFKRPFLSPSPAKHIRALLARRHGSVKSISEGGEPDLGLDKSFGYSRHFAAKYDLGREVGRGHFGFTCAAKCKKGELKGEDVAVKVIPKAKAALEEILYQFEEKLQAERKEAARKQEELQAQLQAQHVALEENQSLLCQTPEEVKGMHTKFEETNALLRAVLKLQKD

SEQ ID NO: 5078 - protein, 341 aa, Zea mays
  VARIANT 4: note = Ancestral polymorphism is P, Derived polymorphism is L
  VARIANT 6: note = Ancestral polymorphism is A, Derived polymorphism is E
MAMPAALLLFLLVLSAFEAGELPRCSAAAAGKPAVLVHDDLSPVQDTSPIATVPSTNPSPAIITVPSTNPTITIPSLNPLPTPITAPSTNIPSPSTMLPPVPVIYPLPTPSTSSPPAVPVTNPAVTTPSTSPPSTPTPFNNPPLLNPTPTPAPTVTAPAASGREVWCVAKAAGSSEAALQNALDYACGIGGVDCSAIQPSGSCYYPNTIQAHASYAFNTYYQRNPVSSSCDFGGTAMLVTANPSSGSCVFASSLPSSSSSTVGYDPASTATPSSPSSGSDSGAPVLNASGAGSSESSDFGFDIPGAVNLGSGWRSVSPPNWPWAALVWILVALCVHKEGMV

SEQ ID NO: 5079 - protein, 454 aa, Zea mays
  VARIANT 228..454: note = Derived polymorphism lacks residues 228 to 454
MVRFRCETTEDYPRHLNLQVQKLTPSSLPTIAMADDAAAAAFAPSPSPPSPVAQPLPDLSPPPPFSPPAGTPASGAQTPSLPDTPASLDPDTPFSDATPTPADASDAALASDDGITNPSGGTAGKHMTLAPPAPPAKKPSKKKGGNSVWTRPASRKGKKKARQPGGLGHGSGGPAGAARGSNPRPNAGGEEEFLLVPATRLAAERSDDAPGQPVLLSRVFKSERIELSEDRLTAASTKGFRMVRATRGVAAGAWYFEVKVVHLGPTGHTRLGWATNKADLQTPVGFDAYGFGYRDVDGAKVTKAWRDKYADEGYGEGDVLGFYISLPDGERYEPKQPDLIQYKGMPFHVQVPKEEQKTPDPVPGSEICYFKNGVCQGSAFKDIPGGRYFPAASLYTMPNEPNCVVKFNFGPDFEFFPQDFGSLPVPQPMSEVTHQALEVKNEGPTENGIAEKTS

SEQ ID NO: 5080 - protein, 73 aa, Zea mays
  VARIANT 38: note = Ancestral polymorphism is R, Derived polymorphism is S
MIEVVLNDRLGKKVRVKCNEDDTIGDLKKLVAAQTGTRPEKIRIQKWYNIYKDHITLKDYEIHDGMGLELYYN

SEQ ID NO: 5081 - protein, 101 aa, Zea mays
  VARIANT 23: note = Ancestral polymorphism is D, Derived polymorphism is N
  VARIANT 25: note = Ancestral polymorphism is P, Derived polymorphism is L
  VARIANT 26: note = Ancestral polymorphism is G, Derived polymorphism is R
  VARIANT 32: note = Ancestral polymorphism is R, Derived polymorphism is C
  VARIANT 45..101: note = Derived polymorphism lacks residues 45 to 101
  VARIANT 46: note = Ancestral polymorphism is L, Derived polymorphism is V
  VARIANT 56: note = Ancestral polymorphism is R, Derived polymorphism is S
  VARIANT 94: note = Ancestral polymorphism is R, Derived polymorphism is G
MKFRCIKVWLKGDKAGEAETFVDLPGWPDNIRLGSNGHFWIAVLQLRSPWLDFITRWTFTKRVVASFSALSEWSKGTATGAMVAQVSEDDTILRVLDDSQG

SEQ ID NO: 5082 - protein, 239 aa, Zea mays
  VARIANT 210..239: note = Derived polymorphism lacks residues 210 to 239
  VARIANT 78: note = Ancestral polymorphism is D, Derived polymorphism is V
  VARIANT 59: note = Ancestral polymorphism is P, Derived polymorphism is L
  VARIANT 31..239: note = Derived polymorphism lacks residues 31 to 239
MGQQPKPPASPSPPPCPPSDPDPGSGFDPIEEWLVDFDPAMLSELEAKGPELAEQAAVPHTLETAAQKSFDLEFGVKDQKVEVVSSELDGLLALDHLLVSGIDDLAMREDIPEKAVAMKMAATPPAAADTEMNATISVEVESEGGKEGQEAPATPADAEMMNTMVSVEVEAQGGKEGQESSDEESELESSEDDDELSSSEDSSSSEDEKEQGVNNDEESSEASSSEEEGREVRRHGGNW

SEQ ID NO: 5083 - protein, 243 aa, Zea mays
  VARIANT 25..243: note = Derived polymorphism lacks residues 25 to 243
  VARIANT 34: note = Ancestral polymorphism is L, Derived polymorphism is I
  VARIANT 39: note = Ancestral polymorphism is R, Derived polymorphism is H
  VARIANT 41: note = Ancestral polymorphism is R, Derived polymorphism is S
  VARIANT 48: note = Ancestral polymorphism is G, Derived polymorphism is V
  VARIANT 65: note = Ancestral polymorphism is P, Derived polymorphism is L
  VARIANT 67: note = Ancestral polymorphism is R, Derived polymorphism is Q
  VARIANT 72: note = Ancestral polymorphism is R, Derived polymorphism is H
  VARIANT 95..243: note = Derived polymorphism lacks residues 95 to 243
  VARIANT 96..243: note = Derived polymorphism lacks residues 96 to 243
  VARIANT 107: note = Ancestral polymorphism is R, Derived polymorphism is H
  VARIANT 108: note = Ancestral polymorphism is G, Derived polymorphism is D
  VARIANT 116: note = Ancestral polymorphism is G, Derived polymorphism is S
  VARIANT 117: note = Ancestral polymorphism is C, Derived polymorphism is Y
  VARIANT 119: note = Ancestral polymorphism is V, Derived polymorphism is M
  VARIANT 120: note = Ancestral polymorphism is T, Derived polymorphism is I
  VARIANT 121: note = Ancestral polymorphism is V, Derived polymorphism is I
  VARIANT 125: note = Ancestral polymorphism is P, Derived polymorphism is L
  VARIANT 127: note = Ancestral polymorphism is G, Derived polymorphism is R
  VARIANT 132: note = Ancestral polymorphism is Q, Derived polymorphism is R
  VARIANT 139: note = Ancestral polymorphism is A, Derived polymorphism is T
  VARIANT 141: note = Ancestral polymorphism is E, Derived polymorphism is K
  VARIANT 150: note = Ancestral polymorphism is T, Derived polymorphism is I
  VARIANT 157: note = Ancestral polymorphism is R, Derived polymorphism is C
  VARIANT 180..243: note = Derived polymorphism lacks residues 180 to 243
  VARIANT 186: note = Ancestral polymorphism is R, Derived polymorphism is W
  VARIANT 196..243: note = Derived polymorphism lacks residues 196 to 243
  VARIANT 207: note = Ancestral polymorphism is D, Derived polymorphism is Y
  VARIANT 221..243: note = Derived polymorphism lacks residues 221 to 243
MRASGPEAFADCLTEVLCPDEDLVWIHDYHLLALPTFLRKRFPRAKVGFFLHSPFPLSEIFRTIPVRDDLVRALLNADLVSFHTFDYARHFLTACSRLLGLDYQSKRGYIGIEYYGCTVTVKILPVRIDMGQLRSVVSAPETEDAMRRVTEAYKGRRLMDGVDDVDLFKGIGLKFLAMEQLLVEHRELHGRAVLVQIANPARSEGRDVQGVQDKARAISAQVNARFGTPGYTPIVLIDAPVTL

SEQ ID NO: 5084 - protein, 185 aa, Zea mays
  VARIANT 1: note = Ancestral polymorphism is I, Derived polymorphism is M
  VARIANT 83: note = Ancestral polymorphism is V, Derived polymorphism is G
  VARIANT 91: note = Ancestral polymorphism is Q, Derived polymorphism is K
  VARIANT 105: note = Ancestral polymorphism is W, Derived polymorphism is C
  VARIANT 107: note = Ancestral polymorphism is E, Derived polymorphism is K
  VARIANT 122: note = Ancestral polymorphism is T, Derived polymorphism is I
  VARIANT 129: note = Ancestral polymorphism is P, Derived polymorphism is H
  VARIANT 159..185: note = Derived polymorphism lacks residues 159 to 185
MYLFVSADGEELPAAHSCGQVDDDGDQWYEIKAAFKLEKQPSKVTAYVQGPPVGVDLRVMDFYIYAVGENRQEFFQFMTLVIVSLAVDKNQWVNCGQVDADGDQWYEIKAAFKLEKQPSKVTAYVQGLPAGVDLRVMDFYIYAVGENRQASIRRHDTFSGSSCHCSKDRLDLYGIDSARAEGERA

SEQ ID NO: 5085 - protein, 150 aa, Zea mays
  VARIANT 87: note = Ancestral polymorphism is R, Derived polymorphism is C
  VARIANT 80: note = Ancestral polymorphism is G, Derived polymorphism is S
  VARIANT 75: note = Ancestral polymorphism is A, Derived polymorphism is T
  VARIANT 74: note = Ancestral polymorphism is A, Derived polymorphism is P
  VARIANT 56: note = Ancestral polymorphism is E, Derived polymorphism is K
  VARIANT 46: note = Ancestral polymorphism is D, Derived polymorphism is N
  VARIANT 44: note = Ancestral polymorphism is T, Derived polymorphism is I
  VARIANT 39: note = Ancestral polymorphism is R, Derived polymorphism is C
  VARIANT 15..150: note = Derived polymorphism lacks residues 15 to 150
MPHASFSAVVQLSLSATSATEFLCISSSFRRIGLAFQLCLNPLIGNTEWLVINEAETEVEAPVPVPTHHKQLLAATFYLSMLNDASRNRAYCLAIDATVTNTTSHVLDIGSKKAKGPKLMFGKGDEVEGFDNSKSKFKDDEQDGNEDEDE

SEQ ID NO: 5086 - protein, 434 aa, Zea mays
  VARIANT 50..434: note = Derived polymorphism lacks residues 50 to 434
  VARIANT 144..434: note = Derived polymorphism lacks residues 144 to 434
  VARIANT 181: note = Ancestral polymorphism is P, Derived polymorphism is S
  VARIANT 195: note = Ancestral polymorphism is D, Derived polymorphism is E
  VARIANT 225..434: note = Derived polymorphism lacks residues 225 to 434
  VARIANT 285..434: note = Derived polymorphism lacks residues 285 to 434
MFLFEGPFGSVLHIADCLSALTPHLARRIDYLFLARCSLRFPATQDSIRQAFGSKIYVDREKNSDWHQRLAHVTPEILAANDAAPSTRFHVLSFSRLSEQATEILALARAARQLKPLIIRPSSQWYAYYDPPPPEEASTQQQQQKPVLTEAMCDELGVWHVCLSMHSSREELEQALGILKPKWVVYTMSSCMAVELSYAVLLTVEAVEKLEEVFNACAPSNDISQALEEGAEATVVDFENYEYESVEIIGDDELEAKDFANELEFCRHSKPIQVVGLTEAATREQNPVSDESELLNDIKSDGGVERLNMIEGTERLNWGAQEQNLNARARLTVGVCRHKVIADKGTEAIEGMVSAAHVPEDGTTVTLGTGRSTDHQYSERASDSSTTFGSSKGLNASLRRLYRSMNVLVSRPLPSLVQLMVASKRPRVSQTAQS

SEQ ID NO: 5087 - protein, 885 aa, Zea mays
  VARIANT 56: note = Ancestral polymorphism is A, Derived polymorphism is T
MVASPWPSPPSPPPPAVASHMAVTQAFADALRSCGARGALAGARALHGRLVAVGLASAVFLQNTLLHAYLSCGALSDARRLLLMDIAHPNVITHNVMLNGYAKLGRLSDAVELFGRMPARDVASWNTLMSGYFQSRQYLVSLETFLSMHRSGDSWPNAFTLACAMKSCGALGWHSLALQLLAMVQKFDSQDDSEVAAALVDMFVRCGAVDLASRLFVRIKEPTMFCRNSMLAGYVKTYGVDHALELFDSMPERDVVSWNMMVSALSQSGRVREALDMVVDMQSKGVRLDSTTYTSSLTACARLSSLRWGKQLHAQVIRNLPHIDPYVASALVELYAKSGCFKEAKGVFNSLHDRNNVAWTVLISGFLQYGCFTESVELFNQMRAELMTLDQFALATLISGCCSRMDLCLGRQLHSLCLKSGQIQAVVVSNSLISMYAKCDNLQSAEAIFRFMNEKDIVSWTSMITAYSQVGNVAKAREFFDGMSEKNVITWNAMLGAYIQHGAEEDGLRMYKVMLSEEYVRPDWVTYVTLFKGCADLGANKLGDQIIGRTVKVGLIIDTSVANAVITMYSKCGRILEARKVFDFLNVKDIVSWNAMITGYSQHGMGKQAIEIFDDILKRGAKPDYISYVAVLSGCSHSGLVQEGKFYFDMMKRAHNISPGLEHFSCMVDLLGRAGHLTEAKDLIDDMPMKPTAEVWGALLSACKIHGNNELAELAAKHVFELDSPDSGSYMLMAKIYADAGKSDDSAQIRKLMRDKGIKKNPGYSWMEVDNKVHVFKADDVSHPQVLAIRKKLDELMEKIARLGYVRTDSTRSEIHHSEKLAVAFGLMTLPTWMPIHIMKNLRICGDCHTVIKLISTVTGREFVIRDAVRFHHFNGGSCSCGDYW

SEQ ID NO: 5088 - protein, 964 aa, Zea mays
  VARIANT 756: note = Ancestral polymorphism is T, Derived polymorphism is I
  VARIANT 714: note = Ancestral polymorphism is L, Derived polymorphism is P
  VARIANT 521..964: note = Derived polymorphism lacks residues 521 to 964
  VARIANT 107..964: note = Derived polymorphism lacks residues 107 to 964
MAPPPPSLLRELLTADGFKNRRKPLDSSAPPTSRAASMPLQHRRPGKPPSRSQSDVLTRSRLRQANADADDGSRDAAGAERRRAATATRGLSASLTSVRKVHSNKGEGDSGSGAGARRGASASDPSAVPALDESALTALISLAAGPLKRFALDEAFRASLRAGCASCLGDSSHRAVLDLRVQSQTVERAAREGLDPRELKRASLRLHEVASLQGKDADAVTAAGVPHTRLAACAHLYMSAVSKLQKRDHSAAVHALEAFCLAPREARTVLLPALWDRLFRPGLSHLRTWRDRESASASADERVEEVEKVFLGVLDDGTRALACYYRDWLLGRTDAMALPDVPAPPSTVHPSTPRCSASTSYDISSEVMFGSGSSSLAKFAYDDIMRASEEIEEEEEAVYPEAAAEAVTVLHQDQERDGAGGEERSYTPTPLAEENEPVPNNVDRETFDPHVEQEPNKQSDARASHPPISDNSAIDLLTLEFCEAPLQSDTNGNELSIFSTVPSDFLCPLTRQIFSNPVTIETGQTFERHAIVQWLDRGFRTCPVTGQDLSSSTVPDTNRVLKRLVDSWRSEHFKHLTSGGAGLDVKLTVSAIDKALGSARDVSEKFDRARHLMAIGGIDFLLCKFQEGGGDEQPRVAEHLLSCIRAEGSCRDYVAIKMDGSSILRLLQSKVLSTRRTAVDLLMELVCLRRREMVELLLHGSRAESIVEAMDVLLEYLRSLPAEEQAPIAALLMRLDALVEPNRNNTYREEAIKAITRSLRCCLSEDTVVPSTRRALLLLGGQFTFSGDLHAEDWMLEHAGFVDPSRATTATSDAVVHDKKAAENDAWLRHVAAALLGSRSGIRRPFLEALSRCLGSPNAGLVGACLTTAAWLSRSLASLDEDGATDTSLAAFSALVPRLKQCLAPGRPVRHRVLAAVSLHNFSRIPDCRELLMLLADGMRDHLAELAQLTWTAGQLSAELHSND

SEQ ID NO: 5089 - protein, 310 aa, Zea mays
  VARIANT 19..310: note = Derived polymorphism lacks residues 19 to 310
  VARIANT 37: note = Ancestral polymorphism is A, Derived polymorphism is E
  VARIANT 43: note = Ancestral polymorphism is T, Derived polymorphism is I
  VARIANT 77: note = Ancestral polymorphism is A, Derived polymorphism is V
  VARIANT 164: note = Ancestral polymorphism is P, Derived polymorphism is T
  VARIANT 170..310: note = Derived polymorphism lacks residues 170 to 310
MQQLLSGLDHCHNRGVLHQDIKGANLLLDNNGILKIAYFGLATFFNPKQKQHLTSRVVTLWYEPSELLLGATNYGAVVDLWSVGCILAELLSGKPIMLGRTEVEQLHNIFKLCGSPSEEFWANLKLSRATIFKPQHPYHRCVNDNLGIGVPLHPPLTVNLVGYPYLPQNYYLPSAPFQQAYSSNGPFHQSAAPAVPGAGMKYPMPQYKSSPPASTLPQPSSLSGYGGFGSANNIPGNFSQNQGAAAAPTTLGFDEALGTQFKHPNHYAALQQSDNSAMWLHGGAGSRTISAVPPGNFYGFQGQSQHGGFR

SEQ ID NO: 5090 - protein, 199 aa, Zea mays
  VARIANT 122: note = Ancestral polymorphism is P, Derived polymorphism is S
  VARIANT 107..199: note = Derived polymorphism lacks residues 107 to 199
  VARIANT 79..199: note = Derived polymorphism lacks residues 79 to 199
  VARIANT 36: note = Ancestral polymorphism is R, Derived polymorphism is C
  VARIANT 23: note = Ancestral polymorphism is V, Derived polymorphism is M
  VARIANT 12..199: note = Derived polymorphism lacks residues 12 to 199
  VARIANT 6: note = Ancestral polymorphism is D, Derived polymorphism is V
MQSDGDVLVQLWVPVNHDDGKLVLTTSEQPFTLDHRSDSLLRFREVSTKYQFSADVKSGDSPGLPGRVFISRLPECALQAVNLRSTEVSSIPRIKFSTASYKDALPEILEVLRAACLTHKLPLAQTWVTCAQQGKRGSRHSDENYRYCISTIDEACFVNEAETRGFHETCSEHHLLRGEGVAGKAFTTNQPCFLPDIGS

SEQ ID NO: 5091 - protein, 387 aa, Zea mays
  VARIANT 109: note = Ancestral polymorphism is G, Derived polymorphism is W
  VARIANT 103: note = Ancestral polymorphism is V, Derived polymorphism is A
  VARIANT 76: note = Ancestral polymorphism is S, Derived polymorphism is Y
  VARIANT 68: note = Ancestral polymorphism is C, Derived polymorphism is Y
  VARIANT 50: note = Ancestral polymorphism is G, Derived polymorphism is S
MEDASTVALRFADVPVHLHASRHDLASLDLDADALRLSTHIFGIFYGHDGVEWPTTAGRGSRGWMMRCQGRQAGLSVASMSHGRWPPRTWAQMRLSPVCSSHAVVANCGDSHVVLHRGKETIESSIDRTSDIKDEQARIEALGLGCKVIQWNGYRVSGILAAVDWCTRSTSEKELVRKQVFVLGRMGNAKEALSTIINKLEVMQMQEVVEIVTEQHDDELWEELIRQCHKKPEMLRKINFGSDQCYSDCYDPIYQCGHGCSKSTILIHRLFPSSNNFFYLFMDHFGFSWLSTFSQSPVNTSRMTLHIRQQCRYQAQISKMLMRTGAVYQQSQRGDKESPPDQNFYICNISFNEYRSAISEEVLAIAPPPAYGYNEEWGRKEIIITVG

SEQ ID NO: 5092 - protein, 904 aa, Zea mays
  VARIANT 509..904: note = Derived polymorphism lacks residues 509 to 904
  VARIANT 517..904: note = Derived polymorphism lacks residues 517 to 904
MRHLLLSRFLRRGGGSGIPNGHYHHLPLLRALSSSPSPVSSDAELRKYAGYALLLLGCGAATYYSFPFPADALHKKAVPFRYAPLPEDLHAVSNWSGTHEVHARVLLQPDSLPALEGALAAAHKERRKLRPLGSGLSPNGIALSRAGMVNLALMDKVLDVDAKKKTVTVQAGIRVAELVDALREHGLTLQNFASIREQQVGGFTQVGAHGTGATLPPVDEQVISMKLVTPAKGTIELSREKDPELFYLARCGLGGLGVVAEVTLQCVERHQLVEHTFVSNADEVKKNHKKWLSENKHIKYLWIPYTDTVVVVQCNPPSKWITPKLASKYGKDEALQHVRDLYRESLKKYRTETESKDPEIDTLSFTELRDKLLALDPLDKDHVVKINKAEAEYWKKSEGYRMGWSDEILGFDCGGQQWVSENCFPTGTLAKPSMKDLDYIDKLLQLIEKEEIPAPGPIEQRWTARSKSPMSPASSSEEDDVFSWVGIIMYLPTSDARQRKEITEEFFSYRSLARSLWDDYSAYEHWAKIEVPKDKDELAELQARLRKRFPVDAYNKARMELDPNKVLSNAKLEKMFPVLEPPHQTKPKPPKNPSAPNPRAKMDPHQFAPSQQSALTMESAESTAAAAARASNGAARAVVEDDDEDDDVPEVAACISTMLDRGGSVESHRLFLARRTALEMLRDRGYAVPEEELARTLPEFRAWWEYRPELERLAFSTTLTSDPSSKVWLPVRFKVITVLVLMIVRVGTILQLGWWLFVPVVPAIIEVKVVFCPPGPVKIAAIRLIYTEVKDENLSRLILILQGKIMSTTRESIKEIFRFKVDTFQITELLVNITKHVLKPKHEVLTAEGKAKLLKEYNVVDSQLPRMLENDAVARYYGLGKGTVVKVIYDSELTGNHVTYRCIT

SEQ ID NO: 5093 - protein, 514 aa, Zea mays
  VARIANT 27: note = Ancestral polymorphism is G, Derived polymorphism is R
  VARIANT 369: note = Ancestral polymorphism is S, Derived polymorphism is I
  VARIANT 396: note = Ancestral polymorphism is I, Derived polymorphism is N
MDAGGTPPPLPLLLLAAAAALLGAALGWLLLAWRSAARPGRLPPGSTGLPLIGETLRLIAAYKTPNPEPFIDERVARHGSGVFTTHVFGERTVFSADPAFNRLLLAAEGRAVSCSYPSSIATLLGPRSLLLTAGPAHKRLHSLTLARLGRPASPPLLAHIDRLVLATVRDWGRPGAGAGPAAVVRLLDEAKKITFNLTVWQLVSIEPGPWTESLRREYVKLVDGFFSIPFPFAYLLPFTAYGQALKARKNVAGALREVIRKRMGEEAGTGPGAGRNGEKKDMVEELLEAEGGSFSVEEMVDFCLSLLVAGYETTSVLMTLAVKFLTETPTALAQLKEEHDSIRHRKGKDEQPLQWSDYKSMPFTQCVISETLRVANLISGVFRRANADIHFKDYVIPKGCRIFASFRAVHLSPEHYENARAFDPWRWQQSKKEGVRVVGQDAQQGGSVFTPFGGGPRLCPGHELARVVVSVFLHRLVTRFSWEEAEEDRVVFFPTTRTLKGYPIILRRRPGWDV

SEQ ID NO: 5094 - protein, 392 aa, Zea mays
  VARIANT 8: note = Ancestral polymorphism is I, Derived polymorphism is F
  VARIANT 104: note = Ancestral polymorphism is H, Derived polymorphism is Y
  VARIANT 322: note = Ancestral polymorphism is A, Derived polymorphism is S
MWPWLERIASACWDRVRKYALTRKGEDDADTDADVDAVADELLWSRDLTRHAAGDFSFAVVQANDVLEDQSQVETAAAATFVGVYDGHGGAEASRFISNHLSAHIVRLAQEHGTMSEDVVRKAFSATEEGFLSLVRRTHLIKPAMATIGSCCLVGIIWRGTLYLANLGDSRAVVGCLDGANRIFAEQLTRDHNASMEEIRQELRSLHPDDSQIVVLKNGVWRIKGIIQVSRSIGDAYLKKREFAVDPSTARFHLSEPLRRPVLTSEPSISSRILGSQDRFLIFASDGLWEHLSNQQAVEIVHNSPREGVARRLVQTALKEAARKREMRYGDIKKLEKGVRRYFHDDITVVVVFIDHELRAEHSSSTSVPELSVRGFVDAGARSSFSGMNDIT

SEQ ID NO: 5095 - protein, 63 aa, Zea mays
  VARIANT 11: note = Ancestral polymorphism is Y, Derived polymorphism is C
  VARIANT 12: note = Ancestral polymorphism is A, Derived polymorphism is T
  VARIANT 18: note = Ancestral polymorphism is S, Derived polymorphism is Y
  VARIANT 19: note = Ancestral polymorphism is A, Derived polymorphism is T
  VARIANT 29: note = Ancestral polymorphism is M, Derived polymorphism is L
MDGLTTEDKSCTLVLFEYAINREVFLTTLEHDVREIWLKRKIRYVPTLMSSLMLIVVHWSTNI

SEQ ID NO: 5096 - protein, 103 aa, Zea mays; identical to SEQ ID NO: 2445
  VARIANT 85: note = Ancestral polymorphism is M, Derived polymorphism is I
  VARIANT 61: note = Ancestral polymorphism is I, Derived polymorphism is V
  VARIANT 40: note = Ancestral polymorphism is R, Derived polymorphism is S

SEQ ID NO: 5097 - protein, 826 aa, Zea mays
  VARIANT 27..826: note = Derived polymorphism lacks residues 27 to 826
MRVQAAVADAIASLARHSHKCKDLFAQSNVVRHLVTHLASTPSIPPPCPHLAAHRLSSRPLRFLRRCLRVRPLGRPEIRRDPRELPRCSPCAATSPSPTSRLYACLSCATVFCPSHAATHASASAGLAAFAKRSRQARFAAEHPAEGLLLQTTRISTSTSTRGPAAAAARPPPPKPRRPTMAFSAKPHCSCSTTTKPPTPVAHLSPPPSLSVRAAACAPRSAYGLSAAGVGGGKASPSTVRLRARAQRIRASQQQPRRRPEYVPNRIDDPNYVRIFDTTLRDGEQSPGATMTSAEKLVVARQLARLGVDIIEAGFPASSPDDLDAVRSIAIEVGNPPTAGAGTAHVPVICGLSRCNRKDIDAAWEAVRHARRPRIHTFIATSEIHMQHKLRKTPEQVVAIAREMVAYARSLGCPDVEFSPEDAGRSNREFLYHILEEVIKAGATTLNIPDTVGYTLPYEFGKLIADIKANTSGIENAIISTHCQNDLGLATANTLAGARSGARQLEVTINGIGERAGNASLEEVVMAIKCRGELLDGLYTGINSQHITLTSKMVQEHSGLHVQPHKAIVGANAFAHESGIHQDGMLKYKGTYEIISPDDIGLTRANEFGIVLGKLSGRHAVRSKLVELGYEISDKEFEDFFKRYKEVAEKKKLVHHLQRVTDEDIEALLSDEIFQPKVIWSLADVQATCGTLGLSTATVKLIAPDGEERIACSVGTGPVDAAYKAIDQIIQIPTVLREYGMTSVTEGIDAIATTRVVVTGDVTNNSKHALTGRAFNRSFSGSGAAMDIVVSSVRAYLSALNKMCSFAGAAKASGEVPESASVQSAE

SEQ ID NO: 5098 - protein, 186 aa, Zea mays
  VARIANT 146: note = Ancestral polymorphism is L, Derived polymorphism is H
  VARIANT 98: note = Ancestral polymorphism is E, Derived polymorphism is K
  VARIANT 84: note = Ancestral polymorphism is P, Derived polymorphism is T
  VARIANT 64: note = Ancestral polymorphism is G, Derived polymorphism is R
  VARIANT 34: note = Ancestral polymorphism is S, Derived polymorphism is L
MDDCQLVNTSAESSNSEMVYGSEEDENDALDFLSAISEHDTELIETVMCHFREKFENLPEKFNGVEEQLFQEFSLDDLFPLVAPLFMETPHSCSMYAEKAEQCFDEVATDPSQIVDLCYNEGNERLFYKLLIDNIEEPLNLSPDQLQKALRKTFSAEKKKSKIRKAWDETKVIYSVAWGCHCCWAA

SEQ ID NO: 5099 - protein, 1110 aa, Zea mays
  VARIANT 317..1110: note = Derived polymorphism lacks residues 317 to 1110
  VARIANT 402..1110: note = Derived polymorphism lacks residues 402 to 1110
MAGSFDLRTPTRGVEQSIGMHLLIASARCFVQAIVALKKGAHLLKCGKRGKPKFCAFRISSDETTLIWYSKGREKHLSLSSVSAVVLGQKTIKFLRQRCPEKEPHSFSLIYKNGERSLDLICSDRDQAENWYLGLRALLPTPCNPCSSIESRSSRQIDSCTNTPSSYIQLKSKLLSVHGTPRHIQFNLVHILLFGSNNSSNALHVKVCSSQRKPKKAHGTFFGGSADCSESLFYTRQRTFSDIGTYLENLTRKMSNPEIHDLKDVMVGNQEKEQKITQTPKLKTFEGPRAACRLDSLKDVFFWGDAFGSILECGDTSKPLPMLVDSTNMLDVQSIACGETHAAIITKQGEVYSWGNESSGRIGNQVNIKVSRPKVVQSLASLHVKDVAYGSKHTCAVTVSGELIEWGEGPYMGQLDSYARNQWFPHKLFSPLDGISVVKIACGPWHTAIITSSGQLYTYGDGTFGVLGHGDTQGTTRPKEVESLKGSRVKCVACGPWHTAAIVEVISDFKSNSPRSKLFTWGDADRGKLGHADKKMKLIPTCVDSLTDYDFIQVSCGTALTVALSVTGVVFTSGSSMHGQLGNPHADGKTVSAVEGLLKSEFVRHISSGSSHVAVVTTNGKVFTWGKGKEGQLGLGDFLNRSTPTLVDALEGRHVESLSCGYNYTAAVCLHKVISRKDLSVCSGCKMAFGFTRKKHNCYHCGSMFCNSCSSNKVAKAALAPDKSRRYRVCDGCFSQLLKVVDSGKVKSELNTSKGAEIIRSYTPKLSRIFRDVNLPVEKEKVALVQRSNQRNEVLYTPVQAKSQRWGQVECPAQFLSAEDSSHYQSISKNHMYSASVSERMHDPTVLKSGRSLQQPNDDQRKDLNSIEETLLTEEVKQLRSQMTLLMEQYHQKALQVELYKQKLDETWLIVRNEAAKCKAAKDIIKVLTDQCKALSEKLLVGQQYENLETKSNISQGQTFSADLQHHPSEKFATGKFGQLDNTKNHQTSSQGDEEYTPSSSSDVQVEGLCGHLNGSRTFDSNGRITEGNSIVARVTSNGVIEQIERGVYVTFAVSPCGKKDIKRVRFSRKHFGEKEAQHWWEENKGSVYAKYSTEKAQHQLEVTIKSVQE

SEQ ID NO: 5100 - protein, 82 aa, Zea mays
  VARIANT 38: note = Ancestral polymorphism is C, Derived polymorphism is Y
  VARIANT 34: note = Ancestral polymorphism is R, Derived polymorphism is T
  VARIANT 27: note = Ancestral polymorphism is K, Derived polymorphism is E
  VARIANT 24: note = Ancestral polymorphism is G, Derived polymorphism is S
  VARIANT 16: note = Ancestral polymorphism is E, Derived polymorphism is K
  VARIANT 14..82: note = Derived polymorphism lacks residues 14 to 82
  VARIANT 11..82: note = Derived polymorphism lacks residues 11 to 82
  VARIANT 7: note = Ancestral polymorphism is A, Derived polymorphism is T
  VARIANT 5: note = Ancestral polymorphism is N, Derived polymorphism is Y
  VARIANT 2: note = Ancestral polymorphism is D, Derived polymorphism is N
  VARIANT 1: note = Ancestral polymorphism is M, Derived polymorphism is I
MDNHNLAELMREDQIELLMELVLGYSKVLSSTARASRCPFHLVEKKSQGKRRSLITSKVGYISETLQPIIEEVFEVQLLMVL

SEQ ID NO: 5101 - protein, 187 aa, Zea mays
  VARIANT 119: note = Ancestral polymorphism is E, Derived polymorphism is K
  VARIANT 104: note = Ancestral polymorphism is A, Derived polymorphism is D
  VARIANT 22..187: note = Derived polymorphism lacks residues 22 to 187
MKLSMPFFGSSSSSSGKKRKGSKTGGSSSFVSTASSSSSDECASPSAVTTTPRTVLQSQPSAPNPKPPAVVAAAVTREDLEVALRRVVRSEDELAAVLAEAEAAGLAPEQAASAEAEDEAELRDAFAVFDADGDGRISAEELRAVLAALGDAACSVEDCRRMIGRVDGDGDGFVCFHDFSRMMMQGA

SEQ ID NO: 5102 - protein, 440 aa, Zea mays
  VARIANT 61: note = Ancestral polymorphism is E, Derived polymorphism is D
  VARIANT 31: note = Ancestral polymorphism is N, Derived polymorphism is S
MARFQARSNQRPAADHVGHRDFMDHLKNTLSSGDMDLPGGARAPKARKPYTISKQREKWTEDEHKLFLEALQQHGRAWRRIQEHIGSKTAVQIRSHAQKFFSKVIRESSGDNSNNSVGAPPQLQIPPPRPKRRPTHPYPRKLGNSVGKDASAAIKQLRKPQLQAQSLSEQENCSPKSVLTTAQMCSEALPAEGSGSPASSVHMEDKCLTPNTSVGESSVQVALSTDSNDAACEIPEAEGPVLRLFGKRVVVSNLDQQPSSNTGSLQHAADMELDDASAETPTSGTGKLSSHAAEEAETWCPWLVGSTQQFLYYLPRGEVFSMHPGCQFLNYGNGSISYTALDAQTVTSNKQRSRPWTESIETSSSVPGTAQNSDPAESTKVNRGEDKVAVPVPGSRKCAGAIPACRRGFVPYKKCTARSKVLQPVAPGEEADRELTRLCL

SEQ ID NO: 5103 - protein, 103 aa, Zea mays; identical to SEQ ID NO: 2445
  VARIANT 10: note = Ancestral polymorphism is G, Derived polymorphism is V
  VARIANT 30: note = Ancestral polymorphism is I, Derived polymorphism is F
  VARIANT 37: note = Ancestral polymorphism is R, Derived polymorphism is S
  VARIANT 40: note = Ancestral polymorphism is R, Derived polymorphism is S
  VARIANT 61: note = Ancestral polymorphism is I, Derived polymorphism is M
  VARIANT 78: note = Ancestral polymorphism is R, Derived polymorphism is H
  VARIANT 84: note = Ancestral polymorphism is A, Derived polymorphism is D

SEQ ID NO: 5104 - protein, 478 aa, Zea mays
  VARIANT 255..478: note = Derived polymorphism lacks residues 255 to 478
  VARIANT 194..478: note = Derived polymorphism lacks residues 194 to 478
  VARIANT 151..478: note = Derived polymorphism lacks residues 151 to 478
  VARIANT 121..478: note = Derived polymorphism lacks residues 121 to 478
MWHRLHTLAPALRRATAVAVGAPTASASSAARAAPLSSAAAAFRRTSPLLSGDKPTSVEDVMPIATRLEREELEAELKDVWLSGYQETSTLLATLEKIESWIFSRIVETMVAVFLWMFLFQALTPHMQKRAEGSPTPKSGRVLGPALGDQQQGTFSVNLWKAAFHDTFNRMCPLSAGGHECGCLPVLAKQVMEQCVARLDVAMFNAILRESASEIPTDPISDPIVNPKVLPIPAGDLSFGSGAQLKNSIGNWSRWLTDKLGIDHDDSEDIGEVEDERRAAAETKSFQLLNELSDLLMLPKDMLLEKSIRKEVCPSIGLQLVTRILCNFTTDEFCPDPVLSTVLEELNSEVCSTQLDGASRQQRRDQCVSVHRCPYSVPHTFNVGRDRESSRHRRCAAERAADIGGGAKLDRKASMVQRRGYTSDDDLDDLDSPLASLIDRSTPPSSSNGFAHFSARRGVSMENTRYTLLREVWGLEQW

SEQ ID NO: 5105 - protein, 137 aa, Zea mays
  VARIANT 45..137: note = Derived polymorphism lacks residues 45 to 137
  VARIANT 94: note = Ancestral polymorphism is P, Derived polymorphism is L
  VARIANT 101: note = Ancestral polymorphism is D, Derived polymorphism is Y
MLIFFEPTVLLDETHYQEGYRNGYNDGLASGNEEGRQVGLKMGFQVGEELGFFQGCLDVWTSAILIDQNAFTARVMKNIEQLAALVGSYPLSDPENEQIQDVMEKIRLKFRVITASLGVKLEYEGHPKSSKQDVEDL

SEQ ID NO: 5106 - protein, 364 aa, Zea mays
  VARIANT 70: note = Ancestral polymorphism is D, Derived polymorphism is Y
MGAIGIVVRACAPLAPAAAAAPAPSGSSSRDAAQAQRWSKPTRTGRVLVLGGTGRVGGSTATALSKLRPDLGILVGGRNRFDREKGESIAAKLGGQSEFVQVDTRNAGMLEEALQGVDLVVHTAGPFQRAEECTVLQAAISTKTPYIDVCDDTDYSWRAKGFHEQAKAAGVPAITTAGIYPGVSNVMAAELVHAARSENGEPERLRFFYYTAGTGGAGPTILTTSFLLLGEDVIAYNKGEEIKLKPYSGALNIDFGKGVRKKNVYLLNLPEVKSAFKILGVPTVSARFGTAPFFWNWGMQAFANFLPVEFLRDRNKVQKLVQSVDPLVRAVDGIAGEHVSMRVDLDCSNGRNTIGLFTHKKLSV

SEQ ID NO: 5107 - protein, 760 aa, Zea mays
  VARIANT 181: note = Ancestral polymorphism is G, Derived polymorphism is R
  VARIANT 352: note = Ancestral polymorphism is K, Derived polymorphism is N
  VARIANT 545..760: note = Derived polymorphism lacks residues 545 to 760
  VARIANT 599..760: note = Derived polymorphism lacks residues 599 to 760
  VARIANT 614..760: note = Derived polymorphism lacks residues 614 to 760
MAKKLGKKARKFARKNLQSAAKRNRKIRNQFKHRRGPRGGEWERRPGGWGRARAAAGPRSHHVIIILLLHKVLHEVTDDAAATLIHGLEFPEDDAELDADLSDSDGYLSEDPGCPYYSDSEDEKAAKDCIMEEGLDRQNDDMNRDIKKQKKKLKKLLDKDPEFANFLEKWQSELESSRSKGDSDEEGMDSMDDDDDSNDGNLPNAKVLTRKTISEWCQLVSKEPKAPALRNLLNAFRDACRYGVHSDGPLMQRFQSARVFYQIIMFVLSESDNIFRALLEIQDDVNKGKIMNLRNSKKWLTVDSLIKSYLSSSLDLLSQLTDNKILAFVLTRLRVSVVLFSAYPSTSSRLVKILFRLWASGDRSLSLSAFLMIREVASLLPDCLDHCLTKSYNTYLASTNLVNDRNTKHIYFLMDCLVELYSLDVQKSYERAIISVEQLNAILRQASKTKEKEDLRKIDNWQYISCVNLWVRFLCCHYKDYNLHPLFSQVLQVIRGVAHLFPGTRYLPLRLKLVQMLNELSTCSQMFYPIPSLLFDCLELREVSQKEQTQRTKINFSSLLKVPKNLLKSRDFQEECILSAIQILSAHFAQWSYHVSFPEVATIPLVLLKRLHEQTTVESLRRPIKRLIDQVTENKDFIERKREVVSFSPNDKASVDSFLQEEKVSRTASFTRFYASVAENRQPKCNVGEKHFKIPREFLRDISHLESVGFQVRATKNHINVEHFSADIRRGSYCVTSSETDSYESSSAQQFCTIVTLIPK

SEQ ID NO: 5108 - protein, 174 aa, Zea mays
  VARIANT 74: note = Ancestral polymorphism is A, Derived polymorphism is T
  VARIANT 88: note = Ancestral polymorphism is R, Derived polymorphism is G
  VARIANT 109: note = Ancestral polymorphism is G, Derived polymorphism is E
  VARIANT 126: note = Ancestral polymorphism is W, Derived polymorphism is C
  VARIANT 129: note = Ancestral polymorphism is W, Derived polymorphism is S
  VARIANT 132..174: note = Derived polymorphism lacks residues 132 to 174
MEAYVLFAPAKEEEDIGCPSESSAARSTSSSSSSSDGVDLADDASSSGSSCHFEMASLMTQLPIKYVRRTHVLADGAGIAAALLPDYRDLILAGVLWSDAALLLFGCAGGACPSSSTASRSRSRRWRRSAASRTCPSRRRSGSRRRGAAASASRTRTAVALPPRPAGSRRPGLG

SEQ ID NO: 5109 - protein, 233 aa, Zea mays
  VARIANT 224: note = Ancestral polymorphism is F, Derived polymorphism is S
  VARIANT 130: note = Ancestral polymorphism is P, Derived polymorphism is S
  VARIANT 120: note = Ancestral polymorphism is E, Derived polymorphism is K
  VARIANT 102: note = Ancestral polymorphism is R, Derived polymorphism is C
  VARIANT 85: note = Ancestral polymorphism is V, Derived polymorphism is D
  VARIANT 81: note = Ancestral polymorphism is P, Derived polymorphism is L
MAAGLICRHWHEMASGQLDDEGGKRIEIDPGRGRVGGVHRDPRRARGEGEREKKTRATGPGEPQDSGISLRTILELGPTIPIFGVCMGLQCIGEAFGGKIIRAPSIVMHGKSSPVYYDEELGKALFNGLSNLWYVLLSKAFRVDAALAPFASMDNPFTAVRYHNLVIEQETFPHDALEATAWTEDGLIMAARHKKYKHIQGVQFHPESIITPEGKKIVLNFVRFIEELEKQRS

SEQ ID NO: 5110 - protein, 179 aa, Zea mays
  VARIANT 39: note = Ancestral polymorphism is P, Derived polymorphism is H
  VARIANT 10..179: note = Derived polymorphism lacks residues 10 to 179
MPSVVEDCSQTSSTRELEDSSIHHAAASVVLESKSSRTPIHVELERSKTKSVGNDSIQSTKPVPSALTVDSHFSSSGSTTNNLATSLNKMVRQQTAPKVTLFSYELFVKLYSKVELHPFGLHNLGSQNKWCFICEFEKLIVEGNRCKTALSPTGILSHLNDIGRIFGPGKQEDAHEFLR

SEQ ID NO: 5111 - protein, 355 aa, Zea mays
  VARIANT 178..355: note = Derived polymorphism lacks residues 178 to 355
  VARIANT 220..355: note = Derived polymorphism lacks residues 220 to 355
MPYLVRERLYFGGIKDAIAALTESSSTPDFTHVLSVVSSASISFITDCRPGLEIPTEEVLRVVAGEEGAAPTAAVPPGTLMRVVERAGHGLRVTRMAVPLRDTEEADLLDRLEPCLEFIDEGRKVGNVLVHCFAGVSRSASIIVAYLMRAEQKSLEEALEALKEISESACPNDGFLDQLKLFEEMGFKVDTSSPLYKRFRLKLLGQSYISGEKISSYMFEDDPGLSLESGSCQDSSKVEQRKTAYRCRKCRRVIAVEGNVISHVPGEGESCFDWNRRKSGHPYNNKEHGCSSLFVEPLKWMTPAVEDGALEGKLSCIHCGARLGYFNWSGIQCNCGSWVTPAFQIVKSKVDISTI

SEQ ID NO: 5112 - protein, 476 aa, Zea mays
  VARIANT 124..476: note = Ancestral polymorphism lacks residues 124 to 476
METSGAAAAATEVGWYVLGPNQESVGPYALAELREHFANGYLNESTMLWAEGRKAWMALSSIPDLHSAVTAKDRFEQDAPDVDGDFEKFQKEVTEAEAEVKALKGSDVDQQDDERPATPPDGESEFTDDDGTIYKWDRTLRAWVPQNDASGSKEGYAVEEMTFALEEEVFQAPDILGPSALEEIDTLSESKNKGSDKAETRGDKKRKSSEKPSEKKEANKPPDSWFDLKVNTHVYITGLPDDVTVEEIVETFSKCGIIKEDPETKKPRVKIYTDKETGRKKGDALVTYFKEPSVALAVQLLDGTSFRSGGKTPMSVSPAKFEQKGDVFISKKSDKQKKRKIKKVEDKMLGWGGHDDKKLMIPTTVILRHMFTPAELRADEELLSELETDVREECIKFGPVDNVKVCENHPQGVILVKFKDRKDGAKCIEKMNGRWFAGQQIHASEDDGSVNHTLIRDYDAEVSRLDRFGEELEEST

SEQ ID NO: 5113 - protein, 410 aa, Zea mays
  VARIANT 24: note = Ancestral polymorphism is P, Derived polymorphism is L
MPGWQEPPDDDALDLEAAALLRHPPVRPLLGCSAAALLAPCSDRRLLLRSTTPQPSCVHGGTPARLHDSPGVHDCPRAHLLLELGRSAAPARIVGFLQRPSAPAAAVQPADLVGNSASTASCSRELFVGIFSHRIPIYPTGMETGKIYRLSLVAPSCINPGSATAYTCKECGKSYPTNQALGGHVAGHKNKQREAEAVAAAAEAGPDATVLDRRDKVGQSHVCLKCGKMFSKAVALGGHMRAHYTGPRIVIVRNNKKRCLVPPPPAEEDLASPPPPEEDWAVAGLSRSLSIRAEEELVAPWRHCHRHRRCQRQMKTWRRGAGSRCLSTRKKSRRRLLLRPELTECCVSSALILISASTKKSRAPARQRHDGARALLEGVVQKIGGPLEEVGSPNPHKILTMMHLIHSGRQ

SEQ ID NO: 5114 - protein, 297 aa, Zea mays
  VARIANT 72..297: note = Derived polymorphism lacks residues 72 to 297
  VARIANT 19..297: note = Derived polymorphism lacks residues 19 to 297
MSKGYKMVTDGTENHLVLWDLRPLGLTGNKVEKLCDLCLITLNKNAVFSDSSALSPGGVRIGDVSRYFLGVWPCKSVQDQAGGEPTVGVVAEVKPETDRGDREDDKSVVSESGSDEDSDGSGSEDSEDSEEERRREEERTRRRAEQLAAMAARAIAERKDAVARLEGEKAGLEKLPAEREKEQAQEASELQTSMIETLEAVEIEKQRHHNTRMEALARLARLEVDQVAQLREEVELKKLAQDKYRRKLTKIQKTSAPPVDEIESLRRFKLEEEIVDAEYTLTCDRIVKDKVGFPVYD

SEQ ID NO: 5115 - protein, 337 aa, Zea mays
  VARIANT 229..337: note = Derived polymorphism lacks residues 229 to 337
  VARIANT 25..337: note = Derived polymorphism lacks residues 25 to 337
MYRRGDDDRLERDNIWNMIQVQKSQIQRRAMGEEGATIADRDGGQGRSQTCAGPVGVGVTGAGAYRRGWHGGGATRGEWSRDAGSRVFGKLQEWINLVSYFPCSPTFVRVIWLAPKSLFHRSRSPYYYFISAMFKIGNSKEVLPIPDYLSEHYKDCIRKCLQRDPSLRIYHLRHLRPVEHPRHCMPTSPDFVHDSGPELCCEIRSLRVDADTGPVAAIVQARVQDHDVQNTITGPEVGPDELPETSVPEGMQAKIVHHHDTSTTKSLKEQCAEYTHPLLSSAPSGPSHHCASHGWSSSRHRYHPAASDAQPPDTVTRCQWEFSRIRLGSRIRLSSTP

SEQ ID NO: 5116 - protein, 82 aa, Zea mays
  VARIANT 32: note = Ancestral polymorphism is A, Derived polymorphism is V
  VARIANT 25: note = Ancestral polymorphism is G, Derived polymorphism is S
MGLLDSLYRVVMRRNAVYVTFVVAGAFAGERVVDYGVHKIWEMNNLGVTFLPQLPFRVIVLLLSVRCHCHRPISERNLGSSE

SEQ ID NO: 5117 - protein, 552 aa, Zea mays
  VARIANT 225: note = Ancestral polymorphism is F, Derived polymorphism is S
  VARIANT 424: note = Ancestral polymorphism is G, Derived polymorphism is R
MGQCCSKGAGEAGATEAAPKAQAPSRGASANNADGQRASSSSAVAAAAAAAGGGGGGTTKPASPTGGARASSGSKPAAAVGTVLGRPMEDVRATYSMGKELGRGQFGVTHLCTHRTSGEKLACKTIAKRKLAAREDVDDVRREVQIMHHLSGQPNVVGLRGAYEDKQSVHLVMELCAGGELFDRIIARGQYTERGAAELLRAIVQIVHTCHSMGVMHRDIKPENFLLLSKDEDAPLKATDFGLSVFFKEGELLRDIVGSAYYIAPEVLKRKYGPEADIWSVGVMLYIFLAGVPPFWAENENGIFTAILRGQLDLSSEPWPHISPGAKDLVKKMLNINPKERLTAFQVLNHPWIKEDGDAPDTPLDNVVLDRLKQFRAMNQFKKAALRIIAGCLSEEEITGLKEMFKNIDKDNSGTITLDELKHGLAKHGPKLSDSEMEKLMEAADADGNGLIDYDEFVTATVHMNKLDREEHLYTAFQYFDKDNSGYITKEELEHALKEQGLYDADKIKDIISDADSDNDGRIDYSEFVAMMRKGTAGAEPMNIKKRRDIVL

SEQ ID NO: 5118 - protein, 357 aa, Zea mays
  VARIANT 55..357: note = Derived polymorphism lacks residues 55 to 357
  VARIANT 15: note = Ancestral polymorphism is L, Derived polymorphism is Q
MSGSPTAAMSGVNILQLFAYDISCSFELSSALLFNLFADLGQPNDVVLGAATSIWLPVPATMSSPLATTRMRASRSISAYGIGFLLLSGHCIAIALVDKFKLKSDHDVQQHNEESDYMGRTEFPVDEDAHSVGDCVKGPQYVCTSFSTFICTNCSGIHREFSHRVKSVSMAKFTSQEVSALQEGGNELLRKSISSIGTCKALLLTVDSSPGVLRSAYVGTYEDNHDLKRTKESLSENQNNLDGHPVSSTVDQNNNSTMAREKVDLRSHLCPDDLLKTDGKSENNQKVVISSASSAAQASKEINSNKVFLPIKLPDPPRSQKATSSNTSTEAQLMISRYSIRPMLQKYFQMELWMIRR

SEQ ID NO: 5119 - protein, 109 aa, Zea mays
  VARIANT 13: note = Ancestral polymorphism is I, Derived polymorphism is V
MFVATAVVAVAAIVVAAATGVVASDGSGPRSYLTSWGGPGCTTGTKGHIASAGSCGCNHLRFHGGHEFNFRGETATLYSQPGCVGTPYQVFEDTQACGDFGWHSIHIDC

SEQ ID NO: 5120 - protein, 115 aa, Zea mays
  VARIANT 64: note = Ancestral polymorphism is T, Derived polymorphism is S
  VARIANT 30: note = Ancestral polymorphism is G, Derived polymorphism is R
  VARIANT 25: note = Ancestral polymorphism is A, Derived polymorphism is V
  VARIANT 6: note = Ancestral polymorphism is C, Derived polymorphism is Y
MAGRKCRAIPTAIATAVVVVAVLMAVAVAGVAAKDASGAPSSLTTWSAAGCSGDTSIVGSCGCTDLAFYAGQEFYYRGETATLYTGTGCTGTPYQVFEDTQACGDFGWRSINIDC

SEQ ID NO: 5121 - protein, 128 aa, Zea mays
  VARIANT 16: note = Ancestral polymorphism is E, Derived polymorphism is V
  VARIANT 46: note = Ancestral polymorphism is H, Derived polymorphism is R
MAADMQIVLAAGRKIEAQYVEMKVPLYSYGCEKKIKKALSHLKGIHSVQADYHEQKVTVWGICDRDDVLAAVRKKRRAARFWDDDGGELGPRERAPTPGREAPKQYLAAFAAYRWRKSWKKLFPLIRL

SEQ ID NO: 5122 - protein, 180 aa, Zea mays
  VARIANT 61: note = Ancestral polymorphism is A, Derived polymorphism is T
  VARIANT 107: note = Ancestral polymorphism is S, Derived polymorphism is T
MEEVEQQLTKKQIEEFREAFSLFDKDGDGTITTKELGTVMRSLGQSPTEEELQEMVDEVDADGSGAIDLQEFLTLLARQMREASGADEDELREAFHVFDQDQNGFISRDELRHVLQNLGERLSEEELAEMLREADADGDGQINYSEFAKVMLAKRRNQELEEHGSESSHSKGLCPSCIIL

SEQ ID NO: 5123 - protein, 284 aa, Zea mays
  VARIANT 174: note = Ancestral polymorphism is S, Derived polymorphism is Y
MADRVHPAPPPLPLSSTPPQHPPTTETTPLQQHPSFARPPPPPPGTYIVQVPKDQVLRVPPPDRARRYKKLAARPARRRALRRACCCACAAAILAVLVAAAFAGAVYLAYRPRAPTFSVTSLSIRGLDAASLLRSSSSSSETLSPRLDAAVRADNGRNAKVGVEYRGSGSVAVSYSGARLAAGPWPAFRQPPRNVTAFAVAMSGRGVRLTEDQATRIAAEQAAGAVPLQVETTVPVRLRFGSVLRTWTVPVRARCDVSVDRLDGDAVVVNRGCRVRVRPLWWWW

SEQ ID NO: 5124 - protein, 163 aa, Zea mays
  VARIANT 128: note = Ancestral polymorphism is V, Derived polymorphism is A
  VARIANT 68: note = Ancestral polymorphism is A, Derived polymorphism is T
  VARIANT 41: note = Ancestral polymorphism is V, Derived polymorphism is M
  VARIANT 40: note = Ancestral polymorphism is P, Derived polymorphism is L
  VARIANT 34: note = Ancestral polymorphism is A, Derived polymorphism is T
  VARIANT 29: note = Ancestral polymorphism is R, Derived polymorphism is C
  VARIANT 17: note = Ancestral polymorphism is L, Derived polymorphism is Q
MAPLPWRQRHHTLLQAQLSKGPLSERDFRVVFAAISGKNPVQGVKFIRIHFLPKLLFSMHLYLAPWLTATHQQLLNNTLLKIKKDLAYLQLELRACVNQHDGMVYYGVVNNISYAIVGYRTPPQAGLVWASDGLFLTSEAGSVGMISHHVLSAMKPVSRLQAV

SEQ ID NO: 5125 - protein, 476 aa, Zea mays
  VARIANT 431: note = Ancestral polymorphism is P, Derived polymorphism is L
  VARIANT 417: note = Ancestral polymorphism is T, Derived polymorphism is I
  VARIANT 400..476: note = Derived polymorphism lacks residues 400 to 476
  VARIANT 399..476: note = Derived polymorphism lacks residues 399 to 476
  VARIANT 390: note = Ancestral polymorphism is N, Derived polymorphism is T
  VARIANT 385: note = Ancestral polymorphism is V, Derived polymorphism is L
  VARIANT 370: note = Ancestral polymorphism is S, Derived polymorphism is L
  VARIANT 332..476: note = Derived polymorphism lacks residues 332 to 476
  VARIANT 266..476: note = Derived polymorphism lacks residues 266 to 476
MILNRLHVRVIRRSPASAALRDAATRALASAGLFRGLHGGEAGDGASSEHGREPADEPGKQVRSAVRIKNISKSHVAFKQDYFSEGLYTFDIGQNDLAGEFYSRTEDQVIVSIPTILLEFENGLKAVISSRRLSNYLSTPEHHSSELNASADLLNHHFKRYTKVTHNPMAIVFQNVSCSWSSSSVAELNIVLRDISLQLQKGLFIAIVGEVFLESYVVGVHNFVNGLFGTNLSFSPSFEQACKTMFEQVDGAFQKGMSEHSNAIQQQVEAAHTPLALTLKETINSASSITQSFSSELLDGNRKLLALVTSGNAKAHNTSALQPINGPMGGPQEVEAPLDPMRELSRLISERKFDEAFTMALQRSDVSIVSWLCSQVDLRALCAMVPVPLNQGVLLALLQQLAIDIHNETSRKVQWMTDVAMAINPADQIIPVHVPPIFEQVYSQLAHQRTLPTTASDGTSIRVIMHVINSVLLSYK

SEQ ID NO: 5126 - protein, 444 aa, Zea mays
  VARIANT 55: note = Ancestral polymorphism is S, Derived polymorphism is F
MKNSILGDNPPILDNNVNSLNPSSNPTSNSKAARKDSGTVVKKLTVGGMPEKIVSAYQSVFDQHFDEDTALNKCKSTVGLLERINKDINDASINGNQPASSLISDLQEQEMTLKQCIEQLESAGRVRISLINQLKEALSEQESKSIILRDQLQVARAEAEHAIQLRQQLGRVLVTNDTQSTSSPLMITPPDQTAAMMHGSGVRSTPPHSQPLNPAVSLPPTVSAVGDESKRTAAAMADKLASLSAPVQVLTSILSSFAAEQAASINGGSPSGELSGVPPGFHIDKRPRLEKTGQAEAGAPPFFGQASQVQQQVGAVPTSFGGTHPPTPGPFPPPPPPLPPLLPPLMQQFGQNTGGMMGMRGPFGMMAGSMPPPPPLSNILPAGFPGLSGPPPPPPLPPAQSQPQQQQTSQAPQQSPTSAGFFQSSGMGFFPPVQVQQSQPAQRQ

SEQ ID NO: 5127 - protein, 211 aa, Zea mays
  VARIANT 141: note = Ancestral polymorphism is R, Derived polymorphism is C
  VARIANT 71: note = Ancestral polymorphism is G, Derived polymorphism is S
MASIIVIAAVLVLDVLAFVLAIGAERRRSYVNYVSVDPAGGVLLRVQLRRVHGVRRERAAAAARRAGRGHGRHPLLLLRPRALAGPLAGVVRHLLHRLLGDVRDRGAVPAGRVGPERVSHQVLPQGRRPAAVRHAAQGRLRRRRRLHLPRRALRRAALPLLRQGARRRRRRGPAHRRRHRHDPHVMSGRYCPVVVIAVAGRRCSRAGAAPP

SEQ ID NO: 5128 - protein, 398 aa, Zea mays
  VARIANT 189..398: note = Derived polymorphism lacks residues 189 to 398
  VARIANT 334..398: note = Derived polymorphism lacks residues 334 to 398
MERSQRQSPPPPSPSSSSSSVSADTVLVPPGKRRRAATAKAGAEPNKRIRKDPAAAAAGKRSSVYRGVTRHRWTGRFEAHLWDKHCLAALHNKKKGRQGVYFFPRAYDSEEAAARAYDLAALKYWGPETLLNFPVEDYSSEMPEMEAVSREEYLASLRRRSSGFSRGVSKYRGVARHHHNGRWEARIGRVFGNKYLYLGTFDTQEEAAKAYDLAAIEYRGVNAVTNFDISCYLDHPLFLAQLQQEPQVVPALNQEPQPDQSETGTTEQEPESSEAKTPDGSAEPDENAVPDDTAEPLTTVDDSIEEGLWSPCMDYELDTMSRPNFGSSINLSEWFADADFDCNIGCLFDGCSAADEGSKDGVGLADFSLFEAGDVQLKDVLSDMEEGIQPPAMISVCN

SEQ ID NO: 5129 - protein, 345 aa, Zea mays
  VARIANT 318: note = Ancestral polymorphism is G, Derived polymorphism is D
  VARIANT 293..345: note = Derived polymorphism lacks residues 293 to 345
  VARIANT 288: note = Ancestral polymorphism is Q, Derived polymorphism is L
  VARIANT 286: note = Ancestral polymorphism is S, Derived polymorphism is L
  VARIANT 255: note = Ancestral polymorphism is A, Derived polymorphism is V
  VARIANT 252: note = Ancestral polymorphism is C, Derived polymorphism is F
  VARIANT 235..345: note = Derived polymorphism lacks residues 235 to 345
  VARIANT 232: note = Ancestral polymorphism is S, Derived polymorphism is L
  VARIANT 231: note = Ancestral polymorphism is A, Derived polymorphism is V
  VARIANT 154: note = Ancestral polymorphism is G, Derived polymorphism is A
  VARIANT 73: note = Ancestral polymorphism is G, Derived polymorphism is R
  VARIANT 67..345: note = Derived polymorphism lacks residues 67 to 345
  VARIANT 62..345: note = Derived polymorphism lacks residues 62 to 345
MLYKYCEERGVAHKRISKLIVATGAAEVPKLNMLLRNAKENGVDDLQLMEGSKAMEMEPELRCLKALLSPSTGIIDSHSLMLSLLADAENLGTTISYNTSVTSGHVGSNGLELHVCESKELQNYHDGGIGVHVTLDLNGLVRFGPDVEWISDGGKDHVSCFLNKFDYSVNLNRCSVFYPVVRKYFPNLKDGSLEPGYSGIRPKLSGPGQPPSDLPRLTSHGFMLASPQLHASILQPLGERDAIQLRSRRWGCLRAVRVFSLVSNPSLVAPPLDAIAHLHNVLVRWSKQQRLPQLGRPGARKRWPSRRSAMLWVVHLSGFLSVAMVVVVLSPSLQSFPPAEAIRSS

SEQ ID NO: 5130 - protein, 726 aa, Zea mays
  VARIANT 371..726: note = Derived polymorphism lacks residues 371 to 726
MGEVSDDNSNLSFLKRIATSDVPLLKEYGVNGVVVALLLAVVTPVLLSMMFGKKTKQRAVRANVGGEEGFAMRNSRFSSLVEVPWEGATTMSALFEMASKKYSRRRCLGTRKLIKREFVESSDGRKFEKLHLGEYEWDTYAEAFNRACNFASGLVKMGHDLDSHAAIFSDTRAEWIIAAQGCFRQNLTVVTIYASLGEDALVHSLNETQVSTLICDSKQLKKIPAISSKLQSLRHIIYIEDEPVEAETLNQVKHLTTLSFTEVEELGKTSSVDARLPSSSDTAVIMYTSGSTGLPKGVMITHGNMVATTAAVMTIVPKLGMNDVYLAYLPLAHVFELAGETVMLASGTAIGYGSTLTMTDTSNKIKKGTKGDVSVLNPTLIISVPAILDRIRDAVFKKVGEKGGLTKKLFDFAYKRNLASIEGSWFGSWAPERMIWDTIIYKPIRAMLGGRVRFVLCGGAPLSGDTQRFMNICLGVPVGQGYGLTETCAGAAFTEWDDTSVGRVGPPLPCCYVKLVSWEEGGYKISDYPMPRGEVVVGGHSITKGYFSNEAKTNEVYKVDERGIRWFYTGDIGQFHPDGCLEIIDRKKDIVKLQHGEYVSLGKVESALATSSYVESIMVYADPFHNYCVALVVPVRQALEKWAQNSGINCEGFEELCQNGQAVKEVQQSLSKAAKAARLERFEVPAKIELLPEPWTPESGLVTAALKLKREQIKAKFKDDLDKLYH

SEQ ID NO: 5131 - protein, 148 aa, Zea mays
  VARIANT 27: note = Ancestral polymorphism is T, Derived polymorphism is R
MTVLSRPTPGTAQCFGRKKTAVAVAYTKPGRGLIKVNGVPIELIRPEMLRLKAFEPILLAGRSRFKDIDMRIRVRGGGKTSQIYAIRQAVAKGLVAYYQKYVDEAAKKEIKDIFTRYDRTLLVADPRRCEPKKFGGRGARARFQKSYR

SEQ ID NO: 5132 - protein, 409 aa, Zea mays
  VARIANT 131: note = Ancestral polymorphism is L, Derived polymorphism is Q
  VARIANT 147: note = Ancestral polymorphism is Y, Derived polymorphism is C
MEFASSSSRFSREEDEEEEQEEEEEEEEASPREIPFMTAAATADTGAAASSSSPSAAASSGPAAAPRSSDGAGASGSGGGGSDDVQVIEKEHMFDKVVTPSDVGKLNRLVIPKQHAEKYFPLDAAANEKGQLLSFEDRAGKLWRFRYSYWNSSQSYVMTKGWSRFVKEKRLDAGDTVSFCRGAGDTARDRLFIDWKRRADSRDPHRMPRLPLPMAPVASPYGPWGGGGGGGAGGFFMPPAPPATLYEHHRFRQALDFRNINAAAAPARQLLFFGSAGMPPRASMPQQQQPPPPPHPPLHSIMLVQPSPAPPTASVPMLLDSVPLVNSPTAASKRVRLFGVNLDNPQPGTSAESSQDANALSLRTPGWQRPGPLRFFESPQRGAESSAASSPSSSSSSKREAHSSLDLDL

SEQ ID NO: 5133 - protein, 315 aa, Zea mays
  VARIANT 143: note = Ancestral polymorphism is A, Derived polymorphism is T
  VARIANT 239: note = Ancestral polymorphism is G, Derived polymorphism is S
MAAAWAVLAAVLVAAQVASAAPVTAPAFLWAPKNYGFRSDDAKEVVHYQTISPKNLAKSVLEEGGWSTFMCSREDTEKHVDVAIVFIGSKLQSSDISKDKQVDPALADTLKLSFTESEFSMAFPYVSTSDDEKLEESLLSGFTENCKSGFGRNRITYTDTCAVSGQDLKTYHNMDAINDLVVSGRTNPSGQTDVIVFCSGGFEKLGTTESEGELLSQLVDLLKLSGARHTILYASQPSGYLLENPSGSPVARHLAERTNGTKTGLLSKCDGECLVKSTLLEGTFVGIVLLIILISGLMCMMGIDTPSKFEAPQES

SEQ ID NO: 5134 - protein, 322 aa, Zea mays
  VARIANT 36: note = Ancestral polymorphism is S, Derived polymorphism is R
MVELEPSVKSEHGGGVGLVLPPGFRFHPTDEEVITSYLLHKFLNPSFAPHAIGEVDLNKCEPWDLPSKAKMGENSKEWYFFCHKDMKYPTGTRANRATKEGYWKATGKDREIFKPAAGRDRDRELVGMRKTLVFYMGRAPRGTKTNWVMHEFRLEGKSRHTCNDLRFNPKDEWVVCKVHHKGAEEASAAKKSAGGGGEEHYYSTATPNVSSVEGGDEFLVDSLLDYSSYFNCFATGGLPLPSTTANSAAAPATNDDDSSWSMLRHAPADQQAMVGSYSLHHQAMKAKTVGGVTSPSFSAGLPSSPVADYVGNDASGYHTNNY

SEQ ID NO: 5135 - protein, 678 aa, Zea mays
  VARIANT 508..678: note = Derived polymorphism lacks residues 508 to 678
  VARIANT 389: note = Ancestral polymorphism is Q, Derived polymorphism is L
  VARIANT 68..678: note = Derived polymorphism lacks residues 68 to 678
MGSSSVLLFPSSSSAAPSAPHSFPHSHATAIASSHSLLPPLPCSNPPPPLSSQDHVLIHYIHQLDEQEAATMVRKRPAPDMDLPPPRRHVTGDLSDVTAAAAAGGGPGAPSSASAQLPALPTQLHQLPPAFQHHAAEVDVPPQPHPPAHSQAGGEAPASTTAWVDGIIRDIIGSSGGGAVSITQLIHNVREIIHPCNPGLASLLELRLRSLLAADPAPLPQQQRALLHGAPAAAAGLALPLPPPLPDKRRHEPAPRCQQQQQEEPHPAPQSPKVPTAEETAAASAAAAKERKEVQRRKQRDEEGLHLLTLLLQCAEAVNADNLDDAHQTLLEIAELATPFGTSTQRVAAYFAEAMSARVVSSCLGLYAPLPPGSPAAARLHGRVAAAFQVFNGISPFVKFSHFTANQAIQEAFEREERVHIIDLDIMQGLQWPGLFHILASRPGGPPRVRLTGLGASMEALEATGKRLSDFADTLGLPFEFCAVDEKVGNVDPQKLGVTRREAVAVHWLHHSLYDVTGSDSNTLRLIQRLAPKVVTMVEQDLSQSGSFLARFVDAIHYYSALFDSLDASYGEDSPERHVVEQQLLAREIRNVLAVGGPARAGAGGARFGSWREELARSGFRAASLAGGAAAQASLLLGMFPSDGYTLVEEKGALRLGWKDLCLLTASAWRPVQTPPCR

SEQ ID NO: 5136 - protein, 491 aa, Zea mays
  VARIANT 239: note = Ancestral polymorphism is L, Derived polymorphism is P
  VARIANT 267: note = Ancestral polymorphism is R, Derived polymorphism is H
  VARIANT 278: note = Ancestral polymorphism is L, Derived polymorphism is P
MGNCGTREENAVVAAHAQVQQLHLLQNPAKNAIGDRKHNRTSSDISDPSTPRKAEDAKNISIYNDVIVFTLFELETITKSFRADYVLGEGGFGTVYKGYIDENVRVGLKSLPVAVKVLNKDGHQGHREWLTEVNCLGQLRHPNLVKLIGYCCEDDHRLLVYEFMFRGSLENHLFRSNFPTDHEHIRNELFYNYALPHLRTTRENSVDQTSCFSCSQRQLHHYPGVLGCQSHWELLKGLLASTMLKGLSSTEISRHQIFYWTLLSVNHFLMLPSPFSVPLLSSNGNTYMFDIFIFLFPLPQDYTAKLSDFGLAKAGPEGDQTHVSTRVMGTYGYAAPEYVMTGHLTARSDVYSFGVVLLELLTGRKSIDKSRPSREQSLVDWALPKLNDKRRLLQIIDPRLEGQYSARAAHKACSLAFYCLSQNPKARPLMSDVVETLEPLQGSGGGDGRGQPSGLPDYRGRRRITGNSVHFRAIPNPKCSPAVPATACRVR

SEQ ID NO: 5137 - protein, 351 aa, Zea mays
  VARIANT 59: note = Ancestral polymorphism is R, Derived polymorphism is S
  VARIANT 159: note = Ancestral polymorphism is R, Derived polymorphism is W
  VARIANT 244: note = Ancestral polymorphism is G, Derived polymorphism is A
  VARIANT 245: note = Ancestral polymorphism is G, Derived polymorphism is S
MAPAISKPLLTDLVAQIGKVPSSHIRPVGDRPDLANVDNESGAGIPLIDLKKLNGPERRKVVEAIGKACESDGFFMVTNHGIPAAVVEGMLRVAREFFHLPESERLKCYSDDPNKAIRLSTSFNVRTEKVSNWRDFLRLHCYPLQSFVDQWPSNPPSFRQVVGTYATEARALALRLLEAISESLGLERSHMVAAMGRHAQHMAVNYYPPCPQPELTYGLPGHKDPNAITLLLQDGVSGLQVQRGGRWVAVNPVPNALVINIGDQMQALSNDRYKSVLHRVIVNSESERISVPTFYCPSPDAVIAPADALVDDGHPLAYRPFTYQEYYDAFWNMGLQSASCLDRFRPGGSLE

SEQ ID NO: 5138 - protein, 255 aa, Zea mays
  VARIANT 194: note = Ancestral polymorphism is R, Derived polymorphism is L
MTAAAFPDRSSGMMMAMSTSRIHPSSAAETATTTQPLPPPPLPLPLPPLPPRRAGGRALHHTVWKRSSMGFPGTDGFSVYDAAGALAFRVDNYSRRRKVFAGELLLMDGQGAPLLALRPQIFSMHDQWNCYAATASEEGEGKRTRPRRRLFSMRKCSLLQKGHEAQVSMSGPCGSGCGSFWVEGCFARRSCKIRSGGGEEVARITRKNAGAATALLGDDVFSLVVQPGADCALVMAFVVVLDRICWQPYTPRICS

SEQ ID NO: 5139 - protein, 181 aa, Zea mays
  VARIANT 22: note = Ancestral polymorphism is L, Derived polymorphism is R
  VARIANT 26: note = Ancestral polymorphism is G, Derived polymorphism is D
  VARIANT 74: note = Ancestral polymorphism is R, Derived polymorphism is M
MSNPSFDHSYELPLRRNLLLLRDLLDLLRFIAGVILDRLGVAPCQGEVHLPGQALGGVGEHVNDVDLERLLEAMLWETVTRSLTAPRYRRRRVAQPADVQLDAEGDAEGAAVCAICLAGLEQGDFQAVVELCGCSHAFHAACIDAWVRSGDGAATCPLCRAPMLPTAWDDVQSSFGARRGD

SEQ ID NO: 5140 - protein, 221 aa, Zea mays
  VARIANT 160: note = Ancestral polymorphism is A, Derived polymorphism is V
MAATGGSVLPTHTAPSAPAYHPSSTKPPPPRRRCLCLCVVVTLALLAALAITLLVLFLTVLKVRDPTTRLVSTRLAGIAPRLTFPAVSLQLNVTLLIVVAVHNPNPASFAYASGGHTDVTYRGAQVGDAEIEPGRVPSRGDANVSLALTLQADRFAAGLAQLVADVEAGAVELQASTRIPGEVAIFGVFRRHAVAYSDCTFVFAVPEMRVRSQQCRDRTKL

SEQ ID NO: 5141 - protein, 253 aa, Zea mays
  VARIANT 182..253: note = Derived polymorphism lacks residues 182 to 253
MCYFRVVINYDFPTGIEDYVHRIGRTGRASTTRVSYTFFSEQDWKHVGDLVKLLQGANQHVPPQLCDMAARSASRGPRNQAVGMRRWDGPGGSRFEPGAGGSVGYGGVREGPRGFGGREGSGGFGVRESPTMLWWSRSRSRNRSWSCNQSRSSSWSRSRRKSRDNGAAPERRPRARSGFDVQPPATGGAGPAPVLVPGPAAPPIPALTAQQLLADTSSMSPMSPGGIVQPAAAPLICGGNDNNFGGIPTGQPL

SEQ ID NO: 5142 - protein, 231 aa, Zea mays
  VARIANT 38..231: note = Derived polymorphism lacks residues 38 to 231
  VARIANT 43: note = Ancestral polymorphism is N, Derived polymorphism is S
  VARIANT 84: note = Ancestral polymorphism is T, Derived polymorphism is M
  VARIANT 90: note = Ancestral polymorphism is A, Derived polymorphism is T
MSLPREGRLPFPDPPTASSALPSFVSRMPVKWEPPSSQMLEYSPNNEDMWEPDLRGGGAPSFLGMTRCGQQRRWVATNRWSTTMILDDDARDGISEGQFNYVLILEMDAIRKACASLEDGYLPPVTFVVIQKRHHTRLFPRVHGRRDVTDRSGNILPGTVVDTEICHPREFDFYLCSHAGIQGTSRPIHYHVLYDENRFSADGLQILTNNLCYTYARCTHAVSIVILAFSL

SEQ ID NO: 5143 - protein, 133 aa, Zea mays
  VARIANT 43: note = Ancestral polymorphism is R, Derived polymorphism is S
MSRSCCVAVSVLLAVAATASATAPAWLHEEAMATGPLVAEGARVAPSASTWAADKASPARPSGGMATQGDDQSSSGGSGSSGEHGKEEGEKQGKSCLTKEECHKKKMICGKGCTLSAHSKCAAKCTKSCVPTC

SEQ ID NO: 5144 - protein, 154 aa, Zea mays
  VARIANT 141: note = Ancestral polymorphism is P, Derived polymorphism is A
MTFPLVCYCYAVPRPVAALLKLLHAAVLVFVLLLSFLGLYEFSYDPEDHAPPAINGGRPRPEAVKRRLPLVEFLELVDSSSSPSSGLGAEPTCRVCLEWLEAKDEVRRLGNCTHAFHTRCIDRWIDLGEVTCPLCRSHLLPRRRAGLLGMARLG

SEQ ID NO: 5145 - protein, 321 aa, Zea mays
  VARIANT 25: note = Ancestral polymorphism is P, Derived polymorphism is L
  VARIANT 28: note = Ancestral polymorphism is A, Derived polymorphism is V
  VARIANT 98: note = Ancestral polymorphism is T, Derived polymorphism is R
  VARIANT 133: note = Ancestral polymorphism is A, Derived polymorphism is T
MDIFLIRACLLRLLLVLFAAAATSPAAAQSQPPSPARILDAALQDYAYRAFARPRTGIVYNATLPGNLTGIAVSAVRLRSGSLRRKGFPGYFQFGVPTGVVVQPYVERVVLVFHDLGNWSDHYYPLPGYTYLAPVLGLLVYDAANLSAAGLQELNVIASGGPISVRFGGNVRAVPAGSAAPRCVVFDLDGVPQFRDLEATDMCSTYRQGHVSIVVNSSGIAPAPPPPGAIAPSIPTTGGNTKGSSKAWKIAVSVVGAAVALGLMAALLLCLVRHKRDKKLQVMERNAEVGETLRMAHVGRTQAPVALGTRTQPVIENDYTA

SEQ ID NO: 5146 - protein, 85 aa, Zea mays
  VARIANT 54: note = Ancestral polymorphism is G, Derived polymorphism is R
  VARIANT 51: note = Ancestral polymorphism is T, Derived polymorphism is M
  VARIANT 43: note = Ancestral polymorphism is K, Derived polymorphism is N
  VARIANT 42: note = Ancestral polymorphism is E, Derived polymorphism is K
  VARIANT 41: note = Ancestral polymorphism is E, Derived polymorphism is K
  VARIANT 33: note = Ancestral polymorphism is G, Derived polymorphism is D
  VARIANT 32: note = Ancestral polymorphism is I, Derived polymorphism is T
  VARIANT 20: note = Ancestral polymorphism is T, Derived polymorphism is S
  VARIANT 11..85: note = Derived polymorphism lacks residues 11 to 85
MIWSLLLVGVKRTVSMEEMTTKDDPKARKMFIGGLPPSLTEEKDLIVLAKTGFGRTGAFVLPILQELPILQVKYSRCLFSARYSQ

SEQ ID NO: 5147 - protein, 182 aa, Zea mays
  VARIANT 87: note = Ancestral polymorphism is R, Derived polymorphism is Q
MGSAISDRHIRDLAHLASHDGEPHPRPPARQAWISRNSQRAAANGAQQPLIPSPRSPPLPHPSRRRPAPIHHQLTARAARSGGVHRRYYKTSGHGRCYGNNMGPPCAGWVEMMVPVFSRAAWRCAWHMIQNDLIYAWGMDYKLSYCAQGDRSRNVPKLGDGGKATMTAATSALGTADRLAVR

SEQ ID NO: 5148 - protein, 577 aa, Zea mays
  VARIANT 177: note = Ancestral polymorphism is W, Derived polymorphism is R
MAAASSSMDRIAQWVSSQEVPTDLTVRIADSVFSLHKAVMVPKCGYIRRAVAASQTQGPGGGAVELDLSALPGGADAFQKAARCCYGDSLEITARDAAALRCAAEFLDAPDLARRADDFLAQAALRALPGAAAVLRSCEALLPAADELGVARRAADAVALGVCNEALFPTPRAPPGWWAAELAALSPASFRRVVAALRCRRAGPEVVAAAAAAYAERVLAGVLAAPGRRDADQRALLEAVVDALPPAADAPLPAAFLCRLLRAAVTAEASAKTCRDMELRVAAVLDQATAGDLLGVALDGAGERVVNADTVRRVVAACVERQQTQQGRRASLAGGPAGELSALEKVAKTVDEVAAEMASHESLPISKFVGVAGAVPRDARPSHDCLYRAVDIYLKTHPGLDEIEREKVCSVMDPLRLSYQARMHASQNKRLPLQAVLSVLYYDQLKIRSADGSGGTEEGWETQSAAGKARAQARADVSLARENEALRLELARMRAYVSGMQQSSKGSGSRPSSSSLVPGPATATGKKASFLGSVSRTLSRLNPFKGGWAKDTTSIADGRDRTSMHVVKPKRRRFSIG

SEQ ID NO: 5149 - protein, 433 aa, Zea mays
  VARIANT 40: note = Ancestral polymorphism is P, Derived polymorphism is T
  VARIANT 324: note = Ancestral polymorphism is D, Derived polymorphism is V
MESTWEWNSQTCPRLAAPPLRATPRVPLLRCVLLVASCIPPAMPPVADEGEWAAVERRGPHLWASGRPFVVHGFNTYWLMYFAADPATRAAVTAALADAAHSGLNVCRTWAFNDGGHRALQLKPFSYDEEVFQVLVCAVALDFVISEARNHKMRLILSLCNNWEDYGGKAQYVRWGKEAGLDLTSDDDAFFSHATIKSYYKAFVKAVLTRKNTITNVAYMDDPTILAWELINEPHCHSDPSGDTLQAWIEEMASYVKDIDPVHLLEIGVEGFYGPSTPELLHVNPDAYSGTIGTDFIRNHHALGIDLASVHIYSDNWLTHSEEVSHLHFVKTWMQQHIDDAANLLGMPILIGEFGVSLKDGKFGHKFREAFMDTVYNIFLRSWKTGVIGGGCLVWQLFPESAEHMDDGYAVIFAKSPETTLKLLADHSRSLES

SEQ ID NO: 5150 - protein, 253 aa, Zea mays
  VARIANT 61: note = Ancestral polymorphism is D, Derived polymorphism is N
MGMAAKEHFVLVHGEGHGAWCWFKLRWLLEGAGYHVTCIDLAGGGVDPTDPNTIRSFQQYDKPLIDLISTLPEGEKVILIGHGAGGLSVIHAMHEFVDRISQAFFVAATMLPFGFQADEDKKDGLPTLPENEIELTLGAGADDPPTTISLRPEFQRDRLSQQSPEEESVLASMLMRPWPATAISTASFEGDDERLNRIKRIFIKMQRDHMLDPQQQDSMIKKWPPSEVLAIDTDHSPFFSAPEQLFNLIVKSL

SEQ ID NO: 5151 - protein, 359 aa, Zea mays
  VARIANT 125: note = Ancestral polymorphism is R, Derived polymorphism is W
  VARIANT 131: note = Ancestral polymorphism is R, Derived polymorphism is L
  VARIANT 192: note = Ancestral polymorphism is G, Derived polymorphism is V
MLRHCKEALGVAIMLAFARPTKMSPCCPCITPPLLLPTAMTTGVLRPEGFLLLLLLQATVALAVPQQQVLQLQDTVLIDDVVQEAAEEWYHGRHRRTGVAYPLSLPGSLSGVEATVARFRAGSLRRYGVRRFGEFSVPPGLAARGRAAHLIAVRVNLGNLSSVYDEYAVGAGYRLASPVLGLMFYGLARHNGTAALEIDLTGAAIRVNFSVAIPALQPGAAPLCLAVGLNGSVTVTNVEDGTNTCHASDQGHFALVVGGAGDGDGGGGGGEEADIGEVSKWKLALFGAALGAGGTVLLGMVAVAVVSIQRRKSEMAEMERRAYEDEALRVSMVGHVRAPSAAGSRTTPDELESEYCATL

SEQ ID NO: 5152 - protein, 159 aa, Zea mays
  VARIANT 48: note = Ancestral polymorphism is P, Derived polymorphism is A
  VARIANT 91: note = Ancestral polymorphism is T, Derived polymorphism is S
  VARIANT 112: note = Ancestral polymorphism is I, Derived polymorphism is T
  VARIANT 118: note = Ancestral polymorphism is D, Derived polymorphism is Y
  VARIANT 133: note = Ancestral polymorphism is C, Derived polymorphism is S
MASGGVARARLAEERKSWRRSHPHGFMAKPATLPDGSVNLMLWNCVVPGKQGTDWEGGHFPLTLHFDEDYPSRPPHCKFPAGFFHVNVYNTGSVCLSILGDAWKPSITVRQTLIGIQDLLDNPNPASPAQNLSYVLFTQNMPEYASRVRQQAKRYPSLV

SEQ ID NO: 5153 - protein, 350 aa, Zea mays
  VARIANT 28: note = Ancestral polymorphism is L, Derived polymorphism is V
  VARIANT 133: note = Ancestral polymorphism is G, Derived polymorphism is A
MACVADRQAAVREVAQVYELIKLQQPLLLLHSSSSHLAQSLLGKALRALNVALSVMNQQQPPPPPPAVAPVTVVVVKAEPHLSPPSPASADSEATAPPARRGAKRTRRSAAPVGGKKNSSSWATLTAVPYDDGYEWRKYGEKKINGTLFTRSYFRCTYKDDAGCLATKHVQQMDSDDNSSPPMFHVTYHNDHTCSSAKAAAKANTGSSSNNNSHLAALLADCCDGSGCNKGLTTTTINGHAAAAAAAMNMNMKQEPSLLPPPPPLAEPPSACFPYDQMPQQCHQLLFPVSMEQQFPGNGEEIPSAAGSCISGETSWDGYYYSGDMAAAEDDRFHDLERFLLGDSFMDYQY

SEQ ID NO: 5154 - protein, 100 aa, Zea mays
  VARIANT 51..100: note = Derived polymorphism lacks residues 51 to 100
  VARIANT 60: note = Ancestral polymorphism is E, Derived polymorphism is K
  VARIANT 61: note = Ancestral polymorphism is R, Derived polymorphism is H
  VARIANT 66: note = Ancestral polymorphism is G, Derived polymorphism is A
  VARIANT 81: note = Ancestral polymorphism is D, Derived polymorphism is G
MTMVAASPEKLHCGAAGSSDKEKEVAGRDDAEVMLPQLSDEPLREKAQRIQVMLTGGMSERLPDRGKKLLATLDAIHREQDRRQAQGDGARAPGNEACER

SEQ ID NO: 5155 - protein, 317 aa, Zea mays
  VARIANT 103: note = Ancestral polymorphism is M, Derived polymorphism is I
  VARIANT 107: note = Ancestral polymorphism is E, Derived polymorphism is K
  VARIANT 156: note = Ancestral polymorphism is S, Derived polymorphism is L
  VARIANT 160: note = Ancestral polymorphism is P, Derived polymorphism is T
  VARIANT 190: note = Ancestral polymorphism is E, Derived polymorphism is K
  VARIANT 211: note = Ancestral polymorphism is G, Derived polymorphism is C
  VARIANT 216..317: note = Derived polymorphism lacks residues 216 to 317
  VARIANT 225: note = Ancestral polymorphism is E, Derived polymorphism is K
  VARIANT 233..317: note = Derived polymorphism lacks residues 233 to 317
MIIYRLMRAYISSSSLRKSALRALAKALTTDQLFNLREQFTLFGPNKSGHISLQNMKTALMKNSSGAMNDSRILDFVNSICNIQYGMIDFEEFSATAISVYQMEGLETWEEHAQQAYELFDKEGNRPIVIEELASELGLGPSISFHVVLKDWIRHSDGHPGSLWVGLLTFMFEFGRLSLSQVGKGLLKDENAQKLALQHWLEAIDPRHRYGHNLHCYYDCWLHSESKQPFFYWCLCSNSFMAALEEILYQFEEKLQAEREEAARKQEELQAQLQAQQAALEENQSLLRQAQEEVKGMHTKFEETNALLRAVLKLQKD

SEQ ID NO: 5156 - protein, 109 aa, Zea mays
  VARIANT 38: note = Ancestral polymorphism is A, Derived polymorphism is V
  VARIANT 60: note = Ancestral polymorphism is G, Derived polymorphism is D
  VARIANT 85: note = Ancestral polymorphism is T, Derived polymorphism is N
MGSRFASAVLQLLVCATLLLGCCHGRFVVDKNNLKVTAPDDLKGTYECAIGNFEVPQYGDTMVGFVAYPKANRKACKSFEDFDINYKAKPGAFPTFLLVDRGETSYLIL

SEQ ID NO: 5157 - protein, 222 aa, Zea mays
  VARIANT 185: note = Ancestral polymorphism is Y, Derived polymorphism is H
  VARIANT 182: note = Ancestral polymorphism is C, Derived polymorphism is Y
  VARIANT 181: note = Ancestral polymorphism is K, Derived polymorphism is M
  VARIANT 165: note = Ancestral polymorphism is V, Derived polymorphism is M
  VARIANT 158: note = Ancestral polymorphism is G, Derived polymorphism is S
  VARIANT 126: note = Ancestral polymorphism is Y, Derived polymorphism is H
  VARIANT 99..222: note = Derived polymorphism lacks residues 99 to 222
  VARIANT 87..222: note = Derived polymorphism lacks residues 87 to 222
  VARIANT 77: note = Ancestral polymorphism is A, Derived polymorphism is T
  VARIANT 24: note = Ancestral polymorphism is P, Derived polymorphism is S
MGAAARLSLARGQGLGDRFSMGDPDCGDPDCGQAHGHIQIDALTTASPSAPSIQPAHTDTIGEEEVGERMILAVLFANSDGNILIERFHGVPVEERLHWRSFLVKLGSKNLKGSKNEELHVASHKHVSCSYSLIILNWPFLFQLPYEVMTPLQVAVAGVQKGYVMYLVRVRHGGRKRPLPKCIVYGKPKHQGITQLKFQRYKRYVAEERAIRKLDGLRVLMS

SEQ ID NO: 5158 - protein, 624 aa, Zea mays
  VARIANT 117..624: note = Derived polymorphism lacks residues 117 to 624
  VARIANT 11: note = Ancestral polymorphism is R, Derived polymorphism is Q
MGSRFASAALRLLVCAALLLGCCHGRFVVEKNSLKVTAPDDLKGTYECAIGNFGVPQYGGTMVGFVAYPKANRKACKSFDDFDISYKAKPGAFPTFLLVDRGDCYFAKKAWNAQKAGAAAILVADDKDEPLITMDNPEESGNTDYLENITIPSALITKSFGDKLKKVIDNGDMVSVNLDWREALPHPDERVEYEFWTNSNDECGLKCDSQIDFVKSFKGAAQVLEKKGYTEFTPHYITWYCPEAFILSKQCKSQCINHGRYCAPDPEQDFSKGYDGKDVVVQNLRQVCVFKVAKEHKKPWLWWDYVTDFAIRCPMKEKKYTKECADGVIKSLGLDHKAIDKCIGDPDADEENPVLKAEQDAQIGKGSRGDVTILPTLVINNRQYRGKLDKGAVLKALCAGFKETTEPAVCLSEDIQTNECLENNGGCWQDKAANITACKDTFRGRVCECPIVKGVKFVGDGYSHCEASGSGRCEINNGGCWKDTKNGRTYSACNDDGCKCPDGFKGDGRHKCEDIDECKERTVCQCKECKCKNTWGSYECGCSGGLLYMKEHDTCISKSGASEAGWGFLWVIFFGLVAAGVAGYAVYKYRIRRYMDSEIRAIMAQYMPLDNQGDVQSHSHHIEM

SEQ ID NO: 5159 - protein, 1188 aa, Zea mays
  VARIANT 269: note = Ancestral polymorphism is S, Derived polymorphism is L
MALGDLMASRFGHSSSSPSPSLAPVPPLPHHHHNHHQNHVADDLPVASGPEPKNGLEVPEVEKPASEAYLPQVVVLCDYRHEGIDEATTAALSTSGLVSNWRPKDRTKTGCGALVLCLNISVDPPDVIKISPCARMECWIDPFSMAPPKALESIGKTLHSQYERLQPKARYKLQLDPTVEEVKKLSNTCRKYAREERVLFHYNGHGVPKPTSNGEIWVFNKSYTQYIPLSITDLDSWLKTPSIYVFDCSAAGIIVKAFLERLDWSSTSSASSQKDFILLAACEAHQTLPQSAEFPADVFTACLTTPIKMALHWFCKRTSLHGPLDRSLIDQIPGRQNDRKTLLGELNWIFTAITDTIAWNVLPRDLFQRLFRQDLLVAGLFRNFLLAERIMRSANCSPVSYPLLPPTHQHHMWDAWDMAAEICLSKLPQLIADPNTEFQPSPFFMEQLMAFEVWLDHGSKDKKPPELLPIVLQVLLSQPHRSRVLVLLGRFLDMGPWAVDLALSVGIFPCVLKLLQSSAMDIRQNLVFIWTKILSLDKSCQVELVKDGGHAYFIKFLDSLDAFPEQRAMAAFVIAVIVDGYRMGQEACMNAGLMDVCLRHLQPENSHAQTEPLLLQWLCLCLGKLWEDFPEAQLLGLQTNGPEIVICLLSEPQPEVRAAAVFALGNLLDTTSNSHDDGSDDDEKVKAEINVVRSLLQISSDGSPLVRSEVAIALTRFALGHNKHLKSVASEYWKPQPNSLLKSLPSLANISNPSNVYSPNNILQGRIGPVLRVASDSGAAGRDGRISTSNPIATSSIMHGSPESDDSSQHSDSGILLRGNASNGGFSYTRSRPVDNVIYSQFISTMYSVSKDPDPTIATIGRRALSLIGVEQVVMKNTRFNSGGSHRGETSASNFGMARSSSWRDMKSGSILMKFMTPPVSPPQHDYLPGLRRVCSMEFGQHPINPPNGLADRLLSSAAGPSNAEPLPQSTIYNWSCVQFSRPVLTVSDDNEETNARREEREQIALDYITKCQRSSCKMTSQIASWDTKFELGTKAALLLPFSPIVVAADENEQIRVWNYDDALPVNSFQNHKLSGRGLSKLLLINELDESLLLAASSDGNVRIWKNFAQKGGEKLVTALSSVQGHRAAGRSIVIDWQQQSGYLYASGDMSSILVWDLDKEQLLSTIQSTADTAISSLAIYCTLSLKK

SEQ ID NO: 5160 - protein, 249 aa, Zea mays
  VARIANT 43: note = Ancestral polymorphism is I, Derived polymorphism is T
  VARIANT 130: note = Ancestral polymorphism is R, Derived polymorphism is W
MEWDSESDGAGSVGVDEQEEEQEEERGGEGGGVDAGGMFTLAIEGMLRASGPCGLVVTNALEPDCPIIYANRGFEEATGYRVEEFLGRNCNELRLSTSQVRSGHFAAGFADGSVRIYDVRSPDRFVYVARPHAPRTEKIVSASQAGDIQFLDVRRAAEPYLTIEAHRGSLTALVVHRYAPVVASGSAKQMIKVFSLGGEQLTIIGYLPSFMGQRIGSVNCLSFHPYKSLLAAGAGDNALVSIYAEENYK

SEQ ID NO: 5161 - protein, 725 aa, Zea mays
  VARIANT 227..725: note = Derived polymorphism lacks residues 227 to 725
  VARIANT 101: note = Ancestral polymorphism is D, Derived polymorphism is Y
  VARIANT 55: note = Ancestral polymorphism is P, Derived polymorphism is T
  VARIANT 43: note = Ancestral polymorphism is L, Derived polymorphism is V
  VARIANT 42: note = Ancestral polymorphism is L, Derived polymorphism is I
  VARIANT 40: note = Ancestral polymorphism is D, Derived polymorphism is V
  VARIANT 6..725: note = Derived polymorphism lacks residues 6 to 725
MTMTAQQHRHPKRRCVALSLSPSLARIPGAPTPPLDSLADELLFLVLDRVAQADPRALKSFALASRACHAAESSHRRTLRPLRADLLPAALARYPTATRLDLTLCARVPDAALASAAVSGSSSALRAVDLSCSRGFSAAGVSELAVACPGLVDLDLSNGVDLGDAAAAEVARARALRRLSLARWKPLTDMGLGCVAVGCTELRELSLKWCLGLTDLGIQLLALKCRKLTSLDLSYTMITKASLPPIMKLPSLQELTLVGCIAIDDDALGSLERECSKSLQVLHMSQCQNITGVGVSSILKSVPNLLELELSYCCPVTPSMVRSFQKLAKLQTLKLEGSKFMADGLKAIGTSCASLRELSLSKSSGVTDTELSFAVSRLKNLLKLDITCCRNITDVSLAAITSSCSSLISMRMESCSRVSSGALQLIGKHCSRLEELDLTDSDLDDEGLKALARCSELSSLKIGICLKISDEGLTHIGRSCPKLREIDLYRCGGLSDDGIIQIAQSCPMLESINLSYCTEITDRSLISLSKCSKLNTLEIRGCPRVSSIGLSETAMGCRLLSKLDIKKCFGINDAGMLYLSQFSHSLRQINLSYCSVTDIGLLSLSCISGLQNMTIVHVAGITPNGLAATLMVCGGLTKVKLHEAFRSMMLPHMIKNVEARGCVFQWIDKPFKVFYGSPEKLGSIQLCFVLPDLNAMLCSFLCFQLRWNLVMYGSNSRKTCLYDEN

SEQ ID NO: 5162 - protein, 119 aa, Zea mays
  VARIANT 23: note = Ancestral polymorphism is F, Derived polymorphism is I
  VARIANT 36..119: note = Derived polymorphism lacks residues 36 to 119
MHSPVAFPTNADDSLDNPDLGPFLLNQACDTMPGWCLHIFPSSKSKYMGNSCRSCNGGEYVDVRWSHHHIHGRFGHPPLHPNWHLLAPWCHNGRKNNMKNWVPKDLRATSSQPVTEDFE

SEQ ID NO: 5163 - protein, 364 aa, Zea mays
  VARIANT 247: note = Ancestral polymorphism is L, Derived polymorphism is R
  VARIANT 259: note = Ancestral polymorphism is P, Derived polymorphism is L
  VARIANT 281: note = Ancestral polymorphism is W, Derived polymorphism is C
  VARIANT 283: note = Ancestral polymorphism is R, Derived polymorphism is W
  VARIANT 300: note = Ancestral polymorphism is A, Derived polymorphism is S
  VARIANT 316: note = Ancestral polymorphism is Y, Derived polymorphism is C
MGMLMNNDDSSSMHPRPQVLASLPLLVYEYKDHPNATTRMLIYSLPERSIVYTHNSSRPQMMMMEGNLSFSTPQGWLVILGQASEASIWHPLTGETITLPPIHGDHRIPDSCKCLLTRSSVAHPDCAVVLLDVTDPLMWFCPVNGGADRMWVQHAYDIGDHFFPEEFRTPSTPTKNVVDDVAALGGKLYFRFTESDQDFMGVFDFDFHGHTPAVEFYEFDVSEEFNLKFPEGVCSASIHLVESMDELFAVCIFYVDFDPTNISAAHIFKMEEICDEEPVAWHRVDDIGDRAFLLTGTNMSTWCSVSTNNLKGNTLYFLGHLVAGHRNLCIYDIQEQSMEIVQVHDQEDMEIVRTPPYWINVPPC

SEQ ID NO: 5164 - protein, 623 aa, Zea mays
  VARIANT 515: note = Ancestral polymorphism is G, Derived polymorphism is V
MEPGAPWRDPRQGYSYGVGSAMQLQLQLQQRADAAAGGGVLKRSLGELERWQHHQQQQVAAQQALYLRAVRQRTAAAVDIAALLGGTPAQPLVLPGSSFGGGLASPSSTLSSSLTTASRAAVPLMQPQLQRQVPLTTSSPQTQPFGLSTAPLPQPSVSSELFILQELEKQLLDDDDDDEPVAAMSGTGSAVTNSEWEETIQQLSSIAAAPSPGLPAAATPNNNNNNVGMTRSPSNSSTASSSASCSPPTPGAASRQLLSEAAVAIADGHHEAAAAHLAALKRAANQHGDAEQRLIAMMVAALSSRIAPAASAPSQLLADLCSVEQRAGSQLLQDLSPCFRVALHAASAAIVEAVGDHRAIHLVDFDVSFPQHAALIQYLADRRVQGRSLKVTAVTDPSSPFTQSLTASLPAIEERLKKLAERAGVEYRFTVVSCRAAELDASRLCCEPGEAVAVNLAFALSHVPDESVSPANPRDELLRRVRALGPQVVTLVEQELNTNTAPLAARFTDACAHYGAILESLDATLAREIAEKARAEAALSKKAANAVGRDGPDRLERCEVFGKWRARFGMAGFRPVSLGSSIAEELVGARVGHVPPGFTVKAENGVLRFCWMGRAVTVASAWR

SEQ ID NO: 5165 - protein, 371 aa, Zea mays
  VARIANT 54: note = Ancestral polymorphism is E, Derived polymorphism is K
  VARIANT 59: note = Ancestral polymorphism is Y, Derived polymorphism is H
  VARIANT 307: note = Ancestral polymorphism is A, Derived polymorphism is S
  VARIANT 325: note = Ancestral polymorphism is L, Derived polymorphism is I
MSSYCTVMGMLMNNDDSSSMHPRPQVLASLPLLVYEYKDHPNATTRMLIYSLPERSIVYTHNSSRPQMMMMEGNLSFSTPQGWLVILGQASEASIWHPLTGETITLPPIHGDHRIPDSCKCLLTRSSVAHPDCAVVLLDVTDPLMWFCPVNGGADRMWVQHAYDIGDHFFPEEFRTPSTPTKNVVDDVAALGGKLYFCFTESDQNFMGVFDFDFHGHTPAVEFYEFDVSQEFNLKFPEGVCSACIHLLESMDELFAVCIFYVDFDPTNISAAHIFKMEEICDEEPVAWHRVDDIGDRAFLLTGTNMATWCSASTNNLKGNSLYFLGHLVAGHRNLCIYDIQEQSMEIVQVHDQEDMEIVRTPPYWINVPPC

SEQ ID NO: 5166 - protein, 368 aa, Zea mays
  VARIANT 42: note = Ancestral polymorphism is T, Derived polymorphism is A
  VARIANT 56: note = Ancestral polymorphism is Y, Derived polymorphism is H
  VARIANT 68: note = Ancestral polymorphism is M, Derived polymorphism is T
  VARIANT 77: note = Ancestral polymorphism is P, Derived polymorphism is S
  VARIANT 82: note = Ancestral polymorphism is L, Derived polymorphism is V
  VARIANT 138: note = Ancestral polymorphism is T, Derived polymorphism is N
  VARIANT 157..368: note = Derived polymorphism lacks residues 157 to 368
  VARIANT 210: note = Ancestral polymorphism is D, Derived polymorphism is Y
  VARIANT 214: note = Ancestral polymorphism is H, Derived polymorphism is R
  VARIANT 228..368: note = Derived polymorphism lacks residues 228 to 368
  VARIANT 238: note = Ancestral polymorphism is C, Derived polymorphism is G
  VARIANT 263: note = Ancestral polymorphism is P, Derived polymorphism is L
  VARIANT 304: note = Ancestral polymorphism is A, Derived polymorphism is S
  VARIANT 320: note = Ancestral polymorphism is Y, Derived polymorphism is C
MGMLMNNDDSSSSRTSMHPRPQVLASLPLLVYEYEDHPNATTRMLIYSLPERSIVYTHNSSRPQMMMMEGNLSFSTPQGWLVILGQASEASIWHPLTGETITLPPIHGDHRIPDSCKCLLTRSSVAHPDCAVVLLDVNDPLMWFCRVNGGADRMWVQHAYDIGDHYFPEEFRTPSTPTKNVVDDVAALGGKLYFRFTESDQDFMGVFDFDFHGHTPAVEFYEFDVSEEFNLKFPEGVCSASIHLVESMDELFAVCIFYVDFDPTNISAAHIFKMEEICDEEPVAWHRVDDIGDRAFLLTGTNMSTWCSASTNNLKGNSLYFLGHLVAGHRNLCIYDIQEQSMEIVQVHDQEDMEIVRTPPYWINVPPC

SEQ ID NO: 5167 - protein, 560 aa, Zea mays
  VARIANT 217..560: note = Derived polymorphism lacks residues 217 to 560
  VARIANT 171..560: note = Derived polymorphism lacks residues 171 to 560
  VARIANT 120: note = Ancestral polymorphism is P, Derived polymorphism is L
MAATSPTPTLAKPAAAAHARAPSAGPRRVSLTSCRCHRRRSTPSRWRSLPRCSRRGGKPVVTEVIDAAAPDKGPETGSKGEEEKEAVAGRGAPGWLRLDGVAADILAIAAPAVLALAADPITALVDTAFVGHIGSAQLAAVGASTSIFNLVSKLFNVPLLNVTTSFVAEQQAKDGNSNTGGERDEFLTPLEKARQPKKVLPAVSTSLALAAGIGLLEMVALIVGSGTLMNIIGIPVDSPMRAPAEQFLTLRALGAPPIIVALAAQGAFRGFLDTRTPLYAVGAGNLLNALLDVVLIFPLGLGVSGAALATVTSEYLTAIILLWKLNDEVDLLSWNIIEDGVIRYLKSGGLLIGRTIAVFLTLTLATSLAAREGPVPMAGYEICLQVWLTISLLNDALALAGQALLASEYAKGNYKQARTVLYRVLQVGGVTGFVLAASLFVGFGSLSLLFTDDPAVLDVARSGVWFVTISQPVNAIAFVADGLYYGVSDFAYAAYSTFFAGAVSSIFLLLAAPNYGLGGIWAGLTLFMSLRAVAGFWRLGSKGGPWNVILSGQIVSKTKI

SEQ ID NO: 5168 - protein, 107 aa, Zea mays
  VARIANT 35: note = Ancestral polymorphism is G, Derived polymorphism is R
  VARIANT 43: note = Ancestral polymorphism is Y, Derived polymorphism is C
MALSLDNLIKAAAAVGSARSGRLCLPASEDLLGEGHMRFAGWYLKIAAVGASIGAAMELFMIHTGFYEKVTVLESEKRAWESSPEAQAMREALNPWHKHDEQEQQKK

SEQ ID NO: 5169 - protein, 1059 aa, Zea mays
  VARIANT 343..1059: note = Derived polymorphism lacks residues 343 to 1059
MLPRKRGVDAGEDQDLHNKALRAAAVAQDKEKVVAEMGGRAPEIDEDLHSRQLAVYGRETMKRLFGSNVLISGLQGLGAEIAKNLVLAGVKSVTLHDDGKVELWDLSSNFFLSEKDVGQNRALACVPKLQELNNAVIISTITGDLIKEQLSNFQAVVFTDMSIEKAVEFDDYCHSHQPPIAFIKSEVCGLFGSVFCDFGPEFTVLDVDGEEPHTGIVASISNDNPALVSCVDDERLEFQDGDLVVFSEVHGMTELNDGKPRKIKNARPYSFTLEEDTTSYGTYIRGGIVTQVKPPKVLNFKTLKEAIKEPGEFLMSDFSKFDRPPLVHLAFQALDKFRTELTRFPIAGSADDVQKLIDLAISINETLGDSKLEEIDKKVLQHFASGSRAVLNPMAAMFGGIVGQEVVKACSGKFHPLYQFFYFDSVESLPVEPLEPSDLKPENSRYDAQISVFGAKLQKKLEQSKIFMVGSGALGCEFLKNLALMGISCSQNGKLTVTDDDVIEKSNLSRQFLFRDWNIGQPKSTVAATAAMAINPKLHVEALQNRASPETENVFNDAFWESLDAVVNALDNVTARMYIDSRCVYFQKPLLESGTLGAKCNTQMVIPHLTENYGASRDPPEKQAPMCTVHSFPHNIDHCLTWARSEFEGLLEKTPTEVNAFLSNPGGYATAARTAGDAQARDQLERVIECLETDKCETFQDCITWARLNFLLMVYIRFEDYFSNRVKQLTFTFPEDAMTSSGAPFWSAPKRFPRPLEFSSSDSSHLNFLLAASVLRAETFGIHIPDWAKNPKKLAEAVDKVIVPDFQPKQGVKIETDEKATSLSSASVDDAAVIEELIAKLEEIFKTLPPRFHMNPIQFEKDDDTNFHMDLIAGFANMRARNYSIPEVDKLKAKFIAGRIIPAIATSTAMATGLVCLELYKVLAGGHKVEDYRNTFANLAIPLFSMAEPVPPKTIKHQDMSWTVWDRWTITGNITLRGLLGWLKEKGLNAYSISCGTSLLYNSMFPRHKDRLDKKVVDVAREVAKVEVPSYRRHLDVVVACEDDDDNDVDVPLVSIYFR

SEQ ID NO: 5170 - protein, 238 aa, Zea mays
  VARIANT 198: note = Ancestral polymorphism is T, Derived polymorphism is I
  VARIANT 210: note = Ancestral polymorphism is R, Derived polymorphism is C
MPKSKRNRPVTLSKTKKKPGLERKGKVVAEIKDAVDKYSSAYVFTYDNMRNQKLKDLREQLKSSSRHGAHIACLLIPSSALVKSILPFQAIFFCSRIFLAGKKFLQGNSGLLFTNLPRDDVERMFREFEEHDFARTGSTAADTVELKEGPLEQFTHEMEPFLRKQGLPVRLNKGVVELVADHVVCEEGKPLSPEAAQILRLLGIQMATFRLYLVCRWSSDEFEAYKEGLMHLGADDSS

SEQ ID NO: 5171 - protein, 1739 aa, Zea mays
  VARIANT 1269..1739: note = Derived polymorphism lacks residues 1269 to 1739
  VARIANT 301..1739: note = Derived polymorphism lacks residues 301 to 1739
  VARIANT 65: note = Ancestral polymorphism is P, Derived polymorphism is L
MAAANAPIAMREALTLTSLGIAPQFVTFTHVTMESEKYICVRETSPQNSVVIIDMAMPMQPLRRPITADSALMNPNTRILALKAQIPGTTQDHLQIFNIEAKTKIKSHQMPEQVVFWKWITPKLLGLVTQTSVYHWSIEGDSEPTKMFDRTANLANNQIINYRCDPAEKWLVLIGIAPGAPERPQLVKGNMQLFSVDQQRSQALEAHAASFATFKVVGNENPSTLICFASKTTNAGQITSKLHVIELGAQPGKPGFSKKQADLFFPPDFQDDFPVAMQVSQKYGLIYVITKLGLLFVYDLETAAAVYRNRISPDPIFLTAESSSTGGFYAINRRGQVLHATVNDATVVPFVSGQLNNLELAVNLAKRANLPGAENLVVQRFQELFAQTKYKEAAELAAESPQGLLRTPETVAKFQSVPVQAGQTPPLLQYFGTLLTRGKLNAFESLELSRLVVNQNKKNLLENWLAEDKLECSEELGDLVKTVDNDLALKIYIKARATPKVVAAFAERREFDKILIYSKQVGYTPDYLFLLQTILRTDPQGAVNFALMMSQMEGGCPVDYNTITDLFLQRNMIREATAFLLDVLKPNLPEHAFLQTKVLEINLVTYPNVADAILANGMFSHYDRPRIAQLCEKAGLYLRALQHYAELPDIKRAIVNTHAIEPQALVEFFGTLSREWALECMKDLLLVNLRGNLQIVVQAAKEYSEQLGVDACIKLFEQFKSYEGLYFFLGSYLSSSEDPEIHFKYIEAAARTGQIKEVERVTRESNFYDAEKTKNFLMEAKLPDARPLINVCDRFGFVPDLTHYLYTNNMLRYIEGYVQKVNPGNAPLVVGQLLDDECPEDFIKGLILSVRSLLPVEPLVDECEKRNRLRLLTQFLEHLVSEGSQDVHVHNALGKIIIDSNNNPEHFLTTNPFYDSRVVGKYCEKRDPTLAVVAYRRGQCDDELIIVTNKNSLFKLQARYVVERMDGDLWDKVLQPENEYRRQLIDQVVSTALPESKSPEQVSAAVKAFMTADLPHELIELLEKIVLQNSAFSGNFNLQNLLILTAIKADPSRVMDYVNRLDNFDGPAVGEVAVEAQLYEEAFAIFKKFNLNVQAVDVLLDNIRSIERAEEFAFRVEEDAVWSQVAKAQLREGLVSEAIESFIRADDAAHFLDVIRAAEEANVYNDLVKYLLMVRQKAREPKVDGELIFAYAKIDRLSDIEEFILMPNVANLQNVGDRLYDEELYEAAKIIYAFISNWAKLAVTLVKLKQFQGAVDAARKANSAKTWKEVCFACVDAEEFRLAQICGLNIIIQVDDLEEVSEYYQNRGCFSELIALMESGLGLERAHMGIFTELGVLYARYRSEKLMEHIKLFSTRLNIPKLIRACDEQQHWKELTYLYIQYDEFDNAVTTIMNHSPDAWDHMQFKDVCVKVANVELYYKAVHFYLQEHPDLINDMLNVLALRLDHTRVVDIMRKAGQLHLVKPYMVAVQSNNVSAVNEALNELYVEEEDYERLRESVDMHDNFDQIGLAQKLEKHELLEMRRIAAYIYKKAGRWKQSIALSKKDNMYKDCMETCSQSGDRELSEDLLVYFIEQGKKECFASCLFICYDLIRPDVALELAWMNNMLDFAFPYLLQFIREYTSKVDDLVKDRIESQNEERVKEKEEKDLVAQQNMYAQLLPLALPAPPMPGMGGPPPPMGGMGMPPMGGPWSDASIRDASNGKLLRCFCSEGGNFIGVVDGYSLELIFFMVPEFFWQVKP

SEQ ID NO: 5172 - protein, 472 aa, Zea mays
  VARIANT 113: note = Ancestral polymorphism is W, Derived polymorphism is S
MPKPPPPTSDPSLPTTTTTSTPKSSSRPAPAGLLDPLAASGRSLLASARRSPVTTLAGAFFLLALVMYGEDARTIAELSIDDYLYPDADLYNVSGLPPLALPPPTCDLSSGRWVFDNASVPAYREKDCTFLTKQVTCLANGRPDDMWQYWRWQPSDCSLPTFDARRFMEAMRGKRLMFVGDSLNRNQWESLVCLVQPILSKGRKKIVKRGSLNTFYAKEYRATLEFYWAPFLVESNSDNPNFHSIKERIISPERIEAHARNWKDVDYLIFNTYIWWMNTADIKVRRPNSRYWSENDEVPRIEAYGRVFKTWSDWLNNNIDPARTSVFFMTISPIHISPQNWGNPGGIRCVKETLPYQNYSQPLDLYHDMRLYDLVIKVASSMEKVPVSVINITKMSDYRKDAHASVYTIRQGKLLTPKQKADPEKFADCIHWCLPGVPDVWNQILYTRILSKSPWRSNFSPPPSQSTPLPPQ

SEQ ID NO: 5173 - protein, 291 aa, Zea mays
  VARIANT 183: note = Ancestral polymorphism is V, Derived polymorphism is A
  VARIANT 187: note = Ancestral polymorphism is V, Derived polymorphism is I
MAMASTATAAASLRLAFPLLSSPASSSSSSNTLRFPLRRRSAARPIAVTAFKKLSEASPVPIPQEPTEPLLVDEDALPPKAGVYGVYDPAGELQFVGISRNVRASIEGHRRKVPANLCASVKVAVSDEETPDRSALNNAWKSWMQEHIAATGKAPPGNVAGNNTWVGGPQRPPDLRLTPGRHVQLTVPLEQLIHRLVKENRVVAFIKGSRSAPQCGFSQRVVGILEGHGVDFVTVDVLDEEHNHGLRETLKAYSSWPTFPQVFVGGELVGGCDIVSSMAEKGELAALLIQK

SEQ ID NO: 5174 - protein, 68 aa, Zea mays
  VARIANT 19: note = Ancestral polymorphism is R, Derived polymorphism is C
  VARIANT 25: note = Ancestral polymorphism is A, Derived polymorphism is V
  VARIANT 30: note = Ancestral polymorphism is Q, Derived polymorphism is P
  VARIANT 60: note = Ancestral polymorphism is L, Derived polymorphism is R
MRRVDDDVAFDAGKPPPFRIGDVRAAVPEQCWRKSPWRSLWYVAVVLALGAAQGTMFWARFVLGLGHD

SEQ ID NO: 5175 - protein, 726 aa, Zea mays
  VARIANT 395..726: note = Derived polymorphism lacks residues 395 to 726
  VARIANT 413..726: note = Derived polymorphism lacks residues 413 to 726
  VARIANT 483..726: note = Derived polymorphism lacks residues 483 to 726
  VARIANT 504..726: note = Derived polymorphism lacks residues 504 to 726
  VARIANT 634: note = Ancestral polymorphism is G, Derived polymorphism is E
MSMAPDHPFDAFVAAARGAITHLHLPVIHIPGSNSSPNPDSKQHHEPEVDCLLHLHVVVTNFFHKPLRSFARCFRPKRRAGKHSPPLYQEPSNGATPQQQLELLLCIAFDAFAHNLHALEDACKHKGEEFAVATRQLEQFVVFRKVIDGKRADFDGFLSNLGFAKVGPPPPPASIMGGASPVPAPAPVSNQEDGAVIGNGERVDIASGTQQQAQKLPARLLNIPLSNVERLRSTLSAVSLTELIELVPQLVSRSSTSADAHPDKKKLFSVQDFFRYAEIEGKRFFEELDRDGDGQVTLEDLEIATRKRRLPRRYARELFRRTRSNFFSKSIGWKQFLSLMEQKEATILRAYTTLCLSKSGTLHKNQILTSLKGAGLPANEDNAAAMLRYLNADSEGSISYGHFRNFMLLLPSERLEDDPRNIWFEAATVVAVSPPIEISTGSVLKSALAGGLASALSTSLLHPIDSMKTRVQASTLSFPELISKLPQIGLRGLYRGSIPAILGQFSSHGLRTGIFEASKLVLINVAPTLPEIQVQSIASFCSTVLGTAVRIPCEVLKQRLQAGIFDNVGEAIVGTMRRDGPKGFFRGTGATLCREVPFYVAGMCLYAEAKKAAQHVLRRDLEAWEVVAVGALSGGLAAIVTTPFDVMKTRMMTAPPGTPVSMQMIILSILGNEGPLGLFKGAIPRFFWIAPLGAMNFAGYELAKKAMIKDEKNSSESTREILPRKQ

SEQ ID NO: 5176 - protein, 1170 aa, Zea mays
  VARIANT 38..1170: note = Derived polymorphism lacks residues 38 to 1170
MTTMSDDGDRTCPLCAEEMDTTDQQLKPCKCGYDICVWCWHHIIDMAEKEETVGRCPACRTCYDKDRIVKMAATCDRTVADKNVEKKHKTQKVKPKAAPTAAATSTVESKKHLASVRVIQRNLVYIIGLPAHLCNESVLECREYFGQYGKVLKVSVSRPTGPPSQQASATSNISVYITYAKEEEAIRCIQAVHNFVLEGKVLRACFGTTKYCHAWLRNMACGNPDCLYLHDVGSQEDSFTKDEIISAYTRTRVPQMASSVSQRRTGTVLPPPGDDFSHSAVVSAKHTFKNGTLNTTSQPRLSPPNSSSGRSTLPPAASWGQRDLNARITATGATSSQSHTKPKSESQSNPFSSSSAISSTKTPSSWNDDTSTAAKMPEGQQVSEKESKTLQPYKPGISKETQALSSLESSLDIDFSTIPSAWNDDDIVVSDGMPKGSDENQVPNKNGELTHPASKSLVLSKKDIEMNITSKNPSDFLSSLAISKLDVSTSDGDHSDTNITPKSLTSNAVECQSCHAAGEKMLEDIGSKDIDMEKISSQISSVTLGGNDKIQSMAGNQQPDVMPCTSIDVPMDQNFGRDRSHLNLNELLLPSENKDSSLSCQYSSDKRLAWSLKMQNCSVTPLNDTIDSAMLTDKPYSILLEGSEKPSYPPFVEFPSTWDTSLWNDTKNNAASTIDTITSSQMQTGFSSIDNTYALLNGGQDGLGTVYTHDNVSVYTRGRGNVSGHPGMGSHQHRAMGSVRTDSIGSFDKTISVNKDESRIISDTLSEFNPWDDSYSTANNFVRMLRESENNDVQCTAPSWKSGTGSKQSRFSFARQDNQGNLLDSSLRNCGIGTEQNFSLLPQNSRRNIYQNGLAFQSLENEFSNSNFPGLLDMATTGTSMSKISAPPGFSAPTRVPPPGFSTAFPSQDSLNPTPGFPSGILSHDGSIPLSRFPSFSSGVSAQEVSKLPTRLPSPFSSRFSSQDGPDPPSRFPFSSGFTSQDGSNQLYGSTNPENLLGGTVLGVDGNHYQSQFGRHSSDMEFDDPAILAVGKGLMPGIGDSGLEMKNTRASQLQPASSDPRFQLHVQPNVQSHQNMRFTDPVQDGLNHMNDNYLASRFLAQNHGPLSPYVQIPQQPRNSQVTNGHWDGWSESRQGNNIPMSDMSRILYPSEVNKLHMLGSNDIHNRAFGM

SEQ ID NO: 5177 - protein, 77 aa, Zea mays
  VARIANT 75: note = Ancestral polymorphism is C, Derived polymorphism is Y
  VARIANT 33: note = Ancestral polymorphism is A, Derived polymorphism is V
  VARIANT 30: note = Ancestral polymorphism is G, Derived polymorphism is R
  VARIANT 20: note = Ancestral polymorphism is D, Derived polymorphism is N
MLGALTTFPSACSTSLTAFDLIAFPHSLNGIFASDPPIDMDATMEDELREKEDGVLFGERMVMGALIGPHDGHACVV

SEQ ID NO: 5178 - protein, 310 aa, Zea mays
  VARIANT 2..310: note = Derived polymorphism lacks residues 2 to 310
  VARIANT 8: note = Ancestral polymorphism is D, Derived polymorphism is E
  VARIANT 10..310: note = Derived polymorphism lacks residues 10 to 310
  VARIANT 16: note = Ancestral polymorphism is Y, Derived polymorphism is N
  VARIANT 36: note = Ancestral polymorphism is E, Derived polymorphism is K
  VARIANT 166: note = Ancestral polymorphism is K, Derived polymorphism is M
MWSYSWLEFQQLNDIYRFKAEEYSHTSVNKFNVNPESIPGCGSGSKNRVNCARAGEGSLEAGLALEMVKAKARVRYEPGPAFEEVKEEAMLDISPTDSTEFWLIQWPKDQSELEYLSFMYVNPTSFAELRKSVEDLYKAHEQELEECYFLMFEILQFQANRILRQKIAGDQFLDLVSVETEVRSVYKELYSIYKTTLKSKSLINEPRIIIKPKSCNGVWPLCTAQQVEDYIATPKPNGYQSLHTTVIPFLMRIRTEDMDLIAERGIATHYSGRGVVSGPVRLGISSGRNAKGKVICLNNTGFALRVLYII

SEQ ID NO: 5179 - protein, 534 aa, Zea mays
  VARIANT 319: note = Ancestral polymorphism is Y, Derived polymorphism is S
MSDMESVAALMNSTSSKIQQLQEAFAELESQSTVSMNLKWKQLEDHFRGLEQSLKKKFDELKEQEKEFQETVAKSEQILEQREAAVVAKELTSLEKLQEKREAALAMIFSKSRLSLPVPTINPMNKALNNLGVKWPKPASEESVHLQVDNAVVTPRSELVALCEEMNVKGLHKFISDNRKNLAAIREEIPSALKKTSHPYGLVLDSLEDFYSGDNLVLDGKKDGDLLGVRRTCLMLLESLGQLHTAGITCFSLEGHMLTTNIIERAKKIAFEWKSKLDNLEIDASNGNCLEAHAFLQLLATFGISAEYNEDDLCKLLPYVSRRRQTPELCRLLGLSQKMPGVIEVLVKSGRTIDAINLAYVFELTEQFEPVQLLKAYLRDVKKLSHARNVKISPGAQNEMNERELCALKSVIKCIEDHKLEEQYPVDPLQKRVLQLEKAKADKRRAVEAAKPQSKRPRANGSTFAPRATGFADKSFYPATPERHPSNPYERQFVYGAEAHLPPMMSSASYPMQPAHGPYYGNGYPVQYQVPYIH

SEQ ID NO: 5180 - protein, 213 aa, Zea mays
  VARIANT 35: note = Ancestral polymorphism is D, Derived polymorphism is V
  VARIANT 81: note = Ancestral polymorphism is R, Derived polymorphism is C
MGFPVGYSELVLPKQLLHLLLLLGYIRRFLLWAFDAVGLGDLLDLGDDHQALLQDHQQQQHGAAAQGRDLPQQAAMLQHRRPEFRAVPAMVIEEVLPVVRFDELELEPEPGDCAVCLSGIGGRDEVRRLSNCRHVFHRACLDRWMEHDQRTCPLCRAPLIPDEMAGALWAAAAGVPDASDFDFSYLGAPLAPVPSPTLLRPHELLLTGLGGYQ

SEQ ID NO: 5181 - protein, 413 aa, Zea mays
  VARIANT 60: note = Ancestral polymorphism is L, Derived polymorphism is P
MAEQHQSVVETLQETGAHNCRISLFPYVAFVQVNSDDVFAPSLAPLIIIINIMKVTVIGLGFVKTEGVVNSMARHGDRRKWRQHAADKRLLREQKIALAVAALCSLSLGPPVHKSTTVSKLAVEELDIGHAFKERQARKQRASDQQVIDNDIANSTSCIVFVVSESISWEMQKERGDTYNEGYEYASKYIINRLGLNGLNRGKIGSSLVIFLIENYIEDHANGFFDDNKLREGLKWLLLNTHVAPGVGPGDCISVFNNAVNQLAEEILAATNANCSQWPAPEIDLLERTSNERIYAEMFLPSIGCCKIPEFSYDLSWLNHGSHMGKQIQDQKKLLEECLPRYLTESARLLDESQVVTEVNVMVQNCVGLELRDSSYYLAPRWVAIFRRIYNWRLAKLSTGKFSEAYVLTQHLY

SEQ ID NO: 5182 - protein, 394 aa, Zea mays
  VARIANT 32: note = Ancestral polymorphism is K, Derived polymorphism is T
MAATSEEAIKQFSALMEQRESSSLVLLLFFAKNQEKIRLFSSSWPLNCSNFFLAVEEPLKSTFQVERFRLGRIDEISDCLLQLMDCLNWRVQNEIDIVLAKPILPSDIYRVIRDTLLVGLTGYSKQGQPVYAFGVGLSTFDKASVNYYVQSHIQMNEYRDRVVLPAASKKFGRQINTCLKVMDMTGLKLSALSQIKMLTMITTVDDLNYPEKTETYYIVNAPYVFSACWKVVKPLLQERTKKKIQVLYGSGRDELLKIPVRNVLSFIHATKPVTKLTPMAMSSVATAFLVMDYESLPHFCKREGSGSSSDSLDGVDCYSYDHPFHQQLYNYMKQQQSLNQDSVGPRKQGSVHVDVPSPGLEEAKIAETIKAELQNLRGSGGLAHSFSSIQIEGP

SEQ ID NO: 5183 - protein, 410 aa, Zea mays
  VARIANT 342: note = Ancestral polymorphism is W, Derived polymorphism is C
  VARIANT 325: note = Ancestral polymorphism is H, Derived polymorphism is R
  VARIANT 36: note = Ancestral polymorphism is N, Derived polymorphism is Y
  VARIANT 35..410: note = Derived polymorphism lacks residues 35 to 410
  VARIANT 32: note = Ancestral polymorphism is L, Derived polymorphism is R
  VARIANT 25: note = Ancestral polymorphism is W, Derived polymorphism is R
  VARIANT 16: note = Ancestral polymorphism is A, Derived polymorphism is V
MQQMSSSSDLEQQVSAHDIEDALAWKKKIELLIDQNQLTISDVARKAFLHSVCDSSLYTCSSLTSTRSKTRKLRCVRPPGRGPSAAAALLASLTSTHGRGTGCTGSNSNQLCWLSGEEDIKMSSLIGLECLHQTLTTDLNILQLQRESQLKGLTSLSFFVNQGVSDASRDVDSKETHDYVQEGENKAHTMEMMYTIIADEFKSMDNKDMRPEDYLNFFCLGNREEPPSNGSPESEKSTDKRSEVFSAFGYVHKIVTFEKAAGFQALIQYTDAATASDVRESLDGRSIPSYLLPEHVTSCCLRISFSAHKDLNIKFQLNHNSLIIHYFMVFLDRSAWKEPIHCKFAHVTFIKPEYLQDSDIVMNRFHKQRHVYEGWEQHLGLEHTTTAPKRSYLGNNQNRHSFEKPVRIYN

SEQ ID NO: 5184 - protein, 120 aa, Zea mays
  VARIANT 5: note = Ancestral polymorphism is P, Derived polymorphism is L
  VARIANT 15: note = Ancestral polymorphism is A, Derived polymorphism is T
  VARIANT 16: note = Ancestral polymorphism is T, Derived polymorphism is M
  VARIANT 25: note = Ancestral polymorphism is A, Derived polymorphism is V
  VARIANT 31: note = Ancestral polymorphism is A, Derived polymorphism is G
  VARIANT 36: note = Ancestral polymorphism is T, Derived polymorphism is M
  VARIANT 40: note = Ancestral polymorphism is A, Derived polymorphism is T
  VARIANT 50: note = Ancestral polymorphism is Y, Derived polymorphism is H
  VARIANT 56: note = Ancestral polymorphism is V, Derived polymorphism is A
  VARIANT 65: note = Ancestral polymorphism is R, Derived polymorphism is M
  VARIANT 69: note = Ancestral polymorphism is L, Derived polymorphism is M
  VARIANT 70..120: note = Derived polymorphism lacks residues 70 to 120
  VARIANT 76..120: note = Derived polymorphism lacks residues 76 to 120
  VARIANT 92: note = Ancestral polymorphism is V, Derived polymorphism is A
  VARIANT 94: note = Ancestral polymorphism is R, Derived polymorphism is M
  VARIANT 102: note = Ancestral polymorphism is E, Derived polymorphism is D
  VARIANT 107: note = Ancestral polymorphism is A, Derived polymorphism is T
  VARIANT 113: note = Ancestral polymorphism is A, Derived polymorphism is T
MPNRPLSNNSHSRNATVFVTLCLVAVEERGAGKGTTIDLAALDGTWRLCYTSASDVLVLFEAAERLPLLQVGQIYQKFECKDRSDGGIVRNVVRWSIENLLEEQEGATLMVSAKFVVLSK

SEQ ID NO: 5185 - protein, 518 aa, Zea mays
  VARIANT 6: note = Ancestral polymorphism is G, Derived polymorphism is D
  VARIANT 9: note = Ancestral polymorphism is E, Derived polymorphism is K
  VARIANT 109..518: note = Derived polymorphism lacks residues 109 to 518
  VARIANT 143: note = Ancestral polymorphism is S, Derived polymorphism is L
  VARIANT 152: note = Ancestral polymorphism is T, Derived polymorphism is M
  VARIANT 165: note = Ancestral polymorphism is R, Derived polymorphism is C
  VARIANT 168: note = Ancestral polymorphism is S, Derived polymorphism is F
  VARIANT 269: note = Ancestral polymorphism is M, Derived polymorphism is T
  VARIANT 448..518: note = Derived polymorphism lacks residues 448 to 518
MMKGGGGKETLTASFLRFLLLLLLPLTALYFFYTLHLLLTSASSAASNCAPDAVSVSRMSANLTAVAEKQLPPSTVAGSTSTTLQHVVFGIAASSRFWDKRKEYIKVWWRPRGAMRGYVWLDRKVRESNMSTARTGLPAIRISSDTSAFPYTHRRGHRSAIRISRIVSETFRLGLPGVRWFVMGDDDTVFFPDNLLTVLNKFDHRQPYYIGSLSESHLQNIYFSYGMAYGGGGFAISRPLAEALARMQDGCLRRYPALYGSDDRIQACMAELGVPLTKHPGFHQYDVYGDLLGLLASHPVAPIVTLHHLDVVKPLFPDARSRPSAVRRLFDGPVKLDTAGLMQQSICYDSANRWTVSVAWGFTVLVARGIMSPREMEMPARTFLNWYRRADYTAYAFNTRPLARSPCQKPAVYYLSSARREALRGGETTVTRYERWRHPNETRPACRWDITDPDAHLDHIIVLKKPDPGLWERVIEAKLLQSGVFAQGWEERGEDDDHRCRRMQGRRVQPSSRSMSFY

SEQ ID NO: 5186 - protein, 160 aa, Zea mays
  VARIANT 31: note = Ancestral polymorphism is T, Derived polymorphism is I
  VARIANT 86..160: note = Derived polymorphism lacks residues 86 to 160
MYDCISCDGPKFIIKSHGAISGPLPPASLSTAACFSLLLSHAASHFPLTLAGDFRQPAWCMSPWEAEISRSGVFAAQRRGSGEAEEGNNEHIDLAVKTIQVTWFQEQLSRVIHVTEMDECAYQEMITHLHLCSIKHPKKGRQDEPEAESRDAKMSPTATA

SEQ ID NO: 5187 - protein, 610 aa, Zea mays
  VARIANT 35..610: note = Derived polymorphism lacks residues 35 to 610
MDMALSKKLSLYLSTKNTILKKYDDSFKYPLYNMQAFDTNVHLQDRINGRTLCDCDSIAACETKWKGQKAKEVEGTGFKLWYTRTIANKNGVGILIDKSLKDGVVDVKRLGDRIVLVKLVIGDLVLNVISAYAPQVGLNENSKWEFWEGLEDMVSSVPVGKKLFIGGDLNGHVGTSSTSFEGVHGGFSFGTRNQEGEEILNFALAYDMFITNTFFRKRKSHLVTFSSGQHTSQIDFVFLRKEDRHACLDCKVIPGECVERVIKEGPWAEEGDTNIMWRKMATCIRKIASEDFGLSQGNKREVKDTWWWNEDVQKAIKEKKDCYKCLHHDKCSDNIEKYMIAKKSAKRAVSRARGQAYDDLYQRLDTKQGEKDIYRMAKIRERKTRDVNQVKCIKDEANQLLVKNEEIKNRWKEYFNKLFNGGNESSTIELDEPFDDNNRGFVRRIQEYEVKEALKRMKVGKAMGPDGIPIDVWRCLGDIAIVWLTKLFNTIFRTNRMPDEWQWSTLVPIFKNKGDVQSCTNYHGINLMSHTMKLWERVIEHRLRKMTSVTQNQFGFMPRRSTMEAIFLLRQLMERFREQKKDLHMVFIDLEKAYDKVPRSVMWWPWKNTK

SEQ ID NO: 5188 - protein, 214 aa, Zea mays
  VARIANT 42..214: note = Derived polymorphism lacks residues 42 to 214
  VARIANT 80..214: note = Derived polymorphism lacks residues 80 to 214
  VARIANT 96: note = Ancestral polymorphism is S, Derived polymorphism is F
  VARIANT 104: note = Ancestral polymorphism is G, Derived polymorphism is R
  VARIANT 112: note = Ancestral polymorphism is G, Derived polymorphism is D
  VARIANT 126: note = Ancestral polymorphism is N, Derived polymorphism is I
  VARIANT 168: note = Ancestral polymorphism is P, Derived polymorphism is H
MDPLSLLQLPRASRPPLPLAAAAAPLTEEQQPSPSGEERFDWLDLWYPLAPVCDLDLHVPHGKTVLGLSIVDWYDRGAGEWRVFDDACPHRLASLFEVRIDDRGRLQCVYHGWACVASYPCVVQNNILWFYPRDDPEYKDVLQRKRPLLIPEIDDPDFVTVYGIRDLHYGYDILVENHMDPAHVPYAHKGIMRGIRKKEDPGRYVPEASFLPGD

SEQ ID NO: 5189 - protein, 109 aa, Zea mays
  VARIANT 11: note = Ancestral polymorphism is G, Derived polymorphism is V
  VARIANT 23..109: note = Derived polymorphism lacks residues 23 to 109
  VARIANT 24: note = Ancestral polymorphism is R, Derived polymorphism is M
  VARIANT 57: note = Ancestral polymorphism is A, Derived polymorphism is V
MGCPYDLIFNGKSISCDYSLKGQMNEGKSMEQSNWTVKGDSSSISSLLSHSVAHKHVAFANLKYKSYVTPKDEAKVKTDDVGHILLTYRKRARSVAVYGFMIGCSVFCP

SEQ ID NO: 5190 - protein, 102 aa, Zea mays
  VARIANT 81: note = Ancestral polymorphism is E, Derived polymorphism is K
  VARIANT 69..102: note = Derived polymorphism lacks residues 69 to 102
  VARIANT 52: note = Ancestral polymorphism is D, Derived polymorphism is H
  VARIANT 47..102: note = Derived polymorphism lacks residues 47 to 102
  VARIANT 45: note = Ancestral polymorphism is R, Derived polymorphism is H
  VARIANT 43..102: note = Derived polymorphism lacks residues 43 to 102
  VARIANT 38: note = Ancestral polymorphism is G, Derived polymorphism is R
  VARIANT 32: note = Ancestral polymorphism is G, Derived polymorphism is D
  VARIANT 28: note = Ancestral polymorphism is P, Derived polymorphism is S
MQQMRSHDWGNFLKKVTSFCITHGVKVPAMDGAYVPYGKSARYARARNQTNDDHFRREIYIGVIDQISQELDNRFDEINMELLSCMTSFSPSHSFASFDAQK

SEQ ID NO: 5191 - protein, 1300 aa, Zea mays
  VARIANT 75..1300: note = Derived polymorphism lacks residues 75 to 1300
MVMSESDDDDDEPQLNAVESYYFVDSTNDNEPVCFSTLPFLFGDTDDLPDCKKRLVLRGTGGDPGVKVYSEVVAWSLGLEGKQPQFAVLTAEGRRWVRLVRPLNSYEEMIRTVLITAHMLHFLMRKPHEPERTLWNHLCKVFNKFDVRPSEDDFRNHISLMKQFVAKDPILAKSEILRVFVEGKSGKIFTEAGADHIDVKQPFITDDEDIDEMIVEDADNESDEEEDGDLFDSICAICDDGGDILCCDGPCMRSFHAKEGSGEDSYCDTLGYTEAEVEAMKLFLCKNCEYKQHQCFICGVLEPSNGAAAKVFLCNNATCGHFYHPKCVAQQLHPNNIDEASELEKKITDGFSFTCPIHWCFHCKGLEDRTQGPLQFAVCRRCPKSYHRKCLPREISFDEIEEKGVIIRAWELSKMILIYCLNHEIDSELETPVRDHIKFPRIEKPLQFVKKGANLLPKKKKRTYSESILEQPPKDTVKMKSKVRMQESEQNKHDTREVSVKSFTQNVVDTPVKKKGKLKENKQLPYVAKDHFVSSPKSVKEQEQELVPLPLSGIRKSSFPKVDSEIEKRVISILGNEISSLTIKDVTRNCSLPSTHVYSGRPTDKMPLGKIERSVQAVEAALKKLKNGGSVNDAKAVCEPDVLRQLARWHTKLRVYISPFIHGTRYSSFGRHFTKVEKLVEIVDRLHWYVESGDMIVDFCCGSNDFSRLMKEKLDKVQKKCHFKNYDLIQPQHHFCFEKRDWMTVQPNELPRGSQLIMGLNPPFGVKASLANKFIDKALTFKPKLIVLIVPKETKRLDKKKIPYDLIWEDSECLAGKSFYLPGSVDLNDNTVEGWNASAPPLYLWSHPHWTKKHMQVAEEHGHTCMGKIASHVEKRNLSDDLPVRKQSEAANKWNSRSGKETTCNDRKDNLLDDVTAKKQAGPEEEKETLGKMDHHVKKATIPDSLTVKKQTEASSKALSHCGNDRKIGRYSSRKYDDWRSKRTPDHEESFPPEKQVEVAYEETKVIIPSKKITHNEQSGACRENRKNSCVEETKNVEYNYEQQTAAGMRFREGEDSDMSISPPSRPVEPFDMIAHPIGSLTKEPFDPVLNRGATHQDSYAVTKEEYLGQFKRKNDRTFTDIDDSSRMRGSSIEEVTRPYIAAPTSDPYSLRYRGDGSFYRHPSSEDLNTTGISAGYGQIGGDSYPQATGSQTHNTRMHGGTSDDNYLSARYSLGYSGSRFSQPASTVPAFGLSGASSQRGSVIDKYSYGLSGPTGPQDSGINRYAPPDDGTSTRSKSSLAEQQYPFGQSGSSGGEWPHI

SEQ ID NO: 5192 - protein, 431 aa, Zea mays
  VARIANT 57: note = Ancestral polymorphism is V, Derived polymorphism is M
  VARIANT 28..431: note = Derived polymorphism lacks residues 28 to 431
  VARIANT 19..431: note = Derived polymorphism lacks residues 19 to 431
  VARIANT 13..431: note = Derived polymorphism lacks residues 13 to 431
  VARIANT 10..431: note = Derived polymorphism lacks residues 10 to 431
MGITSAREYQMLWRHFAYQPYLSLFPPQPSSPRLPPPHPLLLRPPASTRVCTSPPSVASSCNQLSRIQDVRHHIGGESFRSYLAYQYQRIRILLAQFENHVCAVIRTSLCLARSLGLLCSYHNDGLLVTGHDTFNLYINMKTQKISKLLSKRFTTPVWIKVLLLKFAFPFSLYVQLKQHKEPREVNMFVDLLLLEVLESTFRNMSSFRLSSRRAWERQVRPRGLLRLRTLAPRAAPTHAGPQRCTLADFGYLKDLPELLHRIVHGGVSTRTPGKKARLTTSAAGAGAASALATVRVAAARNGPRASAQRRSVPRLAWSATGDSRPRPWWRAGLGEQRPLRGRSRCTEIICLSYVYAICLLKADKIFFLIGLCCETSGAGGTATDKSNKNKRKAPLKRSKGSLGSLDVVAVKNNKSPAKPSTSSSNEGSSQR

SEQ ID NO: 5193 - protein, 411 aa, Zea mays
  VARIANT 367: note = Ancestral polymorphism is H, Derived polymorphism is L
  VARIANT 78: note = Ancestral polymorphism is N, Derived polymorphism is Y
MAASSTMSKEESAASYDMAEFDQSAIFLYLEDGHDQEQQRPSIMLPNGNSSSPKRQEQGGGQQRNVAAPAGAAVPLPNNLAKDNRNSLTKQNKMPNLQKEESSGGKGAASAAGGVQERVKDPKTLRRLAQNREAARKSRLRKKAYIQQLETSRIRLSQLEQQVQVARVQGVFLGTGEQPGFPSAPSPAAVFDVEYGRWVEEHSKLMFQLRAALSEHLADEQLQSLVSGGMAQHEELLSLKGAMARADVFHILSGLWVSPAERCFLWLGGFRPSEVIKVMLKHVEPLSEGQILGIYQLQQLVQAREEALNHSMEATQQNISDIVAAPDVAPATFMGHISLAMNTVASMESFVMQANGLRQQTLHKLHHILTTGQAARGLLAIADYFHRLRALSTLWVARPRQQDDGGPGLPQ

SEQ ID NO: 5194 - protein, 396 aa, Zea mays
  VARIANT 283: note = Ancestral polymorphism is L, Derived polymorphism is S
  VARIANT 282: note = Ancestral polymorphism is P, Derived polymorphism is S
  VARIANT 242: note = Ancestral polymorphism is A, Derived polymorphism is V
  VARIANT 237: note = Ancestral polymorphism is R, Derived polymorphism is G
MAGDGNGRAELPRIAVIGAGIFARTQYIPRLREIAHLVVLKSIWSRTQESAKAAAELARDFAPDIECKWGDAGLEEIMGDSSIMGVAIVLAGQVQVELSLKMLKAGKHVIQEKPASGSTTEAETALSIYHSFQNLFPHKPIWAVGENYRFEPAFIESSKLINDIGDMMHIQVIIEGSMNSSNPYFNSTWRRNFVVRNITVHCHPCEGGFILDMGVHFIAGLRMLVGSEITSVSSISRHVDMALPPPDNICSLFQLENGCAGVFVFAVNSRSPKVELNIILNPSRNHTNAIITQILWRVDGTKGTIQVERGVDSGKHGYQVLFSGENGQCQKTFYPFCGVNEELKTFVHDMLEAGKDGDHKAAPRGSYVEGARDVAVLEAMLESSAKQGAPVQVKRF

SEQ ID NO: 5195 - protein, 115 aa, Zea mays
  VARIANT 52..115: note = Derived polymorphism lacks residues 52 to 115
MAATSSKSSSSSSSAQRAAAALLVAAAVAVSVLVVGAAAVCDMSNEQFMSCQPAAAKTTDPPAAPSQACCDALAGADLKCLCGYKNSPWMGVYNIDPKRAMELPAKCGLATPPDC

SEQ ID NO: 5196 - protein, 399 aa, Zea mays
  VARIANT 30: note = Ancestral polymorphism is G, Derived polymorphism is D
MAPQTATRVASGRLVFGAPTTTDGKLQVKGGSRLSVRSLDNNGRRVAVEAVNGAARPNGAAAVADVRRQVPAPPPPEGDGDGVAFRLGKFAEGRLVYRQQFVVRSYEIGPDRTATMETLMNLLQETALNHVMCSGLAGDGFGATRQMSLRKLIWVVTRINIQVDDRVSLYSLCFTPSHAAPPCLNNDDRGDVVEIDTWVASSGKNGMRRDWIIRDRNTKNMIARATSNWVMMNRETRRLSKIPDEVRQEVLPFYLDRSIIAAATGGGRKIEKLTDSTAEHIRSGLAPRWSDMDVNQHVNNVKYIGWILESVPLDVLEDYHLTSITLDYRRECRQSQLLESLTSMTTSSSAPAEPPLTSSLCGSDLYSTHLIRQQDDRAEIVRACAEWRRKEHPRSIEQL

SEQ ID NO: 5197 - protein, 318 aa, Zea mays
  VARIANT 120: note = Ancestral polymorphism is V, Derived polymorphism is I
  VARIANT 105: note = Ancestral polymorphism is K, Derived polymorphism is M
  VARIANT 64..318: note = Derived polymorphism lacks residues 64 to 318
  VARIANT 58..318: note = Derived polymorphism lacks residues 58 to 318
  VARIANT 43: note = Ancestral polymorphism is S, Derived polymorphism is F
  VARIANT 42: note = Ancestral polymorphism is H, Derived polymorphism is L
  VARIANT 37..318: note = Derived polymorphism lacks residues 37 to 318
  VARIANT 34: note = Ancestral polymorphism is S, Derived polymorphism is I
  VARIANT 31: note = Ancestral polymorphism is S, Derived polymorphism is F
  VARIANT 27: note = Ancestral polymorphism is P, Derived polymorphism is S
MEAEAAAKRTRDSGEDAAAAGISAVIPGWFSEISPMWPGEAHSLKVDKVLFQGKSDYQSVMVFQSSTYGKVLVLDGVIQVTERDECAYQEMITHLPLCSIKDPKKVLVIGGGDGGVLREVSRHSSVEQIDICEIDKMVVDVSKQFFPHLAVGFEDPRVSLHIGDGVAFLKNAPEGTYDAVIVDSSDPIGPAQELFEKPFFQLVARALRPGGVVCTQAESIWLHMHIIEDIVVNCRQVFKGSVNYAWTTVPTYPSGVIGFMLCSTEGPAVDFQHPVFNIEEDEHPMKSKGPLKFYNSEIHTASFCLPSFAKRVIESKAN

SEQ ID NO: 5198 - protein, 82 aa, Zea mays
  VARIANT 43: note = Ancestral polymorphism is D, Derived polymorphism is Y
  VARIANT 36: note = Ancestral polymorphism is S, Derived polymorphism is L
  VARIANT 16: note = Ancestral polymorphism is G, Derived polymorphism is A
  VARIANT 11: note = Ancestral polymorphism is D, Derived polymorphism is N
  VARIANT 10: note = Ancestral polymorphism is D, Derived polymorphism is A
  VARIANT 8..82: note = Derived polymorphism lacks residues 8 to 82
MGADQKPRQADDGSLAIRNWGFYDTVKGSLGLQLMSSMPPDRDTKPLLPRGALLQQHGHHNAAHQLHAQQSQHHRDYAGGTS

SEQ ID NO: 5199 - protein, 471 aa, Zea mays
  VARIANT 200: note = Ancestral polymorphism is H, Derived polymorphism is L
  VARIANT 331: note = Ancestral polymorphism is D, Derived polymorphism is G
MVSALTPSAELLPHPRHPAKRGLLGFRRDHSRAATSKVRVTMLSQQNPGGESAGTPPLYLGIDFGTSGARYALIDEHGAIHSEGKRAYCAPVGDAAGWASSWRAALFQLLADVPPAHRPSVSSISIDGTSATALIVDSETGELLGGPFLYNEGFPDALPAVESVAPANHTVCSPTSTLCKLVSWWAASGGAAAGAAVLMHQSDWLLWLLHGRPGGVSDYNSALKVGYDPELGAYPGWLTSQPYSRMLPAAVRPPGAPVAALRDDVRSQYGFSEDCVVCAGTTDSIAAFLAARRSEPGTAVTSLGSTLAIKLVSRVHVADARFGVYSHRLDDVWLVGGASNTGGAVLRQLFTDDQLAALSEHIDPAVPSPLDYYPLPKKGERFPVSDPDMMPRLQPRPGSDAEYLHGILESIARIEAKGYSLLKELGATAVEEVFTAGGGAQNDRWTAIRERVLGVASGRPSRLRRPMELHC

SEQ ID NO: 5200 - protein, 142 aa, Zea mays
  VARIANT 1: note = Ancestral polymorphism is V, Derived polymorphism is M
  VARIANT 3: note = Ancestral polymorphism is A, Derived polymorphism is V
  VARIANT 15: note = Ancestral polymorphism is D, Derived polymorphism is V
  VARIANT 54: note = Ancestral polymorphism is K, Derived polymorphism is T
MLAEEASKITSTFSDVFTATVLDVEKCKELKMGSYLGVVAASANPPHFIHLCYKPTDGNVKRKLAIVGKGLTFDSGGYNIKTSRGFTQISLSVNSMFFPFSQVHFIVAACENMISGTGMRTGDIVTASNGKTIEVCFFFNLL

SEQ ID NO: 5201 - protein, 46 aa, Zea mays
  VARIANT 8: note = Ancestral polymorphism is L, Derived polymorphism is I
  VARIANT 24: note = Ancestral polymorphism is C, Derived polymorphism is Y
  VARIANT 41: note = Ancestral polymorphism is I, Derived polymorphism is T
MAQQLVSLEKRELNMQKKYFKRKCYVLGNYVKLKRHTILGILFTAY

SEQ ID NO: 5202 - protein, 487 aa, Zea mays
  VARIANT 129..487: note = Derived polymorphism lacks residues 129 to 487
  VARIANT 127..487: note = Derived polymorphism lacks residues 127 to 487
  VARIANT 119..487: note = Derived polymorphism lacks residues 119 to 487
  VARIANT 118..487: note = Derived polymorphism lacks residues 118 to 487
MASRTPRRPPLPKRSTILVPMFGDSDGSKDTSAAVPGSNPSEPPFPSRELTLSSYLCDKALPAAAGPSSSPNPEAAAGPAEEAAANAKLCVERDMLHLTAPKRGDPPGDDSSVVGASQQPSSSLLPQSQLASFLQVDGDLRCVSAAAASARSACRARAAPRRIYSANTGRTRSINSDDLSYSYSVFSHNPSCSLTHNSTDIYTAGEGTNGSVHSRFNFRPMGDGSVAFASAQLKEGTASFFPMELPARAAAALSASGSFDGSRGGMHSSRPDRILREIVSDSMLAMAQVLQDFPCETLEVLRETVRSMVDAPEKRDKLSSLPRKLERRSDLTAEVLGRANKTQLEILVAIKTGMATFVTGKGRVSVSELVEMFLKTRCRNMNCKSAVPVDDCECKICSTKKGFCSACMCPVCQKFDCAANTCSWVGCDVCSHWCHAACALEKNLIRPGPTLKGAMGTTEMQFQCLGCNHASEMFGFVKEVFNCCAEN

SEQ ID NO: 5203 - protein, 1329 aa, Zea mays
  VARIANT 849..1329: note = Derived polymorphism lacks residues 849 to 1329
  VARIANT 308..1329: note = Derived polymorphism lacks residues 308 to 1329
MTAEQLENTRARARERYARRRDQRNLDNLEGGNITYQNSVVASDDFGTIDVVYRNLPDATQMLQPQSDCPHCGAKRFQYESPGFCCKQGKVKLVMPHPPEELHLLYTTRDADSQHFLDNTRFFNGHFSFTTFNCEYDQNLASSRDGVYTFKAHGQVYHRIHSFGRQESDPKHLELYFYDDDPLLSHRMRLARDEVFKAKDQNVMTKLANLLRENPYAETFRSIGQYGNIDEYHIDLNTDYKLDQRTFNTPTSSEVAAIWVEGTELHRQFERGVTLYGNDNAFYSIKPHHGFYDPLAYPLFFPRGELGWHSGIPKVGVNTARIDGRQSTDSDNPVLHGQRLFQQFAVDTYIKLETTRLNYILFNQSRIRADLYQGLMDSVYAGEHRASALGKLWVLPASFIGGPRDMRRRYMDAFVLVEKYGKPDIFLTMTCNPNWEEITSELEPGQKSQDRFDLVVRVFKAKLDNLKHQLFKKHILGVVAAHVYVIEFQKRGLPHAHFLLIMQTGSKLTVPDQYDAIISAKLPDKNRFPELFDMVVKHMMHGPCGYLNMQNTCMKNGSCKCHYPRLFGETTLQGKDSYPIYRRRDDGQKVRVRGHDLDNRWVVPYNPTLLRMYDCHFNVEVCSSIKAVKYIYKYIHKGRDRASVTVIDVDGGQSINEIENFRDSRWVSPQEALWRIYSFDLHGISPPVLQLQLHLPGMHLVSYNINDDMRQVLNKDNIDKSMLTEYFRANQLFDWASNYLYREFPEVARWWPGAKKWTARQQRMQVGRIVSAHPAEGERYYLRVLLNHVRGATSFESLRTYDGNVYPTFREAAEKRGLIEADNSIDECLTEASGFHMPPSLRSYLRRSWFSLVLLDIRDMLQTMGKDIRLFPLPVIKDEHDNMADVVREIFEEMNIPEDPEAEFVVSSLNHEQRHAYDVILSSVENISGGVFFVDGPGGTGKTFLYKALLATVRCSGKIAIATATSGVATSIMPGGRTAHSRFKIPLNIKEGDVCSFTKQSGTAKMLRRSSLILWDEATMTRRQAIEALDKSMRDIMDRPHLPFGGKTVVFGGDFRQVLPVVRKGTRAQIINSMLRRSSLWDSMQHLRLVRNMRAQSDQWFSDYLLCIGNGIEETCNDDNVRLPDEICIPYTGEDDDVDRLIEEIFPSLETNMHNRDYITSRAILSTKNENVDKINMRFIDRFLGQEMVYHSFDVAVDDPNNNYPPEFLNSLTPSGLPPHILKLKVNCPVILLRNLDPPNGLCNGTRLIIRDFHRNTIDAKIVLGQHVGKRVFLPRIPLCPSDDEIFLFKFKRTQFPLRLSFAMTVNKAQGQTIPHVGVYLPNPVFSHG

SEQ ID NO: 5204 - protein, 132 aa, Zea mays
  VARIANT 30: note = Ancestral polymorphism is G, Derived polymorphism is R
  VARIANT 33: note = Ancestral polymorphism is A, Derived polymorphism is V
  VARIANT 46..132: note = Ancestral polymorphism lacks residues 46 to 132
MAGGGVVKHILLASFKEEVTQERLDELIHGYAALVGVVPSMKAFHLLRPSHSLFANCKEKEVNASRCQWRLVHACIFPTEPRLFNEGYGFGCRGTPGDCASWKRLLSCQLSYFNFGLTIIVRVPLSSIFYLL

SEQ ID NO: 5205 - protein, 513 aa, Zea mays
  VARIANT 300: note = Ancestral polymorphism is A, Derived polymorphism is S
MANIDMAKILADLDRGAGDARLPKTKLVCTLGPASRSVPMLEKLLRAGMNVARFNFSHGTHQYHQETLDSLRQAMHNTGILCAVMLDTKGPEIRTGFLKDGKPIKLTKGQEITVTTDYDIKGDEKMIAMSYKKLPVDVKPGNVILCADGTISLAVLSCDPDAGTVRCRCENTAMLGERKNCNLPGIVVDLPTLTEKDKEDILGWGVPNDIDMIALSFVRKGSDLVTVRQVLGQHAKRIKLMSKVENQEGVVNFDEILRETDAFMVARGDLGMEIPVEKIFLAQKMMIYKCNIAGKPVVTATQMLESMIKSPRPTRAEATDVANAVLDGTDCVMLSGESAAGAYPEVAVKIMARICIEAESSLDHEAVFKAMIRSAPLPMSPLESLASSAVRTANKAKAALIVVLTRGGTTAKLVAKYRPRVPILSVVVPVLTTDSFDWTISSEGPARHSLIYRGLIPLLAEGSAKATDSESTEVILEAALKSAVQKQLCKPGDAIVALHRIGVASVIKICIVK

SEQ ID NO: 5206 - protein, 289 aa, Zea mays
  VARIANT 179: note = Ancestral polymorphism is S, Derived polymorphism is L
  VARIANT 172: note = Ancestral polymorphism is G, Derived polymorphism is R
  VARIANT 168: note = Ancestral polymorphism is F, Derived polymorphism is S
  VARIANT 139: note = Ancestral polymorphism is T, Derived polymorphism is A
  VARIANT 53: note = Ancestral polymorphism is L, Derived polymorphism is M
  VARIANT 37: note = Ancestral polymorphism is R, Derived polymorphism is C
  VARIANT 30: note = Ancestral polymorphism is L, Derived polymorphism is V
  VARIANT 20: note = Ancestral polymorphism is P, Derived polymorphism is R
MAMRSRPRRSAGHLYHLRLPRLLFLLPFALLLILLARLPALLRRANAHGRQCMPAATDRPIPFPHPVPDPRLSLAIVTLADEDAGGPGARRSFRGVLAASARNKRAYAAAHGYSLVALPASAVDPSRPPSWSKVLALRAHLRHHHWLFWNDADTLVTNPEIPLERILFSVIGHNNFVESPDLVLTEDFGGVNAGVFFIRRSKWSEKFLDTWWNQTSFIQFGSTRSGDNAALKHLIDHLSAEEMQEHVRIVKMQCLFNSYPWILTLKSVHRLIFHLPTTWKGSTFSRSLY

SEQ ID NO: 5207 - protein, 371 aa, Zea mays
  VARIANT 340: note = Ancestral polymorphism is T, Derived polymorphism is K
  VARIANT 178: note = Ancestral polymorphism is N, Derived polymorphism is K
  VARIANT 38: note = Ancestral polymorphism is R, Derived polymorphism is Q
MAGVRLVGVRPSPGRLERWVGSLPDAGSRGGRPTLPIRGVRSYFIRSIPPLGRVERGVRKARTSRPAMGGDLYALDFDGVLCDSCGESSLSAIKAAKVRWPSLFEQVDAAMEEWIVEQMYTLRPVVETGYENLLLVRLLVEIQIHSVRKSSVSYFLQCFICNICKVADGLSIQEILENWSKLKPTLMDEWQEDRESLVDLFGRVRDDWIENDFSGWIGANRFYPGTADALKLSSSEAYIVTTKQFCSVGNAECLSSTDHLLVVFQSRFAEALLKELAGIDFPSERIYGLGTGPKVKVLQQLQQMLQHQGLKLHFIEDRLATLKNVIKEPALDNWNLYLVKWGYNTQKEREETEAIPRIQLIDLPDFSRQLK

SEQ ID NO: 5208 - protein, 90 aa, Zea mays
  VARIANT 79: note = Ancestral polymorphism is G, Derived polymorphism is E
  VARIANT 68..90: note = Derived polymorphism lacks residues 68 to 90
  VARIANT 52: note = Ancestral polymorphism is M, Derived polymorphism is R
  VARIANT 40: note = Ancestral polymorphism is R, Derived polymorphism is C
  VARIANT 34: note = Ancestral polymorphism is E, Derived polymorphism is V
MSPSSRLLAWCFLFGDTCTSKFGDLLLKSRFCKEVILTDRSDEVLAASVVVMTKADPSIERDDLILLQEIAMYMLLACGAIYVISIRKIK

SEQ ID NO: 5209 - protein, 60 aa, Zea mays
  VARIANT 49..60: note = Derived polymorphism lacks residues 49 to 60
MPLLPPCGLRSPLAFLPPSLPGFAMGHRDVQEPIEAHVRQPVEQAVPSRLHACRRFGIQE

SEQ ID NO: 5210 - protein, 584 aa, Zea mays
  VARIANT 344: note = Ancestral polymorphism is S, Derived polymorphism is C
  VARIANT 195: note = Ancestral polymorphism is G, Derived polymorphism is R
  VARIANT 165: note = Ancestral polymorphism is R, Derived polymorphism is G
  VARIANT 142: note = Ancestral polymorphism is G, Derived polymorphism is C
MKETSSSHVGGPGAEDVCSSSVSNNCFPQDEGTSSSEMINTECSETSSEVSGSERTRPEHSKKASSVLGKKISIRKKLKMFSRMATLKDDGTVVVDIPTTIEAASLDLHSEDHQDVAFGGEPLDSSDLQDRPPMQIAMLIVGTRGDVQPFIAIGKRLQDYGHRVRLATHANFKDFVMTTGLEFYPLGGDPKILAGYMVKNKGFLPATPSEIPIQRKQIRDIIFSLLPACKDPDIDTGVSFSADAIIANPAAYGHVHVAEALNIPIHIIFTMPWTPTCEFPHPFSHVKQPAGYRLSYQIVDSFVWLGIRDMINDLRKRKLKLRPVTYLSGTHAYSNDIPHAYIWSPYLVPKPKDWGPKIDVVGFCFLDLASDYEPPETLLRWLGSGDSPIYIGFGSLPIPEPDKLTRIIVQALEISGQRGIINKGWGGLGNLEESKEFVYVLDNVPHDWLFLQCKAVVHHGGAGTTAAGLKAGCPTTIIPFFGDQFFWGSMVHARGLGAPPIPVEQLQLHSLIDAIKFMIDPKVKERAVELAKSIESEDGVDGAVKSFLKHLPQKRDSETTPTAPEPTFVHRLLHPVNRCFGMAS

SEQ ID NO: 5211 - protein, 492 aa, Zea mays
  VARIANT 89: note = Ancestral polymorphism is S, Derived polymorphism is F
MATAAVPASRTGSGGVVRRRRRRVLMFPLPFQGHLNPMLQLAGALHARGGLDITVFHATFNAPDPARHPPGYRFVPVGDGVPSADLVPSGVDADIPGALLRINRRLREPFRDCLRQALALPEDDGDEGGAPPACLVVDSNLRGMQLVAEELGVPTLVLRTGAAACLVAYLAFPALCDKGLLPPTSKDKSQLDIPLDGLTPLRLRDMVFSPTTTHANMTECLKCLVDATRSCSGVIFNTFRDLEDSDLQRIANGVVGVPIYPVGPLHKISPCTEDSLLAPDRACLEWLDKQEADSVLYVSFGSLARVDGKELLEIAWGLADSKMPFLWVLRHGLLVNSSSSDDDDDQDKVRRLLLPGGFEEATRGRGVVVPWVPQQEVLRHRAVGGFWTHSGWNSTLESVCEGVPMMCRPQFADQMINTRYVQEVWRVGFELDGDQLERRKIAGAVTKLLCTEEGRRMRQRARDLRDKAIECVQEEGASKSAIQLLIDRIASF

SEQ ID NO: 5212 - protein, 125 aa, Zea mays
  VARIANT 112: note = Ancestral polymorphism is G, Derived polymorphism is E
  VARIANT 88: note = Ancestral polymorphism is E, Derived polymorphism is K
  VARIANT 87: note = Ancestral polymorphism is T, Derived polymorphism is I
  VARIANT 76: note = Ancestral polymorphism is I, Derived polymorphism is F
  VARIANT 62: note = Ancestral polymorphism is L, Derived polymorphism is I
  VARIANT 60: note = Ancestral polymorphism is R, Derived polymorphism is M
  VARIANT 54: note = Ancestral polymorphism is E, Derived polymorphism is D
  VARIANT 50: note = Ancestral polymorphism is V, Derived polymorphism is I
  VARIANT 45..125: note = Derived polymorphism lacks residues 45 to 125
  VARIANT 44: note = Ancestral polymorphism is K, Derived polymorphism is M
  VARIANT 42: note = Ancestral polymorphism is V, Derived polymorphism is I
  VARIANT 39: note = Ancestral polymorphism is Y, Derived polymorphism is F
  VARIANT 38: note = Ancestral polymorphism is P, Derived polymorphism is T
  VARIANT 32: note = Ancestral polymorphism is A, Derived polymorphism is V
  VARIANT 12: note = Ancestral polymorphism is S, Derived polymorphism is R
MVSLLSIGNMISYYSSESERCLDDWSSLSSSAGNPDIPYVVVSMSSIVTVVCKEILGCYRKLLGIPDMLNQPNMSILKQLLQTLQPTENFDDVLSEFQPSLAPCNVDYLYCEACKMLEDIMDSCN

SEQ ID NO: 5213 - protein, 198 aa, Zea mays
  VARIANT 102: note = Ancestral polymorphism is H, Derived polymorphism is R
MDGDVATGGGGGTSIHITALDGIVNVNSLFTLAAFLGLAWRPSSDGPGLADGADRTGNPCAAGDRAESDLVSFHVLAFACFLFSSLVALCLKQLVRTYPAPHRRRAASASASASAAGGRTARINRAALRVGILASAVGSVAGCGFLMMALVNVVQVKLGRLGCGAGGAAAWAAVVPLVTLVPSAMLIYIGTVFYAFTR

SEQ ID NO: 5214 - protein, 209 aa, Zea mays
  VARIANT 27: note = Ancestral polymorphism is A, Derived polymorphism is S
MPTRPAQARATADSPYGVYSEQIAAIAAAAPLPAKARSLETGMKLHISNLDSGVTVEDVQELFSEVGELKRYSMNYDKDGRSKGTAEVVFARKVDALDAIKRYNGVLLDGKPMNLELIGNNVEPPPLPPLIHNRPLQNYNDIHSSVLQSQRNGQRRAPQVNGRGGRSSQTSGGRGQGRGRGQDRNRTPISASDLDAELDKYHAAAAKEE

SEQ ID NO: 5215 - protein, 447 aa, Zea mays
  VARIANT 149: note = Ancestral polymorphism is C, Derived polymorphism is R
MGEGGSPEASTTSSSPSSAQGSRDSRPSLALVRRDEVTGSTYPSLRHAVLDLVARDNARAEYLATRLSPAYQPPGFSGSESKVVSGLDEGSGEYLVRVSVGSPPTEQYLVVDSGSDVMWVQCKPCLECYVQADPLFDPATSATFSGVSCGSAICRILPTSACGDGELGGCEYEVSYADGSYTKGALALETLTLGGTAVEGVVIGCGHRNRGLFVGAAGLMGLGWGPMSLVGQLGGEVGGAFSYCLASRGGYGSGAADDDAGWLVLGRSEAVPEGAVWVPLVRNPRAPSFYYVGLSGIEVGDERLPLQAGLFQLTEDGAGDVVMDTGTTVTRLPQEAYAALRDAFVGALAGAVPRAQGVSSSVLDTCYDLSGYASVRVPTVSFCFDGDARLILAARNVLLEVDMGIYCLAFAPSSSGLSIMGNTQQAGIQITVDSANGYIGFGPANCG

SEQ ID NO: 5216 - protein, 223 aa, Zea mays
  VARIANT 65: note = Ancestral polymorphism is D, Derived polymorphism is G
  VARIANT 40..223: note = Derived polymorphism lacks residues 40 to 223
MSFLFGKRKTPAELLRENKRMLDRSIREIERERQGLQAQEKKLITEIKKTAKEGQMGAVKVMAKDLIRTRHQITKFYQLKSQLQGVSLRVQTLKSTQAMGDAMKGVTKAMSQMNRQLNLPGLQRIMQEFERQNERMEMVSEVMGDAIDDALEGDEEEEETEELVNQVLDEIGIDINQELVGAPSATVAQPASVGRVAQAESAGNADSGIDADLQARLDNLRRM

SEQ ID NO: 5217 - protein, 309 aa, Zea mays
  VARIANT 169: note = Ancestral polymorphism is R, Derived polymorphism is W
MAAGLSGAAMTSFVAKNPLLAAAARRRALPPLAGRALPFSPLTTARAPRRRGLGTVTCFVPQDTEHPAAAAPAPVAPVPETALDEEARAAAARRVAERKARKRSERRTYLVAAVMSSLGVTSMAVAAVYYRFSWQMEGGAVPVSEMFGTFALSVGAAVGMEFWARWAHRALWHASLWHMHESHHRPREGPFELNDVFAIVNAVPAISLLAYGFFHRGLVPGLCFGAGLGITLFGMAYMFVHDGLVHRRFPVGPIANVPYFRRVAAAHKIHHMDKFEGVPYGLFLGPKELEEVGGLDELEKELARIGRTI

SEQ ID NO: 5218 - protein, 461 aa, Zea mays
  VARIANT 416..461: note = Derived polymorphism lacks residues 416 to 461
  VARIANT 364: note = Ancestral polymorphism is K, Derived polymorphism is N
  VARIANT 313..461: note = Derived polymorphism lacks residues 313 to 461
  VARIANT 309: note = Ancestral polymorphism is C, Derived polymorphism is F
  VARIANT 300: note = Ancestral polymorphism is P, Derived polymorphism is S
  VARIANT 287..461: note = Derived polymorphism lacks residues 287 to 461
  VARIANT 282: note = Ancestral polymorphism is P, Derived polymorphism is L
  VARIANT 237..461: note = Derived polymorphism lacks residues 237 to 461
  VARIANT 210: note = Ancestral polymorphism is W, Derived polymorphism is R
  VARIANT 206: note = Ancestral polymorphism is S, Derived polymorphism is N
  VARIANT 202: note = Ancestral polymorphism is V, Derived polymorphism is E
  VARIANT 38..461: note = Derived polymorphism lacks residues 38 to 461
MLFGGGGCASRDHSDDISDESLGGDDAEQELAQRYHQQRRSPSTAPPPPSPPLLHHASTPRLRNVHPVGVNRIISVGVPRVLPDERIHRFVGTDKFVFLAREALDIFKHRGFLDLNEPESLNYRSAYLADRFQLNMLIATMKPFCCLLSATVFGVFACLYGLKADRGLQDWFTSCGKGIASLVLEKSKTESIWWLHWCPNTVMKHNIPLWIWLLYGQRNVYTPKVNEKSMSTPLVSCFLSWSPKEASRLMNKGSVSTCSLCLSEWAVARDPKVWSNPLQYRPERFLEENIDIKGSDFKVPSFGVGRHVCPGAQLGINLVAFMTGHLLHYFEWSLPEGTRPEDINMMEFPRLVTFMGTLLQAVANLCLEKELNVYTPKVNEKSMPTPLVSCFLSWSPKEASSVEGGVDAQQTFQFSCRQGDEVPDIDNFPLHNQILQQQMDLLKRRLTKPPKSSSKQAQSLR

SEQ ID NO: 5219 - protein, 241 aa, Zea mays
  VARIANT 17: note = Ancestral polymorphism is K, Derived polymorphism is N
  VARIANT 86: note = Ancestral polymorphism is K, Derived polymorphism is R
MAGPVSSAPRTVEDIYKDYAARRAGLVRALTSDVDGFYSMCDPEKENLCLYGLPNGGWEVSLPVEEVPPEMPEPALGINFARDGMRRRDWLSLVAVHSDAWLVSVAFFFAAKLNGNDRKRLFNMINDHPSVYEIMADRKGRENNPGVDNSSKSRHSTKRSNDGKIKNSRVAVGECRYENDEDHSETLCGSCSGLYNSSEFWIGCDICERWFHGKCVRITPAKAEQIKHYKCPDCSYKKSRQ

SEQ ID NO: 5220 - protein, 223 aa, Zea mays
  VARIANT 168: note = Ancestral polymorphism is M, Derived polymorphism is I
  VARIANT 190: note = Ancestral polymorphism is D, Derived polymorphism is N
MVSSAENDGQPESPKAIPMASMTLEDVRVKSADTSKNNGMKTVDSEKDRSGNNVSVSTKDDNMKAPVTHTGSGAESNVPLQAKRSSKKPAARAKVPFEKGYSQMDWLKLTQTHPDLAGLKGQSNRRLISLEEVKQHKAGDCIWTVLKGRVYNIAPYMKFHPGGVDMLMKAAGKDCTALFSILLLLFLHCDTLSCCLWAHTGTPFLLLCKLVWPKGMIYKQRSL

SEQ ID NO: 5221 - protein, 113 aa, Zea mays
  VARIANT 43: note = Ancestral polymorphism is R, Derived polymorphism is G
  VARIANT 23: note = Ancestral polymorphism is R, Derived polymorphism is C
  VARIANT 16..113: note = Derived polymorphism lacks residues 16 to 113
MQIDDDEKITVIDFPQMVSVSHRNAQMFFDRDIECIYKFFNKRFNLRSVKNEEQAGFENDDEGNSRPSFLSVEKGAGSLDKELAASGFTRKEQVDMEKVGQMFLQICYSCIHL

SEQ ID NO: 5222 - protein, 113 aa, Zea mays
  VARIANT 81: note = Ancestral polymorphism is C, Derived polymorphism is Y
  VARIANT 75: note = Ancestral polymorphism is G, Derived polymorphism is R
  VARIANT 67: note = Ancestral polymorphism is G, Derived polymorphism is D
  VARIANT 63: note = Ancestral polymorphism is L, Derived polymorphism is V
  VARIANT 54..113: note = Derived polymorphism lacks residues 54 to 113
  VARIANT 50: note = Ancestral polymorphism is G, Derived polymorphism is R
  VARIANT 10: note = Ancestral polymorphism is C, Derived polymorphism is Y
MFGGQRLHVCGEIYSWRKLMNTVIKKKLDIIPKDLKWGEQSDDVFNALAGDFMKPRIQEVDQLLKLGVNVTVYSGQLDLICATKGTMDWVQKLKWDGLNSFLSSPRTPIYCNK

SEQ ID NO: 5223 - protein, 258 aa, Zea mays
  VARIANT 86..258: note = Derived polymorphism lacks residues 86 to 258
MALQHAGPASSTLTTGRHGRSAAAVLRRPPTGSSSRLRAHAQKPVAGSRSRGAGAETATSPSSSRSENAVLKAAWYGSELLGIAASLLRPAPSSPQEGDAGGGGDAEGEAAAVAGALDLDHAGVAEAIKADFARSYFVTGNLTLRAYEEDCEFADPAGSFRGLRRFKRNCTNFGSLLEKSNMKLTKWEDLEDKSIGHWRFSCVMSFPWRPILSATGYTEYYFDAESGKVCRHVENWNVPKMALLRQIFRPSRWVWEKR

SEQ ID NO: 5224 - protein, 207 aa, Zea mays
  VARIANT 193: note = Ancestral polymorphism is A, Derived polymorphism is V
MAAPYYGGPPAAPAPVAVVSPQFCAPYVVPLTVTKKAISLSDGDFTVTDANGATVLQVKGAVFSIRHRRVLLDAAGQPILTMLEKVFSMHNRWEVFRGDSSNESDLLFTAKKSSIFQLKTEMDIFLASNTAQQVCDFKIKGSYFERSCAFYLGNSSSMIAQMNRQFTVTNVLLGRDTFGVTVFPHVDYVFVAALVVILDEIHRERSD

SEQ ID NO: 5225 - protein, 320 aa, Zea mays
  VARIANT 45..320: note = Derived polymorphism lacks residues 45 to 320
  VARIANT 68..320: note = Derived polymorphism lacks residues 68 to 320
  VARIANT 116: note = Ancestral polymorphism is P, Derived polymorphism is L
  VARIANT 151..320: note = Derived polymorphism lacks residues 151 to 320
  VARIANT 157: note = Ancestral polymorphism is S, Derived polymorphism is I
  VARIANT 186..320: note = Derived polymorphism lacks residues 186 to 320
MSPPSVIPSPPSSPRPHPSCRRPRPAALKSKKGYEYESQSRAGGRANSKASCSSPIRPSPNLIAGFRQKGWDAARFRRGLFCPFRAILLSAREASTDGSEDQGGGGGPRRWKWNAPMRKFQDSIKALQADIDHANAMVSEFLRDYDGSVIQMRVAYSAVAHFLLQWTDCKLAGALGLLKVMLYKVCADGSSALPDWDMEASIREFYGVIFPLLLQLPSGITELDDRKQRKLCLKKFRSRDEQLWEVDTERELECGICLEEMTPTLLRSLKPQDMSVIKQVQVSRKWEFHGNTDIGSILHIDMILADKERCLRCVVKSRRR

SEQ ID NO: 5226 - protein, 153 aa, Zea mays
  VARIANT 149: note = Ancestral polymorphism is S, Derived polymorphism is Y
  VARIANT 82: note = Ancestral polymorphism is P, Derived polymorphism is L
MTMSSSSINKQEGPKLFSSRILSRDRSSVANASFRVYYSLGAGTVPFLWESKPGTPKSSSTPASGASAVPPISPPPPYQQKPVSQSMADKAKFRRRRPAASSWPPGGCWIIGCLNLNVRRRSPQPSPTDHQQRRCLGVVDGDERRSRRSTMCF

SEQ ID NO: 5227 - protein, 140 aa, Zea mays
  VARIANT 2: note = Ancestral polymorphism is A, Derived polymorphism is T
MADQEAPVAVEAPTPVLGEPMDLMTALQLVMKKSSAHDGLVKGLREAAKAIEKHAAQLCVLAEDCDQPDYVKLVKALCAEHNVHLVTVPAAKTLGEWAGLCKIDSEGKARKVVGCSCVVVKDYGEESEGLNIVQEYVKSH

SEQ ID NO: 5228 - protein, 843 aa, Zea mays
  VARIANT 220: note = Ancestral polymorphism is R, Derived polymorphism is S
MNFLYRTTQPAATELPRISEQDHRNALQKTTSTLEGLIADDSHHQPSSAHIEDGAANNGSRDISGDSSSVDLKSPVPLGTHADVMEDEGWITIPCKALPESWNDISEMVQLQALDRSFLFPGEQVPILACLSASKQDVQVISPFRIAAVMSKNGTSMQNFTNKSSPVSANGHDNGAAGESGYQDVEPNGEASPSGHDILETQSLLQMEDHKQQIEHVLRRFRESNFFVRIAESVEPLWSKKSVTSTTMADERSDNQGNSKSSRSNVYNTISDKGVFDGNTSGGVARDVVKCYSLQNGDIVVVLQVNVSVNKLEDPVLEVLQFEKSISNNCMPGNLVDGHCDSNDDPCQELLSWLLPLDRTLPPRSLAPPTLNPSVSHKQSYSASGSQIFNFRSYSMPSASSVQTPNNIRPPPISESQEFMPEKPAKTPDIINDGQLSFRGVPLEPERYSVRCGLEGVYLPGKRWRRKVEIIQPIEVHSFAAKCTVENLLCVTVKNIAPTHAKDIVVFIDAITIVFEEASKGGAPLSLPIASIEVGHGHSLPNLALRRGEEHSFILKPATMSSRERKTNSHAPLALSLPTMTGATLNTHTPKAGEPYADLSDQYAVLVSYRCNYTGKLLLNQEISSKEEWSGFFMISAFIYVESKLFFKQATSWRPSAASDLMISVSSELSLRNPSLGARVPQLPVQILTLEATNMTSENLTLTVLAPEASGSSSVVSLNSSPTTPNGSFDGVNESSKRSGLGKDGIGFRRLNSVLATPKEGDNGGNRMSNASGCTHLWLQSAVPLGCVPARSSTTVKLELLPLSDGIITLDTLQITAREKGLAYIPEHSLEIHATSGMSSGRS

SEQ ID NO: 5229 - protein, 291 aa, Zea mays
  VARIANT 193..291: note = Derived polymorphism lacks residues 193 to 291
MDPSLKEEVMKAVEEARSAAAPRCRVVRIIVHDEDATDSSSSDDEGEEAGERAAAHPAAAPAGSVKRSRVLLQSAGCGAEEDGEGARFTGVRRRPWGRWAAEIRDPLLRRRVWLGTFDTAEEAAAAYVAARLRIRGPSNSLPPPEHRPALPPRPPPPPQQREKKLPLPPPPPPLLPLPPKKQQYPPPPLLPPKKQLYPPPLPLLPPKKQQQHHHHPSPPLPTLPPKKRLPSPPLLRESKKQCVASSPAEPRFMPLPVWALMSGSGKRKKRSGCGGRVPALHTPAAEETGRA

SEQ ID NO: 5230 - protein, 303 aa, Zea mays
  VARIANT 154: note = Ancestral polymorphism is A, Derived polymorphism is D
  VARIANT 140: note = Ancestral polymorphism is W, Derived polymorphism is C
  VARIANT 103..303: note = Derived polymorphism lacks residues 103 to 303
  VARIANT 78: note = Ancestral polymorphism is W, Derived polymorphism is C
MVMAPAAAQQQRRRDAEAELNLPPGFRFHPTDEELVAHYLCARAAGRRPPVSIIAEVDLYRFDPWDLPERALFGRREWYFFTPRDRKYPNGSRPNRAAGSGYWKATGADKPVEHGGRTVGVKKALVFYHGKPPRGVKTEWIMHEYRLADAGARARARKPGTGTLRLDDWVLCRLYNKKNEWEKTQQQQEKKQNQKQMESEASLSHSHSDTRTPESEIDDDPFPELASLPALDDMMGPAAAAPAGAILPKEEVEDLGGLGGDDWLAGINLDDLQIPGEADFYGSMLVSPMAAKMEQDAAGFPFF

SEQ ID NO: 5231 - protein, 446 aa, Zea mays
  VARIANT 21..446: note = Derived polymorphism lacks residues 21 to 446
  VARIANT 41: note = Ancestral polymorphism is T, Derived polymorphism is I
  VARIANT 46: note = Ancestral polymorphism is S, Derived polymorphism is I
  VARIANT 50: note = Ancestral polymorphism is I, Derived polymorphism is S
  VARIANT 56..446: note = Derived polymorphism lacks residues 56 to 446
  VARIANT 112..446: note = Derived polymorphism lacks residues 112 to 446
  VARIANT 197..446: note = Derived polymorphism lacks residues 197 to 446
  VARIANT 261..446: note = Derived polymorphism lacks residues 261 to 446
MPNNIGLQPLPSSNVQSNQIEYPSMFYPSSLPGDWSLYMGTSVPVSSYYIVPVNQQSVQLGASRPEVSCPAQPLLSRVSLRPPQQVLNIQTSFPAMARLQSSPSMAGRKSQQKVACPKVQMLKSLSFQSSNKRSAQKEPTSKVQHHQLESVRSKFRESLIAALSLDSDQQNRSQSPDNVQSDGSTDKFKPAAGDVVQDLVANTSKDVCTTNSGIATTVAPSRCEENEKLISDLASQMTMSINDGMQQPSNQVSSEDDLLGQCMVAEELLQGHGLSWVSDHVVGISKPNAEPNDLKSLRTSDVESESKRMKSANELAMDEEKFNQRPESLAFRIEEEPFKLFRGVNKKYKEKGRSLLFNLKDKSNPELRERVSSGDIAPERLCSMTTASKELSEWRLAKVEEFAQMVVLPNMEVDPRSLVRKTHKGEFQVEVEEPDGTEMYIYNKLI

SEQ ID NO: 5232 - protein, 152 aa, Zea mays
  VARIANT 65..152: note = Derived polymorphism lacks residues 65 to 152
  VARIANT 58..152: note = Derived polymorphism lacks residues 58 to 152
  VARIANT 40: note = Ancestral polymorphism is G, Derived polymorphism is W
  VARIANT 36..152: note = Derived polymorphism lacks residues 36 to 152
  VARIANT 6: note = Ancestral polymorphism is T, Derived polymorphism is M
MVKIRTVEVEGKTVKLQIWDIAGQERFRTITSSYYRGAHGIIIVYDITDMESFNHVKQWLGEIDRYANDSVRRLLVGNKCDLAENRAVDTSVDSSTGQNFQAYAEEVGIPFLETSAKESINIEEAFLAMSAAIKKSKAGSQAALERKPSNVV

SEQ ID NO: 5233 - protein, 319 aa, Zea mays
  VARIANT 46: note = Ancestral polymorphism is A, Derived polymorphism is V
  VARIANT 63: note = Ancestral polymorphism is E, Derived polymorphism is D
  VARIANT 71: note = Ancestral polymorphism is C, Derived polymorphism is S
  VARIANT 78: note = Ancestral polymorphism is W, Derived polymorphism is C
  VARIANT 92: note = Ancestral polymorphism is R, Derived polymorphism is L
  VARIANT 133: note = Ancestral polymorphism is C, Derived polymorphism is Y
  VARIANT 147..319: note = Derived polymorphism lacks residues 147 to 319
  VARIANT 154: note = Ancestral polymorphism is M, Derived polymorphism is K
  VARIANT 161..319: note = Derived polymorphism lacks residues 161 to 319
  VARIANT 205: note = Ancestral polymorphism is S, Derived polymorphism is F
MAQAPARAASAVRLFDAHCHLQDPRIAAVAPALIRAAGASGVARFAVNGTSEKDWHLVKQMAEDHPAVVPCFGLHPWWVPERSPDWMNLLRRFFAETPEAAVGEVSFSAIQKNPNPLSGVKLLISCVRRQFICRDYLDLWILYAAKLVWTKVHMEKPSTSENRQTGPFPAGVLLHSYMGSAEMVSALANLGCYFSLSGFLTGMKSTKAKHMLKSIPLDRILLETDAPDALPRLDNVSVSPVHVHSSDADTEKRHMDSESQAANASNESLNHPENIHIVLEYVASLLEMTESELAELSYKNATKLFSYPGSKVQHEPEDI

SEQ ID NO: 5234 - protein, 303 aa, Zea mays
  VARIANT 28: note = Ancestral polymorphism is E, Derived polymorphism is K
  VARIANT 32: note = Ancestral polymorphism is G, Derived polymorphism is R
  VARIANT 33: note = Ancestral polymorphism is Y, Derived polymorphism is C
  VARIANT 35: note = Ancestral polymorphism is S, Derived polymorphism is F
  VARIANT 57: note = Ancestral polymorphism is A, Derived polymorphism is V
  VARIANT 113..303: note = Derived polymorphism lacks residues 113 to 303
  VARIANT 121: note = Ancestral polymorphism is G, Derived polymorphism is D
MSTNAGVRDGAPGAAVDAAFARRALQAEALLGYLSALATSPRAGGDRGALDYREFLAVSLHLQRMANDEHLQRAFLFFDKDGNGFIEPEELREALVDDGATDSMEKVVDDILQEVDTDKDGKISYEEFVAMMKTGTDWRKASRHYSRGRFNSLSMKRWRSPASDASQAQQLQKILSCGALIDGMGSDFVSGTFLLGSQFLTDLRDNIFVCLISDTRHCSATDYSKPILDWLENSSDELDEQTDYQNSTGMMDKAVNLAMKRIIDKRRIHYHREHDGNSKHDWWRQPWDESEVEGLHITMDDFE

SEQ ID NO: 5235 - protein, 481 aa, Zea mays
  VARIANT 263: note = Ancestral polymorphism is A, Derived polymorphism is T
MAPFQMRFGLQISPARSDDDEEEDDDDDNEEEYDEMASEGTASPPMMLRPGRGGGGLVSAVVGALRRSLVMCSAGAVDIDDDDDEEEGGIEIGRPTDVHHVSHVTFDRFGGFLGLPADLEPEVPRRTPSARSNSTCSVSVFGVSPTSLQCSYDPRGNSVPTILLMMQRKLYDRGGLKVEGIFRINAENSQEVYVRDQLNSGVVPNEVDLHCLAGLIKAWFRELPSGVLDALTPEQVMHCNTEGGCALLASMLPPVEAALLDWAINLMADVVEQENYNKMNARNIAMVFAPNMTQMADPLTALIHAVQVMNFLKTLILKTLKERNKKDEALEALQPCSSSPNDQDEHQVSEHLEKPSVLPNQKGFGFHMNDSATPVQVLGAEKTLHHHSQIRSHEPKKFGTDMDHKKRQSDASSLLGSDSSNRFNSSGREFGSRNGASDRFSFRKGVERLCRHPVFQLNRSMKKSTDAVVFDAPRETRQAWV

SEQ ID NO: 5236 - protein, 110 aa, Zea mays
  VARIANT 17: note = Ancestral polymorphism is S, Derived polymorphism is F
  VARIANT 85: note = Ancestral polymorphism is P, Derived polymorphism is L
MPRLSCKFADPDSAVSSAPVARRVRSDGMSCGSDVCWDGGSSSGSEEFRLPQPSKVAADDLVAPTRSSDAAAPTSWIDRKLLVDPKMLFIGDKIGEGAHGKVYMGKCLFR

SEQ ID NO: 5237 - protein, 1135 aa, Zea mays
  VARIANT 730..1135: note = Ancestral polymorphism lacks residues 730 to 1135
MPPSRSLFLLLMLALAPLASLTAPAPAPVARTAGVQAEIDALLAFRRGLRDPYGAMSGWDAASPPRPAPGAASPLGSLPYLERLSLRSNDLSGAIPPSLARVTSLRAVFLQSNSLSGPIPQSFLANLTSLDTFDVSGNLLSGPVPVSLPPSLKYLDLSSNAFSGTIPSNISASTASLQFLNLSFNRLRGTVPASLGNLQDLHYLWLDGNLLEGTIPAALANCSALLHLSLQGNSLRGILPSAVAAIPTLQILSVSRNQLTGAIPAAAFGRQGNSSLRIVQLGGNEFSQVDVPGGLAADLQVVDLGGNKLAGPFPAWLAGAGGLTLLDLSGNAFTGELPPALGQLTALLELRLGGNAFAGAVPAEIGRCGALQVLDLEDNHFTGEVPSALGGLPRLREVYLGGNTFSGEIPASLGNLSWLEALSIPRNRLTGGLSGELFQLGNLTFLDLSENNLAGEIPLAIGNLLALQSLNLSGNAFSGHIPTTISNLQNLRVLDLSGQKNLSGNVPAELFGLPQLQYVSFADNSFSGDVPEGFSSLWSLRDLNLSGNSFTGSIPATYGYLPSLQVLSASHNHISGELPPELANCSNLTVLELSGNQLTGSIPSDLSRLGELEELDLSYNQFSGKIPPEISNCSSLTLLKLDDNRIGGDIPASIANLSKLQTLDLSSNNLTGSIPASLAQIPGLVSFNVSHNELSGEIPAMLGSRFGSASAYASNPDLCGPPLESECGEQRRRQRRQKVQRLALLIGVVAAAVLLLALLCCCCVFSLLRWRRRFIESRDGVKKRRRSPGRGSGSSGTSTENGVSQPKLIMFNSRITYADTVEATRQFDEENVLSRGRHGLVFKACYSDGTVLAILRLPSTSADGAVVIDEGSFRKEAESLGKVKHRNLTVLRGYYAGPPPDVRLLVYDYMPNGNLATLLQEASHQDGHILNWPMRHLIALGVSRGLAFLHQSGVVHGDVKPQNILFDADFEPHLSDFGLEPMVVTAGAAAAAAAASTSAATPVGSLGYVAPDAAAAGQATREGDVYSFGIVLLELLTGRRPGIFAGEEEDIVKWVKRQLQRGAVAELLEPGLLELDPESSEWEEFLLGIKVGLLCTASDPLDRPAMGDVVFMLEGCRVGPDIPSSADPTSQPSPA

SEQ ID NO: 5238 - protein, 352 aa, Zea mays
  VARIANT 149: note = Ancestral polymorphism is I, Derived polymorphism is T
  VARIANT 32: note = Ancestral polymorphism is P, Derived polymorphism is L
  VARIANT 21: note = Ancestral polymorphism is T, Derived polymorphism is I
  VARIANT 19: note = Ancestral polymorphism is A, Derived polymorphism is G
MDTGSGPGLQYLLCLAWVAATLPIAAAALPIPRAAGGRFIHGLLCAFSSRGKTVRPSSSSSSKARFTVPQKFFFHFYVVGVVVTTSLLLAIWFYAYMKMTPLIPEPSSYYSTIASHLVGGSNSFSLTNFWLSRPMKHKYHVWRTVFVLILMEIQVLRRLYETEHVFHYSPSARMHIIGYLTGIFYYVAAPLSLASSCLPETIQYLRYQIAEFIVKGRAKMPDLAIVPSHLLKPLLKLGWCQWIGAIIFIWGSLHQIHCHAILVCIRFCHSTSYLFVANANNIQQQLGSLREHKDSDEYVIPCGDWFSRVSCPHYLAELITNLSFAAVQTHKWYLRKFEDYPRSRYAIIPFVC

SEQ ID NO: 5239 - protein, 464 aa, Zea mays
  VARIANT 4: note = Ancestral polymorphism is K, Derived polymorphism is T
  VARIANT 18: note = Ancestral polymorphism is I, Derived polymorphism is V
  VARIANT 25: note = Ancestral polymorphism is R, Derived polymorphism is P
  VARIANT 246: note = Ancestral polymorphism is G, Derived polymorphism is R
MPTKPLLVFVFFTSMAVVSHASSLRFQYIDRRHNFTAKQASTSSSSSPSSAHGSRDRRPSFALVRRDAVTGSTYPSRRHAVLDLVARDNARAEYLASRLSPAAYQPTGFSGSESKVVSGLDEGSGEYFVRVGIGSPPTEQYLVVDSGSDVIWVQCKPCLECYAQADPLFDPATSATFSAVPCGSAVCRTLRTSGCGDSGGCDYEVSYGDGSYTKGALALETLTLGGTAVEGVAIGCGHRNRGLFVGAAGLLGLGWGPMSLVGQLGGAAGGAFSYCLASRGAGSLVLGRSEAVPEGAVWVPLVRNPQAPSFYYVGLSGIGVGDERLPLQEDLFQLTEDGAGGVVMDTGTAVTRLPQEAYAALRDAFVAAVGALPRAPGVSLLDTCYDLSGYTSVRVPTVSFYFDGAATLTLPARNLLLEVDGGIYCLAFAPSSSGPSILGNIQQEGIQITVDSANGYIGFGPTTC

SEQ ID NO: 5240 - protein, 155 aa, Zea mays
  VARIANT 68: note = Ancestral polymorphism is L, Derived polymorphism is M
MASSSSSSHRRLILAAAVLLSVLAAASASAGTSCVPGWAIPHNPLPSCRWYVTSRTCGIGPRLPWPELKRRCCRELADIPAYCRCTALSILMDGAIPPGPDAQLEGRLEDLPGCPREVQRGFAATLVTEAECNLATISGVAECPWILGGGTMPSK

SEQ ID NO: 5241 - protein, 186 aa, Zea mays
  VARIANT 119: note = Ancestral polymorphism is A, Derived polymorphism is V
  VARIANT 7: note = Ancestral polymorphism is K, Derived polymorphism is T
  VARIANT 2: note = Ancestral polymorphism is G, Derived polymorphism is W
MGLAFGKLFSRLFAKKEMRILMVGLDAAGKTTILYKLKLGEIVTTIPTIGFNVETVEYKNISFTVWDVGGQDKIRPLWRHYFQNTQGLIFVVDSNDRDRVVEARDELHRMLNEDELRDAVLLVFANKQDLPNAMNAAEITDKLGLHSLRQRHWYIQSTCATTGEGLYEGLDWLSSNIASKVYIWLA

SEQ ID NO: 5242 - protein, 436 aa, Zea mays
  VARIANT 16: note = Ancestral polymorphism is R, Derived polymorphism is C
  VARIANT 23: note = Ancestral polymorphism is L, Derived polymorphism is V
  VARIANT 27..436: note = Derived polymorphism lacks residues 27 to 436
  VARIANT 28: note = Ancestral polymorphism is E, Derived polymorphism is K
  VARIANT 48: note = Ancestral polymorphism is T, Derived polymorphism is I
  VARIANT 60: note = Ancestral polymorphism is S, Derived polymorphism is Y
  VARIANT 97..436: note = Derived polymorphism lacks residues 97 to 436
  VARIANT 110..436: note = Derived polymorphism lacks residues 110 to 436
  VARIANT 124: note = Ancestral polymorphism is P, Derived polymorphism is L
  VARIANT 139..436: note = Derived polymorphism lacks residues 139 to 436
  VARIANT 151..436: note = Derived polymorphism lacks residues 151 to 436
  VARIANT 153: note = Ancestral polymorphism is Y, Derived polymorphism is N
  VARIANT 174..436: note = Derived polymorphism lacks residues 174 to 436
  VARIANT 180..436: note = Derived polymorphism lacks residues 180 to 436
  VARIANT 183: note = Ancestral polymorphism is A, Derived polymorphism is G
  VARIANT 201: note = Ancestral polymorphism is S, Derived polymorphism is P
  VARIANT 210: note = Ancestral polymorphism is I, Derived polymorphism is K
  VARIANT 211: note = Ancestral polymorphism is W, Derived polymorphism is C
  VARIANT 214: note = Ancestral polymorphism is H, Derived polymorphism is Q
  VARIANT 256: note = Ancestral polymorphism is T, Derived polymorphism is I
  VARIANT 257: note = Ancestral polymorphism is A, Derived polymorphism is V
  VARIANT 285: note = Ancestral polymorphism is P, Derived polymorphism is L
  VARIANT 304..436: note = Derived polymorphism lacks residues 304 to 436
MSEHDLTALMAAQLDRHLVFPLLEFLQERQLYSESEILEAKIRLLSGTNMVDYAMDIHKSLYGTDDVPEDMVKRRAEVVSRLRSLEEAAAPLVAFLQNPQLVQEFRPDKQYNIHMLQERYQIGPDQIEALYQYAKFQFECGNYSGAADYLYQYRALCTNSERNVSALWGKLAAEILMQNWDVALEELNRLKEIIDSKNFSSPLNQLQNRIWLMHWALFIFFNHENGRNGIIDLFFQDRYLNAIQTNAHHLIRYLATAVVVNKRRRNMLKELIKVIQQEHHSYKDPVTEFLECLYVNYDFDGAQQKLIECEQVILNDPFLGKRIEEGNFVSVPLRDEFLENARLFIFETYCRIHRCIDISMLAQKLNMSYDEAELWIMNLVRSSKLDARIDSVSGTLIMTTNHVNVHEQIVESLKGLNMRTYMLAKNIVEPAQQATR

SEQ ID NO: 5243 - protein, 606 aa, Zea mays
  VARIANT 541: note = Ancestral polymorphism is L, Derived polymorphism is P
MAAPPLVFVAAAIAALAIFVLVLVVFAFRRWWWWRRQRRPLQAAAEASTPVAVQEEDIDRPLLSENRDDHSRQSNYFLGSSVGEPSKIQSNRSNISPRSHAIADTGRTYPDECCATQGETHVINIENDTSEEFRLGSTLRRTSPAKLTTPAQKHRRVSGDDYHNGSVPLKDSTYRKLSFKLDLDILIVHCLQSRPSMLPITLGRVPPSDLVLKDSEVSGKHAQINWNAKTLKWELVDMGSLNGTFLNSQAVHHPDAESRHWGEPAELAHGDIITLGTSSKLSVQITLQNQRVPAGVGMASDPMVARRSGKKLPMEDISFCQCPLQGVEHFGLFGIFDGHGGDGAAKAVSKILPENLGYMLSHPETKERVQSCSDASDVLRYAFTLTEDAIDHQYEGCTGTALLIWFDQNKDCFAQCANLANILYGVESQTLLLTSIKRKHCWLHVSEPDDNLNFFSVNGKTIDMTEDHRVASATERARIARTGQPLKDGEVRLNGLNLARMFGDKFLKEQDSRFSSEPYLSQAVRITKACTAFAVIASDGLWDVISTKRAVQLVVEGTERYSGDSASAAKVANRVLDEARSLRTKDNTSLIFVDFDILRTDPCIAK

SEQ ID NO: 5244 - protein, 1323 aa, Zea mays
  VARIANT 782..1323: note = Derived polymorphism lacks residues 782 to 1323
  VARIANT 209: note = Ancestral polymorphism is Q, Derived polymorphism is L
MATSAPPPSSAPWLEWAAEYTKAAQAEARPPPEWAARVAAAAAAAGESEDVPWSAGLAEVLARALFPGGGGGGGGAAPAAAAWKYAEAALAARLASPALLLALLSTRVIPHRLSRPMEYRLYLELLKRHGFNFHHQMKAANFRKCAFPLSDCSLYFLNTMLKSVVWNENQSNRIMDIIERNLRLSKIFGISTCEPGVFVVHFILCIIWQLIDVVLDDEGLLELTPEKNAQWPTRPEDVSTFEGTFTEQRTEKIKKLQKMNTVTTMELIEHLLRDKVITRILSLARENMQSHWGAFTNRLHLLATNSSTLQNSAISLEPFQHLILGDCDAYGETKHNVHKRFHQIVASNPLSSPNGRCLGASYSALWIPIDMYLEDCLDCSIAATNSIEILSGLVKALQAVNRSTWHDAFLALWVASLRLVQREREPIEGPVPHLDTRLCMLLSITTLAIADIIMEADSLCNETELNSHVNEKKAIGNLRNELMLSLQILGDYESLLVPPSCVIPAANQAATKAAMFISGISINNGYMDNVNGMNYTGNMRHLIVESCISRQLLDTSAYYWPGYIMNHANSTSHTLPSQLAGWSSFMKGAPLTQPLVNMLVSTPASRCEHTVRLVVKLLSPSDPIDNSGRESQLIKLGPMLNVILSGISAVDYAPIFSFHGLIPELAASLMAICEVFGCLSPSVSWTLRTGEEISAHTVFSNAFILLLRLWKFNHPPLEYCIMGDGAPVGSQLTPEYLLLLRNSQVLSSSSLSKQRNGQRQSQVSTSHPSSGNPIFMDSFPKLKLWYQQHQACLASTLSGLAHGTPVRNNVDSLLNQMFRKANKGGTSIGSLSGSSSISNSSSPGGDDSHLWPQLPAWEILEAVPFVVDAALTACSHGRLFPRELATGLKDLADFLPASLATIVSYFSAEVTRGVWKPASMNGSDWPSPSVNLSMVDEHIKKIVAATGVDVPKLVTGGSSSGTLPLPLAAFVSLTITYKLDKASECFLNLAGPALENLAASCPWPSMAIVAALWTQKVKRWSDFLIFSASRTVFHHNNDAVVQLLRSCFAATLGMSSTSVCSCGGVASLLGHGYCPGGFSPVAPGILYLRIFRCIKDCSILAEDILSLLMLSVKDIAETTVPRQRPDKLKKTKYGMRHGQVSLSAAMTQVKVAASLGATLVWLSGGTALVQSLIQEMLPSWFLSAQNLDQGGASGGVVYKLGGHALAYFAVYSGMLAWGIDQTPVSRRRERVMRSHLGFLASALAGKIFLGCDLSLWRAYVSGFLGLVVECTPCWVQEVDLRVLKRLSSGLRHWGEDELAVALLRRAGPEAMGTAAEMILGREL

SEQ ID NO: 5245 - protein, 388 aa, Zea mays
  VARIANT 350..388: note = Derived polymorphism lacks residues 350 to 388
  VARIANT 192..388: note = Derived polymorphism lacks residues 192 to 388
  VARIANT 72..388: note = Derived polymorphism lacks residues 72 to 388
  VARIANT 20..388: note = Derived polymorphism lacks residues 20 to 388
MKGKENGEHYELSPQVLNEWAPKSAARNGSGDHNNGSPVVTDHQDSMILEGNPKITPVVPKSIHDGKKPPRENCKTIPVVPEKEINEKKASTYRTIPVIKESDEKKIGMREKRELKEANSAEMVEENRKTKHNDSSVVKHSKLPPVCLRVDPLPRKKPGNDSSRSPSPPRKDTDNTKKDVEEAQSQILEPKQSSTSKDITVSEVKEKSPYEMKKEVGFRNETVEVASVEHLQEEEAPTSKDGQKVQAASTTVGDQENAALKSIEEDHVQENAGAGSLNGCDKRKNEDGTVIESETAKDDARTYGVNLSESDVAVRIQSAYRGYDVRKWQPLDKLRKIKHVHEQMQVVRKQIQCLLDSCSKPTQKEQVAIGETIMNLLLKLDAIQVYFS

SEQ ID NO: 5246 - protein, 525 aa, Zea mays
  VARIANT 4: note = Ancestral polymorphism is R, Derived polymorphism is W
  VARIANT 19: note = Ancestral polymorphism is A, Derived polymorphism is T
  VARIANT 21: note = Ancestral polymorphism is E, Derived polymorphism is K
  VARIANT 23: note = Ancestral polymorphism is V, Derived polymorphism is M
  VARIANT 78: note = Ancestral polymorphism is G, Derived polymorphism is D
  VARIANT 79..525: note = Derived polymorphism lacks residues 79 to 525
  VARIANT 188: note = Ancestral polymorphism is D, Derived polymorphism is G
  VARIANT 254: note = Ancestral polymorphism is L, Derived polymorphism is H
MATRRHILLLAAAFVSLLALEAVEGLEEGPRGRRLLVLLDDLAVRSSHSAFFGSLQARGFDLEFRLADDPKLSLHRYGQYLYDGLVLFAPSTPLVDSTLFVSKASLYSMAGFGGSVDQNAVLEFIDAGLDMILAADSSASDLIRGIATECGVDFDEAKAMVIDHINYAAMDVEGDHTLIVGDDLIQSDVILGSKKIEAPVLFRGIGHTANPSNSLVLKVLSASPSAYSANPKTKLSLPPSLTGSAISLVSVMQHSLVFHKVFMLFHRFRFLKSGVQKAGSKTRYERAGNEQFVTETSKWVFHERGHLKAVNVKHHKVGETNEPGMYRINDDLEYSVEIYEWSGTSWKPYVADDVQLQFFMMSPYVLKTMSNDNKGLYSTSFKVPDVYGVFQFKVEYQRLGYTGLSFTKQIPVRPYRHNEYERFITSAYPYYTASFSTVRSASICYSVDVMKMFLHLLQLHLHMSFIIKFTCVECVIDVCFLHILACVPVPQIKDSRERTSFWRLLMRPRSVAKCYPVQFYGIIYL

SEQ ID NO: 5247 - protein, 277 aa, Zea mays
  VARIANT 11: note = Ancestral polymorphism is R, Derived polymorphism is H
  VARIANT 13: note = Ancestral polymorphism is R, Derived polymorphism is L
  VARIANT 15: note = Ancestral polymorphism is G, Derived polymorphism is S
  VARIANT 22: note = Ancestral polymorphism is A, Derived polymorphism is V
  VARIANT 25: note = Ancestral polymorphism is G, Derived polymorphism is V
  VARIANT 27: note = Ancestral polymorphism is P, Derived polymorphism is L
  VARIANT 30: note = Ancestral polymorphism is E, Derived polymorphism is K
  VARIANT 38: note = Ancestral polymorphism is A, Derived polymorphism is V
  VARIANT 40: note = Ancestral polymorphism is R, Derived polymorphism is C
  VARIANT 45: note = Ancestral polymorphism is V, Derived polymorphism is I
  VARIANT 51: note = Ancestral polymorphism is R, Derived polymorphism is H
  VARIANT 59: note = Ancestral polymorphism is I, Derived polymorphism is N
  VARIANT 71: note = Ancestral polymorphism is C, Derived polymorphism is Y
  VARIANT 82: note = Ancestral polymorphism is S, Derived polymorphism is L
  VARIANT 117: note = Ancestral polymorphism is S, Derived polymorphism is L
  VARIANT 119..277: note = Derived polymorphism lacks residues 119 to 277
  VARIANT 133..277: note = Derived polymorphism lacks residues 133 to 277
  VARIANT 135: note = Ancestral polymorphism is T, Derived polymorphism is N
  VARIANT 137: note = Ancestral polymorphism is S, Derived polymorphism is R
  VARIANT 143: note = Ancestral polymorphism is S, Derived polymorphism is I
  VARIANT 144: note = Ancestral polymorphism is P, Derived polymorphism is L
  VARIANT 147: note = Ancestral polymorphism is S, Derived polymorphism is F
  VARIANT 195: note = Ancestral polymorphism is E, Derived polymorphism is K
  VARIANT 197: note = Ancestral polymorphism is R, Derived polymorphism is C
  VARIANT 210: note = Ancestral polymorphism is T, Derived polymorphism is A
  VARIANT 218: note = Ancestral polymorphism is T, Derived polymorphism is I
  VARIANT 235: note = Ancestral polymorphism is M, Derived polymorphism is T
  VARIANT 237: note = Ancestral polymorphism is G, Derived polymorphism is D
  VARIANT 250: note = Ancestral polymorphism is A, Derived polymorphism is V
MAMLKSVVLWRKRFGIDELLGVDLGLPELEKVVFYRGADREGHPVCYNVWRIQLLERSIREQLDFSLSGICSMVQVTDLKNSSPMLGKHQGVTRQALALLQDNYPEFVAKKVFINVSWWYLATNKVMSPFLTQRTKSKIVFCSPDRSAETLFRYVALEQVPVRFGGLYKEDDTEFSASDVVTELTVKPSSKETIELRVLGWEVSYDAEFAPDAEGGYTVIVEKMRKVPAHEEPIMKGSFKAAGPSKVVLAVDNRASKKKKLLLYRFRVKSTAAEPAA

SEQ ID NO: 5248 - protein, 193 aa, Zea mays
  VARIANT 78..193: note = Derived polymorphism lacks residues 78 to 193
  VARIANT 75: note = Ancestral polymorphism is R, Derived polymorphism is W
MMTQPPSPRPCSPTHTGVVAPSSPLPYLFGCLMSTFFASPVAAWNYIDSKEDILVYATKLIKAEMPISLRLMGLRMSQLHDEKDDPSTSTQKTLDIFFHSSNSNSNGNGTNVQRTTNSPGQDNDSISLTSKEYLAPDAGTSVSTGQQDFFLHDENCFIPEQQRSLDNDTKEAVLSDPLGGTKSDDVSYRQRFV

SEQ ID NO: 5249 - protein, 212 aa, Zea mays
  VARIANT 130: note = Ancestral polymorphism is A, Derived polymorphism is V
MAAVTKIYVVYYSTYGHVARLAEEIKKGADSVDGVEATIWQVAETLPEEALAKMRAPARSEEHPVISGKQLVDADGILFGFPARFGMMAAQMKALFDSTGGLWQRQALAGKPAGFFFALGTQGGGQEETALTAVSQLTHHGMVFVPVGYTFGAGMFDMDEVRCCSPYGAGTFAGADGRSRLPSDAELQMAAHQGSYFAAFAKKLKAGAAVVA

SEQ ID NO: 5250 - protein, 244 aa, Zea mays
  VARIANT 153: note = Ancestral polymorphism is R, Derived polymorphism is I
MDALVATRARTRSLVDFWAGGYTRSLVEEDTRHLEVSVLGRLPGTTVYRNTLQYPEAYTYNGIVVVRIDAPIYFANISYIKDRLREYELNLPSSNKGLDVGRVYFVILEMSPVTYIDSSAVQALKDLHQEYKARHIQIAIANPNRQVYLLLSRSGIIDLVGAGWCFVRVHDAVQVCLQHVQNSSSNALKLPVQASGVLTDSVSTPKPEQQHQKQHGLFKDLWKAQDSNADAGGEVQPLLRQNLV

SEQ ID NO: 5251 - protein, 221 aa, Zea mays
  VARIANT 190: note = Ancestral polymorphism is P, Derived polymorphism is L
  VARIANT 116: note = Ancestral polymorphism is S, Derived polymorphism is L
  VARIANT 81..221: note = Derived polymorphism lacks residues 81 to 221
  VARIANT 11: note = Ancestral polymorphism is P, Derived polymorphism is S
MAPSLLGVTFPPSHFLFFIQGFTKSLAMTVLSEIGDKTFFPAAAAATLRSQRSPQHPRSWKVSRGLPFFQRVSCSVDRDWKTIEACVGSKTVIQIRTHALKYFLKVQKNGATNNCSGSTESPSGTWPTSEAVEQEIMVPSLRGREWLFTPIGLTKSSVGENMFHWQATIMGPSDTPFAGGVFLVNIHFPPDYPFKPPKVSFHTKVFDLNINDNNNICLGHS

SEQ ID NO: 5252 - protein, 532 aa, Zea mays
  VARIANT 11..532: note = Derived polymorphism lacks residues 11 to 532
  VARIANT 12: note = Ancestral polymorphism is C, Derived polymorphism is F
  VARIANT 186: note = Ancestral polymorphism is S, Derived polymorphism is F
  VARIANT 234..532: note = Derived polymorphism lacks residues 234 to 532
  VARIANT 328..532: note = Derived polymorphism lacks residues 328 to 532
  VARIANT 331: note = Ancestral polymorphism is P, Derived polymorphism is L
MPTILVSVDLECSRCRAKIEKVLNRIQESQPLSRYKPGDWIEGIGGAKAGHFVLPEVTTLLLVGPRGNSKSNGTMFLREYPIPRNSSALQNIKSEIADVSANPQGLLLEALHSVGYFGALAKPLMASESAVNRLDVSSLEEFVVEHYTAPRMVLAALGVDHDALISVVEPLLSDLPCVKRPEEPKSVYVGGDYRCQADSPNTHIALAFEVPGGWNQEKTAMVVTVLQTCPEISQAVSSVLERAVYAIAPGGVKKTITCVVAYANLIVLQRYVDQFENRQQPKLPAMLGEAVKELEEDGKRVGAVLVTSPTYHGVCSNVQGIVSVCHPRGIPVIVDEAHGAHFRFQDSLPSTAIEQGADLAVQSTHKVMCSLTQSSMLHMSGDVDVDKVSQCLQLLQSSSPSYLLLSSLDAARDQLSQNRNIFDEPLAIASETKDLLARIPGISVLDLPCFASDFPAIDLLRITLSASNLQLSGYEADDILYEGHQIVSELVGTRAVTFAVNIGTRVQDAEKLVQSAKHLSEKHFFATGHLAK

SEQ ID NO: 5253 - protein, 113 aa, Zea mays
  VARIANT 70: note = Ancestral polymorphism is G, Derived polymorphism is D
  VARIANT 64: note = Ancestral polymorphism is G, Derived polymorphism is D
  VARIANT 57: note = Ancestral polymorphism is V, Derived polymorphism is M
  VARIANT 49: note = Ancestral polymorphism is G, Derived polymorphism is D
  VARIANT 48: note = Ancestral polymorphism is N, Derived polymorphism is D
  VARIANT 47: note = Ancestral polymorphism is T, Derived polymorphism is N
  VARIANT 43: note = Ancestral polymorphism is A, Derived polymorphism is T
  VARIANT 34: note = Ancestral polymorphism is E, Derived polymorphism is K
  VARIANT 25: note = Ancestral polymorphism is D, Derived polymorphism is G
  VARIANT 24: note = Ancestral polymorphism is A, Derived polymorphism is V
  VARIANT 9: note = Ancestral polymorphism is R, Derived polymorphism is W
MCQGGDFTRGNGTGGESIYGAKFADENFKPRHTEPSMLSMANAGPDTNGSQFFICTVQTPWLDGKHVVFGKVVDGYTVVDKMEVVSSSQVIMDGWGGDLIKTSVFVTLGKSAA

SEQ ID NO: 5254 - protein, 297 aa, Zea mays
  VARIANT 93: note = Ancestral polymorphism is P, Derived polymorphism is L
  VARIANT 111: note = Ancestral polymorphism is A, Derived polymorphism is D
MTSKVTPHNSTTLEEMDPKQENNKLVKESIFYTVETLGVVLAYMGSLESLLTYHKDVDEKLLYETFSVFGVIVTNPKDGFKNGSNMPIEMCIPVPAYCDSVTPFTLWLGLAGSLKQYLTNVLLKTSTSLRGHLGPKSEEPSHYLTNVLLKCGTNKGLRLGSDVEHRHLNDIIHPSRAETLIWGPLKRFSSHQVESSASFETTVGYLAVCISCYIFIVIRLGYNYRRKSKAKGSFQKPLSKTEESTGVSDGDFVSYVNEWRIDGATLIGSCYRTTPNTIRAIHRTLNQGSNEQQLPLA

SEQ ID NO: 5255 - protein, 235 aa, Zea mays
  VARIANT 137: note = Ancestral polymorphism is F, Derived polymorphism is L
MKQEAATSIVVTQEDVLHHYKEPPPRREDDPPALAASLSLPSSLSEDDGDAMPQPSSYAVLPRREGELVSAEELLLVPPLNFAMVDHGVYRSGFPDASNLPFLETLRLRSVLCLCPEPYPEANLEFLRAHGIKLFQFGIDGSKEPFVNIPEDRIREALEVILDASNHPVLIHCKRGKHRTGCVVGCFRKLQRWCLTSIFDEYQRFAAAKTRVSDLRFMELFDVSSIKHLAFESSV

SEQ ID NO: 5256 - protein, 578 aa, Zea mays
  VARIANT 391: note = Ancestral polymorphism is R, Derived polymorphism is S
  VARIANT 157: note = Ancestral polymorphism is D, Derived polymorphism is Y
  VARIANT 155: note = Ancestral polymorphism is V, Derived polymorphism is I
  VARIANT 140..578: note = Derived polymorphism lacks residues 140 to 578
  VARIANT 83: note = Ancestral polymorphism is S, Derived polymorphism is F
  VARIANT 47: note = Ancestral polymorphism is A, Derived polymorphism is V
  VARIANT 42..578: note = Derived polymorphism lacks residues 42 to 578
  VARIANT 30: note = Ancestral polymorphism is S, Derived polymorphism is L
  VARIANT 20: note = Ancestral polymorphism is L, Derived polymorphism is F
  VARIANT 15..578: note = Derived polymorphism lacks residues 15 to 578
MTPAAPASAADALAQILQDLLPSVLLAAASVRALHSRWRALQASLLALQSSLVSAPASAPSHPLFADLVAALLPALRSLHALSVRCQDPGLPGGRLRLQSDLDMVASSLSLLLHDLSLLLRSGLLSVDSELSIPTDIVLQVPASAAPHADKSLFVRDAFARLQIGSLDLKLKALVSLLDLLGDDPTAEAAQIVATEGDVAALLRLLDASSHSALRDRAVTAVAHLATACAASRRVVFDEGGLGPLLRVLDSGSPPATRERSAAAIVAITGDAGSAWALSAYGGLPILINACRPGSGSPALQAFAVAAIKNVSSVDDVRSTLVEESGLPVLVDLLASGTAETQKSAALCLWALASMGDHKTQNQIVQAGALSPLLQALHIASDQDLHDSVLRAIHALTSAPAATRILCSSPLFFARLTDLICSSGSFLLQQMAADMIADLAPTVSDDTKRCMAPCIGTLIKLMEVAKPATIQESAGRALLALFTLKSNRKGFVRDEKSLTIFVRMLDPRFQETDKKYPLSIFLVLAMGGGNGTRRRLVDAGSCQHLQKLADADVPGAKKALQRISNNRLKSLFSIGWQN

SEQ ID NO: 5257 - protein, 507 aa, Zea mays
  VARIANT 122..507: note = Derived polymorphism lacks residues 122 to 507
MDSPPLQPTVFSLILALVLVLYLALRRRGGGKNRSYPPVAGTVLHQLFNFGRLMEYQTALSRRYRTFRMLTPTCSYIYTVEPANVEYILKTNFGNYGKGSTLHELSEDLLGDGIFNVDGAKWRHQRKVASHEFSTRVLRDYSTGVFRDTAAELAGIVAAAAAAGEKLDMQELLMRSTLDSIFKVGFGVNLGVLSGSSEEGAAFAKAFDDASEQVLHRFLDPFWKAKRFLNLSSEAAMKRSLRTINDFVYAVVDRKIEQMGRDQQEFAKKEDILSRFLVERESDPGCFDNKYLRDIILNFVIAGRDTTAGTLSWFLYVLCKNQSIQDRIAQEVRAATSGDGGGLGAPELVACLTEDAISKMHYLHAALTETLRLYPSVPIDVKCCFSDDTLPDGYAVKKGDMVNYQPYQMGRMRFLWGADAEEFRPERWLDDAGVFVPESPFKFTAFQAGPRVCLGKEFAYRQMKIFAAVLLYLFRFEMWDANATVGYRAMLTLKIDRPLYLRTSLRR

SEQ ID NO: 5258 - protein, 130 aa, Zea mays
  VARIANT 74: note = Ancestral polymorphism is E, Derived polymorphism is A
  VARIANT 50: note = Ancestral polymorphism is G, Derived polymorphism is S
  VARIANT 34: note = Ancestral polymorphism is L, Derived polymorphism is S
  VARIANT 32: note = Ancestral polymorphism is N, Derived polymorphism is D
  VARIANT 20: note = Ancestral polymorphism is I, Derived polymorphism is V
  VARIANT 3: note = Ancestral polymorphism is H, Derived polymorphism is R
MERQNQVSNLNKGRRVLVVIELSGDLYEDAWNRSYLASKWSLCSGSKLIGTSRSDKIVKFGTTRALTLNSLSHAAYWYFFKYHRSSQEEVPEIRIQDVLYGSIKRHGKFEVLAWRSQIPPYYSYVHACEI

SEQ ID NO: 5259 - protein, 120 aa, Zea mays
  VARIANT 97..120: note = Derived polymorphism lacks residues 97 to 120
  VARIANT 64: note = Ancestral polymorphism is P, Derived polymorphism is L
  VARIANT 60..120: note = Derived polymorphism lacks residues 60 to 120
  VARIANT 53: note = Ancestral polymorphism is S, Derived polymorphism is L
  VARIANT 45: note = Ancestral polymorphism is T, Derived polymorphism is A
  VARIANT 39: note = Ancestral polymorphism is M, Derived polymorphism is I
  VARIANT 29: note = Ancestral polymorphism is L, Derived polymorphism is P
  VARIANT 28: note = Ancestral polymorphism is R, Derived polymorphism is L
  VARIANT 15..120: note = Derived polymorphism lacks residues 15 to 120
  VARIANT 6: note = Ancestral polymorphism is N, Derived polymorphism is I
MPLVLNSSCFSYSVCCQASYLQEINGLRPRGLFFLIMKMVNCVNTSLALFATSRSSGGTLLLTPGMLLQTNLEKCQVIPIQLSMVKLAFVQEIFSCQIAPFPCHYLGVPLSIYKPEHSKD

SEQ ID NO: 5260 - protein, 143 aa, Zea mays
  VARIANT 110..143: note = Derived polymorphism lacks residues 110 to 143
  VARIANT 87..143: note = Derived polymorphism lacks residues 87 to 143
  VARIANT 46..143: note = Derived polymorphism lacks residues 46 to 143
  VARIANT 8: note = Ancestral polymorphism is G, Derived polymorphism is E
  VARIANT 5..143: note = Derived polymorphism lacks residues 5 to 143
MTTREPRGFGFIQYFDTEDASDAKYHMDGKMLLGREIVVVFAEENWKKPSNMRAREKISGRGRSYDGRLRSRSPGLNDSPRGRSRSQSRSYSPALKQKHYSRSPAPRPRERSLSRSPAVNRSRSASPIVSRSPRRQGSLSVSE

SEQ ID NO: 5261 - protein, 196 aa, Zea mays
  VARIANT 94..196: note = Derived polymorphism lacks residues 94 to 196
  VARIANT 24: note = Ancestral polymorphism is S, Derived polymorphism is P
MPMRKDKENLHVLPWFIKKNKKSSFIHRMNKLSHKTDSYMQGFKEHLTMGPKISETIKGKLSFGAKVLQAGGIDKVFREYFAVEKDEKLRKAFQCYLSTTAGPIAGMLFISTKKIAFHSDRPLSFTSPKGGSTRVPYKVLIPTERMKSASVRENLYNPDEKYIDVVTVDGFDFWFMGFVSYEKSFKYLQQVIMELR

SEQ ID NO: 5262 - protein, 172 aa, Zea mays
  VARIANT 139..172: note = Derived polymorphism lacks residues 139 to 172
  VARIANT 107..172: note = Derived polymorphism lacks residues 107 to 172
  VARIANT 81: note = Ancestral polymorphism is K, Derived polymorphism is N
  VARIANT 58..172: note = Derived polymorphism lacks residues 58 to 172
  VARIANT 51: note = Ancestral polymorphism is R, Derived polymorphism is W
MFWNRCLCMPDPTAPLLPPKRINSGDLSRCPWDELVFEDESERGSNALLARAWSPGWQNADKALTAFLNGSLMDYSVNRKKIDSASTSLLSPYLHFSELSVRKVFHQVRMKRLMWSNDGNHAGEESCTLFLCSIGLREYSRYLTFNHPCSHEKPLLSCRTSGSSPGSSMRCT

SEQ ID NO: 5263 - protein, 174 aa, Zea mays
  VARIANT 65: note = Ancestral polymorphism is G, Derived polymorphism is S
  VARIANT 56: note = Ancestral polymorphism is G, Derived polymorphism is R
MPMHDLYLSTHSLTSSLSLWCICNANWTVEAAARAALRLAIHSDNAYIVGFTNSKRTWYQLSKTGTKDKLVDENPVMAGFDVNYSSLIGGGDKLPTLNVAKFRDKDDKPFQPFKGLGINSGEEALAVVALLKLILGSNSLLAWLKCFSGLLVKKLKREDTNYEKPKTAAIVNPL

SEQ ID NO: 5264 - protein, 479 aa, Zea mays
  VARIANT 393..479: note = Derived polymorphism lacks residues 393 to 479
  VARIANT 176..479: note = Derived polymorphism lacks residues 176 to 479
  VARIANT 163..479: note = Derived polymorphism lacks residues 163 to 479
MTTRGAKRAATSDPAAPDLPSKRVMDGPSFDVHRAESSHQHVMAGPASLDPRRAEAASKHVRALNTQFASWVQLQLQNHPAELWEDGLKDYISHASEIMEKFKDVVNWLRQNQAGSIVVSSPSSLKDDKSNLPAADDSKLLVQPSSDNKQKAPIMASSSSSFQNSSLPNLFSSPSQQKTPDYSGMFADKKNTSSDSSKPAFQFGGNNVIFGGKKDAPVDSSKPFQFGPNNGIFGDKKDTPSDSSKPFHFGANKGIFGDKKTTSGDSSNPFQFGANNGFPTSNAPSIFSSVAQSFNPQSPPLFSMNQQSVLPDHNFLVVALSGNQNTSEASADADEDAEPEKPSSPSVKKAEEKGVVVVHETKCKVYVKHDDATKGWKDIGVGQLSIRSKEGTEKASKESTPTIVIRNDVGKILLNALIYKGIKMNLQKNTVASIFHTSDAQSSESAGDTVVARTYLFRLKNVEEATKLSTAIKENAPSD

SEQ ID NO: 5265 - protein, 460 aa, Zea mays
  VARIANT 18..460: note = Derived polymorphism lacks residues 18 to 460
  VARIANT 26..460: note = Derived polymorphism lacks residues 26 to 460
  VARIANT 128..460: note = Derived polymorphism lacks residues 128 to 460
  VARIANT 154: note = Ancestral polymorphism is N, Derived polymorphism is I
  VARIANT 172: note = Ancestral polymorphism is P, Derived polymorphism is R
  VARIANT 178..460: note = Derived polymorphism lacks residues 178 to 460
  VARIANT 185: note = Ancestral polymorphism is R, Derived polymorphism is C
  VARIANT 189..460: note = Derived polymorphism lacks residues 189 to 460
  VARIANT 198..460: note = Derived polymorphism lacks residues 198 to 460
  VARIANT 203: note = Ancestral polymorphism is F, Derived polymorphism is S
  VARIANT 211: note = Ancestral polymorphism is G, Derived polymorphism is V
  VARIANT 216: note = Ancestral polymorphism is N, Derived polymorphism is K
  VARIANT 223: note = Ancestral polymorphism is K, Derived polymorphism is E
  VARIANT 235..460: note = Derived polymorphism lacks residues 235 to 460
  VARIANT 259: note = Ancestral polymorphism is P, Derived polymorphism is L
  VARIANT 270: note = Ancestral polymorphism is S, Derived polymorphism is N
  VARIANT 276: note = Ancestral polymorphism is C, Derived polymorphism is Y
  VARIANT 294: note = Ancestral polymorphism is R, Derived polymorphism is C
  VARIANT 301: note = Ancestral polymorphism is G, Derived polymorphism is C
  VARIANT 303: note = Ancestral polymorphism is T, Derived polymorphism is R
  VARIANT 335: note = Ancestral polymorphism is A, Derived polymorphism is V
  VARIANT 373..460: note = Derived polymorphism lacks residues 373 to 460
MSSRKYPSGSEKRKRKKQGDEFIQTQRGALDKFLKSNFTAPRNSNNELAIVPMEEEEPNVGNSEEDEPNIEENNVSGPQNPTATSDANAQPATVDEPSFYTHDIFYPRHWDNFDNKERDILVEKGPIREEGLEFPLDDASRHFSYVHYHRKLSNGEVVKEAKYFSIILDCTPDVSHQEQMTLLVRCVNLSYGKINIEEYFLGFLKVDDTFGLGIFNILIDVMESFGLNVNDIRGQGYDSGSNMKGKHQGVQKRLLDINPRALYMPCACHSLNLTLCDMEKSCGKAITFFGIVQRIYVLFSGSTKRWNVLLKHVPSSTVKPLSNTRWESRIKRVIAIRYQAPEIRSALYEIRHAKEPKDISDEKGLFDVLGSFEFLLSMVISHDILFSVNKVSKKLQAPTMCIDSTLDLIQGMMEYFEKYRNEGFSVCLNIAKDIANDMGVNASFPVKRKVVRKKRFDESS

SEQ ID NO: 5266 - protein, 391 aa, Zea mays
  VARIANT 56: note = Ancestral polymorphism is L, Derived polymorphism is H
MAAFAALFDPLYCPEEHLDLYRDEPGEGADEQWPGQHGQQEPAVLDDELPALFEAHRAKEGVVLAEDGGYGGAAGREAAVGWVSRAAARLGFSALTAALAAAYLDRCFLPGGALRLGDQPWMARLAAVTCFALAAKVEETRVPPLLDLQLYAAADAADPYVFEAKTVRRMELLVLSALGWRMHPVTPFSYLQPVLADAATRLRSCEGVLLAVMADWRWPRHRPSAWAAAALLITAAAGDGGDGDGDTELLALINAPEDKTAECAKIISEVTGMSFLACDVGVSAGNKRKHAAAQLYSPPPSPSGVIGALSCFSCESSTSATAMAAAVGPWAPSASVSVSSSPEPPGRAPKRAAAASASASASAGVAPPVQVPHQLPPDEESRDAWPSTCAA

SEQ ID NO: 5267 - protein, 350 aa, Zea mays
  VARIANT 174: note = Ancestral polymorphism is P, Derived polymorphism is R
  VARIANT 173: note = Ancestral polymorphism is C, Derived polymorphism is R
MDRPSGTSYQRFPRVRIRELKDDYAKFELRDTDASMANALRRVMIAEVPTVAIDLVEIEVNSSVLNDEFIAHRLGLIPLTSAAAMQMRFSRDCDACDGDGSCEYCSVEFHLSVHATDSDQTLEVTSNDLRSMDPKVCPVDQARAYQHALGGTDPFGANASNENRQVIHHLASRPTCLCLLYVAYFRGILIVKLRRGQELRLRAIARKGIGKDHAKWSPAATVTFMYEPDIRINEELMETLTVEERISLIESSPTKVFELDSANQVVVKNAEAYTYDDEVIKHAEAIGKPGLVEITAKEDSFVFTVETTGAITAYELIMNAITVLRQKLDAVRLQDDDGDLGELGAHLGGP

SEQ ID NO: 5268 - protein, 376 aa, Zea mays
  VARIANT 136..376: note = Derived polymorphism lacks residues 136 to 376
  VARIANT 13: note = Ancestral polymorphism is P, Derived polymorphism is T
  VARIANT 9: note = Ancestral polymorphism is R, Derived polymorphism is G
MGKVELEWRPRQPLMLKEWLELEYSAELSRDGLGCYPRHLATEPRSAGCRRSHVIARVSAALRAALSRPPSARQVEAVALPGSLPARLRVVGFWKKRRGEMEETDRQVASCSATAASSGRRDGACSLATSPRRMGQESRQAGGDRVGLGGGRRSHETVKNEGCNCEATCHLDEEREQEQRLSPVSVMDFQSQQDGDDDCNDDGHSEDEGTSPTFEPSLANIQRSSSQQLLQRLRRFEQLAELDTPDTGNGELDSVQDNPDAERGLVPEAGSPSPCPAHRFKKLLEDFFREGLSPCHSAGASDDPELETSLLETAKAWLDGRRCALIRSDQEAEVEEEIERLGRWRCFGEDDREPMSSDVECGIFCCLVEELVEDLC

SEQ ID NO: 5269 - protein, 374 aa, Zea mays
  VARIANT 312: note = Ancestral polymorphism is K, Derived polymorphism is N
  VARIANT 307: note = Ancestral polymorphism is I, Derived polymorphism is T
  VARIANT 302: note = Ancestral polymorphism is T, Derived polymorphism is I
  VARIANT 223: note = Ancestral polymorphism is T, Derived polymorphism is I
  VARIANT 154..374: note = Derived polymorphism lacks residues 154 to 374
MAAPSLSRGGCRRHLTLGARRARPQPCRAPALGPHWFQERSVSCAERGDTFGGGAAVDVRSYNASYARLQPRPPTSRVQRTRSVSAWTRPAPLPVQSQCLPTALCARPATSRSRSSARSKTVVGGAVRRAGAGDGGNGSPIVVTDAKQEVTVSQFVAQLELKEGFGGKRKGQESTTTTERTALPTYYPCCCLLLYRLHISVLVKSIRTLARMEDPINQILKRTEVAENLILEKTSCPLGVLLVIFESRPDALVQIASLAIRSGNGLLLKGGKEAMRSNKVLHKVITGAIPSNVGEKLIGLVTSRDEIADLLKETLLVHKDLIKAPGLDDLLLSLKTEDVESSELYRYSRSFVILRICLWPCLDPSSPARARASF

SEQ ID NO: 5270 - protein, 255 aa, Zea mays
  VARIANT 26: note = Ancestral polymorphism is R, Derived polymorphism is G
MPPTTALAAKVALASAALAAFASLARLAVPRLVAVAAAVLPRAWAAARLWLVPPYLFVTVHLIILVIWKLSDHRHSQQQAAAAQHKDDPWPPAAELPSTAAAATPAVRAKEEQYGQPLPAEFSSPSPDSGGGGSCVTTESDEDASSPSPDVLWRSLAPAPQERAVVLEREPSLPPSQAVDGDDDDDDLDATWNAIMQKTRPAAPAATPPAPAPAPAAHHQQRPPPRARDPSVGAEEMNRRFDDFIKKNRNSFGRQ

SEQ ID NO: 5271 - protein, 285 aa, Zea mays
  VARIANT 38: note = Ancestral polymorphism is R, Derived polymorphism is H
  VARIANT 48: note = Ancestral polymorphism is S, Derived polymorphism is R
MAASPSPSGSGGGKAGVDRIKGPWSPEEDEALQRLVRRHGARNWSLISRSVPGRSGKSCRLRWCNQLSPRVEHRPFTPDEDDAILRAHARFGNKWATIARLLSGRTDNAIKNHWNSTLKRERERKREYYADARPGPGDQRSLKRTSSDGPPGSPSGSDLSDSSHQSLPTVMPSAASTAVTSQQQLQHVYYRPVPRAGGVVLLPVAPPSPQAPPATSLSLSLSLPGLDQQPEPSPPPPPTPQAQASSPLSAEFLLMMQEMIRIEVRNYMSGSGFDAHAVMGMAEID

SEQ ID NO: 5272 - protein, 397 aa, Zea mays
  VARIANT 248..397: note = Derived polymorphism lacks residues 248 to 397
MPATAGRVRMPANNRVHSSAALQTHGIWQSAIGYDPYAPENNKQQPGRPSSSVSAAAAAAAANDANAAASAAAASGSGSSDGNAYTSFQGLLALARITGSNSDETRGACKKCGRVGHLTFQCRNFLSVKDLDLDDAQAAAQAAAQAKFDEIKKKAAAGGDADEASDDLEEEEEDSDSSDSDVDPELEKIIAQRERARNGGRRHRQEEKSLSHRYRSSSSKRKSKHTRSWRSDDTEDEEEEGRRGRDRKKRSSRSKKHERSDEASSDDSDSDRQRHRKSRKNRSDEASSDDSDSDRHRRRKGRKDRKRRRSHRRRDDSSDEVSGGEERRRQCHRKRSHHQRDASDCDKGGSDYADEKKQSSRRRRHRQSESSGLDEDERRDPRGAKRSEEKNRDRKRS

SEQ ID NO: 5273 - protein, 1065 aa, Zea mays
  VARIANT 268..1065: note = Derived polymorphism lacks residues 268 to 1065
  VARIANT 706..1065: note = Derived polymorphism lacks residues 706 to 1065
MTSVYIPVQGTEEEVQVALDQLPHDASDILDILKAEQAPLHLWLIIAREYFKQGKIEQFRQILEEGSGPEIDEYYADVKYERIAILTALGAFHTFLGKVDRAPQKESHFKDATQYYNRASRIDETEPSTWIGRGQLCIAKGELQMASDSFKIVLDEDENNFPALLGQASVYFLMGEAEQQHKKSLEHYRNSLDLYKKALRVYCNCPAAVRLGIAFCRYKLGQVEKARQAFQRVLELDPQNVDALVALAIMDLQTNEAGGIRRGMEKMKKAFEIYPYYTLALNHLANHYFFTGQHFVVEQLTETALSSSNHGLLKSHAYYNLARSYHSKGDIETAGRYYMASVNEISKPQDFVLPYIGLGQIQLKFGDFKSSLGSFEKVLEVHPENCESLKAIGHIHAKSGETEKAIETFKKVTRIDPKDHQAFVELGELLVESDWAAAMEYLKTARNLLKKAGEAVPVELLNGIGLLHFEKGEFEMAEQSFKEALGDGLWVSIMDGKVGSSMINWSVQNKDQSFFHQLEGVPLELHSNKVTTLFNYARLLEELHDSVRASIFYRFIIFKYPDYIDAYLRLAAIAKQRNNVQLSIELIGDALKIDEKNPNALSMLGSLELQSDEAWLTAKEHFRNAKEATKGDTYSLLQLGNWNYFAANRPEKKAPKIEATHREKAMELYQTQVLKQHRSNMFAANGIGILYAEKAKWDVAKELFTQVHEAASGSIFVHMPDVWINLAHTYFAQGHFQQAVKLYQNCLRKFFHNTDATILLYLARTHYEAERWQDCRKTLLRAIHLAPSNYLLRFNVGVSMQKFSASTLQKTKQTVDEVRATVTELQNAIRVFSLLSVASTYHSHGFDERKIETHVEYCKHLLDAAKVHRDAAEQAEQQNKQKMEVARQIALAEEARRRAEEQRKFQLERRREEDELKQVKQQEEHFQRVKEQWKTSSNTPGKRKDRSKTEDEEVGNKKRRRKGIRRKDQKTKMQYGEEEDEYKDEPEADDDYADLARYNGADNSERAPDHLLAAAGLDDSDAEDDMGHPQSAIERKRRAWSESEDDEPVKKPAAQPSPGADGLSE

SEQ ID NO: 5274 - protein, 272 aa, Zea mays
  VARIANT 245: note = Ancestral polymorphism is A, Derived polymorphism is V
  VARIANT 213: note = Ancestral polymorphism is T, Derived polymorphism is I
  VARIANT 208: note = Ancestral polymorphism is A, Derived polymorphism is T
  VARIANT 143: note = Ancestral polymorphism is S, Derived polymorphism is I
  VARIANT 133..272: note = Derived polymorphism lacks residues 133 to 272
  VARIANT 36: note = Ancestral polymorphism is H, Derived polymorphism is D
  VARIANT 27: note = Ancestral polymorphism is P, Derived polymorphism is S
  VARIANT 22: note = Ancestral polymorphism is V, Derived polymorphism is I
  VARIANT 20: note = Ancestral polymorphism is L, Derived polymorphism is R
  VARIANT 17: note = Ancestral polymorphism is D, Derived polymorphism is G
  VARIANT 15: note = Ancestral polymorphism is G, Derived polymorphism is S
  VARIANT 9: note = Ancestral polymorphism is L, Derived polymorphism is P
  VARIANT 8: note = Ancestral polymorphism is V, Derived polymorphism is M
MAMLKSAVLWRKRFGIDELLGVDLGLPELEKVVFYHGADREGHPVCYNVWRIQLLERNIREQLDFSPNGICSMVQVTDLKNSPPMLGKHHGVTCQSLALLQDNYPEFVAKKVFINVPWWYLAANKVMSPFLTQRTKSKIVFCSPDRYVAPEQVPVRFSGLYKEDDTEFSASDAVTELIVKPSSKETVEVPASEGSTVVSYGAEFAPDAEGRYTVIVEKMRKVPAHEEPIMKGSFKAAGPDKVVLAVDNRASKKKKLLLYRFRVKSTATEPAA

SEQ ID NO: 5275 - protein, 226 aa, Zea mays
  VARIANT 24: note = Ancestral polymorphism is R, Derived polymorphism is C
  VARIANT 28: note = Ancestral polymorphism is P, Derived polymorphism is L
  VARIANT 34: note = Ancestral polymorphism is D, Derived polymorphism is N
MEVDATASPSMPAPRWATLPRAVRTVLLEILRSDRVSLGKKFHLLYAFFFVRKVVAHLVTFLFYCVVIPACVLVQGDVRLPKYVAMYVPALITLLNAACTPRSCHLLIFWILFENVMSMHRSKAAVIGLLEASRANEWVVTDKLGSSKAAAAVVAKKKKQQLVRSRCCSTRREMHVLELAMGACLLYCAVYDIVFFGRDHYYMYLLLQLAAAFIVGFGYVGTSAPS

SEQ ID NO: 5276 - protein, 295 aa, Zea mays
  VARIANT 57: note = Ancestral polymorphism is R, Derived polymorphism is L
MGRAPCCDKASVKKGPWSPEEDRKLKEYIDENGTGGNWIALPHKAGLKRCGKSCRLRWLNYLRPNLKHGDFSDDEDRIICSLFATIGSRWSIIAAQLPGRTDNDIKNYWNTKLKKKLVHGLERYTAHSLSQRSSSTVSSSSSAAVAASPAEAAPIVPLQHLSSPHDYSHLIYSGGGGGYGASSMSTSLLSAAAAAAAGSRDREQQTLRTDAPCLVDSGGGGGGHGIYFDETCASAISGSSVVHGLGTGNFVFGGLQLLQAQALLLATSGAANQLDEPYSFAASCCYGEEAAAADG

SEQ ID NO: 5277 - protein, 95 aa, Zea mays
  VARIANT 72: note = Ancestral polymorphism is P, Derived polymorphism is L
  VARIANT 53: note = Ancestral polymorphism is R, Derived polymorphism is I
  VARIANT 47: note = Ancestral polymorphism is V, Derived polymorphism is M
  VARIANT 45: note = Ancestral polymorphism is A, Derived polymorphism is V
  VARIANT 34: note = Ancestral polymorphism is C, Derived polymorphism is Y
MINERCAQQSALVVARQFYQGAIYEVLSVMYHFCFKESLVLGLLASVSFLISRALRHMRVKYLQRFPHNSLPGSYGTLHCYATDMLAVGLSSLFC

SEQ ID NO: 5278 - protein, 454 aa, Zea mays
  VARIANT 159: note = Ancestral polymorphism is C, Derived polymorphism is R
MAPPSPQPPLVRVLDRIRVSPPPADSEQEPALPLTFFDVAWLFTGPVERLFFFRHPEPASTLPLLRSSLSLALRRFYPLAGTIRPHAPFLCSYTHGTDALTMVVAESNSPDDFDSLVARSRRDLDRIRPLVPQLPPPGEDGAFALAAVQATVFRGRGLCLGVSVHHAACDDASTMHFVRTWAATCRLGLENDDGSEDAVLPPRPVLDRSVVADPDDLRGKTLAGMARLAPPPSPPPPQQEEKTPMVMASFLLGREQIDRIKEGAAAKASSFVAASALAWVCLLKCGSVGVAGARRSHMLFSAECRSRLTPPLPAEYFGNCLRPCFVEAATADLLSGETEDGVAAAASAIGSAIQEMEQGVLEGAEGWLGRVLSVLPERPMSVGGSPRHGVYETTDFGWGRPARVEMVSVEKTPGTVALADSPEGDGGIELGVVLPPDAMDAFASCFAHAVGANV

SEQ ID NO: 5279 - protein, 262 aa, Zea mays
  VARIANT 138: note = Ancestral polymorphism is A, Derived polymorphism is G
MAPKRRGNKVVGSVVKTKLVQETVEVIVADDDGLHAEKQQVPEALALAHPTVDVSGSTVVHVVEVTAKRGRGGGGGGGGGGRRNEGKPPPEEDSAAVPVPQSQETQDPNEELEFELEDEEEKQPETPRVASEKRKKAATPTKKTKTQQPRRRRQRLGQASSGGDAGMGGVGGYRRYVWRVLKQVHPDLGVSGHAMQVLDMMMADMFERLAEEAARLSKATGRATLTSREVQSAVRLVLPGELGRHAISEGTKAISKYMSYAA

SEQ ID NO: 5280 - protein, 574 aa, Zea mays
  VARIANT 391..574: note = Derived polymorphism lacks residues 391 to 574
MNASRKSSHLSSKDSAETARDIITTSGQIQPLKIPDAVAALAQAAAKANGETEKYLPGWPLFSPPKVQLDKCTKCSREFCSAINFRRHTRVHRRSLKIDRDFPKNRDLLAAFWNKLTVDDASKILSLTGVVIEGVTGSSILTALSSWMCKPGYASLPVAYARAGSELLDLIQAKPSMHLPVSSDELFSLLDEASEKTFLCTNTAACIQKFLFDGEVEKIATELKNVVSCASYMLEQKLLEAWCADKTAEALRCQKLLEDEEEAAQKRQAELMERKRMKKLRQKEQRLKNLKDEDATVQSPEIMDDATCSTAIQSVNSIYDPDCFEQEESQYLQFPALITLETDNDFNVDLPVEDISCDLGPEMDKGVVLRQQVVSRHHLGRTEKLAESSILSGSVVTSKHAALARPSNYKDPNVCSAPSRNKTCELKLRSEIEEQCQKHELDVDERGIGPSKNSRVLIGSIIVAIKDCSEHLLDLGSKNDPVPPNVKTKKHASVKVVQQVTHEGNRNEGVPDSDNRSSLSVTTDEISYSTCCDADLAVDEHLQCTTFSSEEATAFLSQRWKEAIAADHVKLVVS

SEQ ID NO: 5281 - protein, 218 aa, Zea mays
  VARIANT 38..218: note = Derived polymorphism lacks residues 38 to 218
  VARIANT 50: note = Ancestral polymorphism is A, Derived polymorphism is E
  VARIANT 72..218: note = Derived polymorphism lacks residues 72 to 218
MSSDLHSASDVIAGRRLLSRLQHLSASFMSFSACTSGQGPADASSTLCTASIFTASRACSATLRSSSPVSICRITMPNAYTSDSVVSSPVMKNTGSMYPAVPIGFVRRPMVSSSSGFTCTARAVPKSPSRLALPASRRMLVSFTSAWMMAWGRLEWRYASAERSSPRILTRSFHRRPLESLSLSVPLGRCSYTRPHDSGHTPISLTMCGCSNLLSTTT

SEQ ID NO: 5282 - protein, 612 aa, Zea mays
  VARIANT 556..612: note = Derived polymorphism lacks residues 556 to 612
  VARIANT 544: note = Ancestral polymorphism is A, Derived polymorphism is S
  VARIANT 78: note = Ancestral polymorphism is G, Derived polymorphism is S
MIAHVGSEPRNMDEEEVHIAVGKNSRKEKANILWAAANFPRATIVLVHVHWPSKWMPFMGGKVLYKFADEKEKEMHRGREMKVMVNMLSQYKKMCGTRKVSAHYLTHDDTVAGVVNLIKKLKIKRIVIGSRNMSRQVVVRQCCQVWLVLNGKHISTSNDHLEYSENIGYGGGSSGILASIHELGEESDGYVTPRSDLVDETMDEESAEMNDSDQLVTEDETLTEQGTEESVTSEDMENFFQENADQSDEIQNFRNIADKAEKIMEEIDRLQKKLKQLQGEERNHDERSLSPRQMAASLKRKSLSEPRYPELQIPENIEQFSMSQIEKATDNFHSRNFIGGGGYGPVYKGKVGSTSVAIKLLKPRGRQGFSEYQQEVVVLSKLEHPHIVRLIGVCPESCGLVYEHLPNGTLKDRLSKGLLWKDRVRILGELRSALAYLHSRRPHAIIHADVKLTNILLDAGNASRLGDFGTARAVHVKPLEEETIGRRTNPMGTAGYMDPVFFMTGELTTESDVYAFGMVILQMLTGLLDLNVAEQAREAVKMDAVHSVLDASAGPWPEVQAEKLMKLALRCCSLERRRRPAITSDAEWRSLDILRAMVNPASKSWKWNSHAS

SEQ ID NO: 5283 - protein, 475 aa, Zea mays
  VARIANT 266..475: note = Derived polymorphism lacks residues 266 to 475
MSLACGLPLLECVYCLACARWAWKRCLHSGEVDSATWGLASADDFEPVPRMCRLVMANYEPDLSPSAPLLFAPPGGYGIDPACVLRRRTYADTRGRVTPYLLYLDHAHADIVLALRGLNLVKESDYALLLDNRLGKRRFDGGYVHNGLLRAAGWVLDAECDLLRELLETYPDYTLTFTGHSLGAGIAAMLTMVVVLNLDKIGNIDRTRTRCYAMAPARCMSLNLAVRYADVINSVVLQDDFLPRTATPLEDIFKSILCCGVFSAYWAQVSLTLCYLLFLDSLPCLLGLRCLRDTCIPEDAMLKDPRRLYAPGRIYHIVERRTCRCGRYPPVVKTAVPVDGRFEHIVLSCNATADHAIIWIEREAQKALDLMLEEENTLAVPSEQRMERNETLQREHVEEHRAALRRAVTLSVPDGRRPSPYGTFDDVEQHRQQPERSESFPPAGPRQRMSWNDLIERVFDKDEDGQIVLRSSVLL

SEQ ID NO: 5284 - protein, 386 aa, Zea mays
  VARIANT 311: note = Ancestral polymorphism is A, Derived polymorphism is P
  VARIANT 97..386: note = Derived polymorphism lacks residues 97 to 386
MVVDTVSASTSIIAPHLFDHRSRGAGASHHHLRRTFHVVACRPLPTAFAGRRLVARVTRQPSSRLADWPVRALAMGVTKEVRASPRREYRGIPGDGGDMGDVGVTSPTPSWPPRNRADDPKLHNPLLRLERMGCGWLGVIFEWEGVIVEDDAELERQAWLTLAQEEGKSPPPAFLLRRVEGMKNEQAISEVLCWSRDPSELRRLALRKDEIHSSLRGGSYHQMRNGSREFMSTLANYKIPIAVVTTRPRKVIEEAIEAVGVRSFFDAVVTAEDVYRGKPDPEMFLYAAQLLSFIPERCIVFGNSNSAVEAAHDARMKCVAVASKHKIYELSAADLVVKQLDELSVVDLKNLADIESPEFGMEPEPEMEEEEVPPPSTSVGIDDLFW

SEQ ID NO: 5285 - protein, 210 aa, Zea mays
  VARIANT 3: note = Ancestral polymorphism is G, Derived polymorphism is R
  VARIANT 18: note = Ancestral polymorphism is H, Derived polymorphism is Q
  VARIANT 43: note = Ancestral polymorphism is P, Derived polymorphism is S
  VARIANT 64: note = Ancestral polymorphism is G, Derived polymorphism is V
  VARIANT 100: note = Ancestral polymorphism is A, Derived polymorphism is S
  VARIANT 104: note = Ancestral polymorphism is K, Derived polymorphism is Q
  VARIANT 122..210: note = Derived polymorphism lacks residues 122 to 210
  VARIANT 177: note = Ancestral polymorphism is I, Derived polymorphism is T
MVRGNILITHHYELIYTHLQSPIAKITGHVFQSNKHSAQRDWPGYCFSQASNNNISRVPDVLVGCSKLSKLDLEGNKLVTLSENMFVSWTMLTELNLDVASTEKFRQSEGPRIVIDLLQGGSENPDLLDAGFSVVAAGSAGNEVVKESFMELKVNELILRVMKDKSKSNVQSLYDAICVLLKLDDNRVVASQVYAVENCEIVVQVICHSM

SEQ ID NO: 5286 - protein, 208 aa, Zea mays
  VARIANT 2: note = Ancestral polymorphism is G, Derived polymorphism is E
MGRLSCTYTTVLVALALSAPLAALAGDPDILTDYIVPADANPGTTNGTFFTFTGFRAAMTMPMPNFMPTKATMAEFPALNGQSVSYVLLMFPAGGSVNPTHTHPRSAELLLLLDGALSVGFVDTAGNLFTQDLAAGDMFVFPKGTVHWQYNQGTQPAKALSAFGSAAPGLVSLPSTLFGASNIDDNVLATSFKTDVATIQKLKAGLHA

SEQ ID NO: 5287 - protein, 129 aa, Zea mays
  VARIANT 67: note = Ancestral polymorphism is L, Derived polymorphism is F
  VARIANT 57: note = Ancestral polymorphism is A, Derived polymorphism is S
  VARIANT 24: note = Ancestral polymorphism is D, Derived polymorphism is E
  VARIANT 20: note = Ancestral polymorphism is S, Derived polymorphism is I
  VARIANT 19: note = Ancestral polymorphism is S, Derived polymorphism is R
MQIFVKTLTGKTITLEVESSDTIDNVKAKIQDKEGIPPDQQRLIFAGKQLEDGRTLADYNIQKESTLHLVLRLRGGIIEPSLQALARKYNQDKMICRKCYARLHPRAVNCRKKKCGHSNQLRAKKKIKN

SEQ ID NO: 5288 - protein, 229 aa, Zea mays
  VARIANT 64..229: note = Derived polymorphism lacks residues 64 to 229
MARFATRVTGDDDALECRSVAYSFITVDVGLRPQPRQLREGGRTQRCIHWDLSGGISRSIDAVWLCDMFAMRRGRLLTIRGGFGTRRESTLKLGGTGGSWRWRQRHGVSCARQGSQILDKTVEEAYRGVDCGDGGPFGAVVVRNDEVVVSCHNMVLKHTDPTAHAEVTAIREACKKLGKMELSDCEIYASCEPCPMCFGAIHLSRIKRLVYGAKAEAAIAIDLQCTTLL

SEQ ID NO: 5289 - protein, 463 aa, Zea mays
  VARIANT 79..463: note = Derived polymorphism lacks residues 79 to 463
  VARIANT 57..463: note = Derived polymorphism lacks residues 57 to 463
  VARIANT 1: note = Ancestral polymorphism is M, Derived polymorphism is T
MEPAAEDAAAAAPDSWETADIDGPMSRLILSARRVSSSPDFADDQDPPQPPPTLQPQGAPSAPSDAREDVVAQVDQFLREALEKPRERLSVLRMEQEILKFIHDPSRTEYEFNGLPTSYLRLAAHRLAQHYFLQSIAIPDNSLPDGTGSRIILRKTTFDCRLPAVRLADIPVNLPQEDISVAKVAIKQRPQKNLHGMNSSSAHSSRDNLQKSVEERKEEYNKARARIFNNSNSSTATDERSAEEVTLPSTLHRSTSLELNSSNRIGQGAEITLERSLTTTSASSRSNRSKIDKEPAVNRNKQNNRVAIFRDRESERKDPDYDRSYDRYMQRFDPGFGFSGGPYTIQPLYAPAVNYNTEFPQLGSAHRSPVAVEQQPRPIAQHMPASWSVAQASNAIGYGPDGVMGPYSPGAPVRSSVFMHASQQYAIPSRPGVPFAHPQESMGPFAQTHQQQPDASLRFARPR

SEQ ID NO: 5290 - protein, 145 aa, Zea mays
  VARIANT 136..145: note = Derived polymorphism lacks residues 136 to 145
  VARIANT 124: note = Ancestral polymorphism is F, Derived polymorphism is L
  VARIANT 113: note = Ancestral polymorphism is C, Derived polymorphism is S
  VARIANT 95: note = Ancestral polymorphism is K, Derived polymorphism is R
  VARIANT 94: note = Ancestral polymorphism is V, Derived polymorphism is E
  VARIANT 66: note = Ancestral polymorphism is E, Derived polymorphism is D
MAAAALREQLNALLSSMFASGLVDEQFQQLQMLQEDGGTPGFVAEVVTLFCDDADRIISELAALLDQPIVDFDKVDAYVHQLKGSSASVGAQKVKFTCMQFRQLCQDKNRDGCIMALAVVRNEFYDLRNKFQTMLQLEQQIQAQQ

SEQ ID NO: 5291 - protein, 379 aa, Zea mays
  VARIANT 320..379: note = Derived polymorphism lacks residues 320 to 379
  VARIANT 315: note = Ancestral polymorphism is T, Derived polymorphism is I
  VARIANT 290: note = Ancestral polymorphism is P, Derived polymorphism is L
  VARIANT 263..379: note = Derived polymorphism lacks residues 263 to 379
  VARIANT 251: note = Ancestral polymorphism is P, Derived polymorphism is S
  VARIANT 231: note = Ancestral polymorphism is R, Derived polymorphism is L
  VARIANT 210..379: note = Derived polymorphism lacks residues 210 to 379
  VARIANT 107: note = Ancestral polymorphism is P, Derived polymorphism is L
  VARIANT 103: note = Ancestral polymorphism is C, Derived polymorphism is Y
  VARIANT 63: note = Ancestral polymorphism is P, Derived polymorphism is L
  VARIANT 46: note = Ancestral polymorphism is P, Derived polymorphism is Q
MATSGMEDERVSGEVREQEDDDDNVPQLSAAATEVLREFLVGQHRPEEQNEARGGEDGVELVPEDWRLSQFWYDERTARELVEEVVRLVSPSGSGSTAGAVACIACPTLYACLKKTVPGVPAQLLEYDERFGQYGGDFIKHFLIGNLCGMEDERVSGEVREQEDDDDNVPQLSAAAMEALREFLAGQHRPEEQNEAGGGEDGVELVPEDWRLSEFWYDERTAWELVEEVVRLVSPSGSGFAAGAVASIACPTLYACLKKTVPGVPAQLLEYDERFGQYSGDFTFCDYNRPEELPAAMKHAYRVIVADPPYLEEMTVTITWVKARQIFISRDNPTIEVDVGLSDGSYARGPYPAAHPLEKATPADPVFLCIVMCKGSHAL

SEQ ID NO: 5292 - protein, 117 aa, Zea mays
  VARIANT 10: note = Ancestral polymorphism is T, Derived polymorphism is M
  VARIANT 7: note = Ancestral polymorphism is A, Derived polymorphism is T
  VARIANT 6: note = Ancestral polymorphism is A, Derived polymorphism is T
MAELAAAAATLLLLRAASLRCSADPRAATPFSWQGVTCSPQSRVVSLSLPDTFLNLSSLSPSLATLSSLQLLNLSACNVSGAIPPSYASLSALRVLDLSSNALTGDIPDGLGALSGL

SEQ ID NO: 5293 - protein, 435 aa, Zea mays
  VARIANT 223: note = Ancestral polymorphism is I, Derived polymorphism is T
MASEKHFKYVILGGGVAAGYAAREFAKQGVKPGELAIISKEAVAPYERPALSKGYLFPTNAARLPGFYVCVGSGGEKLLPEWYSEKGIELILSTEIVKADLSTKTLTSAAGANFTYEILLIATGSSVIKLTDFGTQGADSNNILYLREIDDADKLVAAIQAKKGGKAVVVGGGYIGLELSAALKINDFDVTMVFPEPWCMPRLFTADIAAFYEAYYTNKGVKILKGTLAVGFDADANGDVTAVKLKDGTVLEADIVVVGVGGRPLTTLFKGQVAEEKGGIKTDASFETSVPGVYAIGDVATFPLKMYNELRRVEHVDHSRKSAEQAVKAIKGKESGEPVPEYDYLPYFYSRSFDLAWQFYGDNVGETILFGDSDPTSSKPKFGSYWIKDGKVLGAFLEGGSPDENKVIAKVAKTQPPVANLEELKKDGLQFASKI

SEQ ID NO: 5294 - protein, 169 aa, Zea mays
  VARIANT 26: note = Ancestral polymorphism is T, Derived polymorphism is I
  VARIANT 30: note = Ancestral polymorphism is R, Derived polymorphism is L
  VARIANT 116: note = Ancestral polymorphism is G, Derived polymorphism is S
MAGSRQAAPSRLLASWLTALEGFLLIMAQRVMCLLRRSIGFTVPPAQRALSTTATPAAEGAAVAEATAKEAKKRKKKNLFDVVQFLPGWGVGYKVAKTTWRDVSYQITKINLYKDGRHGKAWGFRYKAGVQAADAPTRISGVNKRGWKYIKESQKKLHDAPKVDVAIAG

SEQ ID NO: 5295 - protein, 422 aa, Zea mays
  VARIANT 188: note = Ancestral polymorphism is R, Derived polymorphism is W
  VARIANT 162..422: note = Derived polymorphism lacks residues 162 to 422
  VARIANT 157..422: note = Derived polymorphism lacks residues 157 to 422
  VARIANT 151..422: note = Derived polymorphism lacks residues 151 to 422
  VARIANT 126..422: note = Derived polymorphism lacks residues 126 to 422
  VARIANT 120..422: note = Derived polymorphism lacks residues 120 to 422
MDAAALLDAFSAAPRHQLRPAAWCRSTRFASQACRATAPFARADWQAACAILASNSTGGAGHDASSNNNAQPAPRVNGQKPPPALEATPTPDELDLVPVSNLPRPLSISDLSPAPMHGSQLRVAYQGVPGAYSEAAAAKAYPGCDAIPCDQFEVAFQAVELWIADRAVLPVENSLGGSIHRNYDLLLRHRLHIVGEVQLPVHHCLLALPGVRRELLTRVISHPQALAQCELTLNAMGLNVAREAFDDTAGAAEHIAAGGLRDTAAIASARAAELYGLQVLAAGIQDDAGNVTRFVMLAREPIIPRTDRPFKTSIVFAHDTDGTSVLFKVLSAFAFRDISLTKIESRPHRHRPIRLVDDANVGTAKHFEYMFYIDFQASMADVRAQNALAEIQEFTSFLRVLGSYPMDMTPWDAALSSRASQY

SEQ ID NO: 5296 - protein, 422 aa, Zea mays
  VARIANT 266: note = Ancestral polymorphism is F, Derived polymorphism is S
MKVPFAFPFPFSRKATFHFSLLRLSWVPPCPPFQLGFITGRARHCIEFHKLRGAMVSPPAFAAAVAVVAVLLCASAAANPAGGPHMADLSVLLPPRMTKPVEYRLIGGDGCFSWSWDHHDLISVKPEYNDSSRCSTSARLASIAPYSGRRETSVYATDIISGITIHCKVFVDKISRISIFHHAVKIDLDEIATLRIHAFDDEENVFSTLVGLQFLWHLTPRLVDNSSHHLIRIPLKETHLSDCGGFCGDMNIRFELEDKNLGSDFSVVKGIEIGQEVVKAQLFEPQFEHVIDTITLTVAESMSLEPSSPVLVTVGVLVKFKLKVFRQKVAQGFTKVVVEDTRVSGHEQVSSLHVVIPRTLFLYLVPIMDDSAHLHGITNIPSSKVWYVYPGRKYMVLAKAFAEGFDAREIYITEILQMSFDM

SEQ ID NO: 5297 - protein, 1223 aa, Zea mays
  VARIANT 448..1223: note = Derived polymorphism lacks residues 448 to 1223
  VARIANT 549..1223: note = Derived polymorphism lacks residues 549 to 1223
  VARIANT 578..1223: note = Derived polymorphism lacks residues 578 to 1223
  VARIANT 641..1223: note = Derived polymorphism lacks residues 641 to 1223
MWVKMATCVRKAESEVFGVTKGSSGEPKDTWWWTEDVQKAIKEKKECYRSLFHDRSAVNIERYKVAKKTAKRAVSEAKGRAYDDLYRRLSTKEGEKDVYKIARIRESKTRDLNQVKCIKDEMDQLLVKGQDIKQRIQESEVKEALKRMKGGKAMDPDGIPIEENELKLESSTMEFWNLSQVPDSSTSSYEVQTSRLLSPIFQGQGHLDASLTYLTGASGPTKVLKLVQEVNVCSKVKAFWDEGLENSNVIYLPWVPGVHQEVEMMAIGGCGKTLDDYKLFSSDEDVASVSDSRIVRAKKPGQAVIRVVSAFDFLNFDEVIVEVSIPSVLSILPIFPVEVPVGTRLHSAAVLKTSAGHPFSQCTHFNAFIRWSLLSEDEAFHILNTAEASSIDDIKHNSGYWGQNGNPCAWVSLSAFAAGRSTIVATFAVDSDSDIETFGGPISLEATSKISAYYPLVVLQGGNGNHFGGYWFDLSGIHSRIKNMDNNSPKELYLVPGSTMDVLIFGGPERWDQVIDFVETVDVIDPSKNHIISSTAVKKLSSGLYRVSCLSKVSYKLLFSRGNMVGKDHPVPAISKSEFTVICDFPSEITLIANENENRLDILEAARKADRGPDRLQASPIVISNGRNIRLAAASIHVNGRFFANSSSLRLKWEATGCEGLAYFEETKSVEMLDESAWERSLVLQNSTGVCTVRATVDDFSTKYAGQTHEEEYTFHSLTDAIQLQIVSSLRVTPEYVLLVFHPEAQENLIVSGGTCSLDASTNDTHVVQIVTHPGKALCSQLILAAKGLGEAIIIIQDVGLSPRATTHSLVRVANVDWIKITAEEQISLMEGSTKDFQILAGTQDGQIFGDSQFKYMDIELHLDDEILELIGPSESMDGPEFSIKAAKIGITSLYVSTKQSSGHRVLSQVVKVEVYGPLQIHPEYIYLTPGASFVLSVKGGPKTGVSIEYSSLNMGIVEVQNTTGKLSAKSVGNSTVRAAVLANGGILVCEAFGRVEVDIPVAMTLNTQSERLCIGCSMPVYPSLPKGDLFSFYETCQSYSWMIADEKVVTFQSAKSWRYRLDQGLYSDGKKSPWFSNGSSKFFISHMLGRSAGKTKISISVVCDFLLPGTSGSVVSYNASKIILVVPDPPLALALPMTWLFPPFYTTMSLLPRSANSLGEPNSLDLESSVGYSLLRGNGRIIDGSKIQTGESNTVDCIQAKDHSAGRTEIAACLRVAQTVAY

SEQ ID NO: 5298 - protein, 229 aa, Zea mays
  VARIANT 21: note = Ancestral polymorphism is R, Derived polymorphism is C
  VARIANT 47: note = Ancestral polymorphism is H, Derived polymorphism is N
  VARIANT 112: note = Ancestral polymorphism is P, Derived polymorphism is L
  VARIANT 161..229: note = Derived polymorphism lacks residues 161 to 229
MRKIEPKRSCNPERVNLWEKCTTPLANDSNKAPAYKNKIDKLTRYRHLMEDVLSLLPHVKKDNQDKVESKQSKGNTLNKLLELRSCFSCLSSRREVKKPKKPKVKQRFSRMPHMFWQPRRHLLTTGWSAFVNKKKLVSRDAVLFLRGDNGELRLGVRRAAQLKNGSAFPALYNQCSNLGSLPNVAHAVATKSVFHIYYNPRSGGNAYVIGDSAKPEQKWHAYYATTEHP

SEQ ID NO: 5299 - protein, 422 aa, Zea mays
  VARIANT 36..422: note = Derived polymorphism lacks residues 36 to 422
  VARIANT 110: note = Ancestral polymorphism is Q, Derived polymorphism is K
  VARIANT 149: note = Ancestral polymorphism is A, Derived polymorphism is T
  VARIANT 173: note = Ancestral polymorphism is I, Derived polymorphism is N
MATKYAAAAADLVTGRPRKRARLGWDVASAAEAQIGTFCGQEVGDVASLLLSANPSDHTCSSLLPKGVARNASPPWREDDKDGHYVFAVGENLASRYKIYRKMGEGTFGQVLECWDRESKEMVAIKIVRSVKKYSDAAMIEIDVLQKLAKNDAAGKHCVQIRNWFDYRSHICIVCEKLGPSLYDFLQKTGFHPFPIDLIRRIGQQLLESVAFMHRLQLIHTDLKPENILLVSSDYVKLPDPKDGSFSRKLPKSSAIKLIDFGSAAYHHQDRSYIVSTRHYRAPEVILGHGWSYPCDIWSVGCILVELCSGETLFQTHDNLEHLAMMDRVLGPLPRHMLERADQHAEKYVRKGGLNWPQAITTVESVRAVLKLPRLQNLVMQHVDHSAGDFIDLLKRLLAYEPSGRLTAQEALGHVFFTRYRQ

SEQ ID NO: 5300 - protein, 204 aa, Zea mays
  VARIANT 178..204: note = Derived polymorphism lacks residues 178 to 204
  VARIANT 63..204: note = Derived polymorphism lacks residues 63 to 204
  VARIANT 43: note = Ancestral polymorphism is R, Derived polymorphism is W
  VARIANT 36..204: note = Derived polymorphism lacks residues 36 to 204
MTFSYACPSFHSDGFVSPPLKPAPSAQQQKAAAAGQRRRMKVWTAVSRLRSALANAVAGRHRQVGMGARLTDALYGHRRGHVHLAFQVDPRACPAQLLELAAPTAALVREMASDLVRIALECDRARGSPAAALPSLGIPMRRAEPEESKSCRAPGLVMWPCGWCHIDDIREISHGRARPREANATAELGTCVDAREPSGFDAHA

SEQ ID NO: 5301 - protein, 542 aa, Zea mays
  VARIANT 107..542: note = Derived polymorphism lacks residues 107 to 542
  VARIANT 362..542: note = Derived polymorphism lacks residues 362 to 542
  VARIANT 387: note = Ancestral polymorphism is F, Derived polymorphism is L
MSNRDEVSVVVKCLRLGAAEYLVKPLRTNELLNLWTHVWRRRRMLGLPEKNFFNDNFELVLSEPSDANTNSTTLLSDETDDRPKGNTNQETGTSKQLEYESNPSVAEPDQREKMEGVPGSALDASQKSSPRRAFSRPIKTNLRVAESSAFLAYVKSSTPATSSFDSELQRGGSRLDSLDNQGNCSSATDRSDTGTDVNIRNKEAFEMPAQYPMVWFSSSNMHMERSSEGHNDTSGTPPAYHFPFYYPGMVEHNMALSSAQDFQANINNAQAHTPQEGTFKICHYAGEVTYDTAGFLEKNRDPLHSESIQLLSSCKCELPKHFASVMVADSQNKSSLSWHSVMDTQKQSVVTKFKPQLFKLMQQLESTTPHFIRCIQPNSKQLPRYGFLLLRSIASQDPLSVSIAVLQQLNIPPEMYQVGYTKLFFRTGQVAALENAKIQMLHGTLRIQKHFRVIRGERARIHFDNLVKRWRAAVLIQKYTRRRLAANMFNDQLNHIILLQSVMRGCLTRRKYKCLQNGKESKASHNIVPGETRKNNAESRIS

SEQ ID NO: 5302 - protein, 132 aa, Zea mays
  VARIANT 93: note = Ancestral polymorphism is G, Derived polymorphism is S
  VARIANT 109: note = Ancestral polymorphism is A, Derived polymorphism is V
  VARIANT 111: note = Ancestral polymorphism is F, Derived polymorphism is C
MGGMRSVEFKVIETDPYEYCIVAPDTEIFCDGEPIKREDEERLDEVGYYDVGGVRKQMTQIRELVELPLRHPQLFKSIGVKPPKGILLYGPPGSGKTLIARAVANETGAFFFLINGPEITKFICIARITNRL

SEQ ID NO: 5303 - protein, 122 aa, Zea mays
  VARIANT 32: note = Ancestral polymorphism is S, Derived polymorphism is Y
  VARIANT 42: note = Ancestral polymorphism is K, Derived polymorphism is N
  VARIANT 88: note = Ancestral polymorphism is I, Derived polymorphism is T
  VARIANT 103: note = Ancestral polymorphism is T, Derived polymorphism is M
MTNAFSFYRGGRACNGVNEALQRILILQVPTSTSARGLEEAKIRKLPRRLEERTVQALIHASDSPLSIVLVGVGNGPWDDLFMDFTEIMSRETSQGDKEGKFTLEALMKIPAQHDAIISQNI

SEQ ID NO: 5304 - protein, 1041 aa, Zea mays
  VARIANT 122..1041: note = Derived polymorphism lacks residues 122 to 1041
  VARIANT 170..1041: note = Derived polymorphism lacks residues 170 to 1041
  VARIANT 210..1041: note = Derived polymorphism lacks residues 210 to 1041
MGKEKLHKQPSGRLIESLKMERMRNILTHRYPYPHEHSRHFIIAVFACWLFFISSDNLQNLIMKLDKNFKWWSMYACLIGFFYFFSSPFIRKTIKPNYSNFNRWYIAWIFLAALYHLPSFQSMGLDLRMNLSLFLTIYISSLIFLMVFHIIFLGLWYLGFVSRMAEKKPEMLTIIQNCAVISIACCVFYSHCGNRTVSRDKSIDRRTASWIVFSLWTKHDDNTLISRLLRMHKFKEQICSSWFAPVGSASDYPLLSKWAIYGELSSNGSGSSNEISPVYSLWATFMGLYIANYVIERSTGWVLTHPLTISEYEKLKKQLKPDFEDMVPWYSGTSTDLFKTVFDLMISVTLFVGRFDMRMMQAAMNKTPDEANSHDLLYDHLDGKDELWFDFIADTGDGGNSTYAVARLLAQPLLVINSDDSRLTFPRGQLLLVGGDLAYPNPSSFSYERRFFCPFEYALQPPAWYKPEHIALEKPELPLGVSELRRYRGPQCFMIPGNHDWFDGLNTFIRYICHKSWVGGWFLPQKKSYFALKLPNGWWVFGLDQALHGDIDVYQFKFFAELCQQKVGESDSVIIITHEPNWLLDWYWGDSTGTNVAYLIREYLRGRCKLRMAGDLHHYMRHSCIESKEPVHVQHLLVNGCGGAFLHPTHVFENFRVFYGNKYETKSTYPSYHDSSKIALGNILKFRRKNWQFDVIGGFVYFVLVFSMFPQCDSFHILHEDSWAGRINGFFTAMWNAVFEILERSYVSLGGVVTLLMVSFFFVPTKLSRRRRVLLGFLHAAAHLTSAVLLMLLMELAIEICIRNHLLATSGYHTLYEWYRKVESEHFPDPTGLRARLEHWTFGLYPACIKYLMSAFDIPEVMAVTRSTICKKGIESLPRGGAIIYYVCVFLYFWVLSTPVVSLVFGSYLYLCINWFHIHFDEAFSSLRIANYKAFTRLHIKKNGDLEVFTLAVDKVPKDWMLDPDWDMEPKQPFQMSYTRKFPSKWRAASGLDPINAVRIVDRFVIPRTPSSPTTPGGSVSSPTTPGGSVSSPTTPGGFMR

SEQ ID NO: 5305 - protein, 177 aa, Zea mays
  VARIANT 38: note = Ancestral polymorphism is A, Derived polymorphism is V
  VARIANT 19: note = Ancestral polymorphism is P, Derived polymorphism is L
  VARIANT 17: note = Ancestral polymorphism is R, Derived polymorphism is H
MSSAPSTTASTIAASIHTPFSSGPRGARLPAALRLSLAQLRSAGCRAAPGRLARPRARVRCGAAARFIGQGEFPAEVLESELPVLVDFVADWCGPCRLIAPVVDWASEEYAGRLKIVKIDHDANPQLIEEYKVYGLPTLILFKDGQEVPGSRREGAMIKDKFKEYLEPLLTTITTAA

SEQ ID NO: 5306 - protein, 1201 aa, Zea mays
  VARIANT 635..1201: note = Derived polymorphism lacks residues 635 to 1201
  VARIANT 356..1201: note = Derived polymorphism lacks residues 356 to 1201
  VARIANT 127..1201: note = Derived polymorphism lacks residues 127 to 1201
  VARIANT 25..1201: note = Derived polymorphism lacks residues 25 to 1201
MARKHGWQLPAHTLQALAVFILYIRCTSINPADPGIMSKFEDGLINIPTNGSGIEGMNLPQKVNNATGTNSPMSTCRSSLDGHSNQRGSSIGEANMNLGSQLPKKRSSCWLLGGLLCATFVKEDCRKTDDSEQQANGEEALFCTLCNAEWLNNCVGRKNYFTFLALMAISLIWLAIEFGVGIAVIVLCFVDKNASRNIQDKLGNGLTRAPFAVIVGITTYDYVVAMRAMSEAAPEDEEGENIIYSPSNSATTGFSDEVIPHLEPGMVPSTVDPDGAGYPERANRAKKAVKISARSLAKLDKNEVMKAAAKARASSSVLRPIDARHGHEADVISSGSASVRSSMSVDYSGTKESNSEMKLSPLHNSYPQSLASQDEYDTGTPTASSLSSLVNIHKLASHSQFSAAPRPAPPERPVPAMVRPPVPTTQITNPGIPRPAVPTTQTTNPMFQSATSYVRENRRASVVWDQEAGRYVSVPAQTRTGTGADLPARNPRFLANPSGEPSSHVRGVAPGNTSSSAMPSGQPSERLTYSGQSIFFGGPMLNTPSLGAQRNEAGARARPEGSRDPNAQQRDIRGEKARTGSLPVFAPGTILQRQKGQADKTSRALLVCFTPSLLPTAPVPVPHHWHSAAFSSSSQKLLPRSAGVGRRLVVRADVKVISTGEACRRGLAAGIDKLADAVSVTLGPKGRNVVIDQDDVPKVINDGVTIAKAIELPNALEHAGATLLQEIASKTNSAVGDGTTTAIVLAREIINLGLLAVATGANPVALRRGIDKAVHELIKILKSKCIPVSTKEDIKAVASISSGNDEYVGNLIADALEKIGPDGIIKIESSSSIYTTVEVQEGMKIDKGYISPYFITNQDKSIVEFENTRVLLTDQRVNDVQEILPLLEKTTQLSVPLLIIAEDVSHEVYSTLVLNKLNGLLNVAVVKCPGLGDEKKAILQDIAIMTGADFFASDLGWGLHGITSDQLGMAQKITITSESTTIIAHPSMRPEIEARIMQLKKDLEETTSSYLKERFSARIAKLSRGVGVIKVGAATEAELEDRKLRVEDAKNATFAAISEGITPGGGVTYVHLSKHIPSIMDLVDDTEEKMGVNIVGKALLVPAMTIARNAGADGPAVVEKLLASEWRVGYNAMTDEFEDLVAAGVVDPCRVARCVLQNSASIAGLILMTQAMMFDKIKKKKSPIPEIPGIPPLQISQKAKA

SEQ ID NO: 5307 - protein, 76 aa, Zea mays
  VARIANT 41: note = Ancestral polymorphism is F, Derived polymorphism is L
  VARIANT 18: note = Ancestral polymorphism is V, Derived polymorphism is M
  VARIANT 15: note = Ancestral polymorphism is T, Derived polymorphism is M
  VARIANT 9: note = Ancestral polymorphism is E, Derived polymorphism is D
  VARIANT 8: note = Ancestral polymorphism is A, Derived polymorphism is V
MILVAIMAELLEEYTAAVARAVERLLSSAAPRRILPRRVRFLVLRSLPFASPPPPPMAAAPPPPPPPPPHATVLTS

SEQ ID NO: 5308 - protein, 42 aa, Zea mays
  VARIANT 11: note = Ancestral polymorphism is T, Derived polymorphism is I
  VARIANT 12: note = Ancestral polymorphism is K, Derived polymorphism is N
  VARIANT 21: note = Ancestral polymorphism is A, Derived polymorphism is T
  VARIANT 36..42: note = Derived polymorphism lacks residues 36 to 42
MVEEIARAFKTKIMFIYVDTAEENLAKPFLTVYGLESEKSLL

SEQ ID NO: 5309 - protein, 638 aa, Zea mays
  VARIANT 305..638: note = Derived polymorphism lacks residues 305 to 638
MAVGATATKLLPSAAAAARRPSMLHLAAVAVLCSLSYLLGIWHHGGFSAGPAAGDSSSSVSIATAVSCATPAPTTASSSPPAGPLDFAAHHTAEGVEAEGALRHRNYEACPAKYSEYTPCEDVERSLRFPRDRLVYRERHCPAAGERLRCLVPAPKGYRNPFPWPASRDVAWFANVPHKELSVEKAVQNWIRVDGDKFRFPGGGTMFPRGAGAYIDDIGKLIPLHDGSIRTALDTGCGVASWGAYLLSRNILAMSFAPRDSHEAQVQFALERGVPAMIGVLASNQLTYPARSFDMAHCSRCLIPWQLYDGLYLIEVDRILRPGGYWILSGPPINWKKHWKGWDRTKEDLDAEQKAIEAVARSLCWKKIKEEGDIAIWQKPTNHIHCKAIHKVIKSPPFCSNKNPDAAWYDKMEACITPLPEVSDLKEVAGGSLKKWPERLTAVPPRIASGSIEGVTEEMFVEDTELWKKRVGHYKSVIAQLGQKGRYRNLLDMNAKFGGFAAALVNDPLWVMNMVPTVGNSTTLGVIYERGLIGSYQDWCEGMSTYPRTYDLIHADTVFTLYNGRCEAENILLEMDRILRPEGTVIIRDDVDLLVKIKSMADGMRWNSQIVDHEDGPLVREKLLLVVKTYWTLDGSEQ

SEQ ID NO: 5310 - protein, 800 aa, Zea mays
  VARIANT 257..800: note = Derived polymorphism lacks residues 257 to 800
  VARIANT 280: note = Ancestral polymorphism is C, Derived polymorphism is Y
  VARIANT 285..800: note = Derived polymorphism lacks residues 285 to 800
MVMPTVASAAAAALHPAISTRRAGVVGNGIASAAAAGGRLAGGGRGAVVRARVAEAAPVAAEGGRLEAPPAAPMVEIPVTCYQMLGVTEKAEKDEIVKAAMELKNAGIEDGYTAEVSTFRQALLVDVRDKLLFEQDYAGNIKEKVPPRSSLHIPWSWLPAALCILQEVGEEKLVLEIGQAALRRPDSKPYVHDVLLAMALAECSIAKASFEKSKVSLGFEALARAQYLLRRKPSLEKMPILEQIEESLEELAPACTLELLSLPQTLENSERRRGAIAALCELLRQGLDVESSCRVHDWPCFLGQAMDKLLANEIVDLLTWDTLATTRKNKRSLESQSQRVVVDFNCFYMAMLAHLAFGFTTRQTELIKKAKTICECLVASESTDLKFEESFCSYLLGEETGTTVFEKLQQLQSTGSSNSKNYGLDKKKDSSGKVTVNQSLELWLKDVALSRFADTKDCPPSLTNFFGAPKRVLNTSKQKLGSPRSVLLSSQPSSSASLCNRTSTEQSPRLSPNSHLGEAVKQLAPANLGLQSSMDRQVNGSGTASVPLKRNPGSHIRTLELWGLSGDVMGKLACSALLGFVVFSTLKLTRFQFGHVRYTDPSRESASMLSLNEASAKEGSFITSRVRKHFENISKFLWLSDRPNSNSKGSDKHPAVNDITAAVCKQKMDIQEAETLVKQWQDIKSEALGPDYQTDMLPEILDGSMLSKWEDLALLAKDQSCYWRFVLLNLNVVRAEIILDEIGAGEAAEIDAVLEEAAELVDDSQPKKPSYYSTYEVQYVLRRQNDGSWKISEAAVRDLT

SEQ ID NO: 5311 - protein, 74 aa, Zea mays
  VARIANT 8: note = Ancestral polymorphism is A, Derived polymorphism is V
MILVAIMAELLEEYTAAVARAVDRLLSSAAPRRILPRRVRFLVLRSLPFASPPPPPMAAAPPPPPSPHAAVLTS

SEQ ID NO: 5312 - protein, 88 aa, Zea mays
  VARIANT 62..88: note = Derived polymorphism lacks residues 62 to 88
  VARIANT 58: note = Ancestral polymorphism is L, Derived polymorphism is H
  VARIANT 38: note = Ancestral polymorphism is G, Derived polymorphism is R
  VARIANT 34: note = Ancestral polymorphism is A, Derived polymorphism is T
  VARIANT 28: note = Ancestral polymorphism is T, Derived polymorphism is I
  VARIANT 8: note = Ancestral polymorphism is A, Derived polymorphism is T
MESKVRAACNSSNAKLDDIVRLLDDLLTEYESTAYGPGKWKRLATFLQQCLAGPVLDLFRRQLEHIDAERNALRLKCNSRDVELSEKL

SEQ ID NO: 5313 - protein, 495 aa, Zea mays
  VARIANT 155: note = Ancestral polymorphism is R, Derived polymorphism is S
MCAYHMRLTGGAAFVLLMVLLLLLYAVHRWRNPRCSGRLPPGSMGLPLVGETLQFFSPEASLDVPRFVRHRLQRYGPIFKTSLVGHPVVVSADEELNYMVFQQEGQLFQSWYPDSFVEILGRDNVGEQQGAMFKYLKNMVLRYFGPESLRESMLRDVEHAVSSSLCTWSTLPSVELKEAVSTMVFDLSANKLLSLEPSRSKILRRSFFDFVRGLISFPLYLPGTAYYSCMKGRQSAMEVLQEVLAERKRLVQVPGAGGGAMETIRRHGGDFLDLVIQEVTKEKPLVTDRMALDLMFVLLFASFHTTSLALTLAVKLLADHPRVLEELTVEHEAILNERNARHGSDGITWMEYKSMTFTSQVINETVRLANIAPGIFRKALKDIQFRGFTIPAGWGVMVCPPAVHLNPVIYPDPLIFNPTRFKDKPEINRGSRHFMAFGGGLRSCVGADFSKLQMSIFLHFLVTRYRWRSLGGGKVVRNPGLEFPDGYHIQIRHWN

SEQ ID NO: 5314 - protein, 62 aa, Zea mays
  VARIANT 19: note = Ancestral polymorphism is P, Derived polymorphism is L
  VARIANT 24: note = Ancestral polymorphism is C, Derived polymorphism is W
  VARIANT 33: note = Ancestral polymorphism is R, Derived polymorphism is Q
  VARIANT 48..62: note = Derived polymorphism lacks residues 48 to 62
MDDGRKLGYEPYFGKTVYPEPERCRCTDDKKWRCSNETTPVSKYCERQMHRGHNRSRKHVKK

SEQ ID NO: 5315 - protein, 84 aa, Zea mays
  VARIANT 45: note = Ancestral polymorphism is R, Derived polymorphism is Q
MILVAIMAELLEEYTTAVARAVERLLSSAAPRRILPRRVRFLVLRSLPFASPPPPPMAAAPPPSPHAAVAAAPPPSPHAAVLTS

SEQ ID NO: 5316 - protein, 439 aa, Zea mays
  VARIANT 118..439: note = Derived polymorphism lacks residues 118 to 439
MASSLLQQLLSLLLLLLPSPLRLREHLSGNHAVSANNFHPIFLVAGVSCSDLEARLTEEYRPSVPHCGAMKGKGWFGLWKNSSELLSRDYVQCFEEQMSLVYDPAINEYRNLAGVETRVPNFGSTRAFSHKNPLKSDWCLGKLRAALEDMGYRDGDTMFGAPYDFRYAPPSPGQTSEVYSRYFKELMELVEAASERTRKKAVILGHSFGGMVALEFVRNTPPAWRREHIERLVLVAPTLPGGFLEPVRNFASGTDILYVPATTPLATRAMWRSFESAIVNFPSPAVFGRLQAPLVVTRERNYSASAHDMERFLAAVGSGEAAEPFRRRAVPKMGSFAAPMVPMTYISGVGNRTPLRLVFWGEDFDAAPEVAAYGDGDGKINLISVLAFEKEMRRQPEQKKQFKSIKINKAQHSTIVTDDFALHRVIQEIVEANNQKIPS

SEQ ID NO: 5317 - protein, 135 aa, Zea mays
  VARIANT 69: note = Ancestral polymorphism is P, Derived polymorphism is S
  VARIANT 64: note = Ancestral polymorphism is G, Derived polymorphism is E
  VARIANT 3: note = Ancestral polymorphism is G, Derived polymorphism is D
MTGVLGGAQTANVQNGLPVQYGLGNDPLTHYLARMSRHQLHEVMAELKFLATQNKEQSKTLLQEIPQLPKALFQGYVVYLVRVRRAGRKRPLPKCIVYGNPKHQGITQLKLQRYKRYVAEERAIRKLGGLRVLMS

SEQ ID NO: 5318 - protein, 360 aa, Zea mays
  VARIANT 192: note = Ancestral polymorphism is R, Derived polymorphism is I
MSTANRYQHIKSTKPVVGKARKLKDLMIKSDNRICADCGAPDPKWASANIGVFLCLKCGDVHKALGPDISKVLSVTLDDWSDSDIDSMVEVGGNSHANSIYEAFLPKDRPKPKPDSTMEYRTKFIRAKYETQDFLKPSLRISSRSSFKSTTSVKSVDSNFSSTSRKDVSEDTREFVGELNITLVKGTNLAVRDMLTSDPYVVLTLGGQFCSKNSTIGSNCIKLNRRHLEDSLDDWFDEQLENYLDDDYLVFDCPGQIELFTHVPVLRNFVEHLKRKIFNVCAVYLLDSQLELPHINILSKMDLVSNKKDVEVDDYSMVSFIPLDLRKESSIQYVLSSIDTCIQYGEDADVKVRDFEEDED

SEQ ID NO: 5319 - protein, 220 aa, Zea mays
  VARIANT 207: note = Ancestral polymorphism is D, Derived polymorphism is Y
  VARIANT 182: note = Ancestral polymorphism is P, Derived polymorphism is L
  VARIANT 146..220: note = Derived polymorphism lacks residues 146 to 220
  VARIANT 49: note = Ancestral polymorphism is L, Derived polymorphism is Q
  VARIANT 48: note = Ancestral polymorphism is R, Derived polymorphism is C
MADDGTSSNIAGVVVLDRHGKPVKLNGPIDVTWSHDVRIRRARGKKLRLFVEKEVTATRQGYQSARIPLDEQAHIDMAMRKSLRDSFSTLEHDSCPPFGKSTGSASGAASCSIGKQSRLSSYYKNTQDISRGPFDIDLARSRTQVQPHINVMLEKGHKEKLGIALAKWFHANDIPGRKKVCPYFHSTLNLAQQLGDGVPIPRGREIDIGYELCRHGGSHG

SEQ ID NO: 5320 - protein, 88 aa, Zea mays
  VARIANT 74..88: note = Derived polymorphism lacks residues 74 to 88
  VARIANT 53: note = Ancestral polymorphism is T, Derived polymorphism is K
  VARIANT 51: note = Ancestral polymorphism is E, Derived polymorphism is A
  VARIANT 31: note = Ancestral polymorphism is S, Derived polymorphism is G
  VARIANT 27..88: note = Derived polymorphism lacks residues 27 to 88
  VARIANT 23: note = Ancestral polymorphism is M, Derived polymorphism is I
  VARIANT 17: note = Ancestral polymorphism is A, Derived polymorphism is T
  VARIANT 16: note = Ancestral polymorphism is R, Derived polymorphism is W
  VARIANT 5: note = Ancestral polymorphism is P, Derived polymorphism is S
MTPRPKLKPLHWDKVRASSDRVMVWDQLKSSSFQVNEEMIERLFICNPAKEATRRPVLPTPRTENKVLDPKKAQNIAILLRALNVTKE

SEQ ID NO: 5321 - protein, 285 aa, Zea mays
  VARIANT 218: note = Ancestral polymorphism is L, Derived polymorphism is I
MEEPLPPRMPRIALLPLALPKMLSHRGAQGAHKGATCSHFLSQVHGAWLPPWLVTHYARYMEVVSGHWNYHGKPVVQNVLHKASEKSAHAKKWVEPHIKTAKMKWIPVKEKLVVLKKNAEPYVQKVSTRSVKFYESSRDAVTPHVVKVKEFAHPYYQEAKKFSKPYIDQIAEITKPHVEKVRTTLKPYTKRAVHAYGSFIASATTYHRQAQATIMDYLHQHGVPKSFATKELVWFLASALLALPVFVICRLVVKTFCTKKNRRPRGGNGNGNHGQKRHKRRYADK

SEQ ID NO: 5322 - protein, 286 aa, Zea mays
  VARIANT 87: note = Ancestral polymorphism is W, Derived polymorphism is R
MGKEVDVSTLEAGGVRDYADPPPAPLIDVDELGKWSLYRAVIAEFVATLLFLYITVATVIGYKHQTDASASGPGAACGGVGVLGIAWAFGGMIFILVYCTAGISGGHINPAVTFGLFLARKVSLVRALLYMAAQSLGAICGVALVKGFQSGLYARYGGGANEVSAGYSTGTELAAEIVGTFVLVYTVFSATDPKRNARDSHVPVLAPLPIGFAVFMVHLATIPITGTGINPARSLGAAVVYNNSKAWSDQWIFWVGPFIGAAIAALYHQIVLRASARGYGSFRSNA

SEQ ID NO: 5323 - protein, 47 aa, Zea mays
  VARIANT 38: note = Ancestral polymorphism is D, Derived polymorphism is G
  VARIANT 36: note = Ancestral polymorphism is G, Derived polymorphism is D
  VARIANT 27: note = Ancestral polymorphism is R, Derived polymorphism is C
  VARIANT 12: note = Ancestral polymorphism is A, Derived polymorphism is V
MDNLKENTKNRALLDYSMDFSKIHEMRKRKQNKSLGGGSDLLAHAQA

SEQ ID NO: 5324 - protein, 292 aa, Zea mays
  VARIANT 44: note = Ancestral polymorphism is V, Derived polymorphism is M
MGKDDVVQSGAGGGEFAAKDYTDPPPAPLVDAAELGSWSLYRAVIAEFIATLLFLYVTVATVIGYKHQTDASASGAGADAACGGVGVLGIAWAFGGMIFVLVYCTAGISGGHINPAVTFGLFLARKVSLVRALLYMVAQCLGAVCGVGLVKAFQSAYFDRYGGGANSLASGYSRGAGLGAEIVGTFVLVYTVFSATDPKRNARDSHVPVLAPLPIGFAVFMVHLATIPVTGTGINPARSLGAAVVYNKDKPWDDHWIFWVGPLLGAAIAAFYHQYILRAGAIKALGSFRSNA

SEQ ID NO: 5325 - protein, 232 aa, Zea mays
  VARIANT 23: note = Ancestral polymorphism is R, Derived polymorphism is L
  VARIANT 38: note = Ancestral polymorphism is R, Derived polymorphism is W
  VARIANT 42: note = Ancestral polymorphism is P, Derived polymorphism is S
  VARIANT 52: note = Ancestral polymorphism is R, Derived polymorphism is C
  VARIANT 67: note = Ancestral polymorphism is P, Derived polymorphism is L
  VARIANT 68..232: note = Derived polymorphism lacks residues 68 to 232
  VARIANT 72: note = Ancestral polymorphism is G, Derived polymorphism is R
  VARIANT 75..232: note = Derived polymorphism lacks residues 75 to 232
  VARIANT 87..232: note = Derived polymorphism lacks residues 87 to 232
  VARIANT 91..232: note = Derived polymorphism lacks residues 91 to 232
  VARIANT 101: note = Ancestral polymorphism is P, Derived polymorphism is S
  VARIANT 106: note = Ancestral polymorphism is S, Derived polymorphism is L
  VARIANT 126..232: note = Derived polymorphism lacks residues 126 to 232
  VARIANT 131: note = Ancestral polymorphism is A, Derived polymorphism is D
  VARIANT 142: note = Ancestral polymorphism is L, Derived polymorphism is P
  VARIANT 152: note = Ancestral polymorphism is T, Derived polymorphism is I
MYLECWHLLDFPTLRLRPFYSRRARLCQRSGAILPALRPILSPASFLVELTRLCAAATPEDVILSTPETTTGEHQVQLGFLSSIAEQFLLRPFLVGIFFDPALDKSSRLFELVFKRLTLGDNVLLEDDIDAIAAQLACPRVLVGLTRLRATTTLDDVILSPLETATRMWMTGRRGCEEDGRGWGSRQGGGCARGGMGRHHGDDAGFAHATRICCGGGGEERWGIRVGEDRGH

SEQ ID NO: 5326 - protein, 69 aa, Zea mays
  VARIANT 9: note = Ancestral polymorphism is P, Derived polymorphism is R
  VARIANT 29: note = Ancestral polymorphism is I, Derived polymorphism is V
MDPPQQPEPVTYVCGDCGAENTVKLVDVVQCRECGHRILYKKRTRRSKTTSLLILSFRYAIPCFPHRLN

SEQ ID NO: 5327 - protein, 66 aa, Zea mays
  VARIANT 16: note = Ancestral polymorphism is W, Derived polymorphism is R
MRSNKQKQSAGGEKSWIGRKLFLYNVTVGLYAMDPWERYLFNSIVLVLLWFICYTTTKPMWQAFDN

SEQ ID NO: 5328 - protein, 737 aa, Zea mays
  VARIANT 220..737: note = Derived polymorphism lacks residues 220 to 737
  VARIANT 283..737: note = Derived polymorphism lacks residues 283 to 737
MRPGARLDSVVFQLTPTRTRFDLVLIANGRKEKFASGLLKPFLAHLKAAQDQIAKGGYSITLEPISEFDVSLFTRGAVERFVRFVSTTEVLERVTTLESEILQLEDAIAIQRNDSLRLKCGSTEMDPAVSSFYSPYHSHKKRELYDYAPYLSQPAISFYIYFYHMPNTIHPLIGGPANYDPNSATAIVVYKPGSNSIPPMQNETTAQEENSKKACSHFIELWKQKHETGQWIEVEPEAISTRSEFPPFNASGIVLMGDNMKQNLESGSINGEPNGEDGAKADQKSSQQMGSHAAYPPWAMHPASGAVLYPPYPMQGMPFYPGVNPYYPPYPPVDDPSSGGGNSHGHKSHRKGKRSGKKPSVVVIKNVNVTSKKCGSSESESQSSSEVESADSDNSHSKSRERKHKSSCSKEGRRTTFDPGDEYNKDETSNGHGVEQGNWSAFQNFLLRAEEKTRSSDADLFAGEKEPPSRRKQNVNTADPIILVERDGGNVCEQNKIGFDSANGRTRVIRVMSNDELVMSGEGRIYMDCEMKEIEAGGGRYRRGTDVSFGYDPAMDYDSHMQSTVKVEDAKPEDVLPVTDGVQKVEKEKLKNARDGSDKRTKDSLLRRLSAPRTPLNDAQKRAQNLRAYKADLQKLKKEQEEEQIKRLERLKLDRQKWIAARGNGKGPGNDAPRANGMNGLSKSVPTFTGMKRVENGTTESLSGRLKRLSEPKSIVGAEHSLNPKSAGAGRSRRSMA

SEQ ID NO: 5329 - protein, 459 aa, Zea mays
  VARIANT 405: note = Ancestral polymorphism is R, Derived polymorphism is C
  VARIANT 373: note = Ancestral polymorphism is P, Derived polymorphism is L
  VARIANT 369..459: note = Derived polymorphism lacks residues 369 to 459
  VARIANT 317: note = Ancestral polymorphism is L, Derived polymorphism is Q
  VARIANT 218..459: note = Derived polymorphism lacks residues 218 to 459
  VARIANT 131..459: note = Derived polymorphism lacks residues 131 to 459
  VARIANT 124..459: note = Derived polymorphism lacks residues 124 to 459
MSRLHADYSSCSEQVMSPKQLACDREVQSQPKISKWERTFASDPVNPAGSMLDPGGISGSGHPWCRPSSPVVDNGHAGATELRYQDVEVDTRRCERLSAELELEWSALRACEALVPRITPASGWSQSSRRQPGHMEPSEANTFANIEATYKCLVDVYGTREEDIVLYGQSVGSGPTLNLAVCFNRVVNPYTKYALTMTSVALSIEEALPKKMQSYLVGMLVRTFLVLSTVAVALFFPYFALVMALVMALLGSVFTMLVALILPCACYLSIKKGAVPLWEIILGVSLSRDLMAVAGDALKTNIRTLGPLVLPLSEQLLFMATLVAKKLLTMKKVKPYIPDFKLAFKHFCIHASGRAVLDELESNLALTDWHMEPSRMTLHRFGNTSSSSLWYELAYNEAEGSIRRCHRVWQIAFESGFKCNSAVWRALRSVNPAEETNPWMDEIDRFPVDVPKVSKVSSD

SEQ ID NO: 5330 - protein, 921 aa, Zea mays
  VARIANT 70..921: note = Derived polymorphism lacks residues 70 to 921
MVSGNLLYRRKRSWRADEFVSRSTLQLLDFDDGSPPEHAWRRKLSSHANRLKEFNVTFREAIRMMKLGLRLWSYIREEASHGRVICRFHISCIHMYFKAPIDPFTREGNKPSASQGVPLGGMGSGSISRGFRGEFKHWQITPGSCEMSPVMANQFSIFVTRGGTKKYASVLSPGQLDGLKKSTDDGISSWDWKLKGDRSTYHALFPRAWTVYDGEPDPELKVSCRQISPFIPHDYQESSLPTSVFVYTLVNTGKERAKVSLLMTWANSIGGLSHHSGDHVNEPFVGKNGVSGVLLHHKTANNNPPVTFAIAACENQNVNVTVLPVFGLSGESSVTARGMWGTMVQDGSFDQDNLNTGPSMPSLLGDTVCAAVSASTWVEPHGRCAVVFALAWSSPQVKFKKGSTYYRRYTKFYGTSPRSAVNLVEDALMKYKHWEEEIDKWQTPVLQDERLPEWYKITLFNELYFLVAGGTVWIDSGSLVSDADNKSNPEESNLSHEIDDKENVGKFLYLEGIEYFMWCTYDVHFYASFALLDLFPKIELSIQRDFARAVLREDNRRVRFLADGTWGIRKVIGAVAHDLGAHDPWHELNAYNIHDTSRWKDLNPKFVLQIYRDFAATGDKSFGKDVWPAVCTAMEYMEQFDHDGDGMIENDGFPDQTYDAWTVQGVSAYCGCLWLAALQAAAALAGSLGHDDYAERCMTRFVKAKTVFEARLWNGSHFNYDSGTSYSSRSIQADQLAGQWYTASSGLPPLFDEDRIKCTLQKIFDYNVMRVKGGRMGAVNGMHPNGKVDETCMQSREIWTGVTYSLAATMLLHGMEHQAFTTAEGIYTAGWSEEGYGYWFQTPEAWTIDGHYRSLIYMRPLAIWAMQWALSPPRSILEAPKVNTMDRAHISPGTFQFLQDSVRKMTPKNGCFGNTVINLDC

SEQ ID NO: 5331 - protein, 166 aa, Zea mays
  VARIANT 17: note = Ancestral polymorphism is Q, Derived polymorphism is K
MDEAGREIMEDVDLEEQPLRQHSPPPPSPPPPPLRKPSRKKPAGSRLLLATPVRALSLVVLVVGLLFSVHLLVHDARTLVLLAAEWLCIFFVMSCVAAWERDHDDGAGGGCNGLGTVAEVALWSFAMALTVTMTFWVAAGLPLPAVAVLYLLSLLAVSACFAVLLN

SEQ ID NO: 5332 - protein, 336 aa, Zea mays
  VARIANT 297: note = Ancestral polymorphism is I, Derived polymorphism is T
  VARIANT 55..336: note = Derived polymorphism lacks residues 55 to 336
  VARIANT 36: note = Ancestral polymorphism is L, Derived polymorphism is H
MARRSSYADKPPKGVRDAKGYNAGAVSTTLHLAKFLNKTMQLGLELFICLHIIVQGYLVGNPSTEERIDVSARVPCAHGFGIISHQLYEMILGHCHGEDYSNPAKELCGQALKTFNDLTSEVAQGHVLQEKCVAASSSPVLNANSRVAGGSSSWASDGRKILREEEMVGRRGVLGKLFHPPALPPFSCRVYRYYLSYFWANDRRTRDALGIKEGTVDEWVRCHNDDQELPYESELKSVVKYHRNLTSRGYRAMVYSGDHDLLVPHLGTQAWVRSLNFPVVDDWRAWHLGGQSAGFTITYSNNMTFATIKGAGHTAPEYEPERCFAMFSRWILNRPL

SEQ ID NO: 5333 - protein, 153 aa, Zea mays
  VARIANT 121: note = Ancestral polymorphism is S, Derived polymorphism is P
  VARIANT 6: note = Ancestral polymorphism is R, Derived polymorphism is L
MTTSTRPCAGAAAAFLLLVLFSSAAVSLATAAGRESKQGQHAAGASVYVVMVKPPAEGVDSKAYQMGILAAALGSEEKAKQALIYSYKAAASGFAAKLTPAQVAALQGFETQQAPGQGNNSRVLFVSWPEHPDVLQALPDVKYTLQDSNHLNR

SEQ ID NO: 5334 - protein, 139 aa, Zea mays
  VARIANT 97: note = Ancestral polymorphism is I, Derived polymorphism is T
MASTNMASATSRFMLAAGVPTASSGSGRVSFASAPNRLGRRLVVRADEESPAEPAPTAEGEGAVATKPKAEKPPPIGPKRGAKVKILRRESYWYNGIGNVVTVDQDPNTRYPVVVRFNKVNYAGVSTNNYALDEILEVK

SEQ ID NO: 5335 - protein, 249 aa, Zea mays
  VARIANT 238: note = Ancestral polymorphism is T, Derived polymorphism is I
  VARIANT 118: note = Ancestral polymorphism is S, Derived polymorphism is I
  VARIANT 30: note = Ancestral polymorphism is G, Derived polymorphism is R
MGGQATGYAAADAVQALPLVSTFWGVLLFGEYHKSSRKTYVLLGFMLFMFVAVVAVLMASKMSTNPDEPKSHARTDFLLNNELEVRKFWDENKNDLATRTGQELLDMVDSSPIVAIKSLKVSDFQGVSLPTIGRSTLEINPDLLEAKNLMSWYVSEGKDISLAPISAEAGATRAGGFKYMYSDRVFLSHITSDPAMGQEKEGDNSYVLKLKEATWVPHMFRVSVTQDEYMNEKRQRITVRGEALVDFAA

SEQ ID NO: 5336 - protein, 1093 aa, Zea mays
  VARIANT 428..1093: note = Derived polymorphism lacks residues 428 to 1093
  VARIANT 805..1093: note = Derived polymorphism lacks residues 805 to 1093
MEASAGLVAGSHNRNELVVIRRDGDPGPKPPPREQNGQVCQICGDDVGLAPGGEPFVACNECAFPVCRDCYEYERREGTQNCPQCRTRYKRLKGCQRVTGDEEEDGVDDLDNEFNWNGHDSRSVADSMLYGRGGDPNGAPQPFQLNPNVPLLTNGQMVDDIPPEQHALVPSFMGGGGKRIHPLPYADPSLPVQPRSMDPSKDLAAYGYGSVAWKERVENWKQRQERMHQTRNDGGGDDGDDADLPLMDESRQPLSRKIPLPSSQINPYRMIIIIRLVVLGFFFHYRVMHPVNDAFALWLISVICEIWFAMSWILDQFPKWFPIERETYLDRLSLRFDKEGQPSQLAPIDFFVSTVDPLKEPPLVTANTVLSILSVDYPVDKVSCYVSDDGAAMLTFEALSETSEFAKKWAPFCKRYNIEPRAPEWYFQQKIDYLKDKVAANFVRERRAMKREYEEFKVRINALVAKAQKVPEEGWTMQDGTPWPGNNVRDHPGMIQVFLGQSGGLDCEGNELPRLVYVSREKRPGYNHHKKAGAMNALVIMASLNHLFVRVSAVLSNAPYLLNLDCDHYINNSKAIKEAMCFMMDPLLGKKVCYVQFPQRFDGIDRHDRYANRNVVFFDINMKGLDGIQGPIYVGTGCVFRRQALYGYDAPKTKKPPSRTCNCWPKWCFCCCCCGNRKHKKKTTKPKTEKKKLLFFKKEENQSPAYALGEIDEAAPGAENEKAGIVNQQKLEKKFGQSSVFATSTLLENGGTLKSASPASLLKEAIHVISCGYEDKTDWGKEIGWIYGSVTEDILTGFKMHCHGWRSIYCIPKRPAFKGSAPLNLSDRLHQVLRWALGSIEIFFSNHCPLWYGYGGGLKFLERFSYINSIVYPWTSIPLLAYCTLPAICLLTGKFITPELNNVASLWFMSLFICIFATSILEMRWSGVGIDDWWRNEQFWVIGGVSSHLFAVFQGLLKVIAGVDTSFTVTSKGGDDDEFSELYTFKWTTLLIPPTTLLLLNFIGVVAGVSNAINNGYESWGPLFGKLFFAFWVIVHLYPFLKGLVGRQNRTPTIVIVWSILLASIFSLLWVRIDPFLAKDDGPLLEECGLDCN

SEQ ID NO: 5337 - protein, 1081 aa, Zea mays
  VARIANT 675: note = Ancestral polymorphism is S, Derived polymorphism is F
MGWSPRPPPITRSTASLRLVPHFSHFRFSFHRAQESRGGGGSRRRTLRCSSAPDPLETRDDGPNGRAHCLTHCLLDASNCRCCGGTAPAAAAGAAEGRMAAATAADMVWVRVLEDGVFRFDASEAARAAAGPSLSFADPRRREAPHDGADMPAVVPVCEVAAGGSQKVVIKLPPGTSFYGTGEASGPLERTGKRVFTWNTDAWGFGPGTTSLYQSHPWVLAVLPDGKALGVLADTTRRCEIDLRQESTIKFSALSAYPVITFGPFNTPADVMTSLSHAIGTVSMPPKWSLGYHQCRWSYDSSEKVLKVVRTFREKDIPCDVVWMDIDYMDGFRCFTFDSIRFPDPISMVDDLHSIGCKAIWMLDPGIKKEEGYFVYDSGSKSDVWIQKADGSPFVGEVWPGDCVFPDYTSEKTRAWWASLVKDFISIGVDGIWNDMNEPAVFKTTTKTMPESNIHRGDADIGGVQNHSYYHNVYGMLMARSTYKGMEMGNAAKRPFVLTRAGFIGSQRYAATWTGDNLSNWEHLHMSLPMVLQLGLSGQPLSGPDIGGFAGNATPKLFGRWMGVGALFPFSRGHTETGSIDHEPWSFGKECEEVCRLALLRRYRLLPHIYTLFYHSHTKGIPVATPVFFADTQDPELRKVETSFLLGPLLVCASTLPNKGAHEYAHKLPKGIWLSFDFADSHPDLPVLYLQGGAILPVGLPIKHVSEASLEDDLSLIIALNENGKAEGVLFEDAGDGYAFTQGDYLLTYYIAELHSSVVTVKILKSEGSWKRPKRNLKINILLGGGAMISTDGVDGEVIHLTMPSESVVSSLVATSEFEHKKRMEMIQPIPDIEEPSGQEGAELSKIPVDLKSGDWFLKIVPWIGGRIISMAHIPSDSQWLHSRIEINGYEEYSGAEYRSAGCTEEYKVIRRHLEQSGEEESICMEGDIGGGLVLQRQISILKDNPKIVQIDSSIQARSVGAGSGGFSRLVCLRVHPTFTLLHPTEVVVAFTAINGSKQEISPEAGEITFEGDLKPNGEWMLVDKCVGLSLVNRFNPREVSKCFVHWGTGDVNMELWSEERPVSNETPLRICHQYEVQQTT

SEQ ID NO: 5338 - protein, 586 aa, Zea mays
  VARIANT 3: note = Ancestral polymorphism is H, Derived polymorphism is Q
MVHLAVPWLCLASWAALLPALASGNVGAAAPILRADYIKLNFSTASATPDKYKSFIASVRAGLVSKAGGNSSGIPVLVDEDDPLALESFLNITLVNKAGRSVSLKMDVSRAYFVAYVAGQRSCLLKRSGRTFSSAICYYGGPWGTSSAPVTRPAAAAGDGEDPGVAAWRARDLDEAISSLFLFPTGNATEEELRRGVAACDMMVASAATFPYVERRMSAGMWDSNGVANDPSLRGLQARWPWLSAAVQQSYQGAFAAPVPVQRSNGKWMRVDNVRSAVPLVSFLEHGSCNRTRGAPALLIRSVVQEPDEDMQPGGGARATTAACGLPAEPTVRLVGPEGRCVDVPYGYYYNGNQVQLWSCKSTSAVNQLWTLKRDGTIRSNGKCLTSSGDAAGARAVVDDCPRFPTGRVVWEVRVDGTVALKWSRGLVLAVTSSTLFAGLTVRQDDRGTGQSWTPTNVTAPLDAAIVGFRDLCLQADYAGSVSVAACRDGVQWSLYPDGSVRPPAWLLLQWQCLAADASGGVTVKLCDGAGSSCERWVFRNDGTIFNTGTGMVLDARPSAGANATASQVIVSPATGSPTQQWTLML

SEQ ID NO: 5339 - protein, 60 aa, Zea mays
  VARIANT 2: note = Ancestral polymorphism is C, Derived polymorphism is S
  VARIANT 11: note = Ancestral polymorphism is V, Derived polymorphism is A
  VARIANT 12: note = Ancestral polymorphism is G, Derived polymorphism is C
  VARIANT 17: note = Ancestral polymorphism is H, Derived polymorphism is Q
  VARIANT 18: note = Ancestral polymorphism is R, Derived polymorphism is C
  VARIANT 31: note = Ancestral polymorphism is R, Derived polymorphism is H
  VARIANT 35: note = Ancestral polymorphism is R, Derived polymorphism is C
  VARIANT 37: note = Ancestral polymorphism is G, Derived polymorphism is D
  VARIANT 40: note = Ancestral polymorphism is E, Derived polymorphism is K
  VARIANT 43: note = Ancestral polymorphism is R, Derived polymorphism is M
  VARIANT 52: note = Ancestral polymorphism is D, Derived polymorphism is G
  VARIANT 57: note = Ancestral polymorphism is Y, Derived polymorphism is N
  VARIANT 59: note = Ancestral polymorphism is M, Derived polymorphism is I
MSWRSTGSIMVGFSGCHRYEAHQRLGLPTIHYKVRRGTKETLRRVHLTFSLDSILNYLMH

SEQ ID NO: 5340 - protein, 470 aa, Zea mays
  VARIANT 82: note = Ancestral polymorphism is T, Derived polymorphism is M
MAGAQEAGDAPGHQPCARRVLVFPLPFQGHIDPMLHLAGVLHARGLAVTVLHTRFNALDPARHPEFQFVAVPDGTPADVAAMGRIIDIILAMNAAMEASPAVGEALRASAVAGQDGRPRASCLFVDANLLAVHRAARALGLPTLVLRTGSAACLGCFLAYPMLHEKGYLPPQESQLCTPVPELPPLRVKDLIYSKHSDHELMRKVLARGSETVRDCSGVVINTAEALEAAELGRLRDELVHLPVVLAAGPLHKLSSSRGAGSSLLAPDHSCIEWLDAQRPGSVLYVSFGSLAAMDSSELREVAWGLAECGHPFLWVVRPNMVRGCDVDSARQLPDGFEDAVKGRGVVVRWAPQQEVLAHRAVGGFWSHCGWNSTLEAVSEGVPMICRPDAVDQMMNTRYLQDVWGVGFELQGELERGKIKDAVRKLMGEREGAEMRRAAQELCAKLAGCLESTGSSQVAIDKLVSYILSL

SEQ ID NO: 5341 - protein, 203 aa, Zea mays
  VARIANT 152..203: note = Derived polymorphism lacks residues 152 to 203
  VARIANT 183: note = Ancestral polymorphism is T, Derived polymorphism is M
MPRLSLTVTDDVAAMPFALRLGGSPALRPGSQSPSWLRFGGRAGARKALFCSAEDARRCGTDDDAEAEEGRRRGGSRVPSDRRIRDRNAAAAVGDLQPGDNVQITGPVGKEMLMPKDPNATIIMLATGTVQRSRLALPGCSNEQLVALQGGQYIDLYKEEFRKMKERAPENFRVDYAVSREQTNAAGERMYIQTRMAEYKEEL

SEQ ID NO: 5342 - protein, 434 aa, Zea mays
  VARIANT 320: note = Ancestral polymorphism is P, Derived polymorphism is T
MAGPSGASSSSRGAGVVVDRFYSPPHVRRQQQEEQLQRLKGLAQGQRPSSPAAGTLTPRAAKQKTPPAEMPVPVKESERRADASSKPVSAPAYTAKAAATADGVTTPPPSPAGLDEAGNLDRFLSSTTPSVPVHYLPKTSMRGWRMGDVTNSRPYFCLGDLWEAFKEWSFYGAGVPLVLSGGESVIQYYVPYLSAIQLYADPSKFQSKIRHSWEESDGESMDTSSEGSSETDVNRLRSSTVETLCRLEGGFQRDGDEMHSPSTRPIFEYLETDPPFGREPLTDKASLYFVSVLASKFPDLKTFSSCDLLPTSWMSVAWYPIYRIPTGPTLKDLDACFLTFHYLSTPTKDTDPSTPACPRFGGLNCNMDAAGKLTLPVFGLASYKLNSSIWSSNRPEEHQLVASLMQTADDWLRHRQVYHPDFRFFLTHYNTALR

SEQ ID NO: 5343 - protein, 165 aa, Zea mays
  VARIANT 151..165: note = Derived polymorphism lacks residues 151 to 165
  VARIANT 96: note = Ancestral polymorphism is P, Derived polymorphism is S
  VARIANT 40: note = Ancestral polymorphism is I, Derived polymorphism is V
  VARIANT 8: note = Ancestral polymorphism is S, Derived polymorphism is T
  VARIANT 2: note = Ancestral polymorphism is E, Derived polymorphism is Q
MESVLKMTRRTFDYICSLVKKDLTTKTYGFRNFRFGDKKVLGVEDQVAVALMKLTTGESLQNIGMWFGMNHSAISNITWWFIESVEECAICHLKWSSPEEMATIKTSFDKVYGLPNCCGAIDTTHILMCSSAQPNSKVWLDNENKNNMVLQAVVDPDLRFRDVVV

SEQ ID NO: 5344 - protein, 246 aa, Zea mays
  VARIANT 13: note = Ancestral polymorphism is L, Derived polymorphism is P
  VARIANT 14: note = Ancestral polymorphism is I, Derived polymorphism is T
MAMARSVAHLFFPILLISTAPAVRAITDAAGGPGYLQEACNKTLFPKVCMHALKDNPECQAETAVTPRRLAELLVYVSAEVGMTVAAFAHHELNAIKDDDVLYKCIDTCSEDIEEAVAHLSALSRDFSDARFLEVKSWLTSTLGGTATCEDACKDAPVSDIKNVCITKSFEFEKLLRVTLDLITEASGSMSAEVALPPSDASAPSGGYGSSAGAPAYGAPSPDAPAYGASVPAPAPTSGQSTASTA

SEQ ID NO: 5345 - protein, 253 aa, Zea mays
  VARIANT 28: note = Ancestral polymorphism is R, Derived polymorphism is H
  VARIANT 29: note = Ancestral polymorphism is G, Derived polymorphism is C
  VARIANT 30: note = Ancestral polymorphism is T, Derived polymorphism is I
  VARIANT 41: note = Ancestral polymorphism is G, Derived polymorphism is C
  VARIANT 43: note = Ancestral polymorphism is F, Derived polymorphism is I
  VARIANT 46: note = Ancestral polymorphism is I, Derived polymorphism is N
MVSPAPGCRDSGEDGGKAEWLIYAFVARGIAVLAEYTEFTGNFPAIAAQCLQRLPAGSSSASTGPDGRGGAPVRFSYACDGHTFNFLLHRGYAYCVVAKESVPKNVSVAFLERLKDDFMKRYGGGKADTALAKSLNKEYGPVIKQHIQYVLDHSQELDKTLKVQAQVSEVKNIMLNNIEKTLDRGEKLSELQDKTSDLHSQAQEFKKQGVKIRRKTWLQNVKIKLVILGILLLLVIIVWVSVCQGFDCTKHET

SEQ ID NO: 5346 - protein, 211 aa, Zea mays
  VARIANT 14: note = Ancestral polymorphism is Y, Derived polymorphism is D
MRGKVDECWDECCYNWGEWKYCLLCLGIVVAIVLIVVFVAAFGFVRHIDVSVDDASLTRFELATSPVTSLSYNLSVTLVIRNPNWAMSLKNTKPLEAQYKFDDQMFDRFQLADKGDKHPAGKTRVYHIAPPGTTSSVMLGNAGEAEFRKENATGTFQVEVAVAGEVRYTARYTKCKIQASCPLKLQLAPPGTAAVVFQKVTCKLAKAEKNC

SEQ ID NO: 5347 - protein, 355 aa, Zea mays
  VARIANT 38: note = Ancestral polymorphism is R, Derived polymorphism is Q
  VARIANT 40: note = Ancestral polymorphism is Y, Derived polymorphism is H
  VARIANT 43: note = Ancestral polymorphism is Q, Derived polymorphism is R
  VARIANT 78..355: note = Derived polymorphism lacks residues 78 to 355
  VARIANT 91: note = Ancestral polymorphism is T, Derived polymorphism is I
  VARIANT 175: note = Ancestral polymorphism is L, Derived polymorphism is P
  VARIANT 195: note = Ancestral polymorphism is S, Derived polymorphism is N
  VARIANT 227: note = Ancestral polymorphism is P, Derived polymorphism is T
  VARIANT 240..355: note = Derived polymorphism lacks residues 240 to 355
  VARIANT 259..355: note = Derived polymorphism lacks residues 259 to 355
  VARIANT 330..355: note = Derived polymorphism lacks residues 330 to 355
MEDGETEEAQRDAITARMRAGRGVDWPSTVSATKRRIRGYSVQRSKVLASTIFTVLIGVVSSYVLHGGQDILAPVCACFDAESMSVSLLSTVLFGVGSTADSPPNPWERSRAEGASGPAPFKPPSAGSTSDVVEASGTAKPDENVTVTESLHRSYHDGLEVRIECLSHHLKKVVLRGPTSFATLIYAAIFVVQNSNCHYHVLMIVAGGHVTHVWELGDFITSSEAHPGGFLFTKFASSSQTLFDLFPDSFGGRMKPYLQIGSSSWKQLARQVDLSARQVLGQLRHQLVIELPEACRRAAAAWRLQCQGRWCSGMTATIKLMQNEYFFRYRDDRNAAEIFRANGDINGLKSHCNSQ

SEQ ID NO: 5348 - protein, 636 aa, Zea mays
  VARIANT 140..636: note = Derived polymorphism lacks residues 140 to 636
  VARIANT 110: note = Ancestral polymorphism is G, Derived polymorphism is V
MEQELLQILRGLKSPRHLLQTHAQLLARGLSASPRLLPVLVSAAFSVSPSSPRQAAAAAILGAAGSGASTVAHNTLIERLAGIGGGGGGGGRGCSAADALAAYAAMRAAGVYPNGFTFTFLLRACESLRRLFLCRCVHGQIVRCGFGSDVVVQNALLNVYYKCSDPGDVGIARQVFDEMANRDVVSWNSIVGVYMSNGDAAGAMELFEAMPERNVVSWNTIVAAFTRAGDMVSARAVFDRMPIRDAISWNLMISGYATSGNVESAWSLFDIMDRKDVVSWTAMVSAYAKIGELDSARVLFDQMPDKNLVSWNAMITGYNHNLRYDDALCTFQQMMLEGRFMPDEATLVSVVSACAQLGSVEYCNWISSYISKSNTHITVALGNALVDMFAKCGDVGRAHLVFNKMKTRCTITWTTMISGFAYNGQFREALLVYNDMCREGVTLDDTVFVAALGACAHGGLLQEGWSIFNQMVEYCRIVPRMEHYGCIVDLLGRAGKLQEAVRFIESMPLKPGVVIWVTLLSSCITHGDAELSEYVSTKIVEMEPFNSSYQVLVSNCSALEGRWDSVMDARRTMRDCGVEKTPGSSLIQVGNEVHEFLAKDTRHKKRKEVYKTLDGLIALIRHTDHTPLDKLLQPLE

SEQ ID NO: 5349 - protein, 242 aa, Zea mays
  VARIANT 53: note = Ancestral polymorphism is R, Derived polymorphism is H
  VARIANT 83: note = Ancestral polymorphism is T, Derived polymorphism is M
  VARIANT 155: note = Ancestral polymorphism is P, Derived polymorphism is L
MSLSVGGARTSLLPSSFTASSSRPRFLALPLHRRSHGSLTSLPAACRRRLRVRMARTESTGVTIGFRAPDFELPEPLTGKLWTLDDFEGNSALLVMFICNHCPFVKHLKKDISKLASFYVEKGLGAVAISSNSVRTHPQDGPDRMAEEAELFKYPFPYLYDESQEVAKAFGAVCTPEFYLFKKDGRRPFELFYHGQFDDSRPSNNVPVTGRDLSRAIDCALSGQELPFVQKPSVGCSIKWHP

SEQ ID NO: 5350 - protein, 340 aa, Zea mays
  VARIANT 95: note = Ancestral polymorphism is R, Derived polymorphism is S
MSNAADVEAGAQARAAPATTGIKPPPGRYNNMTSNGPYTPPSPFYYDPAAAHGRHHWSWLVPLVVIANVLMFVLVMFYNNCPRSGGDCVGRGFLRRFSFQPLKENPLLGPTAATLQRYGALDWYKVVHGNQAWRLESCTWLHAGLIHLLANMISLIFIGVRLEQQFGFWKVGLVYLVSGFGGSVLSVFFIRKGVSVGASGALFGLLGAMLSELITNWSIYTNRFAAMLNLIIIAAINLALGILPHVDNFAHIGGFATGFLLGFVLLIQPQFGWLEQPFGAKTKSKYKAYQIILLLAALVLLAAGFAVGLVMVFRGENGNDHCSWCHYLTCVPTSSWKCDN

SEQ ID NO: 5351 - protein, 435 aa, Zea mays
  VARIANT 352..435: note = Derived polymorphism lacks residues 352 to 435
  VARIANT 284..435: note = Derived polymorphism lacks residues 284 to 435
  VARIANT 262..435: note = Derived polymorphism lacks residues 262 to 435
  VARIANT 126..435: note = Derived polymorphism lacks residues 126 to 435
  VARIANT 115..435: note = Derived polymorphism lacks residues 115 to 435
  VARIANT 81: note = Ancestral polymorphism is G, Derived polymorphism is S
  VARIANT 19..435: note = Derived polymorphism lacks residues 19 to 435
  VARIANT 8..435: note = Derived polymorphism lacks residues 8 to 435
MEQEYIIQHQQIDPAYTTQQSSITVQRMRCGGDGGIPVGVEQSGRAEVLLRVPPVGRAGGGAAGAEDALVHAVELGPVGLGLRDLLALLRGMVLALEPWLDALVLAIEVVHVHHQVLDDEHVGQRRDRGRGGGAGDLGEAGEAVVVVDVHSLDSSSMTATNAKSNEMFQKTKGSVWIPTAGEPSAPKDCVTRWTWIRGRYDSGLHLGMDLAREILEKNTNTIICEIETWTPHQNNQPHGDAYLEGEILGELSSANSLVVAIWRSISLFFKHCINTKPARVSENQKGKGTPYPDPDLRRHNTKPSRRWSGGQGRHQRGAYDGGGAEDGENARRIHVPSKCLLKILLLRPSWGQGHGEREWRAGQATAGSTRERSGGAPSTGASTSIGLRQLGFQWEGEGAIFLGGGCITGAWTGVGEAAALSGRRRRARWRRAGRE

SEQ ID NO: 5352 - protein, 141 aa, Zea mays
  VARIANT 46..141: note = Derived polymorphism lacks residues 46 to 141
MTVRGALLGLASYDSDDDDDADTDSKDKMPISNLSSKDNVGAINTEGDKSTLGKRNGNHNEQNSSLGSAPSGEDLKSNNQNFQRSANAEPEQMHIRDTENGEFRFKAKTCTEPNGAFDKMDEKANTYAEVYIQNRKNLFWQ

SEQ ID NO: 5353 - protein, 113 aa, Zea mays
  VARIANT 2: note = Ancestral polymorphism is S, Derived polymorphism is F
  VARIANT 63: note = Ancestral polymorphism is E, Derived polymorphism is K
  VARIANT 70..113: note = Derived polymorphism lacks residues 70 to 113
MSGLLHGLPTVSLAWQGLKARNKKQRYEKISERKIATSTEALCCGYPTGFASYFHYYSSLRFEDAPDYQYLKRLFRDLFIREDIEGAIEDIEGPLKDIEGTLIATEGALMAIE

SEQ ID NO: 5354 - protein, 188 aa, Zea mays
  VARIANT 94: note = Ancestral polymorphism is A, Derived polymorphism is S
  VARIANT 77: note = Ancestral polymorphism is A, Derived polymorphism is V
  VARIANT 22: note = Ancestral polymorphism is F, Derived polymorphism is I
MATTGTCMGSIIPPLVLLMTVFSAAPRVSGEPPSVVPSACKAATAAGGGTFTEDFCLSALDGKSAGAADYADMALVAVDLATANATATEAKIDALLGSSSGSGAASSEGLRSCRALYGAVVRQYQPECRAAVAGGRYGDAEACLGRTAQAAAACERWFVQRKVASPVAPEDDALAKLADLAIALASVA

SEQ ID NO: 5355 - protein, 223 aa, Zea mays
  VARIANT 1: note = Ancestral polymorphism is M, Derived polymorphism is I
MARRPASWEQGGDEYDYLFKVVLIGDSGVGKSNLLSRFTKNTFALDSKSTIGVEFATRTLQVENKIIKAQIWDTAGQERYRAITSAYYRGAVGALLVYDVTKVMTFENVKRWLKELRDHADSNIVVMLIGNKTDLRHLRSVAVEDAASFAESEGLFFIETSALDATNVEKAFHTVLAEIYRIISKKPLSSEESGLGSGNLREGQSIQVSATNSGALTSRCCSS

SEQ ID NO: 5356 - protein, 567 aa, Zea mays
  VARIANT 228..567: note = Derived polymorphism lacks residues 228 to 567
MLDLAAACADLLVESGERSAFLSIFSVQERPLTPVYLRIGGGFPFRWVGLLVLGVRKRNPFAMIWDWGSIGAPKPPNGSFILFVMGGGVLTLLGMLYIFTVCTTLHHKRGSINDNQNLSNVMDGQGTKHRILMVSDFFFPNFGGVESHIYYLSQCLLKLGHKVVVMTHAYGNRSGVRYVTNGLKVYYVPWRPFLMQNTLPTLFLTFPIVRTIIIREKISVVHGHQAFSTLCHEALMHARTMGYKVVFTDHSLYGFADAGSIHMNKVLQFTLADIDQAICVSHTSKENTVLRSGISPEKVFMVPNAVDTAMFTPSPKRLNCDEIVIVVVSRLVYRKGADLLVEVIPEVCRLFPKVRFIVGGDGPKRVRLEEMREKFSLQDRVEMLGAVPHAQVRSVLISGHIFLNSSLTEAFCIAILEAASCGLLTVSTRVGGVPEVLPDDMIVLAEPAPGDMVRAVKKAIDMLPGIDPQIMHLRMKELYSWDDVAKRTEIVYDRAMESPTTNLLDRLPRYLTCGSWAGKLFCLVMIINYLLWRLLEFLQPAVGIEEVPDIGPLHAHLGSRNDEAQEK

SEQ ID NO: 5357 - protein, 494 aa, Zea mays
  VARIANT 401: note = Ancestral polymorphism is F, Derived polymorphism is S
MDVEYDVIVLGTGLKECILSGLLSVDRLKVLHMDRNDYYGGDSTSLNLNQLWKRFKGEETPPAHIGASRDYNVDMVPKFMMANGTLVRVLIHTGVTKYMSFKAVDGSYVFNKGKIHKVPSTDMEALKSPLMGLFEKRRAGKFFLYVQDYKENDPSTHKGYNLTKLTTKELISWDSVYSNSYVLISFFRKYGLDDNTIDFIGHAVALHRDDSYLTEPAIDTVKRMKASLYSDILKISQHNSKLYAESVARFQGGSPYIYPLYGLGELPQGFARLSAVYGGTYMLSKPECKVEFDDEGKVCGVTSEGETAKCKKVVCDPSYLPDKVKKIGKVFRAIAIMSHPIPNTAESHSVQIILPQKQLGRRSDMQVFLISSPRFIHYLLVYVFCCSYSHNVASKGKFIAFVSAQAETDNPEKELKPGIDLLGKVDELFIDIYDRYEPTNDSSADNCFISTSYDATTHFESTVMDVLSLYTKITGKTVDLSVDLSAASAAEDDM

SEQ ID NO: 5358 - protein, 323 aa, Zea mays
  VARIANT 259..323: note = Derived polymorphism lacks residues 259 to 323
  VARIANT 244: note = Ancestral polymorphism is Y, Derived polymorphism is S
  VARIANT 241: note = Ancestral polymorphism is W, Derived polymorphism is C
  VARIANT 158..323: note = Derived polymorphism lacks residues 158 to 323
  VARIANT 144..323: note = Derived polymorphism lacks residues 144 to 323
  VARIANT 99..323: note = Derived polymorphism lacks residues 99 to 323
MNYYITGCRYVLMPWKFNGCHALFVIDHVKKHVTFIDFTPTQDWCKHMPYKRFAEAIIMASKKYKIAYSKKRSGWAEDIFKWEHTIQTGVPVDLRGKLQTEKAPAALGPNSLAIKANTVQLTGHSIFLQQQIDVEIALDQSRVLYDMDSDDEEWISSWRKSLVRDNTTTLQFAEDLFERVMDKLEKFAYSHNCNGLSIDQMKELGTDDVPLHTIEVIHAYWQDKRQKRGMPLIRHFQSAMWKIYEQQLHEWESKVCRMQSSSNGYQEKKLPPKPALFAFCLGPRGLHVPYKGPKQRSHKKLMSTGCHSFSREHDGFYRQAILP

SEQ ID NO: 5359 - protein, 538 aa, Zea mays
  VARIANT 37: note = Ancestral polymorphism is R, Derived polymorphism is W
  VARIANT 379: note = Ancestral polymorphism is E, Derived polymorphism is G
MMMGACHGSQDLNPIGIDSGGVSCSGWGSMMKQIFGRRKASKTAGKECGGRTFNQLLSGSGFADLSGQLPILSSTGDIYGNGNRTGFQDSRINDTLFSSNFRLLPSFKDVPNTEKQNLLIKKLNMCCTLFDFEDAAKNIKEKEIKTLMLLEIDEYVRTANAKFPEIIVEAITKMISVNLFRTLISPPREKKVLQAFDLEEDEPLMDPAWPHLYHVYELLLTFVQSPENDAKLAKKYIDHSFILRLLELFDSEDARERDRLKTVLHRIYGKFMVYRPFIRKAINNIFYQFIYETEKHNGIAELLEIFGSIINGFALPLKEEHKLFLGRTLIPLHKPRCTSMYHRQLSYCITQFVEKDCKLADTVIRGLIKYWPITNSTKEVLFLGELEEVLDATQPAEFQKCMVPLSHQIAHCLNSSHFQVAERVLFFWNNIHFENFVKQNSKVILPIILPALEKNINGHWNQVVQSLSLNVRKLLSDRDPQMFTECLRKYEEDKGREKEFKLKQELAWKRLDEIASAKVTSGEAVLVSPTLPRQPSFL

SEQ ID NO: 5360 - protein, 156 aa, Zea mays
  VARIANT 92: note = Ancestral polymorphism is C, Derived polymorphism is S
MDTVAPRLSRSSTRYGPISSSAASFSGPVRKWRKAWVPLTGTGTGTAGSGGGSSRGDNKVVLFRWTPVNGCSGGGGGTDGGMELAAAGASTCRRRYVPAAGEAQSTTKKGTSSELNLNLELEDPDDDTDADMSTDEPRDVEDNSARLESRLKRKAF

SEQ ID NO: 5361 - protein, 226 aa, Zea mays
  VARIANT 10: note = Ancestral polymorphism is L, Derived polymorphism is P
MSRGGSHGELGQRIDYVFKVVLIGDSAVGKSQLLARFARNQFNLDSKATIGVEFQTRTLNIDARNVKAQIWDTAGQERYRAVTSAYYRGAVGAMLVYDITKRQSFDHVARWLEELRGHADKNIVIMLMGNKSDLGTLRAVPIEDAKEFAERENLFFMETSALEAINVENAFMTVLTEIYRTVSKKNLVANEEPDSSGNSSLLKGTKIVVPGQEPPSTLKATCCMSS

SEQ ID NO: 5362 - protein, 231 aa, Zea mays
  VARIANT 14..231: note = Derived polymorphism lacks residues 14 to 231
  VARIANT 1: note = Ancestral polymorphism is V, Derived polymorphism is M
MKPTARPRPRCSLQIPVLSHDWLLLDYICTQGDLALIDFIKEIPCEPRVEVVLIDDAFVERKWMECLFQPNAYLGDEVIDCYINLIKAQKHLKCRSGGRVHIENAFQFNFLKRDGDVEIKTEELYPNKYMTQICSAERRVLLYLDHDMVFIPINIRETHWYLAVIHARNMEIQVLDSLGTSQDRKDLTDSIKGLQRQIDMISQRKELKDHRWPDLQVASWPLREIDMGYAK

SEQ ID NO: 5363 - protein, 416 aa, Zea mays
  VARIANT 237: note = Ancestral polymorphism is T, Derived polymorphism is A
  VARIANT 309: note = Ancestral polymorphism is G, Derived polymorphism is S
MLMPSDHPEPPALAPLDLEAHPAPPPAKGGGGKMQRLLRSAFKRGEETDQLSRSASESSSSAGSIGRTPSGRRAGRRGGDVDGDRSSRESFEAQGSKNGKLLSALRDAKIGHAYEPFPWEKKMRELLPVPEASSFLSLLLLPKATDGSNTRYNALEDTLARADAWLLSSQASGVPVVFMNVQTEALLTKISGETAVSTVNMASLSDLAGMANASLYGFEDYHGVDIGVVRAVRLWYTAAAGEAALELRLCPGDTRLGFAISRTEEGFIYVSSVAEEGTPGVASARSGLLELHRAARGASKLLVVSRVGGEKVLPWMVSTAGNVKCFDTVSLSQKLSLHRHALRPITLHFLMWDRDLAAALAKDADVEKPPPVVLLPSVAAADELDGDSSGGPGLDGKDSRDSSFRFQNIDLPDSWL

SEQ ID NO: 5364 - protein, 1758 aa, Zea mays
  VARIANT 597..1758: note = Derived polymorphism lacks residues 597 to 1758
MAGELGQQTVELGAVVRRAAEESYLALRELVEKSQAEAEGKGIGAGANGSWQRSDTEKKIDLLKFITRTRQRMLRLHVLAKWCQQVPLVHYCQQLGSTLHSHETCFTQTADSLFYMHECLQQARAPMFDVPSAIEVMLTGGYQRLPRCIEEIGSQHKLSPDEEKRALRKLDASVRYRVLVTPRPKEVSNVSVTDGIAVFRVDGEFKILLTLGYRGNVDLWRILHMELLVGEKKGPIKLDESRRFALGDDIERRMAASENPFAVLYAILHEFCISLAMDTIIKQANVLRQGRWKDAIRSELISDSATVQTGNTPLMQLVQDAEFDSSGFKIPGLKVNYWLDEKSTSTAEPDSSPFIKIEAGLDMQIKCQHSSFILDPFTDKEASLSLDLSCIDVEQLILRAVSCNRHTRLLNIQRQLCKNVQIFQSPKDVVLTRDVAAAKDPMMNAEKGFSDCFGNEVLQVRACGQAYVSLGINIRSGRFLLQSPENILPRAALMDCEEALNKGSTSATEVFSSLRTRSILHLLAATGSFFGLKVYQQSQGTLKIPKTLLHGSDLMVMGFPHCANAYYLLMQLDKDFRPVFHLLETQCDANGNTNASGDVKEAIRYNKINIGQMQILKNEMNENPFDVKLQALQSLVDSADMMESDLPVQNAIEPLPLLPACSPSFSSIVDEVFEYERGSTAAQNRCLPVDIQGINARVVSPMHDGCLSYTQANNNMNVHPNVSLNSYFPSNFRHLQGTNTFSSNPVMSMTKLSGSNSNHDLCSLSSPYDYDIAGANKSLQLVPSSNDNSNQIPAQSSHSGNLGNATPGHLIGSSTTTGGLGKLITAGSDGASRKHYLSDFLSSIPSLRGLQPSEPRKRRKKTESVQSLLPLQAHSSNLQSRGSLTYGDVLAERNNCVPATIYASVLLHVIRHCSLCIKHAQLTAQMDSLAIPYVEEVGLRRPSSNLWLRLPFAQDDSWNHICLRLGKAGSMSWDVRINDPHFRELWELNGGSTKTQWGVGIRIANSSEMDSHISFDSSGVVLTYNTVEADSVQKLVSDLRRLSNARSFALGMRRLIGVKFQDKLDDNQLTMEVKSQSVNKGNSDAADKLSEQMRKTFRIEAVGLMSLWFSYGTMPMVHIVVEWEIAKAGCTMHVSPDQLWPHTKFLEDFVNGGEVASFLDCIRLTAGPLLALGGAIRPARMPVAVSSGYSSMPKQPNIPTQGPLVNGSSSTIHHAPGPSNAASAHLGSHNLHAAAMLSAVGRGGPGLVPSSLLPFDVSVVLRGPYWIRIIYRKKFSVDMRCFAGDQVWLQPATPPKGGPSVGGSLPCPQFRPFIMEHVAQGLNALEPNFMNATQASGHLNNNAGVPQTAPSANRLNATPGVSMVRPTSGVANHVAASLSRAGNAMLASSALASGISGTSVRLTAGAGLPVHMKGELNTAFIGLGDDGGYGGGWVPLAALKKVLRGILKYLGVLWLFAQLPELLKEILGSILKDNEGALLNLDQEQPALRFYVGGYVFAVSVHRVQLLLQVLSVKRFHHQQQQQQAQSNAQEELAAVEINEICDYFSRRVASEPYDASRVASFITLLTLPILVLREFLKLITWKKGLSPVHGDIATAQRARIELCLENHSGSASSDNTENSSLAKSNIHHDRAHSSVEFALTFVLDHALIPHMNVAGGAAWLPYCVSVKLRYSFGDNNHIAFLAMNGSHGGRACWLQFEEWERCKQKVSRAVETVNGSGVAGEVGQGRLRMVAEMIQKQLQLCLQQLRDDPLSAGSTAS

SEQ ID NO: 5365 - protein, 303 aa, Zea mays
  VARIANT 4: note = Ancestral polymorphism is P, Derived polymorphism is R
MVTRRLFARLYRHCAGAAAASSAAGRHRGALAAAAVEQFAGSSLPVGVPNILNHHFRYSTSIFQKIGFSSVSPQQSDDEVNELKDHERALDGSSEDCPSGSIEGLDLSRDDLVKLVREKDELLKSKDGEIKDMKDKVLRSYAEMENIIARTKRESENSKKYAVQNFSKSLLDVADNLARASSVVKESFSKIDTSKDSAGAVPLLKTLLEGVDMTEKQLAEVFKKFGVEKFDPLNEEFDPNRHCAVFQIPDPSKPPGTVASVVKVGYMLHDRVLRPAEVGVTATEGGAHATEEAEKPEEKTARD

SEQ ID NO: 5366 - protein, 360 aa, Zea mays
  VARIANT 301..360: note = Derived polymorphism lacks residues 301 to 360
  VARIANT 271..360: note = Derived polymorphism lacks residues 271 to 360
  VARIANT 175..360: note = Derived polymorphism lacks residues 175 to 360
MSIAKAIAIVMDRNPQLRQEGIAHEVLQWYLCRMEGWFATDADSISLQGCDQEVLLPGGHGLMVRGYRPVINTLARGLDIRLNHKVLEIVRHRNKVEVTVSSGQTSVADTAVVTVPSPWKKGRAGKKGSSSCGYEDKTDWGTEIGWIYCSVTEDVLTGFKMHARGWRSIYCMPKRPAFKGSAPINLSDRLNQVLRWALGSIEILFSRHCPIWYGYGGRLKFLERFAYINTTIYPLTSIPLLLYCILPAVCLLTGNFIIPKISNLESVWFISLFISIFATGILEMRWSGVGIDEWWRNEQFWVIGEGDFAELYMFKWTTLLIPPTTILIINLVGVVAGISYAINSGYQSWGPLFGKLFFAF

SEQ ID NO: 5367 - protein, 1142 aa, Zea mays
  VARIANT 216..1142: note = Derived polymorphism lacks residues 216 to 1142
  VARIANT 235..1142: note = Derived polymorphism lacks residues 235 to 1142
  VARIANT 272..1142: note = Derived polymorphism lacks residues 272 to 1142
MDAASMLELYRRDRRRLLSFLLSAGGGGGRALDLSRVDLDAVSADYALECVASGAHFNASEATRRYFDERRYPIMIGSSSGNSYFLLSRPMPSDSSPKEAAPSIGPQAPVQDNSSSTGQPTEPRDFFRDALSTSGIGYDTEDDKLADISPQQVNKVDILSLGLPRLTTELSDDDIRETAYEVLLASLFVSGKVHFSEEKREKKHKFLKGRRTKTEGSNPSPQVEDGYAHILDLTRVQMEISESMDILTKRALRHISLKTVKETLDVPRISLQLLSSVGKLDFPTERLRGQWQKRQANVLEELLLFSASLEYDTSNTLRIVLSKLKSTEDWVVTVPEGRVEVLTIIERYNTKLCSLTKKFDIKDETYHWTHNYHFNFRLYEKLLCSVFDILEDGQLVEEADEILEITKLTWPILGVTEKLHHIFYAWVLFQKFSQTGEILLLKHASLQIREFRLYHDVKEIELYTNSFICSVDAYGGNKVLSLVDSVLLKINVWCRRQLGNYHAHYSKNNYSIFEATLNLVLLLVTNSSEDDFEETMFIESPVGSTPELKLIHLLIVRSIHAAYKQALISSNGRSDSEFKHPLTILANELKAVAEKECTDFSPILNKHYPEAQRVALIFLHMLYGKQLELFLERTDNSENSKEILAASNNFELFIAQKLYSVYGETVGSSFSNYLKPYMVGHFSSPLVLQWLHAQHENVLEWTKRTIEIEDWTPLSAHEKQARSVVEVFRIVEETVDQFFNTSLPLEIVHLRSLLIGITRSLEVYLLHMENQQVPGSTLLPSAPVLTRYAESMNPFAKRKLIEPTVPEEKVAMKLNNLAVPKLCVKLNTLQFIRDQLDAIEEGVKQSWVSVLSAVRLLDYLSCMASGRALSESLTSSDESVDELFTIFDDVRMTAVKITDVILNFIGTRAVFWDMRDSFIFSLYRDSVEGARMQIFIPTIDQVLDQVCDLIVDVLRDQVVLRIFQACMDGLIWVLLDGGPSRAFFETDVDLMQQDLAILKDLFIAEGQGLPIDIVEKEARQTHQILDLYMLKADAVIDMLINASDQMPHDPEATNARRRYVHDANTLLRVLCHKKDKIASTFLRIQYHLPRCSDYDDVPVKDVSSKVPIFSDMLKRGTSFNWSETGQQSFRIMKKKLQEATWQ

SEQ ID NO: 5368 - protein, 253 aa, Zea mays
  VARIANT 154: note = Ancestral polymorphism is G, Derived polymorphism is V
MSSTQPIGHSYRKMRAPAPPVPALLSRCSSPPSSAPLRLLTSSRTPAAFRPPPAVARSVSVSVDAPAAATEPAVLGAPSSMPRRRLILLRHGESTAGGRSTRDHDRPLSKAGRADAISVSNKLQQMGWIPELILCSDAMRTKETLKILQEHVQGLSEAVVHFIPSFYSIAAMDGQTAEHLQKAICEYSSDEILTVMCMGHNKGWEEAASMFSGDSVALETCNAALLEAAGKSWVEAFSVAGLGGWKLHGIVKP

SEQ ID NO: 5369 - protein, 207 aa, Zea mays
  VARIANT 66: note = Ancestral polymorphism is A, Derived polymorphism is T
  VARIANT 41: note = Ancestral polymorphism is L, Derived polymorphism is H
MATRKPRDAANKLCLAIPPVKGALAVLPSVCKLNTIPVMLLINDIMLSGCTRCCIRRQEELSKLTAPGLVAQKKAFFEEYYKRARHLKAQGVLHQAGAAVEENDSSQADELPAAMSEPSTDVESKCQDAHEHGQQACQTFRRRVLALDSSDQEMVLNHGSVSFGRFAAESLSWERRSVFEHNRRQEELSKLKAPGLVAQKKAFFEEY

SEQ ID NO: 5370 - protein, 1203 aa, Zea mays
  VARIANT 291..1203: note = Derived polymorphism lacks residues 291 to 1203
MATGEDEKAAGRVALHRLFVFADRTDAALMAVGAVAAVANGMVQPIMAFIFGDVIDAFGSGATDGVVRRVVQVSCWTIAGERQAARIRAMYLKAILRQDIAFFDMEMSAGQAVERMAGDTFLIQDAIGEKVGKAIQLLSTFIGGFIIAFTRGWLLALVMLSSVPPIAIAGAIVSKLMTGLSTRMQANYSDAGNVVEQTLGAIRTVVSFNGENQAITKYNMFIRKAYRSSLQEGAVNALGFGSVIAILFSSYGLAVWYGSKLIVERGYNGGMVISVIMSVMIGAMSLGQATRSVTAFAEGQGAAHRMFKIIERKPDIDIDDNTGIILEDVKGDVQLKDVYFSYPTRPEHLIFDGFSLQVQSGTTMALVGDSGSGKSTVISLVERFYDPQAGEVLIDGVDIRGMKLGWMRGKIGLVNQEPVLFSTTIRENIAYGTEKPTLEDINRAIQLANAAIFIDKLPNGLDTMVGEHGTQLSGGQKQRIAIARAIIKNPKILLLDEATSALDMESERVVQEALVRIMVERTTIVVAHRLSTVRNADVISVLQHGKMVEQGSHVDLMKLPGGAYTQLIRLHETQQEAEDVHPDMEISRRSTSKGSSSFGQSIPAPLGSPDPTEVSGAPDTEEGATDRVKVGRSQKKASIARLFKLNKPETLVLALGSIAAVAHGTIFPIYGTLISTAIKVFYEPPQELLKGSRFWAGMFALLGACAFVLIPVQYFLFGLAGGKLVERIFIYLLTDTISLQTCVSGSICARLSTDALNVKRLVGDNLALNVQTASTIMSGFTIAMVANWKLALVITVVIPFVAFQAYAQMLFLKGLNRNAKLRYEEASQVATDAVGGIRTVASFCAESKVMDAYENKCESPRRQGMKEGVVGGLGFGFSFVVFYLTYALCFYVGARTVASQVFFVLALATSGVSQTSAAGADSAKANDSAVSIFAILDRESKIDYSSEEGVTIASVRGDVDFQKVCFKYPLRPNVQIFKDFSLRIPSGKTVALVGESGSGKSTVIALLERFYDPESGKIFIDGVELGTLKVSWLRQQAGLVAQEPVLFNDTIRANIAYGKQGGVVSEEEVVAAAEAANAHGFIAALPDGYDTVVGERGSRLSGGQKQRVAIARAVVKDPRLLLLDEATSALDVESERVVQEALDRVMVGRTTVVVAHRLSTIRGADVIAVLKDGAVLEKGRHEELMQVKDGAYASLLELSSSSA

SEQ ID NO: 5371 - protein, 168 aa, Zea mays
  VARIANT 4: note = Ancestral polymorphism is R, Derived polymorphism is W
  VARIANT 5: note = Ancestral polymorphism is R, Derived polymorphism is Q
  VARIANT 18: note = Ancestral polymorphism is A, Derived polymorphism is V
  VARIANT 27: note = Ancestral polymorphism is N, Derived polymorphism is D
  VARIANT 28: note = Ancestral polymorphism is V, Derived polymorphism is M
  VARIANT 138..168: note = Derived polymorphism lacks residues 138 to 168
MAPRRPRQLLRLVAGVQALGLAVLHLNVATAPDATTLYTLSRQQWRSTHSSASFPGSAQERLDFLYESGLAVGKSSDGFQALQQSAPGAAAASTSAQESAADSSKAATPGALFEDKPQSANDTWRKLHSDPLLLIRQRGQDAISRIKNNPIKMAEIKKSVKHAYRGVW

SEQ ID NO: 5372 - protein, 362 aa, Zea mays
  VARIANT 47..362: note = Derived polymorphism lacks residues 47 to 362
MLVCAAATTPFASSPKSPPRSTSGHIPSRSRHHAANGRAPRTSMPPQPYIASKAIELSLDSSPIAAVGYSIIAFRGFDSSTRPFSTAIKYVSTPQIRYTCVCLILQHLDSPENKSAMWEFSGANMKKKQKRATKLNLYISGLIILNCVFTSLRFVICQAHCLYSYRFYIQVQSLSTKYDERCKIVGDVASNLTMDEATFRDSQEHRLEIYYTIIRPQKIVYIFREVQQCTLLSKTECSEECSYALSHQDTTLDRTLKNDGSAKKGTIIVWEIFALKHKARHLVQSRLLQSPVAVVAVASATTAYAVITTTDEKPRDIVVTDDFDIKRTQPTSNSKKIVAETDVLTGQNGKLATRLAEVLDEN

SEQ ID NO: 5373 - protein, 303 aa, Zea mays
  VARIANT 25: note = Ancestral polymorphism is E, Derived polymorphism is K
  VARIANT 110..303: note = Derived polymorphism lacks residues 110 to 303
MRNGGSLPLLKSLDMSFNQINTLPEEIGLATTLVKDSPGTADPCKVAFLRKGDSVVITQFYTKLEEKHKALEVEKDEAEARKKEDHDVALKQLRKSLVIRAKPMPCFYQEGPLPNAELKKEEHDVALKQLRKSLVIRAKPMPSFYQEGPLPNAELKKVVQVRTVQKIPVATLSSSKFLTGKPGDTDAEAKLNPGVSTLSNSQHVHLNRIRYFLFCSLYIYYSHMKNLKVVQVRTVQKIPVATLSSSKFLTGKPGDTDAGAKLNPGVSTLSNSQHVQPTNVTTNLKDQPCKSTGGTGPKLLTVK

SEQ ID NO: 5374 - protein, 696 aa, Zea mays
  VARIANT 192..696: note = Derived polymorphism lacks residues 192 to 696
MEGCQLLVGCRMEMEEEAFFDSREELTASPAPSPGPALPWSGSLDSVCQRRERFMRSMGLECCPAPLQADAVATVGDVDKEEEAVPEFGRSWSQSDENDCSMSSWSTEETKSLEDGVSDDNSVSGSSRDDASSKVSRSFSSLSFIQRLMSRSGKLSGVPKAVERRRNGWLRRLGLRSGILDHGGDEASTSSSESEQNRGGRYERVKVRSYRKRSKELSAVYQGQVIKGHDGAILAMKFSPDGQFLATGGEDGVVRVWGVAQSEDCKIPMDDPSCVYLKAHRQSGLGPVDADNEKKCKVKGVKQSADSACVVIPTVVFQISKQPLHEFRGHSGDVLSLSWSNNKHLLSASTDKSVRLWEIGSANCITVFPHSNFVTCVQLNPTNENQFISGSIDGKIRVWDIPRCSVIDWVDIRDIITAVCYRPDGKGAVVGTITGNCRFYDASDNLLRFETQVALSGKKKSSLKRITAFEFSPSNPSKLMVTSADSKVKILEGTTVTQNYSGLRTGSCQSLATFTPDGQHIVCASEDSNIYVWNHENQDEASLKHAKTIWSSERFYSNNAAIAIPWNGPKPRNPVSLASQILSPQGDNLWCMSKAVKCSSSQSEDSAINSFVSRFAPGIFNLNQEFSSESTCRSSATWPEEILPSRSIRAILDESQYKFLRNCFQSTPNSWGQVIVTAGWDGKIRSFQNYGLPAHQ

SEQ ID NO: 5375 - protein, 183 aa, Zea mays
  VARIANT 11: note = Ancestral polymorphism is S, Derived polymorphism is R
  VARIANT 57: note = Ancestral polymorphism is S, Derived polymorphism is C
  VARIANT 67: note = Ancestral polymorphism is H, Derived polymorphism is N
MIPTNSFKPSRQQWLCYKVISHHVHHCLRYSFFSDMANKRIQKELMDLQKDPPTSCSAGPAGEDLFHWQATIMGPSDSPYAGGVFFVNIHFPPDYPFKPPKVNFQTKVYHPNINSNGSICLDILKEQWSPALTISKVLLSISSLLTDPNPDDPLVPEIAHMYKNQRPRYEETARAWTQKYAMG

SEQ ID NO: 5376 - protein, 1073 aa, Zea mays
  VARIANT 779..1073: note = Derived polymorphism lacks residues 779 to 1073
  VARIANT 763..1073: note = Derived polymorphism lacks residues 763 to 1073
  VARIANT 728..1073: note = Derived polymorphism lacks residues 728 to 1073
  VARIANT 6..1073: note = Derived polymorphism lacks residues 6 to 1073
MNPQIWVGANESESRVEGIGPVLCDYIPSIICHTFNHFMHYFNVKLIYREAVLQCWKYELSQDHYLGGPLRIGQSQGSLHRHRSTNFLRPAAAAISVEQDEVNTYLPKGDMWSVHKFGGTCMGTPKRIQCVANIVLGDSSERKLIIVSAMSKVTDMMYNLVQKAQSRDDSYAIALAEVFEKHMTAAKDLLDGEDLARFLSQLHSDVSNLRAMLRAIYIAGHATESFSDFVVGHGELWSAQMLSYAIKKSGAPCSWMDTREVLVVTPSGCNQVDPDYLECEKRLQKWFSRQPAEIIVATGFIASTAGNIPTTLKRDGSDFSAAIVGSLVRARQVTIWTDVDGVFSADPRKVSEAVILSTLSYQEAWEMSYFGANVLHPRTIIPVMKDNIPIVIRNMFNLSAPGTMICKQPANENGEGGARRHHGPQLAGEGHARTAAEAVERAREAAAASRKAGKATEGDGGGLTTARQVHRAAPAQGATRTRAAMGGPPRPRCQGAAPRPGSHARTKPRQEQASSEHSVCFAVPEKEVAVVSAELHDRFREALAAGRLSKVEVINGCSILAAVGLRMASTPGVSAILFDALAKANINVRAIAQGCSEYNITVVLKQQDCVRALRAAHSRFFLSKTTLAVGIIGPGLIGGALLNQLKNQVLEQQAAVGGEEGGKHNRPPRWIKSREVRTDLYFLSSFNKNEGWMAQNTELYRLSRSEVCTDTILQIRHHRRLRRNGQHQVYCRVHLLGAGNTNNASDDGRARMVGDRDNIDERRAVHDHERDNLARTFPQRFSPAHLMGIDLTQWKQLLQKEAEPADIGSFVHHLSDNHVFPNKVLVDCTADTSVASHYYDWLKKGIHVITPNKKANSGPLDQYLKLRTMQRASYTHYFYEATVGAGLPIISTLRGLLETGTRAFSDVVAEAREAGYTEPDPRDDLSGTDVARKVVVLARESGLRLELSDIPVKSLVPETLASCSSADEFMQKLPSFDEDWARQRSDAEAAGEVLRYVGALDAVNRSGQVELRRYRRDHPFAQLSGSDNIIAFTTSRYKEQPLIVRGPGAGAEVTAGGVFCDILRLASYLGAPS

SEQ ID NO: 5377 - protein, 72 aa, Zea mays
  VARIANT 11: note = Ancestral polymorphism is E, Derived polymorphism is K
  VARIANT 42: note = Ancestral polymorphism is G, Derived polymorphism is R
MSPLTSYFISEEAPFDCKGFSFIVASFFLAISSCLAWMLNPGMKDKGTKAAVSDSADEEAAQAPLLAKWTRP

SEQ ID NO: 5378 - protein, 311 aa, Zea mays
  VARIANT 45..311: note = Derived polymorphism lacks residues 45 to 311
MGELAAASSPPPPAVLQVVFVDGEQSVDLGTVAVQPSLSGVKRLQAVVADRVGVAPYQISASLARPRRARRVPLDDATDLAAAVAREGSGCYVVAGLRRSRRERRGGRSRRDRKGAKDAGAPAEKTILKRLPPTDLASLVGTPPPPLPFPHAVAAAPPLALDGWGYDDYEARLRELQLQRDWYMLSTVGVGAGPDPAYLHLAAGGHPEHEDPAAPWSPGRRPSPCPECEAAAAAMRQPAFHWCVHDAVVSAVFRSHVGPIERPPKKTPSPPPLLPLPPSPGRLLGMPVYEFIDQHLLFRRRRLPHSSSNCT

SEQ ID NO: 5379 - protein, 604 aa, Zea mays
  VARIANT 131..604: note = Derived polymorphism lacks residues 131 to 604
MAECRIQDWKRASTPESVSRHETSIPRTKQRNIFSLLAQRELSPRTKNQAKNLWTKPPRLDACPIESKFWGTYAQHDLLSWAEAEFLHWWIPKYCPLTPSSKATIAAAFSTDGRVLASTHGDHTVKIIDWQTGKCLNVLLGHHRTPWVVRFHPQRSDILASGSLDCEVRLWDAKTSRCTAELVFYRPVASIAFHATGELLAVASGHKLFLWDCNKRWETLELPIILETRRSLRAVQFHPHGAPYLLTGEVHNLDSEDSTMTPALLSNYSFRDTPLLGGSGVDNLISELQYMQNFEQVGASSSVPVTTGSFDGSRLHDTSGHHLMTSLPSVGRPLLGTHAAEAPAISLSVGSEQTTSLLGGGTELPCTVKLRIWRHEMKNPFITLGPEACLLTIPHAVLCSRKTVTSTICTIWMYCEMGTHVSPCGRFLVACVACVLPHSYGGHGSQLHEHYDSTGAGTSPTRQAFPSRQIIYELRVYSLEDATFGTVLATRAIKAAHCLTSIQFSPTSEHILLAYGRQHSSLLRTILINGETRVPVYTVLEVLFMGLSKGRLGFFGTMVHHSLAGENVHEVMVYCYYRNLWSTEIISKTERANRKHQISASNYS

SEQ ID NO: 5380 - protein, 525 aa, Zea mays
  VARIANT 30..525: note = Derived polymorphism lacks residues 30 to 525
  VARIANT 42..525: note = Derived polymorphism lacks residues 42 to 525
MERGILGSRGAVQILGSKTGAAIDVLKLRLDDIATGGGHTEWPLSSDWLMSSVGIQAYIMDLIFDCWSTVGRSCGKTTSTSFTCSTKHELNLHVNVKPLQLATDGSSRLAYKTPVLKNQWNLSASSSSANVVTTFDDDKGVPSSFAEEKIGVLLLNLGGPETLDDVQPFLFNLFADPDIIRLPRLFRFLQRPLAKLISTFRAPKSKEGYASIGGGSPLRKITDEQANALKIALEKKKLNANIYVGMRYWYPFTEEAIDQIKKDNISKLVVLPLYPQYSISTSGSSIRVLQNVVKEDSYFSGLPISIIESWYQRDGYVKSMADLIEKELSAFSNPEEVMIFFSAHGVPLTYVQDAGDPYRDQMEDCISLIMGELRSRGILNGHTLAYQSRVGPVQWLKPYTDEVLVELGQNGVKSLLAVPVSFVSEHIETLEEIDMEYKELALESGIENWGRVPALGCTSTFISDLADAVVEALPSASALGTRKPEDTDSSMDLMHYLTKMFFGSILAFILLLSPRLVSAFRNTML

SEQ ID NO: 5381 - protein, 110 aa, Zea mays
  VARIANT 23: note = Ancestral polymorphism is V, Derived polymorphism is I
  VARIANT 31..110: note = Derived polymorphism lacks residues 31 to 110
  VARIANT 34: note = Ancestral polymorphism is R, Derived polymorphism is H
  VARIANT 58: note = Ancestral polymorphism is P, Derived polymorphism is L
  VARIANT 92: note = Ancestral polymorphism is V, Derived polymorphism is L
  VARIANT 97: note = Ancestral polymorphism is D, Derived polymorphism is N
MVEEKNPYEVKLVNLGNKPKWSVSLPLNILQPTRGVSPVTTGLAKCHTSFLEVVEALPVEDNSIDVVIGTMVLCSVNNIDMALRDDTLLHLVQGVLDPSQQFVADGSEPG

SEQ ID NO: 5382 - protein, 431 aa, Zea mays
  VARIANT 368..431: note = Derived polymorphism lacks residues 368 to 431
  VARIANT 330..431: note = Derived polymorphism lacks residues 330 to 431
  VARIANT 282..431: note = Derived polymorphism lacks residues 282 to 431
MQSAAAIGLLRPCAARPLAAYTSPRRGAGACSGGTQPLITPRGIRLSARPGLVPASPLEEKENRRCRASMHAAASAGEEAGGGLAKTLQLGALFGLWYLFNIYFNIYNKQVLKVLPYPINITTVQFAVGSAIALFMWITGIHKRPKISGAQLFAILPLAIVHTMGNLFTNMSLGKVAVSFTHTIKAMEPFFSVLLSAIFLGELPTPWVVLSLLPIVGGVALASLTEASFNWAGFWSAMASNVTFQSRNVLSKKLMVKKEVCSYMPSMLIVCLTLFLSIPCDQESLDNINLFSIITVMSFFLLAPVTLLTEGVKVSPAVLQSAGLNLKQVYTRSLIAAFCFHAYQQVVIHLANIGVFIYSLITSLMLVQITMVSPVTHSVGNCVKRVVVIVTSVLFFRTPVSPINSLGTGIALAGVFLYSQLKRLKPKPKTA

SEQ ID NO: 5383 - protein, 181 aa, Zea mays
  VARIANT 13: note = Ancestral polymorphism is R, Derived polymorphism is W
  VARIANT 34: note = Ancestral polymorphism is R, Derived polymorphism is C
MFGRAPKKSDNTRYYEILGVSKDASQDDLKKAYRKAAIKNHPDKGGDPEKFVLTHLDNRQLLIKSNPSKVVKPDSFKAINDEGMPMYQRPFMKGKLYIHFSVEFPDSLSPKQCKALEAVLPPKPVSQHTDMELDECEETMPYDVNIEEEMRRRQQQHQHQEAYDEDDDVPGGGQRVQCAQQ

SEQ ID NO: 5384 - protein, 360 aa, Zea mays
  VARIANT 42..360: note = Derived polymorphism lacks residues 42 to 360
  VARIANT 57..360: note = Derived polymorphism lacks residues 57 to 360
  VARIANT 206: note = Ancestral polymorphism is R, Derived polymorphism is I
  VARIANT 274: note = Ancestral polymorphism is G, Derived polymorphism is C
MTGAKQSRRCNLLTFFSTILATVLLLIFQRFSPTAAAVPQWRRGGTQEHIDVARGAEAVGHGQGRCEDSLRGGSSRWRRRRGFADGGRGTRVRLALQHAAVGNWYRLGTLRWGQIDSKTADAGNSDPDKLREKAAELVKLSAEELLKRQMEIKELMEKFKAPSDAELIKIAIADLNNSSLEDRQRALQELLILVEPIDNANDEGIRTTSAWVLGKASQDNVLVQNQINGYGALDRLVKMGYSSSGPEAAKALYTISSLIRDNEHGQELFLSENGYAMLQALLAVRNLLHLTSADATDLQKFSGLDDSLNALKVQLDELTSHEEQREYAPEIEILRREVHTVFQRKTDQARVVTNEGKYNG

SEQ ID NO: 5385 - protein, 180 aa, Zea mays
  VARIANT 145: note = Ancestral polymorphism is R, Derived polymorphism is H
MARLAGVAVALAAIAAVVGAHETYYASVENRLPALGMKLACHAMGGFLTELSVVPRGRVPHGRAGRRVAELLVERGQHGWVRCNWAYAGNYVAGITVLDSRWPEAGRCQDPAGEGLCRVVFENDVVLLKTPARGVRVLGDLPIKRCRRHWMLFSTECTYPDHRYPYAGRRLGSAFEYFAV

SEQ ID NO: 5386 - protein, 172 aa, Zea mays
  VARIANT 18: note = Ancestral polymorphism is S, Derived polymorphism is N
  VARIANT 35..172: note = Derived polymorphism lacks residues 35 to 172
  VARIANT 61: note = Ancestral polymorphism is G, Derived polymorphism is R
  VARIANT 96..172: note = Derived polymorphism lacks residues 96 to 172
MEWPPPSTSPSPSLVVRSPRQTVSLIRNRRPHRDWAPSSRSPSFAARDHGPKPSEVYGFVGSITTVIATAVYLAWAYTPEPVLQSLGITYYPSKYWALAVPSFVVVTVVLSMGIYMGLNFAATPPPTSFSTIFDEKSREHTAFSSATEDERPIEPISDIGIDRINSLMFGDR

SEQ ID NO: 5387 - protein, 160 aa, Zea mays
  VARIANT 48: note = Ancestral polymorphism is P, Derived polymorphism is S
MAGGRLAVAAWRASWSLESGEDRGGQEQETRAAGERAAALEPGEEVRPRAPRAVRGGAGGLAVLRAYPFRVPARGVLPLAYVARAQGAPLGDAGSAAMEAALRDGVVPFRVDGEAQTQWKVAGIVGVDQWTRLACQLRFFWPNGTVLPFRCISKSKFLFF

SEQ ID NO: 5388 - protein, 1090 aa, Zea mays
  VARIANT 164..1090: note = Derived polymorphism lacks residues 164 to 1090
MSTNPDEPKSRARTDFLLNNELEVQKFWDENTVFQADPGNDSPSPGEKFFGNFPYPYMNGLLHLGHAFSLSKLEFGAAYHRLRGSNVLLPFAFHCTGMPIKASADKLAREIQQYGYPPVFPVAEGSSAAVADATQADQADVVAPDKFKGKKSKATAKAGAQKYQWEIMKSFGLDDEEIARFQDPYHWLTHFPPLAKEVLKKFGLGCDWRRSFITTDMNPYYDAFVKWQMRKLKKLGKVVKDMRYTIYSPLDGQPCADHDRATGEGVQPQEYVLIKMEVISPFPPKLKSLEGRKVYLAAATLRPETMYGQTNCWVLPDGMYGAFEINDTDVFILTARSAFNLAYQHLSRVPEKPTCLCELSGSDLIGLPLKSPLAFNETIYALPMLTVLTDKGTGIVTSVPSDSPDDFMALQDLVTKPALRAKYGVKDEWVLPYEIIPIIHIPEFGDKSAEKVCHDLKIKSQNDKEKLAEAKRMTYLKGFTDGTMIVGEFSGRKVQEAKPLIKSKLLEEGTAVLYSEPEKKVMSRSGDECVVALTDQWYITYGEAEWKQKAVKCLDRMNTFSTETRNGFEHTLGWLNQWACSRSFGLGTRIPWDEQFLVESLSDSTLYMAYYTVAHLLQNGNMYGKEISSVRPEEMTDEVWDFVFCDGPAPKSEIPAALLNKMKQEFKYWYPFDIRVSGKDLIQNHLTFCIYNHTALLPEHHWPIGFRCNGHLMLNSEKMSKSTGNFLTLEDAIKKYSSDATRFALADAGDGMDDANFVTETANSAVMRLTKEISWMEEVTAAESKLRTGPPTTYADRVFSNEMNIAIKETEKSYNAFMFRDALKSGFYDLQLARDEYRLSCGAAGMNRDLLWRFMDVQTRLITPICPHYAEHVWQKIMKKEGFAIKAGWPVADTPDPTLRIANKYLQDSIVLMRKLLQKQESGSKKPKKGAAPAPPSEEKKMSIGLIYVNEHYSGWKEQCLRVLQSKFDSQSRSFSPDQEIAEALKECPIGQEMNLKQVQKLCMPFIKLKKDEAKEVGPQALDLKLPFGEMDVLRENLELIKRQLGLEQVEVLSASDEAARAKAGEHASLLEKNPPSPGDPIAIFLSKQS

SEQ ID NO: 5389 - protein, 137 aa, Zea mays
  VARIANT 126..137: note = Derived polymorphism lacks residues 126 to 137
  VARIANT 113..137: note = Derived polymorphism lacks residues 113 to 137
  VARIANT 110: note = Ancestral polymorphism is I, Derived polymorphism is T
  VARIANT 108: note = Ancestral polymorphism is E, Derived polymorphism is K
  VARIANT 97: note = Ancestral polymorphism is T, Derived polymorphism is I
  VARIANT 75: note = Ancestral polymorphism is K, Derived polymorphism is N
  VARIANT 64: note = Ancestral polymorphism is T, Derived polymorphism is K
  VARIANT 42: note = Ancestral polymorphism is D, Derived polymorphism is N
  VARIANT 30: note = Ancestral polymorphism is G, Derived polymorphism is R
  VARIANT 26..137: note = Derived polymorphism lacks residues 26 to 137
  VARIANT 22: note = Ancestral polymorphism is E, Derived polymorphism is A
  VARIANT 8: note = Ancestral polymorphism is A, Derived polymorphism is E
MSEQVHEADFYDEELIRDMLEEIQRQREDGSLRDVVFCMHGDLVRNLGNMCNPELHKVAILDATFVVWIFISLAKTIGKLQARRLMAKLDIYRKFAIALIVYVMVSVKWIGYEVCLFMSNPYSNSRIIKGVLLHYTR

SEQ ID NO: 5390 - protein, 207 aa, Zea mays
  VARIANT 87: note = Ancestral polymorphism is S, Derived polymorphism is C
  VARIANT 52: note = Ancestral polymorphism is G, Derived polymorphism is D
MPSLSSGSRNPSAKCYVSPFSCYLGKQGGRSMVCLTKFALFSTSPPVYVLHGDRFIPGRSAMDMDMAHYLLTEPRKDKENTAGMVASPSKEAYRRLLTGKLFNNRTRILDFRNKLPEPENMSSTNVASSNLQVEPTKQRRHIPESAERTLNAPELVDDYYLNLLDWGSNNVLSISLGNIVYLRDALRGSTSKLVTIDEDSGPITSVS

SEQ ID NO: 5391 - protein, 149 aa, Zea mays
  VARIANT 34: note = Ancestral polymorphism is R, Derived polymorphism is C
MAPAAATKRCTNLVCGAPPPLVVGRVGIGGRVGRCDLEALPCSAISEANEQVLRVLRIARKDDQAEHKIIIKPDFIADNLGIAGYYFDFTIGSGRKKAHVILKNNTLNSKIEDFACCNSCAVWLHKRSRGVLITLKKLMGPGVSGRAIG

SEQ ID NO: 5392 - protein, 473 aa, Zea mays
  VARIANT 69: note = Ancestral polymorphism is R, Derived polymorphism is W
MELALATWAALLGIVAALFLLRGRRRGYNPPPGPKPWPIVGNLNLIMGELPHRSMNELSKRYGPLMQLWFGSLPVVVGASAEMAKLFLKTNDAAFADRPRFAVGKYTAYDCSDILWAPLGPYLRQARRICAAELFSAKRLESLEHIRDEEVRVMLQQLRQATGRTVQLGDYLQTMTLGVISRIVLGRKYVVQEEGNSAPPVVTPAEFREMVDEFFVLHGAFNIGDFIPWLDWLDLQGYVARMKRMNARFGRFLEHVLDVHNERRLREGGSFVPKDMVDVLLQLADDTILEVQLSRDNVKAITQDLIIGGTDTTAGTMEWAVSELLKNPKTLAKAMEELNHVIGPDRLVTESDLPRLPYVEALLKETMRLHPPGPMLAPHVAREDTSVDGYDVLAGTVVFINVWGIGRDPALWDAPEEFRPERFLESKIDLRGQDFQLLPFGSGRRMCPGLNTTVNGETSDGQNRRTLELNRRK

SEQ ID NO: 5393 - protein, 341 aa, Zea mays
  VARIANT 250..341: note = Derived polymorphism lacks residues 250 to 341
MYYHRQNSSGRLMYLSIKIDPLSAVEFGSETMADQLGSYTIRSHGMILARLHMYDWIILLLLAVIDGLLNIIEPFHRFVGKDMMTDLRYPMKGNTVPFWAVPLIGIILPWAIFVGIYFKKKNFYDLHHGILGILYSVLITAVITDAIKDGVGRPRPDFFWRCFPNGNDVYDNITTGVICNGVKSVIKEGHKSFPSGHSSWSFAGLGFLAWYLAGKLTAFDRKGHIAKLCIVFLPLLTAALVAVSRVDDYWHHWQDVFAGGLIGLTVASFCYLQFFPYPFDGDALWPHAYAVRLAEEGNSRNANSYSVRPTEIETVDIPGHGGIITLRDTLNDVESGSARRL

SEQ ID NO: 5394 - protein, 195 aa, Zea mays
  VARIANT 23: note = Ancestral polymorphism is V, Derived polymorphism is D
  VARIANT 42..195: note = Derived polymorphism lacks residues 42 to 195
  VARIANT 63: note = Ancestral polymorphism is P, Derived polymorphism is R
  VARIANT 144: note = Ancestral polymorphism is S, Derived polymorphism is Y
MNEVDEESKQVSYPVIRDDNGNDKLDFPALGKQFAAEEISAQLNLYLVLLPLDGQSVPKLEKPYHSCLPTLSIRHLCQFVALQLSRQPKEVEIYIRKSKDACLSANYTRKYETKPEQPNGLERLWEENSLSDLYPSLATCQRRSGPCYSIGPLCSGSGISTERHYLLPSHFRVCLVCALSFLLIWPCRYPMVSMK

SEQ ID NO: 5395 - protein, 169 aa, Zea mays
  VARIANT 55: note = Ancestral polymorphism is S, Derived polymorphism is I
MDMPSLVLLLLVFIATGSRAAGQVFCRSQFNLANEACSLRTFSGPNPAQPLQLHSNSSSASYEIQADHHEHEHSHEHEHEHEHSHEHEHEHSHEHEREREHTHSRRHGFGHGGRDPYDTACCRRLMGIDNACICQAMSFLPVFMSKVKHAIKLSPVPGCDVSFECGAVN

SEQ ID NO: 5396 - protein, 123 aa, Zea mays
  VARIANT 27: note = Ancestral polymorphism is R, Derived polymorphism is Q
  VARIANT 41: note = Ancestral polymorphism is G, Derived polymorphism is R
  VARIANT 46: note = Ancestral polymorphism is T, Derived polymorphism is M
  VARIANT 79..123: note = Derived polymorphism lacks residues 79 to 123
  VARIANT 93..123: note = Derived polymorphism lacks residues 93 to 123
MGSCLSSEAPATGDGPAAWRKRHHGSQEGAAGGGGKKLPGGAGEMTEDELAWVLERLCGKGASAVASLHTQQDRKGTNQDAMVVWEGGGTAEGADAGRGGDGLGQRSCGGDRRREDGADAACR

SEQ ID NO: 5397 - protein, 416 aa, Zea mays
  VARIANT 202: note = Ancestral polymorphism is R, Derived polymorphism is W
  VARIANT 197: note = Ancestral polymorphism is G, Derived polymorphism is C
MGRPPSAGAPAFRFLPSEVAEMEARLLQLNNGIPTRAVLQTLADKFSASPERAGKVAIQPKQVWNWFQNRRYSHRAKTPRAASSPPAKMTPSGADHHQHAANASAFRAAQLSSVAAAHHGSSSTGGMWAPMYVAAAVMDIVAVLPANEQLVLPAILVNQCWKNPVESVSVEFEAKSARDGAWYDVAAFLSHRLFESGDPEVRVRFSGFGAEEDEWINVRKCVRQRSLPCEATECVAVLPGDLILCFQEGKDQALYYDAHVLDAQRRRHDVRGCRCRFLVRYDHDSSEEIVPLRKVCRRPETDYRLQILHAARAAATNADVHTPPKEVKVELASTDKSPAEQKPHKQHKMMDVNTDEVTMVSTLEQDETPGKTVAPVPSATAETRNSSSDTVMKGAEASSVVEDDDEVQAVDKMKEG

SEQ ID NO: 5398 - protein, 377 aa, Zea mays
  VARIANT 47: note = Ancestral polymorphism is R, Derived polymorphism is C
  VARIANT 199: note = Ancestral polymorphism is A, Derived polymorphism is G
  VARIANT 230: note = Ancestral polymorphism is V, Derived polymorphism is I
  VARIANT 237: note = Ancestral polymorphism is F, Derived polymorphism is S
  VARIANT 239: note = Ancestral polymorphism is G, Derived polymorphism is A
  VARIANT 243: note = Ancestral polymorphism is D, Derived polymorphism is Y
  VARIANT 244: note = Ancestral polymorphism is N, Derived polymorphism is Y
  VARIANT 288: note = Ancestral polymorphism is T, Derived polymorphism is I
  VARIANT 347: note = Ancestral polymorphism is P, Derived polymorphism is L
MLASARGFWARHRRKILVSLGVAGVGYAAYHFYDARRAQVVRVEQLRAMEEQAADDFVKNQLQAHFEKVKRICDTTTLPLAMHHLSDKITSQLDISKLTDKLRQAKVDSSALTPKEKYETWEEIKIKSFAKIVSSMWAMTLLSLYVRVQVTILGRHLYLDFAQGTNGPQLQAESDTFSENGHRSFLAMADYLVTDKITGFLTQMQRAATEVLKEKQLKDRMNMDQVLQTVLQILDMFMGLSEDNSWINYLVPENPPVYAQLMAVSSSGFDDSSLLNDFRKLDQLMSETRIVLASDDFRNIMERSLRKIAGVVVEDLGVQIVTPGSGLPLATLLPKVDHLSSPLLEEPNKNKHIQIIRSMPEVELFYTLLYTNMPPET

SEQ ID NO: 5399 - protein, 1291 aa, Zea mays
  VARIANT 151..1291: note = Derived polymorphism lacks residues 151 to 1291
  VARIANT 1091..1291: note = Ancestral polymorphism lacks residues 1091 to 1291
  VARIANT 1172: note = Ancestral polymorphism is R, Derived polymorphism is L
MEAAASSLSTLLSTLRVNGPWTPPGTWESVIPESGAARVSHLGGRPRLQPIYELASVTDADPVHYGLLKYLFIRSCEPYFNFIKSWIYRASVDDPYEEFLITQTENKGAQGISSDITDDFILFPLKQGRNHVSAPCFLKEICHPLLRTGQQLQVLMNLLKYCNLAATEGDVYPSRNIIHMEGVLPWFDTPIESSMNSFTFSKSAIEALTCKRDAMYKLMMEKLQHFFSNVEVIAFDTASNFLHKRTDLVDASVSDAELFYGDSDAVLPCNMAADEKDDSSSNSQESSDKEDPLESSECSSYTSMDDTEVESSTACENLSSSMFSLYCTSTGEAKGSLVTSKLLSSQSSSVDHGINCAIPIECEKDDRLSCKHVLVHPQNTKHTAVPDGSELDYQYSQFSPFDRFMKRASCSFESMNSVGEFLYSDHKRSVGNAVYPLHSESGSTKLSNSKNYEKFVTINQPWNTSIPYNLSLNPILKNAACYHTESDMQQKSKNQSLASFDFESVMDPCEVYCARSPSLLVESVNGAATAGQPSTQPYEQPDCSTKLLQAQTRSQSSLTSSGEMSTGDSLQKNASGGAFWEISLLYNDKSKEKPAMDFSSQFDMPLDIVIDKCIIQEILLQYKYVSSFTMKLLEEGFDLCAHLLALRRYHFMEIADWADSFIASIYQKKWSFVKSEQKRSEIQGLMDLALQRSSCDSDPYKERLFIYMRESPVDSVDASPCGLDLLDDILLGYKAEWPMNIVITVDALKIYAEIFCYLLQVRFAVFSLTEVWRFLKPLKDFPTWGDEMGLQLVGGASGSSRRICSQPFIDACAAQLNDAQLQPFIDACAAQLNDAQLDARADSFITEGRTQESPSPSWKQCRQLVNEASNIGVRTASFIDGDRTKGTLAVGSLNQSRSASPQYHLADAGPLEGDQTDSPQANGPLGFFDEELRDLMSPRQDDLGADLVEWAMTDLTHQVYLTEVVRTTLTLGAPDASDSERKSSTRNLLPQPIHCTTGNEHPRTLPIRDLHSSKKLVVYSRKRFNSRDKSRNMNEERSGPNASVTSGIDTDENAVPTVREVNLAVNTEIIPRRNRRIAGVGVEFDKMDLSSRTTKKVMQALKVIGDPGAVTQQAKEDYLKVFSTELPVSHIEALASFFGWVVPDDLKLGSINFITFYQHYSSISTAIYLIYRGAVFNIPLKIRCFLSDESKQVATIIKSMLQLALELRSCFQSGDTCDLSVNQLSNLQYLINFSQVDVIRTKFEDNIKDLYILHSKSSKYTELGLSRFWGYLNYNEYHSTKVSKDMDNFYF

SEQ ID NO: 5400 - protein, 700 aa, Zea mays
  VARIANT 352..700: note = Derived polymorphism lacks residues 352 to 700
MESLTLRASTAASKLQRRRLLPGRQRATYVRATASAGEPDLSVRVNGLQMQWGRGGTDFRSLRTCSSYADVQQAVVAVCVWLMKSDLGTMDVLFTLLSLVPGQILCGYPTLLAVATSPRSSSPLLCSQGRFLPLPRLIVLEKPSLSTRFRSWTWTLSSATQSSRTRPALVPADSEMAEVKPEDMVHHLPMDQLQGLEYCIDSNPSWGEGIALGFQHYILSLGTAVMIPTLLVPLMGGNDDDKAKVVQTLLFVTGIKTLLQTLFGTRLPTVMGGSYAYVVPILSIVRDPSFARIADGHTRFLQTMRAVQGSLIVSSSIQIILGYSQLWAICSRFFSPLGMVPVVALVGLGLFERGFPVVGKCVEIGLPMLILFVALSQYLKHVHIRHVPVFERFSLLMCITLVWVYAHILTASGAYKHTALVTQINCRTDRANLISSSQWISIPYPLQWGAPTFSADHAFGMMAAVMVSLIETTGAFKAAARLASATPPPAYVLSRGIGWQGIGTLLDGLFGTGTGSTVSVENVGLLGSTRVGSRRVIQISAGFMIFFSILGKFGALFASIPFTIFAAIYCVMFGIVAAVGLSFMQFTNMNSMRNLFIIGVSLFLGLSIPEYFSRYSTSSQQGPAHTKAGWFNDYINTSFSSPPAVALIVAVLLDNTLDVRDAARDRGMPWWARFRTFRGDSRNEEFYTLPFNLNRFFPPT

SEQ ID NO: 5401 - protein, 679 aa, Zea mays
  VARIANT 531: note = Ancestral polymorphism is V, Derived polymorphism is A
MAAAEVLTAAWEEWGLRALVLLSLTVQVTLHILAEFRRHVDSGALRAVVWSAYMAADATAVYVLGHLSVASRSPERELTALWAPFLLLHLGGQDKMTAYAIEDNQLWLRHLQTLVVQVAAAAYVVYGSSAIVGARRLPLLLAATVTMSAVGVVKYGERVWALRRAGTSPTGNYSSDIGKRRFNLAVPDSFISRLDPAETYLLHAHLLLDMAKDRFKGPLPRLYLCGPGSQETQLHGEEELYKVAELQLSLLHDVFYTKAEATHTWCGLCARVLSSLATAAAFVLFNALLLGAHRRKLEGYSRGDVAVTYVLFVGAVVLEAASLVRAVLSSWTCALLVKHGSEGSAVCNSLAPAAVYLRRLVRAAEWRWWRCWSRSMGQLGLVQLCVRSRASRYSRVARWMGVEDWWNTMAYSGPSVPVSPDVRKLLLKSLKARPWDREQFESRGLYGRELGLDWVAESKLEARILVWHVATELYLYWFNKDQLPLPLPAAGAGVADLVEVAQSLSSYMLFLLASRPHMLPPDASRNDYLVVCYALTTHERYSTADDLLSSLQRFADALWANNSAPEYELRCKNTNRRGYKVLRGGCSLAAFLIHHQHQEDSSSSSSSSPAGGTGTLEMICRVWAQMLCCVADECSANSHAKQLSGGGEFLTVVALVAKFMRSKRLSWHLHIESQRTDEW

SEQ ID NO: 5402 - protein, 458 aa, Zea mays
  VARIANT 29: note = Ancestral polymorphism is D, Derived polymorphism is V
  VARIANT 30: note = Ancestral polymorphism is Q, Derived polymorphism is R
  VARIANT 49: note = Ancestral polymorphism is A, Derived polymorphism is G
  VARIANT 169: note = Ancestral polymorphism is S, Derived polymorphism is P
  VARIANT 355..458: note = Derived polymorphism lacks residues 355 to 458
  VARIANT 371: note = Ancestral polymorphism is P, Derived polymorphism is T
  VARIANT 376: note = Ancestral polymorphism is C, Derived polymorphism is Y
MEKETTRHSKEQTLQASSRSPTTVNDIPDRLLKLIFRRLDSHVAYVRAAAVCTRWRSIVSTRGIFNLSYHTHDFSTTIGHYHVVDPSSSPGRRRWSSREQQPSCRVVFVPAAPSIDARHFALDFLPSCPAGRGRRQRWEVVDGCGSLLLVANQPRRGMFPDLVACEPISRRYVRIQPAEDMKHRRCLGVFLDGYRSVTSLCNFSLTCVLSEPSAGIADGVSAVTARVYRHQPPGWSRWKYGWSMPRLATSGSVHLRGAECARYAGRSKGFVFWGIIQDDGTVVVAAREGSCVLSSFRLPDHVRGASLSHHQSTTFRFVDDGADNDDLVRVVSLVGEDLRVFLKRDHNDSGAGIDWVPVRSLNLREATRGLPWFKECFFSQTAKVVTAGKGYIVLTPAEETWPFSIELGTMEAEREHIRNRLAGEVYPYRLHLRPRVRACVFSCKRGRWGPCYDICRCT

SEQ ID NO: 5403 - protein, 365 aa, Zea mays
  VARIANT 264: note = Ancestral polymorphism is F, Derived polymorphism is S
MSAAKEAGPSSRAVLVTGGAGYIGSHAVLQLLTAGFRVVVVDSLANSSELVIRRLRSLAGEHAKNLAFHKVDIRDTDGLKKVFASTRFDAVIHFAGLKAVGESVQKPLLYYDHNVVGTINLLEVMAAHGCKKLVFSSSAAVYGSPNNPPCTEDFPLTPHNPYGRTKLMVEEICRDIYHSDPEWNIILLRYFNPVGAHPSGYLGEDPCGTPNNLMPFVQQIAVGRRPSLTIFGNNYATKDGTGVRDYIHVVDLAEGHLFALKKLFESSSNIGCEAYNLGTGKGTSVLEIVNAFEKASGKKIPLVMGQRRPGDAEVLFSSPAKAERELHWKAKYGITEMCRDLWNWASKSPYGYAASESPKLNGSSR

SEQ ID NO: 5404 - protein, 473 aa, Zea mays
  VARIANT 379: note = Ancestral polymorphism is P, Derived polymorphism is S
MGKGQRRKRNKVKAKQRSKLPAGPTSVNDLPDELLEAVLLNLGSPLHLIRAAATCRRWRRAVAGAGFLACCRALHGAPPVAGRYYVTDMLPPNATGRWGRPARKRPAAFVPSSPAVVDAGHFSLDFLYAPPVEGDRPRRMYMYDNRSSRIRRSQSREIVDSRGSLLLLTSTPWWESIDPRRWSPDFIVCEPVSRRYQGIARPADLSHLPLLGAFLLDGVGTCAGDAMSNFRVLSVLYERSRWRYQFCTPRACVFTPGSDGGWRICWHAMNDDDVEVPDIERSHFAGRAARKVYWGMETSSLLVLDESTLKFSLLAFPAPMQLPNRRISFRVIGGVDGGDTVRVVRLDGDDLEVFCQLPDSGEWVIERSISLRDATANLPGWEYWFFRLPASIVAADNTSVVLTPGEKTWLFSVDLETMEVENEHVRNRDVGPSYPCALPWPPVLQACVNHGDATGRRRHRTAPRSAGAAGVML

SEQ ID NO: 5405 - protein, 205 aa, Zea mays
  VARIANT 49: note = Ancestral polymorphism is S, Derived polymorphism is L
  VARIANT 63: note = Ancestral polymorphism is L, Derived polymorphism is M
  VARIANT 89: note = Ancestral polymorphism is F, Derived polymorphism is S
MDSLFSPRCVWVTGPIIVGAGPSGLAVAACLREQGVPFAVLERADCITSLWQRRTYDRLKLHMPKQFCGQLLRMPFPDGYPEYPTRRQFVDYLERYAAEFKIKPELGTAVLSARYDETSSGIWRVVTNGGDMKYIFHGATGDTAGGSRRLRRAHGPVGQPGRLHQPVRDATVHRAGRRRAGAARLQGHRLVHQPVPRVSFRASGD

SEQ ID NO: 5406 - protein, 238 aa, Zea mays
  VARIANT 195: note = Ancestral polymorphism is G, Derived polymorphism is D
  VARIANT 117: note = Ancestral polymorphism is L, Derived polymorphism is V
  VARIANT 105: note = Ancestral polymorphism is S, Derived polymorphism is L
  VARIANT 98: note = Ancestral polymorphism is A, Derived polymorphism is T
  VARIANT 81: note = Ancestral polymorphism is S, Derived polymorphism is N
  VARIANT 72: note = Ancestral polymorphism is G, Derived polymorphism is D
  VARIANT 62: note = Ancestral polymorphism is L, Derived polymorphism is P
  VARIANT 40: note = Ancestral polymorphism is R, Derived polymorphism is W
MAAAMDAPNPGVVAGPGTYRSVYKARDLENGKIVALKKVWFANMDPESVRFMARKIHILRRLDHPNVIKLEGLVTSRMSSSLYLVFECMEHDLAGLATTPSLKFLESQVKCYMQQLLSGLDHCHNRGVLHRDIKGANLLDNNGILKIADFGLATFFNPKQKQHLTSRVVTLWYRPPELLLGATNYGATVDLWSAGCILAELLSGKPIMPGRTEVEQLHKIFKLYGSPSEEFWANLKLS

SEQ ID NO: 5407 - protein, 439 aa, Zea mays
  VARIANT 80: note = Ancestral polymorphism is G, Derived polymorphism is S
MALEVQVIESSFVVPSAGMPRRGLWVSSLDLDRANRGYTPTVYFYHRSTDAAAAGNVSDATSRLKDSMANALVLFYPLAGRLGVDKDGRIEIDCNSEGALFVIARSELTMDDLKNLEPSPELTRLFVPRIPSTDEQPSSIILAVQVTLLKCGGMSLGTALHHVAVDGTSAFHFFQTWSTISRDGDGAAVEPPCHDRTLLRARRPPSVHPDALSVFCPKMSFAEPSGPTASKVFVVSADQLASLKRASGSETTFCALTALVWQCTCVARRLPPAAEARVSFSANIRRSTRPPLPTRYFGNALVPVFAAGAAGDVASDALESVAGRIRRAISRVDDELVRSAVDYHELFGIDYRLQRGILPATELRMVSWLGMPLPKRVGHPQAPQHDELHRDLGYSGQESAWHKDENDGAEALADHVSRHKERDQGSPDDRCTNEQTRLY

SEQ ID NO: 5408 - protein, 414 aa, Zea mays
  VARIANT 289: note = Ancestral polymorphism is T, Derived polymorphism is M
  VARIANT 242: note = Ancestral polymorphism is P, Derived polymorphism is L
MSAIAGSYGYIAPGEIWSGSEGGIIKAWPWDTIAKSLSFTSGISHKAVSLVEKSYIDLRNHATIGNLCSLLAADVKHMLADSCRAKVWRLTSMTFALWDAKTRELLKVFGIDGQVDLARPEAPVMPEQFIEEEIKKSRNALMGAADAVRRVATKGTCVEDNRRTEAVAQAMNGTIWSGCTDGSIIVWDGNGNRLREFHYHSSSVRCIKTLGDRVWVGYTSGTIQVIDVKGNLQAGWIGHSCPVIDMAISDSYIFSLAHHGGIRGWPLSSPSSLDDILCYELASRELLYTRLENLKILVGTWNVAQEKASPEALRSWLGGAFFDVGLVVVGLEGSGNGQWWIDSIGKTLDEGISFHRVGSRQLAGLLIAAWATNDLRPHVGDVDATAVPCGFGRAIGNKVSGIICLICVLPLGIA

SEQ ID NO: 5409 - protein, 786 aa, Zea mays
  VARIANT 547..786: note = Derived polymorphism lacks residues 547 to 786
  VARIANT 609..786: note = Derived polymorphism lacks residues 609 to 786
  VARIANT 613..786: note = Derived polymorphism lacks residues 613 to 786
  VARIANT 638..786: note = Derived polymorphism lacks residues 638 to 786
MPLLLHQPLLLLNASADHHLPWRRSSPISSCQGAVAELALPQPWMSLGHPSPISPRPHPLAAAPSYSWWLSLLPWMLVVLPSLVLTSAPCVGWPVAPALGLSSANSAPSIPARILLIGPAQIILMPGRGTTATAMKPHCVAPSTCSTEYRSTCRPDLQPWLRGRQTPLPSTLCLTLHQCDEMSERIDDMRPEFDSARLFDVYFTHCDLVDDVFVCASTHCLKLHIDGARIFHASAALGVLVDRLVKAADSVLVCLSKGLGAPVGSVIVGSKASIDKARILRKTLGGGMRHVGVLCAAAHVAVRDTVGKLADDHKKAKALAVWVLKLLCLVGFIFLEGLKKIEQITVDSASVETNMFKLYKVRSVLFGQKGIPYLNTYDGRTMRYPDPLIKANDTIKIDLETNKIMDFIKLYLPFHGLHQVIYLVRLNVSTNSSASDPSGHAVLRPTLSFVGVRYPLLSGPAASNPSPEVAFMPLRSEIPANAAPAQTPAPEPVGRLMDSVHKVFYAVVEAAAVRADNSHLGGLVRYPVSTTLPHIGSRLFLTWGVFWSFPECFFDCRRRGRCSSRRKQPSWRYLIPILYVSVELVKALQAHIINWDIHMFDEEIGNTTQAGHQSMEPKDHHTIHPEFPTKAFKAHKVYYLNEGGKFDHADRLFQSIESAYINRLSNTSDVKELIPEFFYMPEFLENSNSYHLGVKQDGELIGDVALPPWAKDSSVAFLMTVNLALQLCLALQRTTSAYSYVAQLHNLKDNNSSDEFDKDSIESGDRSLEELSWETLELLVVPHIFR

SEQ ID NO: 5410 - protein, 158 aa, Zea mays
  VARIANT 100: note = Ancestral polymorphism is R, Derived polymorphism is C
MPGPGSRPSVVATNVNVQSVNNSSMEESTCADGNPGVRVDVKSAREEPAAATTPKPVSREEEEPNEPVRGPPLVVTPQKSAAAGGCETAPAKPRPRRCLRALMMENGSDTGAARKPRPSACRFQCVTDHAPTAAATSGGGAGDKNADYGRKLSTEEAC

SEQ ID NO: 5411 - protein, 342 aa, Zea mays
  VARIANT 208..342: note = Derived polymorphism lacks residues 208 to 342
  VARIANT 197..342: note = Derived polymorphism lacks residues 197 to 342
  VARIANT 167..342: note = Derived polymorphism lacks residues 167 to 342
  VARIANT 152: note = Ancestral polymorphism is D, Derived polymorphism is N
  VARIANT 122: note = Ancestral polymorphism is P, Derived polymorphism is A
MGDSRRHEPWVILQPDGWLRRPALGLNSLMQIPDKIQSSLKVQFGRFLNKDGAVRRMSAEISSEKAKQSCSAAASAEVRLDRHLQAWWDNPSWTDEPPEIKVNVPEGSLCNLNLRFKAGLPPDAVYNIIIDPENKRVFKNIKEVISRKVLLDEGSRQVVEVEQAAIWKFLWWSGTFSVHVFVDQNRKKHTVKFRQGRAGFMRKFEGCWTIEPLFVDKELCLPLNPHSLEEYESCTGGRGRVGSAITLDQLIEPALLPPPPISWYLRGITSRTTEMLVNDLIAETARLRTISNNANAKQGTEETGDANIGDPVRECGDIKERWRQRRKSGRHGSSLRLTSRFL

SEQ ID NO: 5412 - protein, 85 aa, Zea mays
  VARIANT 71: note = Ancestral polymorphism is P, Derived polymorphism is H
  VARIANT 65: note = Ancestral polymorphism is D, Derived polymorphism is Y
  VARIANT 51..85: note = Derived polymorphism lacks residues 51 to 85
  VARIANT 43: note = Ancestral polymorphism is G, Derived polymorphism is C
  VARIANT 1: note = Ancestral polymorphism is M, Derived polymorphism is V
MAFNYYKMTWCGTAAAASSRNEEEIKKCAVVVATLRKKRHWGGSVIGHKTYNRDRIGGHIRLMNDYFIERPLFDPNIFRRRYFVN

SEQ ID NO: 5413 - protein, 476 aa, Zea mays
  VARIANT 6: note = Ancestral polymorphism is T, Derived polymorphism is R
  VARIANT 7: note = Ancestral polymorphism is Q, Derived polymorphism is R
  VARIANT 31: note = Ancestral polymorphism is D, Derived polymorphism is E
  VARIANT 105: note = Ancestral polymorphism is G, Derived polymorphism is D
  VARIANT 112: note = Ancestral polymorphism is V, Derived polymorphism is I
MAAELTQIVVVPFPAQGHVTPMLHLARAIVDRGHGSISATVAVPDFIHRRMGQYSAAGVALVSIPCGVADEDGSDEPPGPAMFLHAMEHRMPAQLEGMLQSARRGVGAGRRVSCLVVDLLASWAIPVAARFGLPVVGFWVGMVATYRTVAVIPELIAKGFVSESGTLLPADGTKNIGDLNILPAKLKLRFKDLPWLLDSALPQKSRISFWLQALDRAKSLRCILVNSISKEGGAGGDSPDDQQQYDYEYLPQDQQQIMLHVGPLLFNADASKKTATMWQPDKTCMDWLDKQSPGSVIYVSFGSWAAPIQPDRIRGFARGLEASGRPFLWVLKSHPSWRAGLPDGYAEKVSGRGKIVSWAPQEDVLKHEALGCYVTHCGWNSVLEAVRQGVRMICYPVSADHFVNCAYVVNVWKVGVELATSGQGDVKDCIERVMEGDDGRRLQRKVNALRETVTAGEAMRAAKRNLTLFMDRINGS

SEQ ID NO: 5414 - protein, 239 aa, Zea mays
  VARIANT 38: note = Ancestral polymorphism is D, Derived polymorphism is N
  VARIANT 83..239: note = Derived polymorphism lacks residues 83 to 239
  VARIANT 90: note = Ancestral polymorphism is H, Derived polymorphism is Y
  VARIANT 145..239: note = Derived polymorphism lacks residues 145 to 239
  VARIANT 152: note = Ancestral polymorphism is E, Derived polymorphism is K
  VARIANT 168: note = Ancestral polymorphism is G, Derived polymorphism is E
  VARIANT 178: note = Ancestral polymorphism is S, Derived polymorphism is C
  VARIANT 195..239: note = Derived polymorphism lacks residues 195 to 239
  VARIANT 227: note = Ancestral polymorphism is P, Derived polymorphism is R
MGVRADGSSKDRENLITRQIRVTRQENALCAAASFDRDAANAFQLYDAKFLDFGVKRAGFLYGRVDAETKDVFVDFIYEPPQQGSEDVVHLLRDPDEEARVDTIAEGLGMRWVGLVFTQAVGRKPSETGEYTMSNREVMQAAQLQAEGGIPKWVTAIVKLEVGDDGTGDVHFEAFQMSEICVKLFKDGVLETEVQDADDPRLSKMRKEVVAGGKDTMEVDNDFFLVPVKISDHQFTSLK

SEQ ID NO: 5415 - protein, 328 aa, Zea mays
  VARIANT 36: note = Ancestral polymorphism is D, Derived polymorphism is V
MGSGRNGAVVRRYVRSKEPRMRWSADLHRSFVQAIDSLGGQHKATPKLILQFMGARGLTISHVKSHLQMYRAASLGAERGGDFANGKPNTFLSWHHRSGTPAQLLQRRYSCSGDERGGPKEEFLCCPPPPPLKRARMGYESMQGSHGVSDARTTAGGGGLYCIDDYMQAMAVGWRIKEEGLIRWQRRDAAAATPSNLQAMGCLVQESGPFKVRRPEAHRLGSALKQQDGDDSSKEDGNDGRPQSSNAATKEDEASEQCSLSLSLGNLDAKCGRGMAAAASSRSGESSCILTASPARRSSSDCSGHSGCFVVGPGGVVSLELSLSICGS

SEQ ID NO: 5416 - protein, 331 aa, Zea mays
  VARIANT 54: note = Ancestral polymorphism is H, Derived polymorphism is L
  VARIANT 143: note = Ancestral polymorphism is G, Derived polymorphism is D
MASTEMEMGVVGGGVNSSGGGSCGGLVVTELSHIKELVRQLEVHLGGSPDLCKHLASQIFSLTERSIGLITSSNLDGARRQKRPAGDAGLASPLSATPTSDVTDGPFQSTKKKRKVMEQRRQRVSSAGGENPVEDGHSWRKYGQKEILGAKHPRGYYRCTHRHSQGCPATKQVQRTDEDPTVYDVIYHGGHTCVHRAAAGQAQATAPPEHRPDAHGHLRSLGAGLTVKTETEEGLPAAAPLCLSASTPPVSGGGCPCPCLAPSTPENWGVSPASSNSNHAASYLPFEDAEWRGHAGLQEVVSASAPPPPAVDSLDDLLLLVDIDDIASLFD

SEQ ID NO: 5417 - protein, 233 aa, Zea mays
  VARIANT 23: note = Ancestral polymorphism is P, Derived polymorphism is L
MGDEMSDGRRADGSYGPEYGPVPREFQHAWYPQLPSRTRRRSPWPLHHGDYPWRLSEHRFRRPPFERSSSWHPLQPPFHIHRVHGSSGSGAPLNPRHRRGDAGLTNEEFREAMDQLRKDEYRQQQKHGGGGRGNLRTGKETSEEEKVCTICLETFLPGEQVAVTPCNHTFHQGCIAPWVQGHGSCPVCRFALCERSVADEDGGGMDLDLLAMVMAMEEAFSRFRFSDSTQHYH

SEQ ID NO: 5418 - protein, 122 aa, Zea mays
  VARIANT 45: note = Ancestral polymorphism is Q, Derived polymorphism is L
MGCVGSTPATKDAGGSSDVNHGTKRVRKPKAWKHPQPITMAQLRQMREEFWDTAPHYGGQKEIWDALRVASESEVSHAQAVVESAGIIVSNADLTLCYDERGAKYELPKYVLSEPTNLIRDS

SEQ ID NO: 5419 - protein, 331 aa, Zea mays
  VARIANT 75: note = Ancestral polymorphism is W, Derived polymorphism is S
MARRRVLLFLKPFDVYPPRPYVGAAASSPTSAPSSLPQPRAANPKVLSYLDDRCRVHKDTIDLCQSVLQRKSLDWIAVQRNHLCQPIRDVDLVVAVGGDGTLLRASHFLDDSVPILGVNSDPTCTKEVEELSDEFDARRSTGYLCAATAGNFEQILDVTLDGSRRPLELSRISVKLNGIQLPTYALNDILVSHPCPASVSRFSFRKRNNTGENSRLINCRSSGLRVSTAAGSTAAMLSAGGFTMPLSSRELQYMIREPISPMDADKAMLHDVLKQEQHMHVVWYNQEGAVYVDGSHVVHSIQHGDSLEISSGAPTLKVVLPEHLLKMGPEW

SEQ ID NO: 5420 - protein, 617 aa, Zea mays
  VARIANT 2..617: note = Derived polymorphism lacks residues 2 to 617
  VARIANT 97..617: note = Derived polymorphism lacks residues 97 to 617
MGMEVVGAEAAPAEIKVSDDVNLFQEKESKATAKEREEAAVFGSETTTNVTDLAPPTDVKDEWPEPKQTYAFYFIKVRSFEDPKLRAKLEQADKEFQKKIQARSKLIEAVRAKKAERSSIIAELKPLSAENKQYNGVVNEKIKEMEPLRNSLGKFREENNAMRAQSAGLCSSIEDLDLTIKMLNDRIVHESIPLSEEKRLVKEIKDLEKTRSKVISNAANRAKLQGTVVEKEAIQDQVKIIGEGIDEIKKERQAVRSKIKVLEDELKLVDAEIASLQEDLDAATARKDKAYELLQELRAGRDAKNAPFMQNRTVLAKARDYSLRNMLSELQELHKAEVDKFMSQWCESKAFREDYEKRILTSLNSRQLTRDGRMRNPDEKPIFIESQAPAPEPEPFPVKLPAKQVKEVPAPQADNASKIEAPSKGPVQLHKAKAALDADDDYEAEPPKEKAKPTGADVAKLKEMKRQEEIEKNKLALERKKRQAEKQAAKAVARAQKEAEKKLKKEEKKAKKKSGAADTDEPSESDAKSDEAMEAPAEQEVAPASTTVKKEQKESARYRNVVSRSKAPLPKAILKRKKAQSYWSWAGPAAMVAAVLVALLAVLGYYQYYYLPANTSN

SEQ ID NO: 5421 - protein, 227 aa, Zea mays
  VARIANT 29: note = Ancestral polymorphism is R, Derived polymorphism is W
  VARIANT 30: note = Ancestral polymorphism is R, Derived polymorphism is H
  VARIANT 39: note = Ancestral polymorphism is P, Derived polymorphism is L
  VARIANT 68: note = Ancestral polymorphism is K, Derived polymorphism is N
  VARIANT 75: note = Ancestral polymorphism is D, Derived polymorphism is N
  VARIANT 96: note = Ancestral polymorphism is R, Derived polymorphism is I
  VARIANT 97: note = Ancestral polymorphism is T, Derived polymorphism is I
  VARIANT 107: note = Ancestral polymorphism is N, Derived polymorphism is I
  VARIANT 120: note = Ancestral polymorphism is L, Derived polymorphism is S
  VARIANT 126: note = Ancestral polymorphism is P, Derived polymorphism is L
  VARIANT 132: note = Ancestral polymorphism is I, Derived polymorphism is N
  VARIANT 145: note = Ancestral polymorphism is L, Derived polymorphism is P
  VARIANT 155: note = Ancestral polymorphism is G, Derived polymorphism is D
  VARIANT 161: note = Ancestral polymorphism is R, Derived polymorphism is K
  VARIANT 162: note = Ancestral polymorphism is P, Derived polymorphism is L
  VARIANT 163: note = Ancestral polymorphism is G, Derived polymorphism is R
  VARIANT 171: note = Ancestral polymorphism is G, Derived polymorphism is R
  VARIANT 173: note = Ancestral polymorphism is N, Derived polymorphism is I
MGYFSRSGSEAATQPMHTDGLLKQEGDLRHAGNGGALDPYVYMVTDRSDEVNEALFIEIVMEMFTGGKGHKYKANFTNDLTSMKLGSLDELLKAMITVLDPPWEGSNLIPRDVMWSDPSLQMGLSPNKDQDIGLLWGPDITQQFLRTNNLKRRTGELIMWRPGSVMVVYRGSIYKRPLKSQALNGASSSVKGEFGALFIPNASNAVENDIQGIYLSAKHATVSLLNV

SEQ ID NO: 5422 - protein, 199 aa, Zea mays
  VARIANT 148: note = Ancestral polymorphism is G, Derived polymorphism is E
  VARIANT 128: note = Ancestral polymorphism is S, Derived polymorphism is C
  VARIANT 112: note = Ancestral polymorphism is I, Derived polymorphism is F
  VARIANT 62: note = Ancestral polymorphism is T, Derived polymorphism is A
MVKGRTGQRVRLYVRGTILGYKRSKSNQYETTSLIQIEGVNTKEDVAWYAGKRMAYIYKAKTKSSETRYRCIWGKVTRPHGNSGVVRAKFKSNLPPESMGRKVRVFMIRRHIESVAANSPYSAENHGSLAIVVCCAHVDTGLNSVFVGVKVDSKWPCLVLLSELKMPCVGNLDCSCTEPVEVLPKFVVERLNSCPNVML

SEQ ID NO: 5423 - protein, 195 aa, Zea mays
  VARIANT 19: note = Ancestral polymorphism is A, Derived polymorphism is V
MAGKKRKAEAARLEETDRALYGAFRGAANSLSQLYTLGMGAQKASFHAGERHAMEKLYEWILRQHENGLRLTVADVASHIQHEIQYGGDNASASPRSQYPSQSTAPTMHIPNTSNQQPSPSLFASGNPGLTQSKNSMVFSSALSSPIRRSLQPYHLEQDGDAGYFANGASRDVNPTASNDSSMDMHSDSPAHDSY

SEQ ID NO: 5424 - protein, 1126 aa, Zea mays
  VARIANT 749..1126: note = Derived polymorphism lacks residues 749 to 1126
MLVPIMVRKKRTGPGGSGETSGESSGASGQGSSQRPERTQQPGAGRGWVPQQGGRGGGQHQGRGGHYQGRGGPGPHHPGGLPEYHQREYQGRGGEYQGQYQGRGGARSRGGISQPYYGGHRGGSVGRNVPPGPSRTVPELHQAPYVQYQAPVISPSPSGPGSSSQPMAEVSSGQVQQQFEQLAIHGQSSMSQEVQVAPASSKSVRFPLRPGKGTYGDRCIVKANHFFAELPDKDLHQYDVTITPEVTSRGVNRAVMGELVTLYRQSHLGGRLPAYDGRKSLYTAGPLPFTSMTFEITLQDEEDSVGGGQGGQRRERVFRVVIKFAARADLHHLAMFLAGRQADAPQEALQVLDIVLRELPTARYSPVGRSFYSPNLGRRQQLGEGLESWRGFYQSIRPTQMGLSLNIDMSSTAFIEPLPVIDFVAQLLNRDISVRPLSDSDRVKIKKALRGVKVEVTHRGNMRRKYRISGLTSQATRELSFPVDDRGTVKTVVQYFMETYGFSIQHTTLPCLQVGNQQRPNYLPMEVCKIVEGQRYSKRLNEKQITALLKVTCQRPQERELDILQVAVYHMFSYELFYQCIHLMYLNTVHHNAYYEDPYAQEFGIRIDERLAAVEARVLPPPRLKYHDSGREKDVLPRVGQWNMMNKKMVNGGRVSNWACINFSRNVQDSAARGFCHELAIMCQISGMDFSLEPVLPPVTARPEHVERALKARYQDAMNILRPQGRELDLLIVILPDINGSLYGNDLFQKTLKHCPLDTFGHQHCFHFSGDLKRICETDLGLVSQCCLTKHVFKMSKQYLANVALKINVKVGGRNTVLVDALTRRIPLVSDRPTIIFGADVTHPHPGEDSSPSIAAVVASQDWPEVTKYAGLVSAQAHRQELIQDLFKVWQDPQRRTVTGGMIKELLISFKRATGQKPQRIIFYRDGVSEGQFYQVLLYELDAIRKACASLEPNYQPPVTFVVVQKRHHTRLFANNHNDQRTVDRSGNILPGTVVDSKICHPTEFDFYLCSHAGIQGTSRPAHYHVLWDENKFTADELQTLTNNLCYTYARCTRSVSIVPPAYYAHLAAFRARFYMEPDTSDSGSMASGARGPPPGAARSMRGAGSVAVRPLPALKENVKRVMFYC

SEQ ID NO: 5425 - protein, 284 aa, Zea mays
  VARIANT 22: note = Ancestral polymorphism is G, Derived polymorphism is S
  VARIANT 24: note = Ancestral polymorphism is F, Derived polymorphism is S
  VARIANT 41..284: note = Derived polymorphism lacks residues 41 to 284
  VARIANT 42..284: note = Derived polymorphism lacks residues 42 to 284
  VARIANT 53..284: note = Derived polymorphism lacks residues 53 to 284
  VARIANT 57: note = Ancestral polymorphism is R, Derived polymorphism is P
  VARIANT 62: note = Ancestral polymorphism is T, Derived polymorphism is I
MGQILGLVQVDQSTVAIKENFGKFSEVLEPGCHFLPWCIGQQIAGYLSLRVRQLDVRCETKTKDNVFVTVVASVQYRALADKASDAFYKLSNTREQIQSYVFDVIRATVPKLGLDDAFEQKNEIAKAVEEELEKAMSTYGYQIVQTLIVDIEPDDRVKRAMNEINAAARMRVAASEKAEAEKILQIKKAEGEAESKYLAGVGIARQRQAIVDGLRDSVLAFSENVPGTTAKDIMDMVLVTQYFDTMREIGASSKSSSVFIPHGPGAVKDVSAQIRDGLLQANLH

SEQ ID NO: 5426 - protein, 1301 aa, Zea mays
  VARIANT 771..1301: note = Derived polymorphism lacks residues 771 to 1301
MPGAGVKPPAPPVEAATGLPPRRLTPSRVSAKRSWPPGCGRFPAPLPAPASPAAAGPEVNGVDGAFTIVGGRADDEAAPAVISPSAQNGCPDKVEEAVAAATVSPLPENGAPPRPQGSDKVEEAAATVSPLPENGAPPRQQGSDKVEEAVAAATVSPLPQNGAPPRQQGSDKVEEVADPAAVSPVAQSCGLPHQEDDKVDDLSAVLPAARSSALPHALPQSGPERARQDGDGGENGEVQLVGGAVKLSSDGQQGDRVVQVAGPTLEVLGSCTTVGASSMQNGGEGDGLLVAAEKGCGGSSDMGQEVAANDFTEIENKTGTGELQGKENGIAGSRTKRWSSESSLNPLPKRRAVSAVRKFPPGCGRTIVTTADSGVLEVSPIRSFAPSFGMSAVNTTGSGDREWLPSEATPVNNGDALVAIPVLVLGESAFPTSAIEASNKKVESKKIVDEGHSKAHNRVQVRDDFAGTKQDGDQRNVVSKATQRNVSDEKMNGKFSAHKGEQVAQEMVDHKMKNELESSLQRSNLRTPLSNPIDVKVKRLDSGKMNAGLLGNARSSAGGKMQSKTLSAKKEVSSNMNTKQNKFAHKLKSDDTSKGNLHLSARESKLGTHVAINQIEEPNQIIVQALMAPDNCPWTRGRKSFASASKSLVPRNKLKGKDGSASKSLVRMNKIKEKDTTRKDILARKVTSNESINDETMDDNETRGREPIDSTSKWLVPVNKLDATPNDIPVGKVVSCDSSNDEAMDDNDGIILEDDDNSRALVVYGQKQEMCLTVLPVVPSGSHHKQSRDHDIDARSKVRKLLQLFQATYRKLTQVEEQGKRKVGRIDIEAAKALKNDPIYKKLGAVVGNFPGVEVGDEFHFRVELSIIGLHGPLQAGIATSKVNGINVAISIVASGGYPDELSSSDELIYTGSGGKAGGNKEGDDQKLERGNLALKNCIETKTPVRVIHGFKGQNRSEIGHSKGKQTSIFIYDGLYEVLECWQEGPKGERVFKYKLQRIAGQPELALHAVKATRKSKVREGLCLPDISQGRERIPICVINTIDDMKPAPFKYITEVIYPDWYEKEPPKGCNCTNGCSDSITCACAVKNGGEIMFNFNGAIVEARPLIYECGPSCRCPPTCHNRVSQHGVKIPLEIFKTGKTGWGVRSLSSISSGSFICEYTGELLEDEEAEKRENDEYLFDIGHNYHDKELWEGLKSVVGLGSATSSSETMEGFTIDASECGNVGRFINHSCSPNLYAQNVLWDHDDMRMPHVMFFAVENIPPLQELTYHYNYKIGEVYINGEEKVKHCYCGASDCCGRLY

SEQ ID NO: 5427 - protein, 236 aa, Zea mays
  VARIANT 10..236: note = Derived polymorphism lacks residues 10 to 236
  VARIANT 19..236: note = Derived polymorphism lacks residues 19 to 236
MPLPVHGPACNSSGHLIGWHTFNSLPFSGKTATVVGEAAPVLPRDLEWAGFVLNSRMLWKEADGKPDWVKDLDAVGENGEEIENPLTLLNDPSSVEPLGNYGKKVHTPDSSRYRIANSYEDRFISGLEPENVDKEFLRLWFKNNCNPYEDTVLPEAPEELVCHPKIIHRDIKASNILLDFKFEAKVADFGLAKCTTDNNTHVSTRVMGTFGYVLMLPYNSSSRLDIIGRHVAYLFG

SEQ ID NO: 5428 - protein, 216 aa, Zea mays
  VARIANT 13: note = Ancestral polymorphism is A, Derived polymorphism is P
  VARIANT 68: note = Ancestral polymorphism is S, Derived polymorphism is L
MATPWWWPSLLPAWLSSSALWFLVANAVVAAVAILSRRPPLPLPLPLPSPRRRRRSSGAAAALTRRASSALLQRLRSFSIFAVPSACFNTTTPFPHPDAAQGTETEAPARTPASPLSSLGRAPAADADEEDSEPGGMSMDEAYALALEARRRPDREREEAPRRSEVDAKPEEFIRGFEDHQRQQRLNSIFNYTQMLKQRAAAARRQRQPDAPPDQL

SEQ ID NO: 5429 - protein, 366 aa, Zea mays
  VARIANT 166: note = Ancestral polymorphism is P, Derived polymorphism is L
MKKAVSVRGGGKGGTAPTDLLVCFAARQHLALMPKPICSPSRATMDKAAAARRRQLQLQLPGASAAAGGARVRGGSSPMFRGSKAKQRAEEEEEPQSPKVTCAGQIKVSRPKKVKPASTAAAKHSSDGAGGARSWLTVMEEIERLHGRRKKAGWLENLGIRRHALPFVGGALRSLRSKARCFGSLHAAAVDSSVDSDGNGNGNDAAGRGSERGAGGSAAASVFYKWLMVLEGDQEPLEQDETRYDEEFGQGEDVERQVGKETDEGTNGPTSAPPPNALLLMRCRSAPATGLSMSRRRTCEQLAGVVEQGKGAAGGVPGDAETEEDKEELAFTCTAPGFMKLSLDIAKETWVVGGRDPIARSRSWKR

SEQ ID NO: 5430 - protein, 281 aa, Zea mays
  VARIANT 198: note = Ancestral polymorphism is E, Derived polymorphism is K
MLTPRVLKASLLRCLRATAELPPLRRPRILPVRVYHSRGYSSGGSSKYDRPMRQFSEQNESTSQPLIYYIAPSALLAFAGIATFVHYNDERRAVPFAKVPGQTNVPKRCTTNRPAIGGPFKLYDTENSEVTESKLRGKWNLMYFGYTSCPDVGPAEVQKIADVVKLLESKYDINITPLFVTIDPQRDSPAQLKAYLTEFDPRIVGLTGPISAVRQIAQEYRVFFKRVEEVGQDYLIESSHNMYLLDPCLETVRCFGSEYEASDLAEAITTEVQKASASSTN

SEQ ID NO: 5431 - protein, 462 aa, Zea mays
  VARIANT 262: note = Ancestral polymorphism is Q, Derived polymorphism is R
  VARIANT 269: note = Ancestral polymorphism is M, Derived polymorphism is K
  VARIANT 270: note = Ancestral polymorphism is R, Derived polymorphism is T
MVEYGKLLEMMVSLSINNQQSALALPRMREGRREEDDDAAGAAAAAAADRFSPAFLGHHRDRDIIYPRAYAPAPPIGQEAGPSAPSQMHPASVWMPLPPCDLSVPDARPFAEGRSIARGARNEPAVPPAAIIAAARGPRPDGHAHAYMAPPPYLGGTMSVNYPNSFHRGNEEALLLALSEETPEIIVSYACHLLESRHGQRLFRLVFNHCNQQLRDGIVATITRDKKSFSSLCTRRPDEVVHIISSCATRRSMQLLGDAMLQWMAHNQMRYLLSDSKRLEVLQTFILRSPPDIAQFIFEAVAQNCTRLAYQQNGLRLLQNCLDRVSQKQKDYIFTQLSYESLFLAQDSSGNWIVQDVLRRGDPSHIEIIASCLRNHYVTLAKNKYSSNVVEWCLRVFHEEERSVIVYEFISYSHFRDLVTDEFANFALSTALQTCEVPLRNILANAILSQNIIIRNQHCIVK

SEQ ID NO: 5432 - protein, 197 aa, Zea mays
  VARIANT 24..197: note = Derived polymorphism lacks residues 24 to 197
  VARIANT 33..197: note = Derived polymorphism lacks residues 33 to 197
  VARIANT 57: note = Ancestral polymorphism is R, Derived polymorphism is W
MRRPVSTSRLTALRHLDDLRGRLQLGFGSFGFGRRCENQIVENAMRGREERGSWQSRHWILGLEVEGGQVHLPRPVPKAGIACGISGGRRKGVEDRGTMGDMGGRQMWSGGMELRPEVRSSMVRSAAGTELCESILDAHGGWQVPRGPGDGLAEHLGLVAQVGAKLGEVAAVIFVGSSDLLVITERFVDNNPILRWY

SEQ ID NO: 5433 - protein, 99 aa, Zea mays
  VARIANT 9..99: note = Derived polymorphism lacks residues 9 to 99
MASGSSRPQIDQVHTVVKSSGAHLRSLGVCQSLTHAIRFNRLRQPLHVVGGGEMKWGLAAIMASTTTVARDFSGDKCRRSEETAGYKDLQLQLPSKSDL

SEQ ID NO: 5434 - protein, 107 aa, Zea mays
  VARIANT 44: note = Ancestral polymorphism is A, Derived polymorphism is G
  VARIANT 54: note = Ancestral polymorphism is M, Derived polymorphism is K
  VARIANT 58: note = Ancestral polymorphism is F, Derived polymorphism is S
  VARIANT 60: note = Ancestral polymorphism is R, Derived polymorphism is H
MSMIRRPSTETLAMADVDWARYDDRAFHDDDQDTPPEHLRAFEAFVETVVPLDMVLAFGREQSTRARRPGHGREDDVKEKLKLWAKAVAAKARRQYITKQDNDDQNA

SEQ ID NO: 5435 - protein, 313 aa, Zea mays
  VARIANT 35: note = Ancestral polymorphism is L, Derived polymorphism is F
  VARIANT 41: note = Ancestral polymorphism is A, Derived polymorphism is V
  VARIANT 224..313: note = Derived polymorphism lacks residues 224 to 313
MAALLELFLGSSPTPVDWEAEVYPAYGDFAVLPLLVAFFPAVRFLLDRLVFEVLARKFIFGKGHDKLSETDDSRKKINKFKESAWKFVFFLSGELLSLSVTYNEPWFKNTRYFWIGPGDQIWPDQKIKLKLKAVYMYAAGFYTYSIFALLFWETRRSDFGVSMSHHIATVVLIILSYIFRFARVGTVVLALHDASDIFLEIGKMAKYSSCEWLAVMAFLLFVASWILLRLVMFPFWILRSTSYEVLLTLDREKHRFYGPIYYYVFNCLLFSLLVLHIYWWVLIWRMLVKQIQSKGRVGDDVRSDSEGEDEHED

SEQ ID NO: 5436 - protein, 162 aa, Zea mays
  VARIANT 14: note = Ancestral polymorphism is A, Derived polymorphism is T
  VARIANT 32: note = Ancestral polymorphism is A, Derived polymorphism is G
  VARIANT 46: note = Ancestral polymorphism is A, Derived polymorphism is V
  VARIANT 48: note = Ancestral polymorphism is R, Derived polymorphism is H
  VARIANT 49: note = Ancestral polymorphism is G, Derived polymorphism is A
  VARIANT 50: note = Ancestral polymorphism is R, Derived polymorphism is C
  VARIANT 51: note = Ancestral polymorphism is A, Derived polymorphism is V
  VARIANT 54: note = Ancestral polymorphism is S, Derived polymorphism is L
  VARIANT 55: note = Ancestral polymorphism is L, Derived polymorphism is F
  VARIANT 58: note = Ancestral polymorphism is P, Derived polymorphism is S
  VARIANT 78: note = Ancestral polymorphism is D, Derived polymorphism is G
MGAVESSAWMSAAARRWLENAGATAEDAPGRGFNALPLSGVRVSLAERGRALCSLRVPPHLTDAEGNWHAGAIAAAVDNVCAAAIMSVEGIIKVSIHYDISYFTTAKLHDEVEMDGRVVEQKVRMTAVAVEVRKKESGELVAIGRQWMTASRPKVVAAHSKI

SEQ ID NO: 5437 - protein, 185 aa, Zea mays
  VARIANT 1: note = Ancestral polymorphism is M, Derived polymorphism is I
  VARIANT 12: note = Ancestral polymorphism is A, Derived polymorphism is P
  VARIANT 15: note = Ancestral polymorphism is R, Derived polymorphism is H
  VARIANT 21: note = Ancestral polymorphism is A, Derived polymorphism is T
  VARIANT 23: note = Ancestral polymorphism is A, Derived polymorphism is T
  VARIANT 25: note = Ancestral polymorphism is V, Derived polymorphism is M
  VARIANT 29: note = Ancestral polymorphism is P, Derived polymorphism is L
  VARIANT 32: note = Ancestral polymorphism is A, Derived polymorphism is G
  VARIANT 35: note = Ancestral polymorphism is A, Derived polymorphism is T
  VARIANT 41: note = Ancestral polymorphism is V, Derived polymorphism is A
  VARIANT 46: note = Ancestral polymorphism is A, Derived polymorphism is V
  VARIANT 49: note = Ancestral polymorphism is G, Derived polymorphism is S
  VARIANT 50: note = Ancestral polymorphism is R, Derived polymorphism is C
  VARIANT 51: note = Ancestral polymorphism is A, Derived polymorphism is V
  VARIANT 54: note = Ancestral polymorphism is S, Derived polymorphism is L
  VARIANT 56: note = Ancestral polymorphism is H, Derived polymorphism is Y
  VARIANT 58: note = Ancestral polymorphism is P, Derived polymorphism is S
  VARIANT 79: note = Ancestral polymorphism is D, Derived polymorphism is Y
  VARIANT 82: note = Ancestral polymorphism is A, Derived polymorphism is V
  VARIANT 83: note = Ancestral polymorphism is A, Derived polymorphism is T
  VARIANT 84: note = Ancestral polymorphism is A, Derived polymorphism is T
  VARIANT 85: note = Ancestral polymorphism is I, Derived polymorphism is S
  VARIANT 98: note = Ancestral polymorphism is Y, Derived polymorphism is N
  VARIANT 99: note = Ancestral polymorphism is D, Derived polymorphism is G
  VARIANT 105: note = Ancestral polymorphism is T, Derived polymorphism is M
MGAVEPPAWMSAAARRWLENAGATVEDAPGRGFNALPLSGVRVSLAERGRALCSLHVPPHLTDAEGNWHAGAIAAAADDVCAAAIMSVEGIIKVSIHYDISYFTTAKLHKMKLAVNIFLFHGTPFTEIGSSLDEVEMDGRVVEQKVRMTAVAVEIRKKESGELVAIGRQWMTASRPKVAAAHSKI

SEQ ID NO: 5438 - protein, 633 aa, Zea mays
  VARIANT 218..633: note = Derived polymorphism lacks residues 218 to 633
MASNSSAAFFGVRDGDQQDQIKPLISPQQQLAAALPGVAGGVPAASGQGAPPAQPPPKKKRTMPDPDAEVIALSPKTLMATNRFVCEVCNKGFQREQNLQLHRRGHNLPWKLKQKNPLQAQRRRVYLCPEPTCVHHDPARALGDLTGIKKHFCRKHGEKKWKCDKCSKRYAVQSDWKAHSKICGTREYRCDCGTLFSSSDANVFAAFFSSFLLVGTWQCYPAHITFFPILIDMGFWDLELALWRDSFITHRAFCDALAQESARLPPTSLSSLTSHLYGATSTGNMALSLSQVGSHLTSTLQDGHHHHPSAELLRLGATAGGGSSIAARLDHLLSPNGASAFRPPQGPPSSASFFLNAGASVGPDFGDDVGNGPHSFLQGNKPFHGLMQLPDLQGNGAGGPGGSGPSLFNLSFFANNGNSSGSSHEHASQGLMNNNDHFNGGAGGGGGGSEASEAGIFGGNFVGGGDQVPPPGLYSDQASMLPQMSATALLQKAAQMGATSSANGGAASMFRGFVGSSPHVRPATPHMEQSDANLNDLMNSLAGGGVGAGGMFGSSNGAGGPGMFDPRQLCDMEHEVKFGHGGGDMTRDFLGVGGGGIVRGISTPRGDHQSSSDMSSLEAEMKSASSFNGGRMP

SEQ ID NO: 5439 - protein, 218 aa, Zea mays
  VARIANT 29: note = Ancestral polymorphism is P, Derived polymorphism is L
  VARIANT 47: note = Ancestral polymorphism is R, Derived polymorphism is C
  VARIANT 79: note = Ancestral polymorphism is Q, Derived polymorphism is H
  VARIANT 87: note = Ancestral polymorphism is G, Derived polymorphism is R
  VARIANT 102: note = Ancestral polymorphism is R, Derived polymorphism is H
  VARIANT 104: note = Ancestral polymorphism is G, Derived polymorphism is C
  VARIANT 184: note = Ancestral polymorphism is A, Derived polymorphism is V
MAGRGSLAGLLPFGDANDIVLQMANEVLPVVKGVPVLAGVCAIDPFRRMEYFLRQLETIGFCGVQNFPTVGLFDGNFRHNLEETGMRFIVSMEVEMISMAHRMGFLTTPYAFNPDEVAAMAKAGSHIVVAHMGLTTAGSFGAMTATTLDDSVLRVQAIADAAFGVNPDIIVLCHEGPISGPLEAEFILKNTERVHGFYGASSMERLPVEQTITNTVRE

SEQ ID NO: 5440 - protein, 455 aa, Zea mays
  VARIANT 36: note = Ancestral polymorphism is I, Derived polymorphism is N
  VARIANT 439: note = Ancestral polymorphism is R, Derived polymorphism is G
MGASSTCPCHHFSSSSILTKRAIAFVLYALVPLALIHYLLSLPPRLPSPPTTGAATSPSRPQQAEEAPAARCDYSDGEWVRAAAGPRYNGSSCGETIKAGQNCEAHGRPDTGYIYWRWRPRGCALPPFDPEEFLSAVRGRHVAFVGDSLARNQCESLVCLLASAFPAQLVRGAGGGDGDGDGDELRKFRRWAFPSHNATVSVFWSPFLVNGTERPKSPAAAGGLDHNRIYFDQPDERWAAAVPGFDVVVLSAGQWYLNSAMFYDRGAVIGCHRCPEPNRTETGFFGVFRLAVRNALREVISRVAATSSPARPRLAVVTTFSPAHFQGDWDSPTACVRTQPYARGEREMEYMDLEMLRAGVEEVAAAGADASERGAGLAVEALQVTRLAAMRPDGHPGLYTRAFPFAEGAKDRMPNDCVHWCLPGPIDTWNEILLQLVKGWAVGVGAIADTSSPSP

SEQ ID NO: 5441 - protein, 254 aa, Zea mays
  VARIANT 204: note = Ancestral polymorphism is G, Derived polymorphism is C
  VARIANT 90: note = Ancestral polymorphism is H, Derived polymorphism is Y
MAQGTVPSAAGAGGGGCASAPAVSTTPPGTPRASAAAAPPPPPPSFATGFYYAVELYFDPALENQVLKAWNALARRQLGSRLIDAAARPHLPLLHLPAAALPPPGTGAGGDPLLRLAPSLRALASRLDPLALALSSLAALPASATSSPHDNVLFLAPTPSAALLGLHAQLCELLRKDAGVEIPDPFRPDHWLPRCAVAIDVPRGRMAEAFCVLRELKLLPVSGYGMDIALVEVGATVRELVCYPLGGSGSTGAD

SEQ ID NO: 5442 - protein, 174 aa, Zea mays
  VARIANT 167: note = Ancestral polymorphism is Q, Derived polymorphism is L
MSMALSRFTQWLWPGGAAARVDTHEHPSGGLTSSSFPDFPSGFREPDTVTFYTGRQRARPRRVRNRRRSRGEARVDREYDMVIVPSDGGGCLSGSDSDDSDWSIGWLEPQAPELQTDGDPENCFAVLVPCYRHGRQEQQPRRQEGRFLGAGALTDGGPSDGKNFVEQWLSSFQN

SEQ ID NO: 5443 - protein, 864 aa, Zea mays
  VARIANT 409..864: note = Derived polymorphism lacks residues 409 to 864
  VARIANT 146: note = Ancestral polymorphism is Y, Derived polymorphism is C
MVLKSHTNLLDMCCEDVFDFQQPLRSPRHVVNSPGIISDPDWESSNDGNSVGSMPFCFKRKIIVANFLPVICAKNEATGEWSFAMDDNQLLVQLKDGFPIGNEVIYVGSLNVQVDPIEQDRVSQKLFKEHRCVPTFLPAELQHQFYHIFCKQHLWPLFHYMLPVCHDKDELFDRSLFQAYVRANKIFADKIVEAVNSDDDCVWVHDYHLMLIPTLLRKKLHRIKVGFFLHSPFPSSEIYRTLPVRDEILKSLLNADLIGFQTFDYARHFLSCCSRLLGLNYESKRGHIGIEYFGRTVSLKILAAGVHVGRLEATLRLPATIKKVQEIESRYSGKLVILGVDDMDIFKGISLKLLGLELLLERTPKLRGKVVLVQIVNPARSIGKDIEEAKYEAESVAQRINDKYGSANYKPVVLIDYSIPFYEKIAFYAASDCCIVNAVRDGMNLIPYEYTVCRQGNEELDKLRGLNKSSSHTSTLIVSEFVGCSPSLSGAFRVNPWSMEDVADALYSVTDLTRYEKNLRHEKHYRYVRSHDVAYWARSFDQDLDKACIEQYSQRCWTTGFGLNFRVIALSPGFRRLSLEHLASSYKKANRRMIFLDYDGTLVPQTSHDKSPSAELISTLNSLCSDMKNTVFIVSGRGRDSLSEWFASCENLGIAAEHGYFIRWNKAAEWETSFSGIYSEWKLIADPIMHVYMETTDGSFIEPKESALVWHYQNTDHDFGSCQAKELVSHLERVLSNEPVVVRRGHQIVEVKPQGVSKGISVDKIIRTLVSKGEVPDLLMCIGNDRSDEDMFESINRATSLSELPAAPEVFACSVGPKASKANYYVDGCDEVIRLLKGVTAVSLQKDTAGHSHAAFEDTLEVVS

SEQ ID NO: 5444 - protein, 534 aa, Zea mays
  VARIANT 3: note = Ancestral polymorphism is S, Derived polymorphism is F
  VARIANT 31: note = Ancestral polymorphism is P, Derived polymorphism is Q
  VARIANT 74: note = Ancestral polymorphism is G, Derived polymorphism is S
  VARIANT 102: note = Ancestral polymorphism is E, Derived polymorphism is D
  VARIANT 149: note = Ancestral polymorphism is A, Derived polymorphism is T
  VARIANT 196: note = Ancestral polymorphism is T, Derived polymorphism is I
  VARIANT 449..534: note = Derived polymorphism lacks residues 449 to 534
MASSAPAPASTLPCSGAHDAQAELPHIVIFPFMLKSHTIPLTDLAHQLRRRQMATVTFLTTPGNAAFVRAALAGADSVAIVELPFADNLTKPGAPPRRECVETLDLMSSLHAFVESVSLLRPQFEEALAALRPPASAVVADAFLYWAHTAAAARGVPTLSFFGMNMFAHFTREVFVRDNPASVLTRGTPDPDAVFTVPEFPDVRLALADIPFPFNDPATTGPTREMDAKIGHAIASSHGLIVNTFDAMEGRYIQHWNRHIGPRAWPVGPLCLARTAEAAWHHGDVAKPAWMRWLDEKAAAGRAVLYVALGTTLAVESAQLREVADGLDRAGLDFIWAVRPVDADLGAGFEERVRGRGEVVRGWVDQRAILAHECVKGFLSHCGWNSVLESISAGVPLAVWPMGAEQPVNAKLVVDELGVGIRVPPKSDAVSGMARSEQIARVTSDLMTGETGAEAARKMSALAAKAREAVAEAGSSWRAAEELIELEPVTQDKGTGDAGRYIELSEEVVALCVPSVLVDFVQEGLASWFFDMWL

SEQ ID NO: 5445 - protein, 446 aa, Zea mays
  VARIANT 131: note = Ancestral polymorphism is L, Derived polymorphism is V
  VARIANT 126: note = Ancestral polymorphism is E, Derived polymorphism is K
  VARIANT 104: note = Ancestral polymorphism is L, Derived polymorphism is V
  VARIANT 70: note = Ancestral polymorphism is A, Derived polymorphism is T
MASSAPAPASTLPCSEAHDAQAQLPHVVIFPFMAKSHTIPLADLAHLLRRRQMATVTFVTTPGNAAFVRAALAGADSVAIVELPFADNLTKPGAPPLPECVESLDLMSSFPAFVESVSLLRPRFEKTLAALRPPASAVVADAFLYWAHEAAGARGVPTLAFFGTSVFAHVTREVLLRDNPASVLTRGTPDAVFTVPEFPDVQLALADLAFPFNDPATTGPTREMDAKIGHAIASSHGLIVNTFDAMEGRYIQHWNRNIGPRAWPVGPLCLARTAEAAWHHGDVAKPAWMRWLDEKAAAGRAVLYVALGTTLAVESAQLREVADGLDRAGLDFIWAVRPVDADLGAGFEERVRGRGEVVRGWVDQRAILAHECVKGFLSHCGWNSVLESISAGVPLAVWPMGAEQPVNAKLVVDELGVGIRVPSKSNAAQALQKRESGFDLFVTECF

SEQ ID NO: 5446 - protein, 170 aa, Zea mays
  VARIANT 155..170: note = Derived polymorphism lacks residues 155 to 170
  VARIANT 23: note = Ancestral polymorphism is V, Derived polymorphism is A
MASLALRPVIPATTASSRTLTIVVGSRSCHAATLHRGFRSRRLITCKAEPSGGNSTLELGAGAAGLASSAVVAWSLYTLNTTGCGLPPGPGGALGAAEGVSYLVVAGLVGWSVTTKVRTGSGLPAGPYGLLGAAEGVAYLTIAAIAVVFGLQFFQQGSIPGPLPSEQCFG

SEQ ID NO: 5447 - protein, 90 aa, Zea mays
  VARIANT 27: note = Ancestral polymorphism is Q, Derived polymorphism is L
MAQPAFLSSLRSRLGSAPPPPPNHRLQPRRGYHVELGAREKALLEEDVALKRFKSYKNSVKQVSKIGNALTLAVVLACSYELAVLATSTK

SEQ ID NO: 5448 - protein, 180 aa, Zea mays
  VARIANT 56..180: note = Derived polymorphism lacks residues 56 to 180
  VARIANT 47: note = Ancestral polymorphism is D, Derived polymorphism is V
  VARIANT 21..180: note = Derived polymorphism lacks residues 21 to 180
MARRGTEAFPNLGAHCDKPDCNQLDFLPFDCDGCGKVFCAAHRTYGDHGCAKAADQGRTVVVCPDCGDAIERLVPGQGEREILEAHVRSRRCDPGKKRKPRCPARRCREQLTFSNTQDCKGCGRKVCLKHRFPADHDCAASAPGAAAAARRASGECGRGARKEGSGGWALPASIRSLKIF

SEQ ID NO: 5449 - protein, 312 aa, Zea mays
  VARIANT 63: note = Ancestral polymorphism is T, Derived polymorphism is I
MLCFDLPSLFYLTGHYCFQMVQLLLSYESLEINAINIQNETAMDLDDKVPYGESKTEIIEWLTEAGAKNARNVEKIDEASELRRTVSDIKHNVQAQLSENAKTNKRVTGICKELQKLHREAIQNTINSVTMVATLIASIAFIAIFNFPGQYFQDVNSGGDIGEAQIAKLTGFRVFCLLNATALFSSLVVVVMQITLVAWETGAQKQVIKIINKLMWTACLSTGAAFTSLAYVVVGPQHAWMAFTVSAIGGPIMIGTLLFLAYPLLCPRFKFGEDRQRRIKRAGGSKSFSWSLHDGFSDLEAFSDHEKMIYAL

SEQ ID NO: 5450 - protein, 161 aa, Zea mays
  VARIANT 17: note = Ancestral polymorphism is R, Derived polymorphism is C
  VARIANT 46: note = Ancestral polymorphism is K, Derived polymorphism is N
  VARIANT 71: note = Ancestral polymorphism is G, Derived polymorphism is A
  VARIANT 108..161: note = Derived polymorphism lacks residues 108 to 161
MCLFTDLLGDLLCRIHRSPDSLMLVVETTIGTNSTEIVGIVRGCAKTAVSVGITQQAKDDPIYTKVGSILGLRVLPSHWRKGMGKKLADREEDEVVQASYTYNIYNNWDPLEDALRLFDRMCMEQDSPKTSAVNLGSFNVMVDAYCHAERGQYAIKQIEDA

SEQ ID NO: 5451 - protein, 787 aa, Zea mays
  VARIANT 24: note = Ancestral polymorphism is L, Derived polymorphism is V
MPASSVSGGSGPGGVSPDAIIEWLQDEMGYPSAPPAPDQLRKICRGNMIPVWSFLLRRVRSERTVATARRNILVHGVAARRAREGGAMGAGAGDAAAREAEARERDLAAEEAERLRGIVRRQRKELRARIAEVAREEAERKRVLGERSNARHKQVMLQAYEQQCDEAHKIFAEYQRRLHQFVNQARDVRRSSIGVAGATGALVDMQLQSDRDDLYPSTIKSNRLPEDLLETAGERSIRKACETLAADMIETIRSSFPAFEGCGINSSCQLDAEKLGIDLVGEIPTYVKLVALDSLKNPFMLLQSIITYTSRMKTLIHRETDKIDIRADAELLRYKYENEQVIDAASTDASSPLPYQVYGNGKTGSQLSTRGTYDQLLERQKEHVQQFLATEDALNKAAEAKALSQKLLQRLYGTADMAGNKKLPTGNTTQNVTNSRHLELDVWAKEREVAGLKASLSTLTSEVQRLYKLCAEWKEAEDSLKKKWKKIEEFDARRSELEFIYSALQRANMDSSAFWEQQPLSARGYASTTIIPACHAVVDMSTNSRDLIERELAAFSQSLDNSLCRLPATPQALLEAVGSNGVTGSEALAAAEKHAALLTARAGARDPSAVPSICRISAALQYNFVSPGTEGTDSGLASVLNSLEFCLKPCGSEASILEDLSKSINLVHTRRNLVENDRVLLNRAHRAQQEYERVANYCLKLAGEQEKVVSERWLPELRNAVQEARRCFDDCQRVRGLVDEWYEQPAATIVDWVTIDGQSVGAWINLVKQLHMEISRRTLAMSSVGDD

SEQ ID NO: 5452 - protein, 31 aa, Zea mays
  VARIANT 12..31: note = Ancestral polymorphism lacks residues 12 to 31
  VARIANT 6..31: note = Derived polymorphism lacks residues 6 to 31
MMEQQGLFAKASSFREERGKTSRIATSTGDI

SEQ ID NO: 5453 - protein, 166 aa, Zea mays
  VARIANT 74: note = Ancestral polymorphism is S, Derived polymorphism is I
MIKKLRISRSWMKLQSPQKLLSHTKKVRGGSFGLTSLNRLLRRKIYASYLLQFEKPRMPPVRVVGVIRGSEKPSIFVPANEPNSGQWFYVDVPMIARACGLPENTIYIEDINEDVSPTNPYPVPQDVNTLIRHSVMPDDHLKYTFTWYTFNPKLIANLQVYYILIC

SEQ ID NO: 5454 - protein, 316 aa, Zea mays
  VARIANT 243: note = Ancestral polymorphism is P, Derived polymorphism is Q
MASLTLPPAPPNPRQDAIDLHKAFKGFGCDSTTVINILTHRDSVQRGLIQQEYRAMYHEELSHRISSELSGNHKKAMSLWILDPAGRDATVLREALNGDTMDLRAATEIICSRTPSQLQIMKQTYYARFGTYLEHDIAHHTSGDHQKLLLAYMGIPRYEGPEVDPTIVTHDAKDLYKAGEKRLGTDEKIFIRVFTERSWAHLASVSSAYHHMYDRKLEKVIKSETSGNFEFALLTILRCAENPAKYFAKLLRKAMKGLGTDDMTLIRVVVTRTEIDMQYIKAEYLKKYKKPLAEAINSETSGNYRTFLLSLVGHGH

SEQ ID NO: 5455 - protein, 207 aa, Zea mays
  VARIANT 89: note = Ancestral polymorphism is G, Derived polymorphism is R
  VARIANT 71: note = Ancestral polymorphism is R, Derived polymorphism is H
MDERPDACAVASSTSSASVSSAEEDASIQDQLGGHGAFAPPAVDAAQPVPPRRRFWAWATLTARAAAPRLHEACGTAARGLVAWTRRGGAPRCLLVVSVGSVALVALSGLLILVFFVVAAATNAIAFSVVVSLAGAGGFLAVLLAFLAAMYVGAVSVAVFVILATTIATVVAITIATGWVAFFWFVWFTARECLSLTTKRRTGTTSP

SEQ ID NO: 5456 - protein, 114 aa, Zea mays
  VARIANT 43..114: note = Derived polymorphism lacks residues 43 to 114
  VARIANT 31: note = Ancestral polymorphism is A, Derived polymorphism is P
MTSSAGSHDVVVVHTGGCHCRRVRWRVEAPASIVAWVCNCSDCSMRGNTHFVVPAAKFRLQAGADESVTTYTFGTHTARHTFCKVCGITSFYTPRSNPDGVAVTVACVDPVVMD

SEQ ID NO: 5457 - protein, 147 aa, Zea mays
  VARIANT 24: note = Ancestral polymorphism is W, Derived polymorphism is R
  VARIANT 29: note = Ancestral polymorphism is P, Derived polymorphism is L
  VARIANT 35: note = Ancestral polymorphism is W, Derived polymorphism is S
  VARIANT 41: note = Ancestral polymorphism is D, Derived polymorphism is N
  VARIANT 52: note = Ancestral polymorphism is V, Derived polymorphism is I
  VARIANT 53: note = Ancestral polymorphism is P, Derived polymorphism is L
  VARIANT 77: note = Ancestral polymorphism is A, Derived polymorphism is G
MTSSAGSHDDVVHTGGCHCRRVRWRVEAPASVVAWVCNCSDCSMRGNTHFVVPAAKFRLQAGADESVTTYTFGTHTARHTFCKVCGITSFYTPRSNPDGVAVTVACVDPGTLGHVEYRKADGRNWEEWFERSGIAGFSEGKADAAAE

SEQ ID NO: 5458 - protein, 147 aa, Zea mays
  VARIANT 124: note = Ancestral polymorphism is N, Derived polymorphism is K
  VARIANT 104: note = Ancestral polymorphism is V, Derived polymorphism is D
  VARIANT 85: note = Ancestral polymorphism is C, Derived polymorphism is Y
  VARIANT 77: note = Ancestral polymorphism is A, Derived polymorphism is G
  VARIANT 63: note = Ancestral polymorphism is A, Derived polymorphism is P
  VARIANT 62: note = Ancestral polymorphism is G, Derived polymorphism is S
  VARIANT 60: note = Ancestral polymorphism is R, Derived polymorphism is W
  VARIANT 55: note = Ancestral polymorphism is A, Derived polymorphism is T
  VARIANT 53: note = Ancestral polymorphism is P, Derived polymorphism is L
MTSSTSSHDDVVHTGGCHCRRVRWHVEAPASVVAWVCNCSDCSMRGNMHFVVLAAKFGLRASADESITTYTIGTHTARHTFCKVCGITSFYTPRSNLDGVAVTVACVDPGTLGHVEYQKADGRNWEEWFERSGIAGFSEGKADATAE

SEQ ID NO: 5459 - protein, 195 aa, Zea mays
  VARIANT 16..195: note = Derived polymorphism lacks residues 16 to 195
  VARIANT 35: note = Ancestral polymorphism is E, Derived polymorphism is K
  VARIANT 107: note = Ancestral polymorphism is L, Derived polymorphism is P
MHPYLRNLMVLGLSFWQDQNIIINQALKRHSVDPEWWMCPAIPVKDITPAPPPSVAMAKVTDKKKTKKALGTIYEEGSPEPANGDDDGALALPETGLGLSLNTDGVLKAWCGRGSAFADGNGPDLPLSPAHVVGLRLFNIDMIREHPPPCQATHTITRSTRDGICIAKASLNSARKGASMTTRFYCNKISVVLVA

SEQ ID NO: 5460 - protein, 539 aa, Zea mays
  VARIANT 67: note = Ancestral polymorphism is G, Derived polymorphism is V
MERDFLAAIGKEQQHPRKEKAGGGAEESGRLPRPPFAACRAAFLDLYARRAVLGWVGLGSAHSIRFGEMRLGCAAKFKRPFLSLSLLSYLFIYLFWLCSQQRVCGLGCHACRIPSDGRPAVYARFGRELMREKPRWRVAEPFGQPRVSLVDFELPLPLLLLACWWEGRGCLTDPSLAYFGAAAVPAMDWSFASKPCAAPALMSFRSAAREEPSFPQFSALDGTKNTAPRMLTHQRSFGPDSTQYAALHRAQNGARVVPVSSPFSQSNPMFRVQSSPSLPNSTAFKQPPFAISNAVASSTVGSYGGTRDAVRPRTAQLTIFYAGSVNVFNNVSAEKAQELMFLASRGSSAPVACKPEAPPTLAPAKVTAPEVLLPAKQMLFQKPQHLSPPPSSVPGILQSAALPRSASSSSNLDSPAPKSSVPLAVPPVSQAPPATLIATTTAAAIMPRAVPQARKASLARFLEKRKERVTTAAPYPSAKSPLESSDTFGSGSASANANDKSSCTDIALSSNHEESLCLGGQPRSIISFSEESPSTKLQI

SEQ ID NO: 5461 - protein, 435 aa, Zea mays
  VARIANT 252..435: note = Derived polymorphism lacks residues 252 to 435
  VARIANT 228: note = Ancestral polymorphism is A, Derived polymorphism is P
  VARIANT 201..435: note = Derived polymorphism lacks residues 201 to 435
  VARIANT 166: note = Ancestral polymorphism is R, Derived polymorphism is W
MKDKMKDFVKKITSSGSGTPSSFKGTSHVLGSGPSPSSSSSHPASRPSNPSANPRPAPMRPSPPPPPTSTTDFAPLTPLVSSSSCRPDANGTAAAAVACPSCGDAFPSEVAVSEHLDGCLASAGGARACASAYLAADPPPPAASVEVVKRLLGNLLREPENDKFRRVRLSNPRIKEAVADREGGMELLEAVGFRVRDEGGEPFAVMNEVPRDARLNGIRRAVLLLEGAHPSAPPVKAEVEAKESCSNVADLQDGAKNIDRQVRVFFSVPESSVAQNDVPDSFYNLTGNEIRNEAKMRRERLEQSRLLIPKSYKEKQALAARQKYKQAVIRVEFPDRMILQGVFLPGEATGSLYEFVTSALKQPGLEFELISPAIPKPRVVPHFPNPGERARTLQEEELVPSALLKFIPRETDSVVFTGLLDELLKASEPLPAASQ

SEQ ID NO: 5462 - protein, 523 aa, Zea mays
  VARIANT 341..523: note = Derived polymorphism lacks residues 341 to 523
  VARIANT 84: note = Ancestral polymorphism is P, Derived polymorphism is L
  VARIANT 9: note = Ancestral polymorphism is M, Derived polymorphism is T
MAFVALMVMASPVLILLLRAAWITLSCYLLTPLRIRRIMARQGVHGPPPRPLIGNLRDVSALVAQATANDMPALSHDTVGRLMPHYVLWSRTYGKSFVYWYGSEPRLCLTDAAQIKEFLSSKYAASATGKSWLQRQGTRHFIGRGVLMANGAHWSHQRHAVAPAFMPDRLKGRVCHMVECTKQTIRELREAASVPSPGGGRRREVEIGGYMARLTGDIISHTEFDTSYDTGKLIFRLLEDLQRLTASSSRHLWIPGSQYIPSKYRSEIRRLNGELEAVLTESIGRSREIADEGRTTSAYGRGLLAMLLAEMEEKKAEQFSYDLQLVVDECKTFFFAGHDTSALLLTWALMLLATHPEWQNRARAEVARVCGDDLPSYDDLSKLTVLQMIIHETLRLYPPATLLPRMVFEDIRLTGGLHLPRGLSVWIPVLAIHHDESIWGPDANEFRPERFAAGRRPLFLPFASGPRNCVGQAYALVEAKVVLAMLLSHFRIAISDDYRHAPVNVLTLRPKHGVPVHLRPLRP

SEQ ID NO: 5463 - protein, 445 aa, Zea mays
  VARIANT 329: note = Ancestral polymorphism is P, Derived polymorphism is Q
MKVSVKTLKGSSFQIEVEPTDKVAAVKKVIENMQEQASYPADQQVLIHQGKVLSDDTTLEENQVTENNFLVIMLRQVAYLFVFLLIRQYCIYGCKGYCEFGMSTISSKCYISYHSTIVTFHRTRDHQVQHRLRQLRIRSPEAPPTQTVPVVPPQTSAAPAAPAPIVPVSALAATATASAAPAVAVSTEADSYGQAASNLVAGSNLEGTIQSILEMGGGIWDRDTVLRALRVAYNNPERAVEYLYSGIPEQMDVPTSPPSIQPVNPVQAAQAAQTAAPSGPNANPLDLFPQSLPNASANAGTGNLDVLRNNVQFQNLLGLVQANPQILQPLLQELGKQNPQVMQLIQENQAEFMRMINEPLEGDEENEMMLDQMADAAETIAVTPEENEAILRLEGMGFDRALVLEVFFACNKNEQLTANYLLDHMHEFDNDDGLGGPPLSCERRL

SEQ ID NO: 5464 - protein, 367 aa, Zea mays
  VARIANT 20: note = Ancestral polymorphism is V, Derived polymorphism is A
  VARIANT 133: note = Ancestral polymorphism is C, Derived polymorphism is Y
  VARIANT 144: note = Ancestral polymorphism is R, Derived polymorphism is C
  VARIANT 162: note = Ancestral polymorphism is N, Derived polymorphism is Y
  VARIANT 240: note = Ancestral polymorphism is Q, Derived polymorphism is L
MAKARKQKGDGASTGGGATVLHQKLCLSIDMENQLIYGLTIPLIGKMKVINRIVEEGIENSAVEEGKEKENDKEKEEENGNEKSKETGNETEYEKVKNIKLVHIDYILEKAETGVQFVGNVMRSSSQTRRAHCWFPCVDSATERCPFDLEFTVSMDFIAVSNGDLLYQVCANCSVCESDVSGATALSSTAASSDLYGTQAIGSYGKVRSLKAVAVFKCWRSRWDQTHFGRLLLIDFNCSQFQILQGMSFLASLLKQIDRFLQFDNFMPGYNGVLTVSCIRTLVRIAKKVPSFVCLDHIFELVAPFRNMDKPWKVRIEASRILIDLELHHKGLDAALLLFLKYVDEEKSLRGWIARVLFDGFVCFAIF

SEQ ID NO: 5465 - protein, 276 aa, Zea mays
  VARIANT 47: note = Ancestral polymorphism is P, Derived polymorphism is L
MLPYPNNPHHFGVSQELPHPNPTAGFPMPPPGAHLDQRYYVDHHFFPGHGHCFNSETLEAVLRPARAAPECDEALVVTAPQAGGRRNGSLPAAAAAGQGQGQGHARARKRPFRTDRHSKIRTAQGVRDRRMRLSLDVARDFFALQDRLGFDKASKTVDWLLTQSKPAIERLAAATEPSHQRSDDAAFSPPTSGVADVSAGNKSGGVAEKLGRSRSGGSASMEMERACGLDRLVSAAPVLREYYYGLSEMMSNDNGGDGDDDGEYEEDGDFLDGMQY

SEQ ID NO: 5466 - protein, 143 aa, Zea mays
  VARIANT 27: note = Ancestral polymorphism is M, Derived polymorphism is V
  VARIANT 34: note = Ancestral polymorphism is P, Derived polymorphism is S
  VARIANT 39: note = Ancestral polymorphism is P, Derived polymorphism is S
  VARIANT 40: note = Ancestral polymorphism is W, Derived polymorphism is R
  VARIANT 67: note = Ancestral polymorphism is P, Derived polymorphism is L
  VARIANT 74: note = Ancestral polymorphism is A, Derived polymorphism is V
  VARIANT 79: note = Ancestral polymorphism is G, Derived polymorphism is S
  VARIANT 87: note = Ancestral polymorphism is A, Derived polymorphism is V
  VARIANT 88: note = Ancestral polymorphism is D, Derived polymorphism is N
MSRDTRPQPTPPPGSLDARTQTAVVPMASWLLLPFSFFSWPAPPPSGYSSCHSSGSDGGRDNDYWRPTVVAAFAGAQVGHALRRRFADLLPLTVAPILWYIYCLTPFLLLSMKRLCRSGSITSKASYVGSQVMTIICNERSTV

SEQ ID NO: 5467 - protein, 110 aa, Zea mays
  VARIANT 11: note = Ancestral polymorphism is F, Derived polymorphism is I
  VARIANT 21: note = Ancestral polymorphism is S, Derived polymorphism is Y
  VARIANT 38: note = Ancestral polymorphism is A, Derived polymorphism is V
  VARIANT 44: note = Ancestral polymorphism is E, Derived polymorphism is K
  VARIANT 53: note = Ancestral polymorphism is R, Derived polymorphism is M
  VARIANT 54: note = Ancestral polymorphism is A, Derived polymorphism is V
  VARIANT 57: note = Ancestral polymorphism is K, Derived polymorphism is I
MTAREPRGFGFIQYFDPEDASDAKYHMDGKMLLGREIAVVFAEENRKKPADIRAREKNKIIFVSTLVCTLGYLNVYYVLGIPKSLMSEVGCEPMNLDVGRADQCAGAYVV

SEQ ID NO: 5468 - protein, 348 aa, Zea mays
  VARIANT 216: note = Ancestral polymorphism is S, Derived polymorphism is W
MWDGGVEHGSQEAAHQLLPWLGAAPFSEPAAVAGLGAAMGAYACDGVGGLGHGGVFGFGFDAAVQQQQQQQRAADGSGKAVVVSGLLGSLQAELGRMTAREMMDAKALAASRSHSEAERRRRQRINGHLARLRSLLPNTTKTDKASLLAEVLDHVKELKRQTSAMMAATDADADADDEGAGRTQAQAQAQLLPTEADELCVDAGADGAGRLVVRASLCCEDRPDLIPDIVRALAALQMRARRAEITTLGGRVRSLLLITADRRADVQRGGGGGGGDGDDDEEEEDEEEGGERAASHRRHECIASVQEALRGVMDRRTASSCDTSSSGGGGGSIKRQRMNYGAQEQCSV

SEQ ID NO: 5469 - protein, 155 aa, Zea mays
  VARIANT 86: note = Ancestral polymorphism is W, Derived polymorphism is S
  VARIANT 45: note = Ancestral polymorphism is V, Derived polymorphism is D
  VARIANT 37: note = Ancestral polymorphism is Q, Derived polymorphism is R
  VARIANT 9..155: note = Derived polymorphism lacks residues 9 to 155
MLFVLFPVCFLDETTNAQPAASVQQSSQLQRLATVLRCGAVWAAVEAPAALAVTGEEDIDLLAILPPIAVFAFFYFLVAPPLIMNWMRLRWYKREFVETYLQFMFTYLFYPAMMFWAPFVNFRKFPRDPTMRYPWSKPKEGTPLFKDRYPPIDSY

SEQ ID NO: 5470 - protein, 188 aa, Zea mays
  VARIANT 172..188: note = Derived polymorphism lacks residues 172 to 188
MGAENGSNNPSSTVLDGLYGVQLGRPSDPAQTDGGASSSPAACEHHHKRGRGGTAQAQQRLQIRRLWQHRPSCFKPIHCTITCTCLSRAVGNENPRLLMAASALLLPFQPLVVSAVHTGLMEASNVSFARRASMEPELRMAHNLHKVSSLLGGALFIADDCFPETPYIHAAWHLAAAIGVGTCNKLLE

SEQ ID NO: 5471 - protein, 345 aa, Zea mays
  VARIANT 96: note = Ancestral polymorphism is G, Derived polymorphism is R
  VARIANT 249..345: note = Derived polymorphism lacks residues 249 to 345
  VARIANT 257..345: note = Derived polymorphism lacks residues 257 to 345
  VARIANT 287..345: note = Derived polymorphism lacks residues 287 to 345
MHIDADPSHVPVVLIEKHGMVVPQHSSNKDLASNASEQKDTVVLPKLQGESLVPKSSAGKKVGASCELSFLCMVFRQGHHLDLRLVRNQWLLLDPGADCLMFEANEDKTSRDFKEMGSRLAGEVIAFLKKKMDKLSRYGGCKELKLSFVGHSIGNIIIRSALAEPALQPYLKNLYTYMSISGPHLGYWYSSNSLFNSGLWLLKKLKNAQCIHQLTFSDDQDPHNTYFYKLCKLKTLENFKNIILLSSPQDGYVPYHSARMELCPAASSDTSKKGQVFTEMLNNCLDQIRAPSSDTRTFMRCDVNFDQSNHGQSLNTMIGRAAHIEFLETDIYAKFIMWSFPDLFR

SEQ ID NO: 5472 - protein, 86 aa, Zea mays
  VARIANT 73: note = Ancestral polymorphism is S, Derived polymorphism is L
MTSVAASPPAQPHCAPLQWDLGAARPPRWDLGAGKRSSSIFGSTMSCQNIYQMDEVVKQLTPLQDPNNMASASPRPRSTQRGMVHR

SEQ ID NO: 5473 - protein, 461 aa, Zea mays
  VARIANT 358: note = Ancestral polymorphism is T, Derived polymorphism is M
MARSRQEGEAGGEERKLVLGKYELGRLLGQGTFAKVYYARDLSAAAGTGSTSVAIKVIDKARLRRMEGMVEQLRREISIMRMVRHPNVVGIREVLASRSRVFVVMEYARGGELFAKVARGRLTEDHARRYFQQLVAAVGFCHRRGVAHRDLKPENLLLDGDGRLKVTDFGLAALPEQLRHDGLLHTQCGTPAYVAPEVLRKRGYDGARADLWSCGVVLYVLLCGFLPFQHDNCAKMYQRIFKAEYQVPPWVSGDARRLIARLLVVDPAKRASIPEVMCTPWFRKGFVPPVLSVSPPMTPKKRLDGDDDGGGALFDSSSNSGATSPRSCNAFQLISSMSSGLDLSGLFENEQKAATVFTARAPAATVVEKLESAARALGFETTRGKGWKVRMEAKAGGTNGRLAVTAEVLEVAVDVAVVEFAHDAGDALDFNKFCAVDVRPGLAEIVWAWQGDSPAAVVGTA

SEQ ID NO: 5474 - protein, 351 aa, Zea mays
  VARIANT 226..351: note = Derived polymorphism lacks residues 226 to 351
MLLMDSARRAGCSPVCLDLIVGLSPSSDPETTADSQRLELDRPAAGCRATSSLSDEQVTDRPTDRLLAARLPSWLRARVVLVPEPIGTGVATHDHDDAVCDRRGPWRPGSPRSARRTGGSPRRSPTCTAPRHHHHASGRKKSRDSLEAPSNSSDGGKTTDHADEATCRRVKVARARVCTRIDPSDATTLAVKDGYQWRKYGQKVTRDNPSPRAYFRCAYGPSCPVKKKVQRSAEDSSVLVATYEGEHNHPCPTRAGDLPSSATASGSVPRSISNSINSSGPAITLDLTMNGAGGVRVLEGAEAPDLRKLCQEIASPDFRTALVEQMARSLTKDCKFTDALAAAILQQLPGP

SEQ ID NO: 5475 - protein, 218 aa, Zea mays
  VARIANT 40: note = Ancestral polymorphism is N, Derived polymorphism is D
  VARIANT 62: note = Ancestral polymorphism is T, Derived polymorphism is I
MEASSWDAVRKQARRLEAQLDDQMIAYRKLVSMKSDGSEDNIESDIERSLKQLQQVNSQMQTWVSSGGSEVLSHTLTRHMEILQDLTQEFYRLRSSLRAKQQHTSLLDLRDFDRAKFDVEEPSDSADQVLLREQAAIGRSTGQMDNVISQAQATLGSLMTQRSTFGGITTKISNVSSQLPTINHVLSSIRRKKSMDTIILSLVASVCTFLIFIYWLSK

SEQ ID NO: 5476 - protein, 125 aa, Zea mays
  VARIANT 105: note = Ancestral polymorphism is V, Derived polymorphism is I
  VARIANT 75: note = Ancestral polymorphism is R, Derived polymorphism is C
  VARIANT 53: note = Ancestral polymorphism is D, Derived polymorphism is N
  VARIANT 48: note = Ancestral polymorphism is P, Derived polymorphism is S
  VARIANT 36: note = Ancestral polymorphism is T, Derived polymorphism is M
MKCNPRATSSCRKCRKAHFTAPSSVRRVLMSVGLSTELHHKYNVLSIPIRKDDEVQVVRGTYKGREGKVVQVYRRRWVIHIERITREKVNGSTVNVGIHPSKVIVTKLKLDKDRKALLDRKAQNN

SEQ ID NO: 5477 - protein, 142 aa, Zea mays
  VARIANT 36..142: note = Derived polymorphism lacks residues 36 to 142
MHAILYTICMTSRATLHSVVMEPPRKNKSSGMQVKEEVKLEDGNDLLVKRRRTELPGSIVQLQQKIEVFDMENKVPDGLSVEDSTGKDPMDVLTRYAAQNSGQGNSCSNEPAISRLTKICKAIGWKEPSYDFEEQGPPHNRM

SEQ ID NO: 5478 - protein, 149 aa, Zea mays
  VARIANT 5..149: note = Derived polymorphism lacks residues 5 to 149
  VARIANT 41: note = Ancestral polymorphism is L, Derived polymorphism is P
  VARIANT 42..149: note = Derived polymorphism lacks residues 42 to 149
MPSVQNGFEYRENEKLEDDLADAYLASMNQPKKKESAISKLWKSSRPKNSEMCKKDAVVETVNARSSNVRHSVGTYSTVESGIQETGLSLPSVEQWSSPDSMNIQFNRGFKGCIEYPRTSQKHSLKAKLMEARMESQKIQLRQVLKQKI

SEQ ID NO: 5479 - protein, 326 aa, Zea mays
  VARIANT 204: note = Ancestral polymorphism is T, Derived polymorphism is K
  VARIANT 136: note = Ancestral polymorphism is S, Derived polymorphism is W
MGRPPCCDKVGVKKGPWTPEEDLMLVSYVQEHGPGNWRAVPTNTGLMRCSKSCRLRWTNYLRPGIKRGNFTDQEEKLIIHLQALLGNRWAAIASYLPERTDNDIKNYWNTHLKKKLKKMQAGEGGGGDGDGAAGASEGGAVATAGAGGKRPAVPKGQWERRLQTDIHTARQALRDALSLEPSPSASAPPPAKVEPLPATAPGYTTYASSAENIARLLEGWLRPGSGGGKGPEASGSTSTTATTQQRPQCSGEGAASASASHSGGAPANAAAQTPECSTETSKVAGAGAAPPAFSMLESWLLDDGMGHGEDGLMTDVVPLGDPSEFF

SEQ ID NO: 5480 - protein, 455 aa, Zea mays
  VARIANT 233: note = Ancestral polymorphism is E, Derived polymorphism is K
MAARAADENRRPAAGKPAPGVRGGCGRPRLISSCIVCCVASPCLHGSDLLICADMASRRALTDIKNLVGAAPYPYAVAKKPMLQKSKRDEKQPALASSRPMTRKFAASLASKGQPECQPIVADPEPEVCQQKESVGDGTVDIDVELYELVDGSDSDIDMGATENKDIMNEDELLMDIDSADSGNPLAATEYVKELYTFYRENEAKSCVRPDYMSSQQDINSKMRAILIDWLIEVHYKFELMDETLFLMVNIIDRFLEKEVVPRKKLQLVGVTAMLLACKYEEVSVPVVEDLVLISDRAYTKGQILEMEKLILNTLQFNMSVPTPYVFMKRFLKAADADKQLELASFFMLELCLVEYQMLNYRPSHLAAAAVYTAQCAINRCQHWTKVCESHSRYTSDQLLECSRMMVDFHQKAGTSKLTGVHRKYSTYKFGCVAKILPAQFLLESGGTPPPSGAN

SEQ ID NO: 5481 - protein, 126 aa, Zea mays
  VARIANT 7..126: note = Derived polymorphism lacks residues 7 to 126
  VARIANT 30: note = Ancestral polymorphism is A, Derived polymorphism is T
  VARIANT 45..126: note = Derived polymorphism lacks residues 45 to 126
  VARIANT 49: note = Ancestral polymorphism is V, Derived polymorphism is M
  VARIANT 50: note = Ancestral polymorphism is Y, Derived polymorphism is F
  VARIANT 55: note = Ancestral polymorphism is L, Derived polymorphism is M
  VARIANT 59: note = Ancestral polymorphism is P, Derived polymorphism is L
  VARIANT 94: note = Ancestral polymorphism is T, Derived polymorphism is N
  VARIANT 95: note = Ancestral polymorphism is G, Derived polymorphism is C
  VARIANT 111..126: note = Derived polymorphism lacks residues 111 to 126
  VARIANT 118..126: note = Derived polymorphism lacks residues 118 to 126
  VARIANT 125: note = Ancestral polymorphism is L, Derived polymorphism is P
MDRVGLQAFCKRHGLSARGSNADLIAHLDTALGIIGVEKTASQQEIKKVYHKLALRLHPDKNPGDEETKEKFQLLQKVISILGDAEKRALYDETGITDDDALVGEAANNLQEYFRTMYKKVWLLLY

SEQ ID NO: 5482 - protein, 293 aa, Zea mays
  VARIANT 247: note = Ancestral polymorphism is R, Derived polymorphism is G
MKEHLMLNIDDLSILEPNEVIGTVKNKSSGETIAHPPSMAHAILAVGESMVSEAEPLLQVVECRICQEEDSIKNLESPCACTGSLKISISSNSVLVFSMQYAHRTCVQRWCNEKGDVTCEICHEPYEHGYTAPPRGHPDETTIDISGGWTITGTAFDLRDPRILAVAQNHIMEAEYDDYSATNASTAAFCRSAALVLMALLLLRHALTLTDEDDDDTSAMFSLFLLRAAGFLLPFYIMAWAISILQRRRQRQEAAALAAAEVAFILQSGQGRGVHFTIAPDSPATPQHEPPQP

SEQ ID NO: 5483 - protein, 180 aa, Zea mays
  VARIANT 21: note = Ancestral polymorphism is V, Derived polymorphism is M
MEMASSSAPTASYNVSVAQAVLTLSINAILLWLTTVIKSYSSSSSSARRRDAAPATAPAPPSPSPAKPAAAAAAAVDLDAVLGLMGAGAESVGFEEAAALFEEEEATVEEARQAFAVFDRDGDGFIDAAELRAVLTSLGFESGVSAAAEAECQRMIDAYDEDKDGRIDFREFVKLMETSH

SEQ ID NO: 5484 - protein, 421 aa, Zea mays
  VARIANT 297..421: note = Derived polymorphism lacks residues 297 to 421
MSSAAAAPRVPGAARRLSQSPKPPGARDKEPPPPASARRKNLLPSPASARGAAASMLLRRAAVAGGGRGSSYVHPSSSLSVSCASEASTESFCSRASTGRIGRRPAGPPAGAPRRRAAGSAGPPSARPAAAASASRKVASSGVVPGGGAAATTVHHQAVPPVVAGGLLNGEPTAAASAGPPRCPWITPNSDPCYAAFHDQEWGAPVHDDMKLFEMLTLSGALAEMAWPAILSKRDTFREVFMNFDPQLVAKLNEKKFLAPSSPASSLLSQHRLRIIIENARELLKVIDEFGSFDSYCWSFLSNKPTVGRYRHTREVPLRTAKADAISQDLMRRGFLGVGPTVVYAFMQAVGMANDHLVTCYRFEECCDLESCAAPEGYGGDNCKKPPAAASDQELSMLCGLVQCVALEPSRAATATVISIS

SEQ ID NO: 5485 - protein, 185 aa, Zea mays
  VARIANT 169: note = Ancestral polymorphism is T, Derived polymorphism is M
  VARIANT 53..185: note = Derived polymorphism lacks residues 53 to 185
MLKSCFDVFQESQQPPQQQQPQVQVQQAQPQNQAAPVMRRASSIAARQAAMAQQSQETKPVQSSPKIKRQTSARSGSVASTKPPIAASAPKPGGSPKKGEVKPTADPVQTPTTGADSPKPEPSARSLPGVEGVDKMAIDEASGDAPEGAEELDPALEEETPIEEMIRVTRAKLRRRTTTEVPVGN

SEQ ID NO: 5486 - protein, 218 aa, Zea mays
  VARIANT 79: note = Ancestral polymorphism is R, Derived polymorphism is W
MDDIAWERGRNADDSSRAVLTPPRGPGLLSPSSPSGSGPIPSAAVLALPASATSQSAGLLASSRLAGDMDGGGETLLVRRSKGKKRPQPAAPAEEGSGSGGRFRAIWRDYHDLLQETEAKRKRLASTKRRSLALLAEVKFLRRKYQSFLRGGSQQTHYRLKKQARYMPSPLGSNKAAALADHGLKLSVCRDKGNSPAIEGKRTVPWQDRLALKAEALS

SEQ ID NO: 5487 - protein, 478 aa, Zea mays
  VARIANT 41: note = Ancestral polymorphism is R, Derived polymorphism is W
MAHCSPEDPIAKSIELIAGRDRETASCGDEGGRYRRFPDPRGHEALAEDSSMLVIRDALLSLLQKDRLRQEIILAELDKIERDIALHSSTDVDRANSAAPFSSLEEMPHSREALGIEDEDHDFVFVAADVDNYLEKDEVREGVELESQKLATEDECLETSCDAGNAAGQQKAALDESKLQEPDEEKDEVRQGVELESQKPATEDECLETSCDAGNAAGQQKAALDDSKLQEPNEEKDEVREDVELESQKPATEDECLKTSCDASNAAGQQKAALDSKLQEPNETTLPMKTMATSSLKWSCEICLVIAPTEDHLQQHFAGQKHQSNVASLVSRNSAYSYNAAWVCIFCQSNCYRKSDLENHLRGKRHKAKIQSLLEECKNLALNSQPNLVTQGEHNNPALSWNCSLCQAKSTGQSALAKHLRGERHKLNFLVLQVEGKQYLTDWGCGICEAKCKSVFQFENHCSGRRHQKKIKALLYWE

SEQ ID NO: 5488 - protein, 417 aa, Zea mays
  VARIANT 122..417: note = Derived polymorphism lacks residues 122 to 417
  VARIANT 128..417: note = Derived polymorphism lacks residues 128 to 417
  VARIANT 173..417: note = Derived polymorphism lacks residues 173 to 417
  VARIANT 175: note = Ancestral polymorphism is T, Derived polymorphism is I
  VARIANT 183: note = Ancestral polymorphism is R, Derived polymorphism is I
  VARIANT 188: note = Ancestral polymorphism is P, Derived polymorphism is L
  VARIANT 195..417: note = Derived polymorphism lacks residues 195 to 417
  VARIANT 201: note = Ancestral polymorphism is D, Derived polymorphism is N
  VARIANT 228..417: note = Derived polymorphism lacks residues 228 to 417
MPPSVAPPLSSSSRPASGPPRHPSLHLAVSYLLPLDRICLPPWPRYQGRDRRDLLGFGVFAVDSESRRRCSRRRPRAPSAPLLNHPGCSSNLSTRLVLVESKDCQLAHIGLFANQNIAVGEELAYDYRQKLVAGDGCFCHCGGLSVGVQSTSTPKFNHLPTSIVDMNWTCLIQGTWLMCSSSRGYLAPEYTIQGQLNKKRDVYSFGVLLLEIVSGRCHTDPRLPVDEQFLLEKVWTLYEFDDLESIIDRTLKRDLDPSYAPLTLPTPTPATVAPPCSPHPQHSATRPPQLDAPCSATPPPSSRRGCPRAPPHSLCRPNLRSRCLHFPSRRRFLCITSHAADLPRTEPARPTMPGATPSPQRRPLHGVVGCLEALASPSPCTRLGCPNCSNAMPPPHRPLCAAAQSRCDRPWRSPRVP

SEQ ID NO: 5489 - protein, 281 aa, Zea mays
  VARIANT 226..281: note = Derived polymorphism lacks residues 226 to 281
MTIELRSSNTSSGRHWKTGCKSVGRPPRWGDGSSSISNRTKLYVVADEFSMPTSRVMFKEVDAPSPSPALWNGPQEAGKKVEEEFSTYPLSVLMMSVKNNTKAHIKEPEEVKLLKNLPHPNIVRYLVTVREEDTLNILLEFVPGGPINSVAFGEARFIPRACFMCAPGQVIAVWKDKQLWPHWHGMLSDTSNDESGSDVDDFGPSFVHKVSGYGCLTPVREEAVNWRLDILRPPIGNYSGSVDALAIDGEDCLARYDILESIGSDIKASIMEKFPTVFSKQ

SEQ ID NO: 5490 - protein, 600 aa, Zea mays
  VARIANT 212..600: note = Derived polymorphism lacks residues 212 to 600
  VARIANT 299..600: note = Derived polymorphism lacks residues 299 to 600
MRVLAVDDDPTCLKVLENLLFRCQYHGTSPDNNGPGSHCPELLREKKDQFDPVISNVHMPDMDGFKLLELVGLEMDLPGISTDHSTFNSTQIVHVSFSHHDLSLGYFHHFWYGSVCNVPGIIILFLVWIWNGLGSTTMMRQSCSKDWMISIPLLPIRLGSPSPLCPTGTKQPMELEQPMDDFHSPAANSPNCFDPSTQSACTQPIVAANSDWVRKPEGRGAWLTQNGRQDTAGGSLQPHAWWPVWEGAHCSSSDDFRNFSGQGHDEISVCYLASFTTKIILHNRFRQQKLMEFAEMPFQACSICATRVIADNVGDNVGDIVGMGSYLFGSYAESSCAALVVASISSFGINHQFTPMVYPLLVSSVGIIACLITTLFATDFFEIKAVSEIEPALKKQLIISTVVMTIGIALMLAWQLFLCVAVGLWAGLVIGFITEYYTSNAYRTGAATNVIFGLALGYKSVIIPIFAIAFSIFLSFSLAAMYGVVVAALGMLSTIATDLAIDAYGPISDNAGSLSLSTATTIGGAPNTVAPCAPAWCGDLAISYPFWLAGTHLPKCGYDQGFKVTCDKAKVYLKNSTCTYQIQAIFYAMKLLRVAIVGLS

SEQ ID NO: 5491 - protein, 264 aa, Zea mays
  VARIANT 112: note = Ancestral polymorphism is V, Derived polymorphism is I
  VARIANT 153: note = Ancestral polymorphism is D, Derived polymorphism is E
  VARIANT 220: note = Ancestral polymorphism is V, Derived polymorphism is L
MVAVAEAAVTTTMTTTGGRYALLMAAHDSEYVLNKYGGYLHVFVAAFGDAGETWDLYRAIDSELPGPGELEAYDGFVISGSPHDAYADELWILRLCLLVRALHGMRKRVLGVCFGHQVICRALGGRVGKARAGWDVGVREVAIAEAPPRRFLDALRERDQLPLRARITEVHQDEVWEVPEGAEVLASSDKTGVEMFCVGEHVLGIQGHPEYTKDIFLSLVDRLLAAGSITIPFAEAVNRQLETTAPDREFWLMLCKSFLKAREE

SEQ ID NO: 5492 - protein, 975 aa, Zea mays
  VARIANT 395: note = Ancestral polymorphism is T, Derived polymorphism is A
MIAGAAAAGQLLVVAGGARSSGSAALPSRPLALLLLLLLLLLCLVGAEQAAPTPGAAGERRRVDVDVGVILDRTTWLGNISWACMELALQDFYADDDDAGYSTRVRLHLRDAPAGPSAVDAASAGVDLLKNVHVQAIVGPQTSTQAKFLAELGNKASVPIISFSANSPSRSPSQTPYFIRTAWNDSCQAEAIASLVQNYNWREVIPIIEDDDSNARFIPDLVDALGHVDTRVPYRCKIHPSAGEDEIKRAISGLKENWTSVFVVRMSYQLALKFFQLAKDEGMMGQGYVWITAYGLTDIFNVVGYPALEVMEGVVGIEPYVPETVKLNKFRRRWREKYRSENPGTSINEPITSGLYAYDTVWAIALAAEQAGFVNSDFVLSETNNGSTDFDKISAYKAAEKFRGAFLKVNFTGISGQFVIQDMQFQLVSTTYKIINIAGREKRAVGVWTPGLNMSKILEKKDGISTIIWPGGSENTPRGWLLPANKELKVGVPVKPGFGSFIRSEDGIPKGFCIDVFEEVISNLTYKVPKHYVEFGNGEGESNGTYDELVYKVYLKEFDAVVGDITILANRSLYVDYTLPYTESGVRMLVPVRDQRQKTAWTFLEPLTADLWFGTGSFVVFTGFIVWFIEHRTNQEFRGPPASQIGSVFYFSFSTLVFAHRERIVNNLSRIAVVVWLFVVLILQQSYTASLSSILTVEQLQPTVTNLDEVIRRGDYVGYLNDSFMPNLLKRLKINETKMRAFSSPEEYNDALSTGKVAVIVDEIPYLKVFLAKYCHNYTMVGPTYKFDGFGYAFPRGSPLTPEISRGILELASNGRMDELEKKLYGDTSCPDKDDSQTSSSLTLHSFLGLFIITGASSLLALILHVIITLYDHRSNWINGSGQISWRELLAILVKIFHERDSANTPDEEVPGMEDIDPATAESPWSMSNHVIENVDSDTDTGSTPEGEGTPGREVANQGPGPLSFAYMHSEGAME

SEQ ID NO: 5493 - protein, 346 aa, Zea mays
  VARIANT 31: note = Ancestral polymorphism is E, Derived polymorphism is G
  VARIANT 27: note = Ancestral polymorphism is A, Derived polymorphism is G
MGRALCCDKATVKKGPWAPEEDAVLKGHIDEHGAGGNWIQLPHKIGLNRCGKSCRLRWLNYLRPNIRHGGFTEDEDRLICSLYISIGSRWATIAAQLPGRTDNDVKNHWNTKLKRRLLGGGGRRPRAEARLQLLTNPTWQHNSFASSALERLHVSMRLHRRHQARLDDNPPPAAFTLYNYDSLAAPLWPSLAPSSSPSPAASESSEMLPRQQPPAGATPTAGYSAGLWWTHMPGSYSFGYAGGRVQENVDGTCTPPLSTSTRDTMTAVGVESSSSTPTASSASATFESSMDDEIDMLLRQIQCFGESGRHIGDEVAVDGIDHCFRAVDRHETANGSVGSWSGFGVP

SEQ ID NO: 5494 - protein, 789 aa, Zea mays
  VARIANT 572: note = Ancestral polymorphism is L, Derived polymorphism is F
MGCKGSKLDDQEAVALCRARAELLAAAVRHRYALADAHAALADSIDSVAAPLHRLLRLQAESPGLTLPSARKGGGAPADRLPRSFRPSSSAPQPAHGHSSHLQFGASPGSEPPSPAESPPRRVPEQLQHPHPHHAAYGYEYDYATQPAYAYPPTPAGSLQFYYARSRPPPASVAVTQRVPGPPERVVRFGSFDAAGGYPQQYAYSAQRAPIPPPAPAALQRAAPPAPPKASSWDFLNVFENYDSYEYDTYYYDSATAATAAAAPYTPSRSSREVREEEGIPDLEDDDDEDSVVVNEVAGQYSAPGSGGARSRRSSLGGVSATAELDQAENIIDVIGELRRRPTAHGNVSVHAPPPPTRRAVDKENVACEIKAQLVRTAEAARQLAPMLEVGRPSYQGRSELLPSSKMMSAISVAHLGCKDMDAVDVGVVAMVDSQSLSSALEKLYFWERKLYAEVKAEEKMRLLISKNSKRLKLLDQKGAEPQKIDATRNLLRKLSTKIRIAVRVIAKISRKINKLRDEELWPQVNALIQGFVLMWQDKLDSYHRQCQVISEAKNCTSVLSGENGQDLVLELEVELIKWIISFSSWVNSQRNFVKALNGWLALCLNYEPEDNTAGVPSYSPGSMGAPLVFVTCNKWSQAMDQISEKDVVNAMQALVSSVRHLWEQEHLEQSEQIISIREREKWIKFLERKTQDISKEADELNKKLALIPSRHRLHVPRIVQLYEAHCVEASSLHINLRLVLEALENFAANSLQAFLGVSKSAEGTRLPRDNVRRERRSSNRGSNYKTSS

SEQ ID NO: 5495 - protein, 152 aa, Zea mays
  VARIANT 10: note = Ancestral polymorphism is A, Derived polymorphism is V
  VARIANT 14: note = Ancestral polymorphism is P, Derived polymorphism is S
  VARIANT 50: note = Ancestral polymorphism is E, Derived polymorphism is G
  VARIANT 66: note = Ancestral polymorphism is K, Derived polymorphism is Q
  VARIANT 86: note = Ancestral polymorphism is A, Derived polymorphism is S
  VARIANT 103: note = Ancestral polymorphism is A, Derived polymorphism is G
  VARIANT 110: note = Ancestral polymorphism is R, Derived polymorphism is H
MAPKADKKPAAKKPAEEPATEKAEKAPAGKKPKAEKRLPAGKSAGKEGGEGKKGKKKAKKSVETYKIYIFKVLKQVHPDIGISSKAMSIMNSFINDIFEKLAAESAKLARYNKKPTVTSREIQTSVRLVLPGELAKHAVSEGTKAVTKFTSS

SEQ ID NO: 5496 - protein, 328 aa, Zea mays
  VARIANT 112: note = Ancestral polymorphism is M, Derived polymorphism is T
MKTTSSHGLHAASASLCTPYLLLLPLGLLAVLLALPSLGSSYARSQGLGVLCRSAAAGTDVGGGGDYSSSVASGAGDEKKAAVAETPRPELSLLVGVLTVPGRRERRDILRTAYALQPAAPAARVDVRFVFCSVTDPVEAALVAVEARRHGDVLVLDCAENMNDGKTHAYLSSVPRLFASAPYDYVMKTDDDTYLRVAALVAELRPRPRDDVYLGYGFPVGDDPMPFMHGMGYVVSWDVARWVSANGDILRHNDTHGPEDLLVGKWLNIGGRGRNRYDLKPRMYDLNWFMDNFRPDTIAVHMLKDNRRWAATFTYFNVTAGIHTNSLP

SEQ ID NO: 5497 - protein, 204 aa, Zea mays
  VARIANT 113..204: note = Derived polymorphism lacks residues 113 to 204
  VARIANT 101: note = Ancestral polymorphism is R, Derived polymorphism is W
  VARIANT 73: note = Ancestral polymorphism is S, Derived polymorphism is G
  VARIANT 60: note = Ancestral polymorphism is S, Derived polymorphism is Y
  VARIANT 29: note = Ancestral polymorphism is G, Derived polymorphism is S
  VARIANT 8: note = Ancestral polymorphism is V, Derived polymorphism is F
MLRPAYAVEYDYLPAYQCSRSLMTKKIEGLFFSGQINGTTGYEEAAAQGIISGINAARHSDGKSLIILERESSYIETLIDDLVTKDLREPYRMLTSSSEHRLLLRSDNADSRLTPLGREIGLIDDRRWELYQSKQARIKQEKERLRSTKVPGGEFAAEVTAVSNQPVKDSSTLEAILKKPHVQYKLLTSMDAEMKIYLELRRNV

SEQ ID NO: 5498 - protein, 103 aa, Zea mays; identical to SEQ ID NO: 2445
  VARIANT 84: note = Ancestral polymorphism is A, Derived polymorphism is P

SEQ ID NO: 5499 - protein, 324 aa, Zea mays
  VARIANT 22: note = Ancestral polymorphism is L, Derived polymorphism is F
MSATATDEAAVEARLQELRGRLGKKQHFEEAVNELAAAVRDRYAGASPALRKAMYSTVCRVATVLQTRYTAPGFWHVGLNLFVGIEKLVSNPAEKEHLKTCISRAREHLDEKENEDSVPSNREADTRFLFEGHLTVGQEPPPPAWLVAQNLTRELSILTESSGDQDGSNNRTVPRAEEITPAIMNLLETISGDRDLETALEESLQGIIEYPQRAPPASKEVVANLPVIAVTEEVMSRLGSETECAVCRENLVVDDKMQELPCKHLFHPLCLKPWLDENNSCPICRHELRTDDHVYESRKEREREEEEDRRGAANAVRGGEFIYI

SEQ ID NO: 5500 - protein, 293 aa, Zea mays
  VARIANT 260: note = Ancestral polymorphism is R, Derived polymorphism is H
  VARIANT 248: note = Ancestral polymorphism is A, Derived polymorphism is T
  VARIANT 99: note = Ancestral polymorphism is P, Derived polymorphism is R
MAGYRRTISFPAPKPGADALALATASDKLAAYRIRSSSLPCRFHPLLLQLDDDVAALRLVIGQSPPCPSAPSPSASSVSAAASQVCRVLVSLSELLRHPQVREPLRRLLGRSRLAERLLDDLLRLADAHGSFRQALVALAALQAETRAALRRGDPTRLASASRAQRRAGRDLPRLAAAARAVAARAPAPLPEGLPPDAAALAAAVADATAAVASGSAAVFSGVSSLSNAAASARVEVASTPCWVTAPARPSDAPGTSRHHIWWVADLIPERAYRLDFTFLRRFAVLASRETVT

SEQ ID NO: 5501 - protein, 257 aa, Zea mays
  VARIANT 18: note = Ancestral polymorphism is C, Derived polymorphism is S
  VARIANT 38: note = Ancestral polymorphism is R, Derived polymorphism is I
  VARIANT 149: note = Ancestral polymorphism is R, Derived polymorphism is G
  VARIANT 220: note = Ancestral polymorphism is L, Derived polymorphism is Q
  VARIANT 253: note = Ancestral polymorphism is V, Derived polymorphism is D
MDDRGGASSSGSSRWRGCRDKESSYGHHHHWPPPHSARCLCLCLLLSLTLLLAAAAALLAVFVTRLKKPAFYLQSIQMDRSFSLLTWSSNPNRSADDGTAAPCAVASLVFAAQNLNGVGIRYGATVLDVAYANESVGALDVPALYQPPRSANVTVLVHAVLAQRNVTRLLVGELSAQRRYMEVRVAGRVDARTHIMNVPLPKVQFSLDCRFGANYTEIVLREGIESVMTRKVFLARPAAYNVLWHCSDAHACVTRLI

SEQ ID NO: 5502 - protein, 156 aa, Zea mays
  VARIANT 46: note = Ancestral polymorphism is L, Derived polymorphism is R
MAKGGLSKLKCMLKRWHSSSRISRTPSGCSARSSHDVGDAGAGFALENSWRKGVAASSVFAFGGGGTGSASFHGADGVPPGLHPVYVGKSRRRYLIAADLVGHPLFQNLLDRSGGTGAGGTVVGCEVVLFEHLLWMLENADPQPESLDELVEYYAC

SEQ ID NO: 5503 - protein, 181 aa, Zea mays
  VARIANT 166: note = Ancestral polymorphism is G, Derived polymorphism is R
  VARIANT 164: note = Ancestral polymorphism is D, Derived polymorphism is G
  VARIANT 143: note = Ancestral polymorphism is A, Derived polymorphism is E
  VARIANT 130: note = Ancestral polymorphism is E, Derived polymorphism is D
  VARIANT 108: note = Ancestral polymorphism is A, Derived polymorphism is V
  VARIANT 26: note = Ancestral polymorphism is W, Derived polymorphism is R
MGDDDGAKAATGAKQMVRLRELLHKWQHLMALADQKQQREEEEDDHAAGGGVPEEAVAPAIPPLVVRRLRRTETAESVSDDESCGHSPEPPPPPPDVPRGYCPVYVGAEQRRFVIPTGYLAHPVFRLLLEKAEEEFGFQHQGALAIPCETEAFKYILQCVQRHDRRGDDEAANQEPAMHRA

SEQ ID NO: 5504 - protein, 119 aa, Zea mays
  VARIANT 6..119: note = Derived polymorphism lacks residues 6 to 119
MGLLNQLWDDTVAGPRPDSGLGKLRKYASFSPSSSSSAAVAAAAAAGSAPPPGAVTRSLTMLRRPAALSVVTSPRSESSSAPSSPSPASGAPDSPFGAGLEAPGVAVTVACREKPEMPT

SEQ ID NO: 5505 - protein, 280 aa, Zea mays
  VARIANT 25: note = Ancestral polymorphism is R, Derived polymorphism is H
  VARIANT 26: note = Ancestral polymorphism is C, Derived polymorphism is Y
  VARIANT 55: note = Ancestral polymorphism is A, Derived polymorphism is V
  VARIANT 57..280: note = Derived polymorphism lacks residues 57 to 280
  VARIANT 58: note = Ancestral polymorphism is A, Derived polymorphism is V
  VARIANT 72: note = Ancestral polymorphism is R, Derived polymorphism is C
  VARIANT 98: note = Ancestral polymorphism is V, Derived polymorphism is M
  VARIANT 99..280: note = Derived polymorphism lacks residues 99 to 280
  VARIANT 105: note = Ancestral polymorphism is W, Derived polymorphism is L
  VARIANT 112..280: note = Derived polymorphism lacks residues 112 to 280
MVKQRGSDYGEPWSAAGSVFWISPRCTYSGGASAAPDSGKLPAAALRRVLEMPGAHQAPACYDALSARLVERAEFRAYFTSVVLIIEVVLRKDNYNSMQRSIDILSFVLSLRVRVLFDNAKWAYPGGFSEEKQARRELNDPENALIYAFAGAITGAITTPLDVMKTRLMVQGQGNQYTGIVSCAQTILREEGPKAFSKASLVPTALVLLRWETNTKANGCKEGKRARRRRSTKVTLQAQQAALEENQSLLRQTQEEVKGMHTKFEETNALLRAVLKLQKD

SEQ ID NO: 5506 - protein, 110 aa, Zea mays
  VARIANT 92: note = Ancestral polymorphism is V, Derived polymorphism is G
  VARIANT 78: note = Ancestral polymorphism is S, Derived polymorphism is T
  VARIANT 59: note = Ancestral polymorphism is G, Derived polymorphism is D
  VARIANT 58..110: note = Derived polymorphism lacks residues 58 to 110
  VARIANT 22: note = Ancestral polymorphism is G, Derived polymorphism is D
MVQVGNSPEYITDRKLGKGGFGHVYVGRRVSGGAARTGPDAYEVALKLEHRNSKGCNYGPPYEWQVYNTLNGCYGIPSVHYKGRHSDYYILGMDMLGPSLWDVWNSMGQA

SEQ ID NO: 5507 - protein, 444 aa, Zea mays
  VARIANT 161: note = Ancestral polymorphism is R, Derived polymorphism is W
  VARIANT 168: note = Ancestral polymorphism is D, Derived polymorphism is Y
  VARIANT 218: note = Ancestral polymorphism is P, Derived polymorphism is L
MGSEGRAWNGAGMAAGSGYGGGVEAKATTTAVSAAAPAEVPTSAASVDISLPLLKMSPRIMQVPRPHIYLRSSCFGSRSRSRLRPAWSRCEVVSCSGTRDREASYPCSGTSRALCKELVEGWSSIDSSLFSIETVSGGITNLLLKVSVKEDNGNESSVTVRLYGPNTDLVIDRKRELQAIPYLSAAGFGARLLGIFENGVVQSFIYARTLSPADMKEPKIAAEIAKELRKFHQVDIPGSKEPQLWNDIFKFLKKAAALKFEDNMKQKRYEKISFREIQDEVQELKDLLDILRAPVVYAHNDLLSGNLMLNDLEGKLYFIDFEYGSYSYRGYDIANHFNEYAGFDCDYNLYPDKDAQYHFFRNYLHTDRPSEVDAQDMEVLYVETNTFRLASHIYWALWALIQAKVSPIDFDYLGYFFLRYGEYKKQRESCFSLAQSFLSELKNG

SEQ ID NO: 5508 - protein, 291 aa, Zea mays
  VARIANT 227: note = Ancestral polymorphism is L, Derived polymorphism is P
  VARIANT 92..291: note = Derived polymorphism lacks residues 92 to 291
MRRRDARRVAVSAEQRQHQPANGKVHQPRGVRATPMSPRALRCAGRDTHTQQDAAVSTPSTPRSDGATLPRSRTVGGGAEGSPARPSHSHHQRRNSLGVVPAEFGECATPRPFLKRGTGTGGAGAAAPARLRTARVHDLLPAIDVAMTTPRPPLPQELGDSHAHAHAPRHVRSVSELPFDAAALASPSPQARPRKRWGSPERPTATLSVSATADSHRELSKGLKKLLSFVRKGGRSGGGGGDQPLPAPSPRGSGKPVSKGWSGCSQVGVPFDRARLDGHRFPMPRPVGISG

SEQ ID NO: 5509 - protein, 227 aa, Zea mays
  VARIANT 45: note = Ancestral polymorphism is A, Derived polymorphism is T
  VARIANT 44: note = Ancestral polymorphism is P, Derived polymorphism is A
  VARIANT 43: note = Ancestral polymorphism is A, Derived polymorphism is V
  VARIANT 31: note = Ancestral polymorphism is G, Derived polymorphism is V
MAGSAPATAMDKTSFATTCSLLSQYVKEKKGGLLQGLGALAMAPAAGEGAFRPPTTMNLLSALDDAPAEERSEKATAGEPKHQDKCTGGNPREEAAGEEEEEAQQLTIFYGGRVVVFDMFPSAKVEDLLQIMSPGGDGVDRAGGATVPTRSLHRPSHDSLSDLPIARRNSLHRFLEKRKDRITAKAPYQQVNSSVVGVEASKQAAGAGVEKPWLGLGQEATTAKLEM

SEQ ID NO: 5510 - protein, 271 aa, Zea mays
  VARIANT 9: note = Ancestral polymorphism is F, Derived polymorphism is S
  VARIANT 59: note = Ancestral polymorphism is E, Derived polymorphism is Q
  VARIANT 175: note = Ancestral polymorphism is R, Derived polymorphism is S
MALSSAGSFVACSLRPSGASIHAPRSPPHLKPGAAAASFTRTPQRRANATKGGVSTVCEPLGPDRPIWFPGSSPPPWLDGSLPGDFGFDPLGLGSEPELLRWFAQAELMHGRWAMLAAAGILVPDLLARWGFIDAGFSWFDAGSREYFADPWTLFVSQMALMGWAEGRRWADYLRPGCVDIEPRFPNRKNPVPDVGYPGGLWFDWANWGRGSPEPVMVLRTKEIKNGRLAMLAFVGFWFQAVYTGQGPIDNLLAHLADPGHCNIFSAFTSH

SEQ ID NO: 5511 - protein, 367 aa, Zea mays
  VARIANT 196: note = Ancestral polymorphism is M, Derived polymorphism is I
  VARIANT 200..367: note = Derived polymorphism lacks residues 200 to 367
MAAAAAAPPIPDPNHAPLPSSLTSSRPHSQLKEPSRNREPHHQIRSSRVARMVVAELSMTTDGVGPRTVVGTALLGVLAAVEPPPRRGHPLLHQRRPRGPRQDEVCCRSVLGSMSTTSQTKADRAKLDGMYECILCLLLHLLPVLLVEPGGVPRPGRAAPRQQGFSRDTGLAKEAIHSLSASKSSYPMVDLTQLFMTATQEGKRLESQGQILRVHNKLQATILTTKGARTIAAATVKPPVHTKYQNGGQTHVDETSKKAIRMPNLQLCQHEQFILAFPHPPLPCRRADSRSRGSDLEGGYVFVSTRLKILFKEGGRGTFDPLFLNLIVSMQRYNQIDAQSAASMTPMWTLCNMCMIGCVMRELIYVN

SEQ ID NO: 5512 - protein, 637 aa, Zea mays
  VARIANT 44: note = Ancestral polymorphism is D, Derived polymorphism is Y
  VARIANT 544..637: note = Derived polymorphism lacks residues 544 to 637
MEGFAAAELEAAERLVKRWDSTASAASSAGRGGDNQMLFDGAADRAEAERFLRAVDDLRRLAPPSPASVGSPRRASSAGGVCTAVEVAMTRLEDEFRHVLSARALDLEIEALAGLSSLSMASGRSNSDATEAAAGEEDDGSVSSSVGRRSSYRSLQSIREIDLFPADAISDLHAIASRMAAAGYGRECVQVYASVRKPAVDSALRRLGVEKLSIGDVQRLEWDALEAKIRRWIRAARAAVRGVFASERCLCLHIFNDLPLRTSTATAAAAAAPTNHDAPFAEAVKGAALQLFGFAEAISIGRRSPEKLFKIIDLHDALSDMLPDISDIFADSKAAESIYVQAAEIKSRLVDAVRGILSEFENAVLRDPSKTPVPGGTIHPLTRYVMNYSTLISDYKATLSELIISRPSASPQTAAEENEATPAFPDLDPPDPDSQLPLATHLVWIIVVLEHNLESKASLYKDAPLSHLFLMNNVHYIVHKVKDSAELRGLIGDEYLRRLTGKFRQAATSYQRTAWLKILNCLRDEGLHVSGGFSSGVSKSALRERFKAFNAVFEEAHRVQSAWYVPDTQLREELRISVLEKLLPAYRSFLGRFRHHIENSRHPELYIKYSVDDLEIAMADFFEGSPPSLHNRRRSHG

SEQ ID NO: 5513 - protein, 573 aa, Zea mays
  VARIANT 473..573: note = Derived polymorphism lacks residues 473 to 573
  VARIANT 458..573: note = Derived polymorphism lacks residues 458 to 573
  VARIANT 356..573: note = Derived polymorphism lacks residues 356 to 573
MAGRFLLVVAVALLLRPGDASVHEYRGLSFANKGNAFILHAGSEGLYAASHANTTAEDAAAVAEALIRAKGWLRYSYSGVDAGSRVDLGSYRAGYSAARHLDGFDKITFRRSEDTNNSVKETSSAKVQVLIFEIEDREMIGGSAYGGQKAICCTSDLAKLGACTEGSVIYRPSQVNPGWPKLFVASFDGSDLIATLPSRTIPITKTGIYNMYFIHCDPSLASLEIEGKTIWKNPTGYLPGRMAPLKNFFGLMSFAFVVLGIYWFYQYMKSWREVLPLQNCITLVITLGMFEMALWYFEYAEFNETGVRPKGITFWAVTFGTVKRTAAEVIVLIVSMGYGVVTPTLGGLTSKVVMLGGTFFLATEILELVENLGAVNDLSGKARLFLVYPVAILDAAFVIWIFISLAKTIGKLQARRLMAKLDIYRKFATALIISVLVSVGWIGYEVCLFMSKPYSNSRIIKGILLHCLTKLDWFLGSIYSKSTDVFNERWQHAWIIPAFWHVLSFLLLCVICYLFSYDASEFFDRKDNISLIRPAPSASKNGWNLSSTPEPKATKDVNTVADFEGDDEENKRE

SEQ ID NO: 5514 - protein, 511 aa, Zea mays
  VARIANT 365..511: note = Derived polymorphism lacks residues 365 to 511
MGAFAKEEHQFLAELGLAQRNPGAFACGAWGGSGPTVTSTSPTNNQVIAEVVEASVHDYEEGMRACFDAAKTWMAIPAPKRGEIVRQIGDALRAKLHHLGRLVSLEMGKILPEGIGEVQEIIDMCDYAVGLSRQLNGSIIPSERPNHMMMEVWNPLGVVGVITAFNFPCAVLGWNACIALVCGNCVVWKGAPTTPLITIAMTKIVASVLEKNNLPGAIFTSFCGGTEIGQAIALDIRIPLVSFTGSTRAGLMVQQQVSARFGKCLLELSGNNAIIVMDDADIQLAVRSVLFAAVGTAGQRCTTCRRLILHENIYQTFLDQLVEVYKQVRIGDPLEKGTLLGPLHTPASKENFLKGIQTIKSQVKGGKILFGGSAIESEGNFVQPTIVEITPSAPVVKEELFGPVLYVMKFQSLKEAIEINNSVPQGLSSSIFTKRPDIIFKWLGPHGSDCGIVNVNIPTNGAEIGGAFGGEKATGGGREAGSDSWKQYMRRATCTINYGSELPLAQGINFG

SEQ ID NO: 5515 - protein, 510 aa, Zea mays
  VARIANT 433..510: note = Derived polymorphism lacks residues 433 to 510
  VARIANT 265: note = Ancestral polymorphism is G, Derived polymorphism is E
  VARIANT 242: note = Ancestral polymorphism is M, Derived polymorphism is T
  VARIANT 70..510: note = Derived polymorphism lacks residues 70 to 510
MEQATWAAFLGIVLCAALFHRTFLARGRRRANNPPPGPKPWPIIGNLNLVGELPHRSMNELSKRYGPLMQLRFGSLPVVVGASVEMAKLFLKTNDAAFSDRPRFAVGKYIAYDFSEVRQARRICATELFSATRLESFEHIRDEEVRVMLQQLRQAAGRTVLLRDYLQMLTLGVISRIVLGKKYVQEEAADGEGDSAPAMTPAEFGEMVDEFLVLHGVFNIGDYIPWLDWLDLQGYVARMKRMKARFGRLLERLLDVHNERRLREGGNFVAKDMLDVLLQLADDTSLEVQLNRDNVKAITQDLIIGGTDTSAKALEWAVSELLKNPKVLAKATEELDHVIGPDRLVTESDLPRLPYIEAVLKETLRLHPAAPMLAPHVAREDTSVDGYDVLAGTVVFINVWAIGRDPALWDAPEEFRPERFFESKIGVRGHDFQLLPFGSGRRMCPGINLALKVMALTLANLLHGFKWRLPDGVTAEELSMEEAFQLTVPRKFPLEAVVEPRLPDRLYTGA

SEQ ID NO: 5516 - protein, 517 aa, Zea mays
  VARIANT 68..517: note = Derived polymorphism lacks residues 68 to 517
  VARIANT 157: note = Ancestral polymorphism is R, Derived polymorphism is P
  VARIANT 170: note = Ancestral polymorphism is R, Derived polymorphism is G
MEPATWAVFLGIALCAAAALFLSRGRRPVYNPPPGPKPWPIIGNLNLMGELPHRSMNELSKRYGPLMQLRFGSLPVLVGASVEMAKLFLKTNDAAFSDRPRFAIGKYTAYDFSDLLWAPSGPYLRQARRICATELFSATRLESFEHIRDEEVRVMLRQLRQAAGRTVRLRDYLQMLALGVISRIVLGNKYVMEEVADGEGDSAPAITPAEFREMVDEFFALHGAFNIGDYIPWLDWLDLQGYVARMKRMKARFGRFLERVLDVHNERRLREGGNFVAKDMLDVLLQLADDTSLEVQLSRDNVKAITQDLIIAGTDSNANTLEWAVSELLKNPKILAKAMEELNHVIGPDRLVTESDLPRLPYIEAVLKETMRVHPAAPMLAPHVAREDTSVDGYDVLAGTVLFINVWAIGRDPGLWDAPEEFRPERFVESKIDVRGHDFQLLPFGSGRRMCPGINLALKVMALSLANLLHGFEWRLPDGVTAEELSMDEAFKLAVPRKFPLMVVAEPRLPARLYTGA

SEQ ID NO: 5517 - protein, 388 aa, Zea mays
  VARIANT 80: note = Ancestral polymorphism is K, Derived polymorphism is T
  VARIANT 216..388: note = Derived polymorphism lacks residues 216 to 388
MGEEVAVVLEPPRPKSPPRYPDLCGRRRLQLELQALNREIDFLKDELQSLEGVPPVSRSCKEVNEFVGTKQDPLIPIKKKTHRSCRLFWWIRYAFRYLFLSVVAWRDQNCAYACHGSVAPAIACPAAKGHAAWIAPAAHAQICHAASPAANHATNPALGPTAVHVATYHAASQIAHPVVQTAARAAPAVHHAVNQTATPAADQTVARAAIRHAANRTAAASRPSRAANSSAAQTAAPAASRVAPAATPAAVARNAGHAPATASQAVAVSARNVAAARDAARAQAVSVASVVSSPSSAPTCLGAAPASSASSASPRAARGRRPAANASRRAVRVKTAAAAAGGHAALFRSQLALGVRAGALGPAESVQNGVDVPGAAIRAVPLDACVDC

SEQ ID NO: 5518 - protein, 301 aa, Zea mays
  VARIANT 64..301: note = Derived polymorphism lacks residues 64 to 301
  VARIANT 59: note = Ancestral polymorphism is R, Derived polymorphism is W
  VARIANT 29: note = Ancestral polymorphism is L, Derived polymorphism is F
  VARIANT 23: note = Ancestral polymorphism is E, Derived polymorphism is K
  VARIANT 22..301: note = Derived polymorphism lacks residues 22 to 301
  VARIANT 18..301: note = Derived polymorphism lacks residues 18 to 301
  VARIANT 11: note = Ancestral polymorphism is G, Derived polymorphism is D
  VARIANT 10: note = Ancestral polymorphism is R, Derived polymorphism is C
MQVWQELQERGGGPEAVQDLLREPPARPLYQPERPLRLYYRLGINRFADMSWEEFRATRLGAAQNCSATLAGNHQMRAAAAAAMPETKDWREDGIVSPVKNQGHCGSCWTFSTTGALEAAYTQATGKAISLSEQQLVDCGFAFNNFGCKGGLPSQAFEYIKYNGGLDTEESYPYQGVNGICQFKAENVGVKVLDSVNITLGAEDELKDAVGLVRPVSVAFEVISGFRLYKTGVYTSDHCGTTPMDVNHAVLAVGYGVENGVPYWLIKNSWGADWGDEGYFKMEMGKNMCGVATCASYPVVA

SEQ ID NO: 5519 - protein, 387 aa, Zea mays
  VARIANT 181: note = Ancestral polymorphism is V, Derived polymorphism is G
  VARIANT 136: note = Ancestral polymorphism is P, Derived polymorphism is L
  VARIANT 134: note = Ancestral polymorphism is V, Derived polymorphism is M
  VARIANT 113: note = Ancestral polymorphism is R, Derived polymorphism is Q
  VARIANT 12: note = Ancestral polymorphism is E, Derived polymorphism is K
MEELGRQRDLKETYKARLESTQGYLRFCLEVAQEHGFLHLISDGAPPHGDAEAEPATTVDAGDPSEAPAPPCDPYLAATRDLAVQHGWSVAPDECVLRPPAMEQVELHEVIGRGTTADIHRATWRGLDVAVKWVRPEFFRSNPSGEAFFAQEVDVLSRQRHPHVLRLLGACLRPPDICFLVTELLSGATLGEWLHGGRERRARPRAASSPPPPLVDRVSRALDVALAMRHLHAQTPRVVHRDLKPSNVLLDAHLRARVTDFGHARFLPDGKDALTGETGTYVYMAPEVIRCEPYTDKCDVYSFGIMLNELITAEHPYIETSYGPSKIALNVANGTLRPKLPEHDAYPPGLTDLIRRTWDAEPSSRPSFATITSALGEIKQQIVQHRI

SEQ ID NO: 5520 - protein, 395 aa, Zea mays
  VARIANT 292..395: note = Derived polymorphism lacks residues 292 to 395
  VARIANT 310: note = Ancestral polymorphism is I, Derived polymorphism is T
MASRGGASVVLVVLCSSLLGFAPRPGAAGKPLVPAMFVFGDSLVDVGNNNHLASVNDSCKANYRPYGVDYHPGQSPTGRFSNGYNLADHLARWLGFAGSPPPFLSLANARARHTRRTTVSTGINFASGGSGLLPTTGDSVCGGAVVSMAEQVGNFTSLVRTTTWEGSKRRERTAPGLVSESLVFISVGSNDLFEYSDFFADPKNRNVSRNDTAFLGGLVALYATYVKDLYAAGATMFSVVSPSLVGCCPSQRKIAEDTHDVDGFGCLGTANNLSRQLYPMIGSMLESLSQDELPGMKYSLGDAVAMAQWIFTHASTPPNNFTTPDRACCGSGDFGSGACNSSAPLCPNRSSFFFWDRFHPTETLAAVTAQQLFSDNGTFVHPINVQQLVAPSSRP

SEQ ID NO: 5521 - protein, 536 aa, Zea mays
  VARIANT 7: note = Ancestral polymorphism is N, Derived polymorphism is K
  VARIANT 38: note = Ancestral polymorphism is R, Derived polymorphism is L
  VARIANT 291: note = Ancestral polymorphism is S, Derived polymorphism is L
  VARIANT 427: note = Ancestral polymorphism is I, Derived polymorphism is M
  VARIANT 434: note = Ancestral polymorphism is T, Derived polymorphism is P
MEAEARNILERAAESSFPPLHAVHHLLSVGVCVRCILRLLGAYSSACSYACLTASVLHSFLEEHDESIKGGSCPCLSMNDAYCSVCLGVLLPTFHRDEGLETPNGISHIDNMSSVISQAVHGESYQVDEFSLEISLPPVIAANERAVRLYMKQKYGNENWFKDKMFAQQTMSVKEALRLLIAPSLEKLMNAKHGNNSFRIRLTYTHGDASQKLHSLLPNEHSRKRKPDSRKGGDASNEAHKRNSADGNPIQTSESDSFIYKSLEGIQDQEFCNAFQLPPEKVFKPCHLLISCLRSPTYLGGRYLKLSRNVSQSCWIIDDERMGEASVEEIIGENVRAICRGDSCKFHAAGREDIDVRMLGSGRPFLVEVLNVRSIPSETEVQQIEERINNSEKKYVIVRNLKLVDNEIWTMMREGEAEKQKQYTALIWTSRDLTDDDLHNISIMKEMEIVQKTPIRVLHRRSPLERKRIIHWMEIEKITGSSNYYLLHLCTQAGTYIKEFVHGDLGRTHPSIGAIIGCRAEILQLDVTDVKMDFLP

SEQ ID NO: 5522 - protein, 350 aa, Zea mays
  VARIANT 229..350: note = Derived polymorphism lacks residues 229 to 350
MERRGNCHGGKHPPPRQARGPGERTRQPSSGGSFSASLLDAVYRSLDDGDGADVVVDAARGSGAEEKAAATAQFWWANKEAATARPRQSSSSADGDRRRRETGAARPRHSGYASSTTSSSDSSASYSSFSCSSASTTDTESTCRRHSPPPPRMSLSEESAATDAEEATATPPPPPKSKPKKKARPCFPVARIRPPKASVPSSSSSGAQPPSPATFACALKALFSSVRLQRKPKAPAATPPPKISQPQPQPQPPSMSATSTAKAADAPAEPSVQRTVRLRPEAEVSVVRRRVVEELVRSLEELEADEEGSDASSDLFELDSLRGAGADELPVYGTTSLVVANRAIAQGPAR

SEQ ID NO: 5523 - protein, 693 aa, Zea mays
  VARIANT 433..693: note = Derived polymorphism lacks residues 433 to 693
  VARIANT 283..693: note = Derived polymorphism lacks residues 283 to 693
  VARIANT 222..693: note = Derived polymorphism lacks residues 222 to 693
MSLLRRRKQQQLPPSEGDGSDHDDNDKGKKPSSSSAPPSKEPTRRTKAKWSCVDSCCWLVGCVCSAWWLLLFLYNAMPASFPQYVTEAITGPLPDPPGVKLQKEGLRAKHPVVFVPGIVTGGLELWEGHQCAEGLFRKRLWGGTFGDVYKRPLCWVEHMSLDNETGLDKPGIRVRSVTGLVAADYFVPGYFVWAVLIANLARIGYEEKTMYMAAYDWRLSFQNTEVRDQTLSRIKSNIELMVATNGGNRVVVIPHSMGVLYFLHFMKWVEAPPPMGGGGGPNWCEKHIKAVMNIGGPFLGVPKAVAGLFSSEAKDVAVARAIAPDVLDSDFLGLQTLRHLMRMTRTWDSTMSMLPKGGDTIWGNLDWSPEDGLECKAKKHKTNDTEVSKDSNGENIEVQPEPINYGRLVSFGKDVAEAPSSEIEQIEFRVSIQKLLNTFLPVSLDAVKGNDIVHSNASCREIWTEYHELGWGGIKAVADYKVYTASSVIDLLHFVAPRMMQRGNVHFSYGIADNLDDPKYQHYKYWSNPLETKLPNAPDMEIISMYGVGIPTERAYVYKLAPQAECYIPFRIDASADGGEENKCLKGGVYLADGDETVPVLSAGYMCAKGWRGKTRFNPAGSKTYVREYSHSPPSTLLEGRGTQSGAHVDIMGNFALIEDIIRIAAGATGEEIGGDQVYSDIFKWSEKIKLKL

SEQ ID NO: 5524 - protein, 91 aa, Zea mays
  VARIANT 22: note = Ancestral polymorphism is K, Derived polymorphism is I
  VARIANT 13..91: note = Derived polymorphism lacks residues 13 to 91
MFSLSVECCWDICFFFCQTPVKIFSLYCMNCGVQKHKEISKVEKDIVLRPSMGSRCSSSASSRPSASVAPPPPLEILQDHRPQDRLSKSRT

SEQ ID NO: 5525 - protein, 371 aa, Zea mays
  VARIANT 91: note = Ancestral polymorphism is P, Derived polymorphism is L
  VARIANT 2..371: note = Derived polymorphism lacks residues 2 to 371
MGACHIGRVAIDRRNAPPPPDAAAEKDESTQGLQLPEDIRWERLDKARFFVVGAGLFSAVSAALYPAVVLKTRLQVAPAAAAAAESAALPPSAVAAATAILRQEGPLAFYRGFATSLAGTIPARALYMGALEATRSAVGPAALSFGAAEPAASAAAGAVAGLAAAVAAQVVWTPVDVISQRLMVQGNPCPASRYHGGLDAFRKTVASDGLRGLYRGFGMSILTYAPSNAVWWATYSLSQKIIWSGIGCYLCDYGVGVQEIDLGDGDSLLQPGCKTVMVVQGVSAAMAGGASAFVTMPLDTIKTRMQVMDGDGEPITVGRTVRRLIKEGGLAACYRGLGPRWASMSLSATTMITTYEFLKRLSDKGQGSDLA

SEQ ID NO: 5526 - protein, 487 aa, Zea mays
  VARIANT 419: note = Ancestral polymorphism is R, Derived polymorphism is C
  VARIANT 369: note = Ancestral polymorphism is A, Derived polymorphism is T
  VARIANT 313: note = Ancestral polymorphism is A, Derived polymorphism is V
  VARIANT 251..487: note = Derived polymorphism lacks residues 251 to 487
MNQLSIKNENQLIPLAVGFSFRHGSDGRFLLAAIRYSDSVCDLFSLAQPRAYVALNDPAAADADITALVDAVALGLFCIVATLGVVPVISCARGGPAEMVAGALDARLRDHLLAKPNLFTEAASAAVTSFQRPVLCLFDRNFELSVGVQHDWSYRPLVHDVLGLKKNKLKLPAEKYELDDSDKFWVANNWSSFPKVAEEIEAQLAKYKQDVDEVNQHTGGGKVGVEFDGTDLLGNTKHLMNAVNSLPELTERKNMIDKHTNIATSLLGHIKERSLDGYCSCENDMLVSGTVDRNTLLSLIRGKGTKEDKLRLAVTYLLSFATPPSSELEQYVKRIKALLNTQFAAASGTATKSNIVDWAEKLYGQSIGAVKNLLSDGRQLALTRTVEALMEGKPNPEVLLEFKEYATEVNVDFVRKVVRAIGRCAIKLERAAERCISVLLELIKIKVNYVVQEAIIVIKDIFRRYPNTYESIIATLCESRFVKVWTL

SEQ ID NO: 5527 - protein, 242 aa, Zea mays
  VARIANT 186: note = Ancestral polymorphism is T, Derived polymorphism is A
  VARIANT 128: note = Ancestral polymorphism is E, Derived polymorphism is K
  VARIANT 127: note = Ancestral polymorphism is R, Derived polymorphism is W
MEFDLLNYYSPEEAQLELMNTMLQLEQLTALDGHRQSAMAPASPPISPMQTHHAGPHSFSPLPHTSTTTTTTATATGYPKKQHAPPRAVYGAATSSGLEHHHLQLQDGGALQAGPSSAAAASADAMREAIFRIAALQPVEDQTTTGPEPEAAVRRAPKRRNVRVSKDPQSVAARLRRERISERIRALQRLVPGGTKMDTASMLDEAIQYVKFLKSQLQSLQRAAASRHAPWQYALLPHADML

SEQ ID NO: 5528 - protein, 241 aa, Zea mays
  VARIANT 34: note = Ancestral polymorphism is S, Derived polymorphism is F
MDSYATLLFPKIMEIKPEAFCKQFALCRNTTLFSGVRSESTCVFCHHLFDEIMSKLKDRDVEFEIIQILIKECSKIEGHVTSSSIEVCMSWLIFLEGLKKIEQIIVDSALVETNMVFFDIMDLGMSPGKLCQIGGVTGIALGVALFFGFGSFSVLFTNDPAVLGTAKSRVWFVTVSQPINAIAFVMDGLYYCVSDLAYVAYSVFFVGAVSSAFLLSIAPKLGVGMCPDSGPGIFLSSLVQP

SEQ ID NO: 5529 - protein, 303 aa, Zea mays
  VARIANT 24: note = Ancestral polymorphism is Y, Derived polymorphism is H
  VARIANT 192..303: note = Derived polymorphism lacks residues 192 to 303
  VARIANT 225..303: note = Derived polymorphism lacks residues 225 to 303
MARRRDDVALAAITFAIVALCARYASAVGTTPQSSFSYREGDPTGPTKWATLQKDWDVCDSGTEQSPIDVAKVEVSEDLDPLQQTYEPGDAVMHNRLHDFMLNWTGGNGGLTIEGKKYKLKQVHWHVPSEHTVNGTRFDAEMHMVHEDSTDAKSKAVVAVLFSAKAGKSSKLLRDLKPYFERLAGKQNGTEEVKGPVVDPAAWIDKASGYYGYEGSLTTPPCTQGVLWTIMSKVADASKEEIHSIESVKEVRKCTAGSENQQPRCSLLQSSRSHRSAGAGAGARSNLIEENVRTVAHPPESMG

SEQ ID NO: 5530 - protein, 428 aa, Zea mays
  VARIANT 359..428: note = Derived polymorphism lacks residues 359 to 428
  VARIANT 317: note = Ancestral polymorphism is V, Derived polymorphism is F
  VARIANT 223: note = Ancestral polymorphism is P, Derived polymorphism is S
  VARIANT 141..428: note = Derived polymorphism lacks residues 141 to 428
  VARIANT 124: note = Ancestral polymorphism is G, Derived polymorphism is W
  VARIANT 107: note = Ancestral polymorphism is R, Derived polymorphism is W
  VARIANT 98..428: note = Derived polymorphism lacks residues 98 to 428
MEWDGDCSEVGMNSVPDGVVQLILSMLSNARDVAACACVCRRWRDCVPYLPALFFPRNAFEPARGAADDVIGRMVASVARLRELVIYCPFSMARLPVWLAERSATLRVLELRMDAAADKVPEGGHLDCIGLTANLEELRLWGVSLTAPPAWGRMERLRVLEVVGAPLRDSAVRDAIAACPNLTDLSLLGCDCSGTVAIDLQQLERCRLDILGAGNCSLLLTASRLESLEIQGFTWITLRGGHNLRRLSIAKSTGRLHKVDTGNLPDLDHLSLRGVQWNWGAVSSVLQCASEVKHLVMKIEFCGDLDALQPFPEVDLVDFFDNHPKLRKFEIHGAMFAALCQKNSLKNLNSRFLIPCLEEVLITVRSPLNAEQKLNTLESLLKYSVKLRTMIIRISQMKNCHEAADEFFEDISFCVLIWSMRIGFHMYF

SEQ ID NO: 5531 - protein, 980 aa, Zea mays
  VARIANT 808..980: note = Derived polymorphism lacks residues 808 to 980
  VARIANT 29..980: note = Derived polymorphism lacks residues 29 to 980
MGSLATADGPLPPLKYPQARRDEDIVDDYHGVLVPDPYRWMEQVDSKEVKEFVDAQAAVTSAVLSSCDHRGRLRGQLTALFDHPRFRAPFKRRGSYFYFHNPGLRPHSALYVQHGLGGEPDVLLDPSTFSEDGTVSLGVVGVSDDGEHLAYGTSGSGSDWVTIRVMRVRDKEHLPDTLSWKWQLCSKLELAMVVPVSRDALDSGMKTGVNLNHEVYYHFLGTEQSQDVLCWRDPDHPKYIYIPQVTEDGKYVILSVSETSEPVNKLYYCDLSALAHGLGGVKSAHGNGMLPFVKLVDRFEAYYGLIANDGTQFTFLTNKDAPRYKLARVDVDDDEPGSPWWTDVVPEDEDGKAVLESACAVHGHKLLVSYLSDVRCVLQMRSLVTGELLHDIPVDIGTVSGISGRRCDAEVFVEFASFLTPGIIYRCDVGSAVPEMDVYREISVPGFDRNEFEAKQVFYPSKDGTKIPMFIVSKKEISLDGSHPALLFGYGGFGVSVTPQFSVARVVLMRNLGFVACVANLRGGGEYGEGWHRAGSLANKQNCFDDFVAAGEFLVSAGYTSPARLCVEGGSNGGLLVAACVNQRPDLFGCALAHVGVMDMLRFHKFTIGRAWTCDFGCSENEEEFQWLIKYGSGCLLPLLSVFTKRVGNDALIMQVLPPAQRAAAVGEQTGGRSCQRRRKLPGLRRPVPCNHAADGGPRRPRGAVAHAQIPRAAFASAARSLRARARPPQTALREIRTPLAASPARSLSSTSLPKELAAARLRRERTQRTPRGGCGRSSTPSRPPRRWQPDPAIEPPNRADPSCSTQQVYEEGAKEVALSVVSGINLTQAYLPMANKQWTYTMIEMTEYTVRAIGLERTCGKLISDLASFSGWYCYHIPLFLVLYIFLKHEQIGGIFSEAITGLYILPEHDHISLMFEQFHTFTFVNVLTVSTLQTHKSPACANAPAAVCTEDQDTNIASFIKARLVRKVYFCEISKMKH

SEQ ID NO: 5532 - protein, 512 aa, Zea mays
  VARIANT 69..512: note = Derived polymorphism lacks residues 69 to 512
MGKPFDVELGGGAGGLEIAGAGGGGPWGGRVFGAIGRAVSFRCVFVLLLAAGVLIPVLFLLVPSRQQGYLSDDHDVLAAEIKVGFTLEKPVSFLTSHIDKLGNDIFEDIGVPNSKVSIVSMHPLTSKYFTHIVFGVLPYPKDASISLPALSVLRSSLIEMMLQQVNLSLTPSLFGHPSSFELLRFPGGITVIPAQSGFTWVNTDPLFNFMLNNSIYQILGNLTELKDQLKLGLNLRSYEKIYFQFRNEIGSSVEAPATIVASVLDGSSNLLPDRLRQLAKLIREPDARNLGLNHSVFGKVKGVQLSSYLQHKISGLSPSPSPAPSPSQSPSPSMPTSLSPYPASSLPGPALAPSWSRHPCFPCFRCNPSPAGSSTVKPPCIVRDPRLPPLMHSPKPPIMPSPPKYLPPADPPVPSHVVPPRPLPNPNHFPKAVSRPNSQMMPIPSPSRPVSQHWKAPRKKENSRTSNFSPIAPSPYVYRISISICSSPSHLKLCLIGCLGCFECWACVIRKI

SEQ ID NO: 5533 - protein, 341 aa, Zea mays
  VARIANT 166..341: note = Derived polymorphism lacks residues 166 to 341
  VARIANT 164: note = Ancestral polymorphism is L, Derived polymorphism is F
  VARIANT 155: note = Ancestral polymorphism is A, Derived polymorphism is D
  VARIANT 141..341: note = Derived polymorphism lacks residues 141 to 341
  VARIANT 98: note = Ancestral polymorphism is N, Derived polymorphism is I
  VARIANT 82: note = Ancestral polymorphism is E, Derived polymorphism is Q
  VARIANT 56: note = Ancestral polymorphism is R, Derived polymorphism is C
  VARIANT 48: note = Ancestral polymorphism is A, Derived polymorphism is V
  VARIANT 41: note = Ancestral polymorphism is V, Derived polymorphism is A
MASWLLLPFSSFPWPPPPPPGSSSGRGGDGGGDGGDWRPTVVAAFAGVQVGRALRRRFAGLLRSPEVRHLDALPKMGSFWFEGSESLATFHILGAIGIVFSAPYVCSSALFSGNGSGGRYISNGKLLSRRPRGIDSKKRLWTNVLLALNVLAYVAQVASQGKLLMWGAKINSLIDRGQFWRLATSSLLHANLTHLAFNCFSLNSIGPMVEMLSGPRRYLAVYFSSALAGSLMSYRFSASPAVGASGAIFGLVGAYAVYMWRHRRFFGNSRESLEHIGRVVVLNMGMGLLSRGIDNWGHLGGLLGGVAMAWFLGPAWQYQYVAKDGRAVFKDRAPVLRLIKG

SEQ ID NO: 5534 - protein, 406 aa, Zea mays
  VARIANT 239..406: note = Derived polymorphism lacks residues 239 to 406
MDGHGGGAGAGKLTRTPSSLLRSPTVRNCSSFQAVVVDDPEPDDKKAQAHPKPPPHHLHPGGGPAHPRLVLALPLAFLLVLLLLRGGGDGHHLALLSASAAVALAAAAGAARLLRGRLRRSPGSGSVQWFIGDDDDKPQKRADKAAAPHGRVVREGVEFYSNGDCYEGEFHQGRCNGSGVYNFFGKGKYEGDWVDGKYDGYGIESWARGSRYRGQYRQGLRHGHGVYRFYSGDCYAGEWAGGQSHGIGAQTCSDGSSYVGEFKCGVKHGIGSYHFRNGDRYAGEYFGDKIHGFGVYRFANGHCYEGSWHEGKKQGFGMYTFRNGDRRSGDWDSGTLKTPLPPADPSVQRAVQAAQRAAENAFRLPRVDEQVHKAVIAANRAATAARVAAIKAVQNRMDGKFCDTCV

SEQ ID NO: 5535 - protein, 175 aa, Zea mays
  VARIANT 5: note = Ancestral polymorphism is G, Derived polymorphism is S
  VARIANT 9: note = Ancestral polymorphism is S, Derived polymorphism is I
  VARIANT 103: note = Ancestral polymorphism is P, Derived polymorphism is S
MGVSGILLSLLGSVEMFGDLLEEVGLLFLLASLLLRGEKVVAHGGDEGGRQKVPFLDVCNTLLHPIVPLTAIDYEEFGYPVDYEEFLAIRKYSPYDNIQKDVPYPALFVTSSFNTRFGVWEAAKWVAKVREFTQYDPERPVILNLTTDVVEESKYLQTRELSLETAFLIKMVCSV

SEQ ID NO: 5536 - protein, 161 aa, Zea mays
  VARIANT 11: note = Ancestral polymorphism is I, Derived polymorphism is N
  VARIANT 10: note = Ancestral polymorphism is A, Derived polymorphism is T
MVVVVDKSIAIHFIENILVTSPFGDIVHKKEKVSMGQFAFTTAEAGNYLACFSIDGEDRGLVVKLNLDWKIGLASRDWDSVAKKEKIEGVELELLKLEVAVQSIHDNLLLLKSKEANMRDVSEQTNSRVTWLSMLSLVVCIAVSVLQLWHLQQYFRKMKLI

SEQ ID NO: 5537 - protein, 452 aa, Zea mays
  VARIANT 18: note = Ancestral polymorphism is C, Derived polymorphism is W
MKLRLVALVLAVASVYACSSAASAFAGDDVVRVALKHVDAGKQLSRPELIRRAMRRSKARAAALSAVRNRARFSGKNEQQTPAGVLPVRPSGDLEYVVDLAIGTPPQPVSALLDTGSDLIWTQCAPCASCLSQPDPLFAPGQSASYEPMRCAGTLCSDILHHSCERPDTCTYRYNYGDGTMTVGVYATERFTFASSGGGGLTTTTVPLGFGCGSVNVGSLNNGSGIVGFGRNPLSLVSQLSIRRFSYCLTSYASRRQSTLLFGSLSDGVYGDATGRVQTTPLLQSPQNPTFYYVHFTGLTVGARRLRIPESAFALRPDGSGGVIVDSGTALTLLPAAVLAEVVRAFRQQLRLPFANGGNPEDGVCFLVPAAWRRSSSTSQMPVPRMVLHFQGADLDLPRRNYVLDDHRRGRLCLLLADSGDDGSTIGNLVQQDMRVLYDLEAETLSIAPARC

SEQ ID NO: 5538 - protein, 443 aa, Zea mays
  VARIANT 8: note = Ancestral polymorphism is L, Derived polymorphism is S
MPSLAAFLVLLLPPLLLSAAGAAEAEELIGFKATLRHVDADAGYTEEQLLSRALRRSSARVATLQSLAALAPGDAITAARILVLASDGEYLMEMGIGTPTRYYSAILDTGSDLIWTQCAPCLLCVDQPTPYFDPARSATYRSLGCASPACNALYYPLCYQKVCVYQYFYGDSASTAGVLANETFTFGTNETRVSLPGISFGCGNLNAGSLANGSGMVGFGRGSLSLVSQLGSPRFSYCLTSFLSPVPSRLYFGVYATLNSTNASSEPVQSTPFVVNPALPTMYFLNMTGISVGGYLLPIDPAVFAINDTDGTGGTIIDSGTTITYLAEPAYDAVRAAFASQITLPLLNVTDASVLDTCFQWPPPPRQSVTLPQLVLHFDGADWELPLQNYMLVDPSTGGGLCLAMASSSDGSIIGSYQHQNFNVLYDLENSLMSFVPAPCHLM

SEQ ID NO: 5539 - protein, 135 aa, Zea mays
  VARIANT 14: note = Ancestral polymorphism is G, Derived polymorphism is R
  VARIANT 43: note = Ancestral polymorphism is V, Derived polymorphism is M
  VARIANT 45: note = Ancestral polymorphism is D, Derived polymorphism is G
MSPSRAKRKVAQIREQALSAAVGDVVARTMSAVAGRYDAHASVDDQLERLATLLVMVHSAVDEAERVHVANWWLRRWLWRLRYAALDGDEVLLSMRQQRAAEAAEATAMTQIQITLVKCIASSMVSTEQPSVLQY

SEQ ID NO: 5540 - protein, 556 aa, Zea mays
  VARIANT 418..556: note = Derived polymorphism lacks residues 418 to 556
MDRLGANPANSCPLTPLGFLERTATVYGDCPSVVYHDTVYTWSQTHRRCLRLASALVSLGVSRGDIVSVLLPNVPAMYEMHFGVPMSGAVLNTINTRLDARTVSVLLRHAGSKLVFADPASMPLVRDALSQLPPGHPAPRVVPVEDPHETEFPAAAPGALTYEALLDGGDPEFAWVRPASEWDPMILNYTSGTTSAPKGVVHCHRGIFLVTVDALVEWAVPPRPTYLWTLPMFHANGWCFPWGMAAVGGTNVCLRRVDAAEVYDAIARRGVDHLCGAPVVLNMLANAPDAARRPLPGKVRILTAGAPPPAAVLHRTESIGFEVTHGYGLTETAGLVVCCAWKREWNKLPASERARLKARQGVRTPGMNEVDIVDGETGRSVPRDGSTMGEIVLRGGGVMLGYLNDDKATRAAIRDNGWFYTGDVGVMHPDGYMEIRDRSKDVIISGGENISSVEVESVLYNHPAVNEAAVVARPDEFWGETPCAFVSLKEGSGAVTAADVIAWCRDRMPHYMVPKTVVLRAELPKTSTGKIQKYVLRNLAKEMGPTRKGASSSSRM

SEQ ID NO: 5541 - protein, 441 aa, Zea mays
  VARIANT 18: note = Ancestral polymorphism is T, Derived polymorphism is K
MRPAVLAALLLVAAAASTAAALYSSGSPVLQLNSNNFKSKVLNSNRVVLVEFFAPWCGHCKQLAPTWEKAAGVLKGVATVAALDADAQQALAQEYGIKGFPTIKVFSPGKSPVDYQGARDVKPIVEFALSQVKALLRDRLSGKASAGSNGKTSGGSSEKNEPSASVELNSRNFDELVVKSKDIWIVEFFAPWCGHCKKLAPEWKKAAKNLKGQVKLGHVDCDAEKSLMSKYKVEGFPTILVFGADKESPFPYQGARVASAIESFALEQLEANSGPVEVSELTGPDVMEEKCASAAICFVSFLPDILDSKAEGRNKYLELLLSVAEKYKKSPYRQVFVWTAAGKQANLENQVGVGGYGYPAMVALNVKKGAYAPLRNAFQRDEIIEFVKEAGRGGKGNLPLNVAPTVVTSEPWDGKDGEVIEEDEFSLDELMGDSSSVNDEL

SEQ ID NO: 5542 - protein, 134 aa, Zea mays
  VARIANT 62: note = Ancestral polymorphism is N, Derived polymorphism is H
MGKTWALITHLHALAGPSLTLIYPLYASICAMESATRVDDEQWLAYWIIYSFITLFEMAAEHVLYWIPLRYEAKLLLAAWLVLPHFRGASFIYDRFVREQLRKNGVSLRGHHHGHAADHVPHVFQAEHRHGVHS

SEQ ID NO: 5543 - protein, 525 aa, Zea mays
  VARIANT 307..525: note = Derived polymorphism lacks residues 307 to 525
MCGCAALVAGARPPRPVLPRRLRRRRGSSVRAEVSPGGESQPKKVTVAGAGWAGFAAAHHLIKQGYDVTLLAAESGPTEEVGLRGFWQPYRNIFALVDELGISPFTGWNKAAYYSTEGLAVEFPIFHNQPRLPAPFGVFAYPEFPNLPLSDRLTSIPVIAAVIDFDNTDTAWRKYDAMTAKELFKMYGCSQRLYREIFELVIQAALFAPDLVFINECPILQENSDFLLCRGEVEEKIFSPWLQSLELKGLKFVENKVPTSLTTDVDSGCISSIVCGDDVYEADAFVLAMGLSSLQSIVKNSNVGSQECPFLRSDREFRNLLHLSTVDVISVKLWFDKKIIIPKVANVCSGFDDSSGWAFFDLTSVYDDYCEESITIVEAEFYNASHLVLLSDDDIVYEASSHLIKCIQDFEGAIVIRYSIRRSPNSVINFLPGSYKYTLRGSTSFPNLFIAGDWIVNRHGSFSKEKAYVTGLEAGNRVVDYFDIGDFAKIIAVEGDEPHIETLRSLNRRANELKSQIPFSEFFLQ

SEQ ID NO: 5544 - protein, 141 aa, Zea mays
  VARIANT 89: note = Ancestral polymorphism is P, Derived polymorphism is S
MGLCISVSLWKEKLYGADGSSRSVQCRVVHEVAGVESGDCECGNLGSDADALGVEHKAAAAAAPAAMGVKSGGVEGAAAAVSGGTPVRPIWQRRVLMGVKCQLPRFSGMVLYDESGRPVCTGVRDRARDQCLSLVFMRYCF

SEQ ID NO: 5545 - protein, 339 aa, Zea mays
  VARIANT 333: note = Ancestral polymorphism is T, Derived polymorphism is I
  VARIANT 28: note = Ancestral polymorphism is T, Derived polymorphism is S
MEKGVQLMEGRQAWPLHTMGMPVASTTTTSTCFDDYSCSSSGWEQSAPFGCFGLLAADVHDLFPLFAAMEPAPPPPPSAHGVAVAIPGELDDLLLNFWDAGCHDGDVGEPPLKAQQEEEEAAFNSSCACASATHEQGYRTPTDSFTIHCDDDDQALSSIFSAGPAPAAERAAFQQQAPATEAEPLPSSSSSSCRGDPRAAGAGTGLPLPGRGAARGPARAPPLPRTCGPSLKRAATREESEQASAESGGGKRRKGAGVVVVRPFALLKPDGLDGGATLADINARVLMRPARPVRHPVGEFACAPRVSADQPGISGKAVAGFTRLHTPGRGSITIIRTRG

SEQ ID NO: 5546 - protein, 325 aa, Zea mays
  VARIANT 223: note = Ancestral polymorphism is T, Derived polymorphism is A
MELGLSLGETMADSGSDLVLGLGMGVGVRREEETQRGRRDREARRELEFETGRCARPSPEPAVRLTLLPGLVPSLGLPWPLSSETNREVSTRGFDDVNRALSVAGAGAEEDEAAVAAATAAASSSPNNSSGSFAMDISAQGQGQGQDQAAPAADRACSRASDEDDGGSARKKLRLSKEQSAFLEESFKVRATPNPKQKLALARQLNLRARQVEVWFQNRRARTKLKQTEVDCEHLKRCCETLTGENRRLHKELAELRALKAVRPLLHMHLPATTLSMCPSCERVASTSSAAPAAPAPASPSPAAGAGIAASAPDPDQRPSSSFAA

SEQ ID NO: 5547 - protein, 91 aa, Zea mays
  VARIANT 54: note = Ancestral polymorphism is A, Derived polymorphism is V
  VARIANT 46: note = Ancestral polymorphism is S, Derived polymorphism is P
  VARIANT 40: note = Ancestral polymorphism is G, Derived polymorphism is A
  VARIANT 1: note = Ancestral polymorphism is M, Derived polymorphism is V
MEPGMEAALIKVGMFVLVQALVYLILSQSSTVFSRTKSLGLRPARSLSARRMLALLSDLPLNAGEPSPVAAFARTRSALSPMLAAAQRKQD

SEQ ID NO: 5548 - protein, 91 aa, Zea mays
  VARIANT 40: note = Ancestral polymorphism is G, Derived polymorphism is A
MEPEMEAALIKVGMFVLVQALVYLILSQSSTVFSRTKSLALRPARSLSARRMLALLSDLPLVAGEPSPVAAFARTRSALSPMLAAAGRKQD

SEQ ID NO: 5549 - protein, 822 aa, Zea mays
  VARIANT 397..822: note = Derived polymorphism lacks residues 397 to 822
MSSSLVSTPFAAAAQKQLLAAPVPLHSFLLSSRRQQPRRAGAIRCAVAGGNGLFTQTKPEVRRVVPADPRGLPRVKVVYVVLEAQYQSSWATFRADLADVNVFIGSLIFVEELALKVKAAAEKERDRMDAVLVFPSMPEVMRLNKLGSFSMSQLGQSKSPFFQLFKRSKSNSSNFADSMLKLVRTLPKVLKYLPSDKAQDAWLYILSLQFWLGGSADNLQNFLKMIAGSYLPVLRGAGIKYDDPVLYLDSGIWHPLAPTMYEDVKEYLNWQDHPKAIAALQKLDVPYIVALPLVFQTTEEWLNSTLGLHPIQVALQVALPELDGKSHALHRRVEQLCTRAIRWAELKRKTKEDKKLAITVFSFPPDKGNVGTAAYLNVFSSIYSVLSDLKKDGYNVEGLPDTPEALIEEVIHDKEAQFNSPNLNVAYRMNVREYQALTSYASLLEENWGKPPGHLNSDGENLLVYGKQYGNVFIGVQPTFGYEGDPMRLLLSKSASPHHGFAAYYTFVEKIFQADAVLNFGTHGSLEFMPGKQVGMSDACYPDSLIGNIPNIYYYAANNPSEATVAKRRSYANTISYLTPPAENAGLYKGLKQLAELISSYQSLKDTGRGPQIVSSIISTAKQCNLDKDVPLPEEGEELPPSERDLIVGKVYAKIMEIESRLPPCGLHVIGEPPTAIEAVATLVNIAALDRPEDGIISLPGILAATVGRDIEDVYRGSDKGILADVELLRQITEASRGAITAFVEKTTNSKGQNHGCSTKFIRADREKLRVLFGFLGECLKLVVQDNELGSGRGYWETSEENLDRLRELYSEVEDKIEGIDR

SEQ ID NO: 5550 - protein, 374 aa, Zea mays
  VARIANT 130..374: note = Derived polymorphism lacks residues 130 to 374
MAFSYSNGRTLPSKWEDAERWIFSPNSSDMRGRTTVAHGRRPKSKSGPLGPPGRLGGQYSSVSSVSLLDSERVGPITSNSHFSAGVLMPGHVCGGKNTNGAYSGRPIGDEINIGEGVRICPLNGGSHPIRTPRVRKRLDSAVESSASLPSTQESIQDEQVEITEDSASTIACIISRKDVATQTSPELSRSSSPNNRPTFNRSLSTEQMKERGSCFSDLDIRDVQMDDRVTLTRWSKQNVTRLPNKNSTNIIEWKEKAVESKSLSWGFAEAKCISKIGREDTKITAWESIQKAKAEAAIQKLMIKMEKKGSSSLDKILNTLKSAQRKAQVMLEHELDAVTANQDGKGSRKAKKGAQRSKNGQISSLSGCFTCHAF

SEQ ID NO: 5551 - protein, 342 aa, Zea mays
  VARIANT 240..342: note = Derived polymorphism lacks residues 240 to 342
MHAQSFPVGLDLSLNLFKGRDNADNSLHGYKVFKNPSISDVPCTTTAEALAMGKFVTCAEHPSNEFLRSYRELIDLMAKHKIDLEGFKLDVYGSGEDSQEVQSTAKRCKVFKNPSISDVLCTTTAEALAMGKFVICAEHPSNEFFMSFPNCLTYKTSEEFVARVKEAMDREPQPLTPEQRYNLSREAATERFMEYSDLEKVLNNEAAQSEQGRKRKNKRTSQPNLSSVFRAHLREIKHNCCCGSPQPSSCRTRRVRRWTSTSPGSVSVLAARPRTGSSLLRIMRLSRSTLATWMRMACTMSLHHVCSLWVCPCSGYSPGVMLTARWTGRGRRRLRSSSRSCT

SEQ ID NO: 5552 - protein, 118 aa, Zea mays
  VARIANT 42..118: note = Derived polymorphism lacks residues 42 to 118
MACKTKSLLLALCVAALLAARSEFHGLGDFTSGEATTTSEMQTFFMPQATTALPEALDASMPAKPEATALPAAAAATTAAGTTGGTAPSDTPRRPVSVAAGMAVVAMVGIADHPDAVA

SEQ ID NO: 5553 - protein, 305 aa, Zea mays
  VARIANT 6: note = Ancestral polymorphism is R, Derived polymorphism is Q
MDELLRSIWTAEETQAKASASIAGASAGMPPTPMQRQGSSLTLPRMLSTKTVDEAWRNLVRDEPPQGADGGGHQPPHRQSTLGEMTLEEFLVRAGAVKENPASAPPAPPPMVPPRPVPVAPKSSAFFGDLPGADDDAATAAVGFAPVGMVDLALIPPRAAGMGGSAMAVQTAVSQLDSVGKGYSDLSSLTEPQTFSFERMIRGRRHGGGVEKVVERRRRRMIKNRESAARSRARKQSHRTLPGLYNGVRSRSSETQRAESGTGEETGRNYGNAEQRGIRNVEGSIRTEETAVLAKNVDGPLVTIA

SEQ ID NO: 5554 - protein, 298 aa, Zea mays
  VARIANT 72..298: note = Derived polymorphism lacks residues 72 to 298
MVEEGATAAASRSGPAPFLSKTHQMVEERGTDEVISWAEQGRSFVVWKPVELARDLLPLHFKHCNFSSFVRQLNTYGFRKVVPDRWEFANENFRRGEQGLLSGIRRRKSTTPQPSKYGGGSVVNTAFPPPLPLPPPASVTTSGGGGAGGAGNERSSSSASSPPRTDDLTSENEQLKKDNRTLSTELAQARRHCEELLGFLSRFLDVRQLDLGLLMQEDVRAGAGDDAAPRRAMVSQLERGGEEGKSVKLFGVLLTDAARKRARCEEAAASERPIKMIRIGEPWIGVPSSGPGRCGGGN

SEQ ID NO: 5555 - protein, 544 aa, Zea mays
  VARIANT 325: note = Ancestral polymorphism is A, Derived polymorphism is S
  VARIANT 303: note = Ancestral polymorphism is C, Derived polymorphism is W
MALFFILACTLIFVAIASYAQYARWQKGKGRLGGHEKASSSSSKLPPGSMGWPYLGDTLQLYSQDPNVFFASKQKRYGEIFKTHLLGCPCVMLASPEAARFVLVTQAHLFKPTYPRSKERMIGPSALFFHQGDYHLRLRKLVQGALGPDALRALVPEVESAVRSTLAAWDGQVRSTFDAMKTVSKHAWAWPMVSVMMSTQYISDDAENIIACRLDLLLRLFQLSFDVGILAIFGGGGLDERRKAELRKNYSIVEKGYNSFPNSIPGTLYYKAMQARRRLHGVLIDVMRERRERGAPGTDLLGCLMRSQGDDDGARRPLLTDDQVADNIIGVLFAAQDTTASALTWAVKYLHDHPKLLEAVRAEQAAVREATGGGRRPLTWAHTRSMALTHRVILESLRMASIISFTFREAVADVEYKGFLIPKGWKVMPLFRNIHHSPDYFQDPHKFDPSRFQVAPRPNTFLPFGSGVHACPGNELAKLEMLVLIHHLVTAYRWETVGSSDEVEYRPFPVPKQGLPVRLWRESSAAVDRNGRHETDDDVEDIIV

SEQ ID NO: 5556 - protein, 334 aa, Zea mays
  VARIANT 147..334: note = Derived polymorphism lacks residues 147 to 334
MPAGGVAEMKELPEELAKGVVCLKCETSVEAAAAGVGYDWAINWAIRGWTALHWAACYGRERTVGALIASGAASGALTDPTQQYPSGRTPADLASENGHKGIAGFLAESALTSHLSALTLKESPSGNVEEICGLTAAEGFAVSSSSQLACVNSQEESLKDSLGAVRKSTQVAARIFQAFRVESFHRKKVRKNYRKVVWSVGIVEKVILRWRRKGRGLRGFQPEKQLEGPSWQIQPAKAEAEDENDFLKDGRKPATGRLDRALARVRSMNQYPEARDQYRRLQACVNSLRESQAMQDRMLADSAGTDGGDFMTELEEPYASKSMPKREQFPIADC

SEQ ID NO: 5557 - protein, 118 aa, Zea mays
  VARIANT 106..118: note = Derived polymorphism lacks residues 106 to 118
MPFLENNKGLPVALWFVGPTFAVLMASSSRKVSAMGTGSCILTFLIPGLLLGHLVTQKPLAFISINCCRADTLLPVSNLTNQGAIRDKYVFMFNTLLEEENKAWIQKLERQKGQELFE

SEQ ID NO: 5558 - protein, 747 aa, Zea mays
  VARIANT 367..747: note = Derived polymorphism lacks residues 367 to 747
  VARIANT 380..747: note = Derived polymorphism lacks residues 380 to 747
MIPFSVLAGALVLLVGVADALPGYQISCGATSDKVAGNVTWVADGAFIHAGKVAELDSPGVMPMLSSLRYFPPDASSAAKYCYAVPAAMHARYLVRTTYYYGGFDGGGAPPVFDQIIDGTRWSAVDTAGGYARGLATYYEAVVEAAGKELSVCLARSAATAPGRSPFISALEVVPLEESVYSAVNFTAYALSTVARHSFGHNGSIIGYPDDRFNRYWEPYSDGGIPVVESQASVATEAFWNKPPEAVFRRGLTASRDKSLELQWPPAPLPAASYYLALYFQDNRGPSALSWRVFDVAVNGQPFFAGLNVSTAGCMVYGVDWPLSGQTRITLTPALESPVGPLINAAELMMVVPLGGRTHPRDVIGMQELARGFTNPPSDWRGDPCLPQGNSWTGVTCNQDPLARVTGLNLTNFRVGGSISNNIANLTAISSIWLVGNNLTGPIPDLNHLLHVVSLHLEDNGLTGPLPESLGNLTRLEELSVQNNSLQGTIPSSIRNRAAVDPRFRFQPVLTQDMKISTSCLVHLLNYLIVPRAHRPLCRRCISHSRLFAGDDRRLPRPNLLGFSMTTPPNPSPLLSSRPNPSLPLHRRPRFPHSPAAANTTGAASAPDWFRPRRTPDSDPSISGGRVTARDPGVRVKAKEGAEEEKDKKAKRRRWWERWSGDKESYLVDDVEPLPIPLTVPETEPMSREELDRRLSCDVEIDECKTVSYEWTGKCRSCQGTGLVSYFRKKGKETICKCVPCAGIAAE

SEQ ID NO: 5559 - protein, 563 aa, Zea mays
  VARIANT 129..563: note = Derived polymorphism lacks residues 129 to 563
MALVSPAPAPSAPDAPSPPQHQQAPVPIPGPAANSQAAVAAASSNPGASASIPSLSPPVSHATKGRSKSVRWGDLSPASSDGATSFDSRPSFKDVLVRTTNPSPPGRVAAQGSAPAAGKSSALGKVYRQPHPLSTKRRSPRQATQPTPAIRPAPGFSDHGWTTVESKKGRSRRLKASWLPGRVPADLVGRCFNCLGCDHRAVGCGSEPRCFLCSALGHKSSCPKATVWRRLGCPRPVKSVWERLSPAVEGRVQRPAGRRPVWQRIAPPEAIPIVPSVPVGNMLGVSAAQGIGGPASSRRKRWRKKKRKEREDEPALEISAPPPPEQMLPASDETACVIDWSVQMSIAEDNLKTAAVITVVSSRDVSADEIVLVLAPRLEMEVGGLVLRQFSQSSFLAVLPNQVQLDTLVDRFHIIREENFMLSSRRWTSFGGAVGNSLKHLVELELRDLPLHAWETSVVQHLINPHACISHVLPDTLEIRNLEVFRCLAWCCDPEHIPSKKDLWITEPDQASAAEGKKALVYPVRIRWGPVDLNLIPGAPQPPVGAGDQDKPDTPPPFTEKMW

SEQ ID NO: 5560 - protein, 650 aa, Zea mays
  VARIANT 317..650: note = Derived polymorphism lacks residues 317 to 650
MAALVPLLLAHLLLCVHGATVTSVATPPPLPVLPVPSYAQLRWQLSEMALFLHFGPNTFTDSEWGTGHADPSVFAPSALDAGQWARIAAQGGFGRVVLTAKHHDGFCLWPSALTEYSVAASPWQGGAGDVVAELAAAARAEGLGLGLYLSPWDRHEPVYGDTIAYNEHYLGQMTELLTRYEIQINRAPTNSHRIHQSLLPFSSRSLVWFSDPEVLLRWDMFRITAPSKASKDFQIPDFQRVGQNMGNACMGVDQMLHHRSLPRVQRQISELKFHEMLQGITNSTPEARPPPRGEHEVFFSDDMEAIHQRVELHLVGYGDVEEVWLDGAKGDAKKMDYMFDAWFSLIHQLQERVVIFSDAGPDTRWVGDEAGVAGYTCWSPFNKSSVTIGHTTAEYSSSGDPFGQDWVPAECDVSIRPGWFWHASEKPKNVTTLLDIYYKSVGRNCLLILNVPPNSSGLIADEDIQVLQEFTEIRRAIFSQNFAANATVTANSVRGEQDNLQFAPSKVLEDGIYSYWAPQEGQTCWEMLFDLGQSTSFNLLQLQEPIQLGQRVIEFHVAILVDELWQTIVEGTTIGYKRLLLFPVTESRYLKLTIDSARADPLISFFGVFMDPFSSIHSLQNHVKPPRTNSNEVTMLRMAHASVNKSIDAM

SEQ ID NO: 5561 - protein, 98 aa, Zea mays
  VARIANT 88: note = Ancestral polymorphism is Q, Derived polymorphism is H
MAIKNMTVAATTRSLDADMTVDEFKEWLRRFDTDQDGRISRDELRRALRAIRSRFTGWRSRQGISYADTDGDGYIDDSEVDGLIEFAQKNLGLKIVAY

SEQ ID NO: 5562 - protein, 57 aa, Zea mays
  VARIANT 6: note = Ancestral polymorphism is V, Derived polymorphism is I
  VARIANT 7: note = Ancestral polymorphism is G, Derived polymorphism is D
  VARIANT 28: note = Ancestral polymorphism is A, Derived polymorphism is V
  VARIANT 36: note = Ancestral polymorphism is A, Derived polymorphism is V
MALSDVGTMSAKRGGGGCFLVPVPRALALLPDNDWAPTTLRHVSNSLPSLREGGKVG

SEQ ID NO: 5563 - protein, 151 aa, Zea mays
  VARIANT 68: note = Ancestral polymorphism is S, Derived polymorphism is F
  VARIANT 67: note = Ancestral polymorphism is F, Derived polymorphism is I
MSCVNMYNPEQHQAAPPFMAPRMSFSSDFAVEPPPPAAARGGAAGPGDADFEFSVGSHPMMAADQLFSKGRLLPLREAPQQAGGGARPVTLREELRADERHGRVPRAPNIRWKELLGLKKAPKKQAAADAAAGTSADAHMDLGGQQGSTRD

SEQ ID NO: 5564 - protein, 133 aa, Zea mays
  VARIANT 8: note = Ancestral polymorphism is E, Derived polymorphism is K
MAEAANEEDAKRTGLEGTGLPLQGGSHGNLRSAGSDQQLRQMLDSLKSSKSPAVINYGASWCRVCSQILPSFCKCSDKFKKLTFIYVDIDECPETTQNIRYTPTFHFYRDGERVDEMLGAGEERLHDRLWLHS

SEQ ID NO: 5565 - protein, 174 aa, Zea mays
  VARIANT 13: note = Ancestral polymorphism is L, Derived polymorphism is S
  VARIANT 25: note = Ancestral polymorphism is Y, Derived polymorphism is C
  VARIANT 71: note = Ancestral polymorphism is R, Derived polymorphism is S
  VARIANT 72: note = Ancestral polymorphism is H, Derived polymorphism is N
MGLSSSISVQKTLYEVLSVSEDATYDEIRAAYRSAALNTHPDKARTPLESCVLSGEQQEFSSVQKAWEILRHPTSRADYDKQLQSSRQNIEIIASEVQVGDMIIESTADADTVELSYPCRCGDYFSITSCELSGMGISVSGDGDGEVELQASDSPSASVVLGCGSCSLKIRLVL

SEQ ID NO: 5566 - protein, 762 aa, Zea mays
  VARIANT 529: note = Ancestral polymorphism is A, Derived polymorphism is T
MSEFLDLELQDGIRMPWNVIPGTKQETVNCVIPVSAIYTPLKPISDIPVLPYSPLRCRMCRSILNPFSIVDYVAKIWVCSFCFQRNQFPQHYSSISENNLPAELFPQYTTVEYISSTETGPIVPPVFIFVVDTCMIEEEIGYLKSALAQAVELLPDNSLVGFITFGTYVQVHELGFGLLPKSYVFKGTKEVTKEQILEQMCFFAGKKMPTTGVIAGTRDGLSSESISRFLLPASECEFVLNSVIEEIQKDPWPVPADQRASRCTGAALSVAANLLGVCVPGSGARIMAFVGGPSTEGPGPIVSKSLSEPIRSHKDLDKDSAPLYDKAVKFYDQIAKQLVHQGHVLDLFACAVDQVGVAEMKVAIEKTGGIVVLAESFGHSVFKDSLLRIFQSTDDNLGLSFNGILEINCSKDVKVQGIIGPCSSLEKKSPLSSDTVIGQGNTSAWKMCGLDRKTSLCLVYDIAKKDGPDSIAQSANNQFYFQFLTYYQHNEGQMRLRSTTISRRWVSGDNHVEELVAGFDQEAAAAVMARLVSFKMETEVDFDPVRWLDRALIRLCSKFGDYQKETPSSFSLSPRLSIFPQFIFNLRRSQFVQVFNNSPDETAYFRMMLDRENVTNTVVMIQPSLISYSFQSGPEPVLLDATAIASDKILLLDSYFTVVIFHGVTIAQWRNAGYQDQEGHEVFAQLLKAPHEEANLIIKERFPVPRLVVCDQYGSQARFLLAKLNPSVTYNSDNPSPGGDVIFTDDVSFQVFMDHLQRLAVQ

SEQ ID NO: 5567 - protein, 352 aa, Zea mays
  VARIANT 136: note = Ancestral polymorphism is R, Derived polymorphism is S
MASRILLPLLVLLLLFLGPHCSTGAAARRQLQQARRARDPNSQVKFDFSPFLIQYKSGRVKRLMGTDVVAASTDARTGVTSRDVTIDPSTGVAARLYLPSLRARAPVLVYFHGGAFVVESAFTPVYHAYLNTLAARAGAVAVSVNYRLAPEHPLPAAYDDSWAALRWVLASAASDPWLSRYGDLSRLFLAGDSAGGNIAHNLALRAGEEGLDNGGGGARIKGVALLDPYFQGRSPVGADSTDPAYLQSAARTWSFICAGRYPIDHPYVDPLLLPASSWQRFGASRVLVTVSGKDRLNPWQRAYYAALRNSGWPGEAELYETPGEGHVYFLTKLGSPQALAEMAKLVAFINRD

SEQ ID NO: 5568 - protein, 361 aa, Zea mays
  VARIANT 110: note = Ancestral polymorphism is P, Derived polymorphism is S
  VARIANT 114: note = Ancestral polymorphism is F, Derived polymorphism is S
  VARIANT 149: note = Ancestral polymorphism is D, Derived polymorphism is Y
MPKLSCRVLFAALLIASLAALLVRFPIHRLLNPHAAMDPDSELEFEMPGVLRVYKTGRVERFDGTETVPPCPDGDPANGVASKDIVLDPAAGISARLYLPAGVDAGKKLPVVVFFHGGAFMVHTAASPLYHIYAASLAAAVPAVVVSVDYRLAPEHRIPAAYDDAFAALKAVIAACRADGAEAEAEPWLAAHGDASRIVLAGDSAGGNMAHNVAIRLRKEGGIEGYGDMVSGVVLLYPYFWGKEPLGAEPTDPGYRAMFDPTWEFICGGKFGLDHPYVNPMASPEEWRQLGSRRVLVTTADQCWFVERARAYAEGIKKCGWEGELEFYETKGEAHVFFLPKHGSEKAVKELALVAEFVRRC

SEQ ID NO: 5569 - protein, 327 aa, Zea mays
  VARIANT 56: note = Ancestral polymorphism is D, Derived polymorphism is V
MAGSGANDDEVIFEMAQFIRVYKSGRVERYFGSDPVPASTDTATGVASKDRAVSPDVAVRLYLPPPAKDTEDNGGSSKKLPILVYFHGGGFCLHTAFNFVFHAYLTSLAARARAIVVSVEYRLAPEHPLPAAYDDSWRALLWVASHATGSGEELWLTDHGDFSRLCVGGDSAGANIAHHMAMRAGAEPLPHGARISGAAIVHPYFLGADRVASEETDPALAENVVTMWRVVCPGTTGLDDPWINPLAAGAPGLEGLACARVLVCLAEKDVARDRGRAYAAELRASGWAGEVEVVEVNGQGHCFHLVDFACSDAVAQDDAIARFVNLY

SEQ ID NO: 5570 - protein, 402 aa, Zea mays
  VARIANT 203..402: note = Derived polymorphism lacks residues 203 to 402
MEKGKHIQPPTYGNLVTILSIDGGGIRGIIPAVVLTFLESELQKLDGEEARLADYFDVIAGTSTGGLVTSMLVAPNNTNRPLFAAKDIQAFYMNHAPKIFPQQRGPFGRVMRIFRSLSGPSYDGKYLHDVVRKKLGITRLHETLTDVVIPTFDIKRLQPIIFSSYEVKNEKYNTMDALLSDICISTSAAPTYLPAHYFKTEDCHGNTKEFHLIDGGVAANNPALVAIGEVTKQIFKENPDFFPIKPMDYGRFLVISLGTGSAKFEANYNAQTAKSWGLLGWLLGSGSTPLVDIFTQASADMVDIHISAVFKALHSEQNYLRIQDDTLQGTLSSVDVATKENMEKLARVGDMLLKKPVSQANLETGHMVPACHRAEMTNEEALKRFAKLLSDERRLRKARSPK

SEQ ID NO: 5571 - protein, 502 aa, Zea mays
  VARIANT 21: note = Ancestral polymorphism is L, Derived polymorphism is H
MMMRTNTLFLLSLAILLGTSLAVTDVSQEAQLSKFMTTRALKRLTTKRPRVNGPEETDPWADPSAFAHLAERCKGPPSGSKEADRVLGLPGQPPRVNFRQYSGYVTVNEEHGRELFYYFVESPHDAASKPLILWLNGGPGCSSLGFGAMKELGPFRVNPDGTLRRNKHSWNNLANVIFLESPAGVGFSFSRNATDYDTVGDRRTAEDTYVFLAKWLDRFPEYKGRAFYVTGESYGGHYVPELATVILYMNRFPDLLTPINLQGIFFGNPLLDDYLNGKGELEFLWSHGVISDEVWARILANCTFTPSDDWPCFVAAHSFQRGNIDKYDIYAPVCLQSDNGTYYSSSHSLPGYDPCSYYYIEPYLNNHAVKQALHARVDTNWTGCSEDLAWNDAPEFMVPIIKRLINEGLKVWIYSGDFDSVCSITATRFSVNDLNLTVTTKWRPWYTPDSEVGGYVQQYKEGFTFASVRAAGHLVPTIQPKRSLVLLYAFLKNMLPPADISN

SEQ ID NO: 5572 - protein, 151 aa, Zea mays
  VARIANT 17: note = Ancestral polymorphism is R, Derived polymorphism is W
  VARIANT 23: note = Ancestral polymorphism is C, Derived polymorphism is R
  VARIANT 27: note = Ancestral polymorphism is R, Derived polymorphism is Q
  VARIANT 29: note = Ancestral polymorphism is A, Derived polymorphism is T
  VARIANT 31: note = Ancestral polymorphism is E, Derived polymorphism is K
  VARIANT 32: note = Ancestral polymorphism is A, Derived polymorphism is V
  VARIANT 35: note = Ancestral polymorphism is P, Derived polymorphism is S
  VARIANT 73: note = Ancestral polymorphism is A, Derived polymorphism is T
MAAGCALSMVATAPAPRWAWPFCFLPRGATEASGPVFFWAHVFYLSKVYELGDTLLILLARPPRFQISLRPGAVTEEEERLVRALDAEAVEGSERHVGPERGATLLDAVVVEGHDAADERDDGGLEVEGDLHVEVTDAGDREAEKEGRRME

SEQ ID NO: 5573 - protein, 624 aa, Zea mays
  VARIANT 539: note = Ancestral polymorphism is A, Derived polymorphism is P
MHTAPPMNGRSRRPAAARGAKAAPKSDSRVMEKDPRKAATPAKGPANAGTRVTMNRIQSRERKLALQQDVDKLKKKLRHEENVHRALERAFTRPLGALPRLPPYLPSQTLALLAEVAVLEEEVVRLEEQVVSFRQGIYQEAIIFSSTKNAQLPDGQVPVPAQLVPSYPVLNSEVSPATVSQGPPDHPPGARPSPHSGVANGKQTPRNPVATSPSQDDRSGAGKENQSCSNTPSTSSRQSPSQQKTPKCRATPPDRRRVTPAQTSPAVAPDRKRPADAAAGTGSNSDNVTTSHDDASSSVPNKVSEELLRCLLAIFSQMGGSAAGGGRGLGDEDQQALSPSVSGSSESSASSEADAYPQDPYGILELGARDIGAYKRFHVVDAASFDGNGDTPLVRRRLKALLRRLSSVDLAGLSHQQKLAFWINVYNSCMMNAFLEHGIPTTPQMLVAMMPKATVSVGGRTHSAMSIEHFILRLPYSAKQVKVSREGAKCDDGDVTAARGAFGLEWPEPLVTFALSCGSWSSPAVRVYTAARVEEELEAAKREYLQAAAGVWAAGRLAVPKLLHWYLLDFAKDVDALMDWVCLQLPPELRQEAVRAVEVGRRAGAGGRVRVLPYEFRFRYLLAS

SEQ ID NO: 5574 - protein, 189 aa, Zea mays
  VARIANT 1: note = Ancestral polymorphism is T, Derived polymorphism is M
  VARIANT 18: note = Ancestral polymorphism is H, Derived polymorphism is D
  VARIANT 24: note = Ancestral polymorphism is S, Derived polymorphism is L
  VARIANT 25: note = Ancestral polymorphism is P, Derived polymorphism is L
  VARIANT 33: note = Ancestral polymorphism is M, Derived polymorphism is I
  VARIANT 45: note = Ancestral polymorphism is G, Derived polymorphism is R
  VARIANT 70: note = Ancestral polymorphism is A, Derived polymorphism is V
  VARIANT 72..189: note = Derived polymorphism lacks residues 72 to 189
  VARIANT 76: note = Ancestral polymorphism is R, Derived polymorphism is C
  VARIANT 128: note = Ancestral polymorphism is G, Derived polymorphism is R
  VARIANT 139: note = Ancestral polymorphism is R, Derived polymorphism is L
  VARIANT 145: note = Ancestral polymorphism is G, Derived polymorphism is R
  VARIANT 154: note = Ancestral polymorphism is M, Derived polymorphism is T
  VARIANT 157: note = Ancestral polymorphism is P, Derived polymorphism is L
MTVSLFGHHRGRVILAIHEDTRVSPLFLIELPMPTSVLHREISSRVVKLALESDTRRSAHRRLVEEYIWAVYCNGRKASYAIRRKEASNDERQRKEASYDECHVLRLLRTVSMGVSVLPPPAPEKDDGPDSEITYVRARVERVVGSKDSEVFYMINPEEGGNSGDNNGGGGGGAPELSIFFSKDEMGKP

SEQ ID NO: 5575 - protein, 72 aa, Zea mays
  VARIANT 1: note = Ancestral polymorphism is L, Derived polymorphism is M
  VARIANT 4: note = Ancestral polymorphism is A, Derived polymorphism is T
  VARIANT 5: note = Ancestral polymorphism is G, Derived polymorphism is S
  VARIANT 10: note = Ancestral polymorphism is K, Derived polymorphism is R
  VARIANT 11..72: note = Derived polymorphism lacks residues 11 to 72
  VARIANT 42: note = Ancestral polymorphism is L, Derived polymorphism is H
  VARIANT 54: note = Ancestral polymorphism is P, Derived polymorphism is L
MYTASEMSFKSLEFVVKLGKEGRKIEYKVTIQYATQPNLYHLKQLINCQRRDTLYDAIQALDIVLSHLLSIM

SEQ ID NO: 5576 - protein, 536 aa, Zea mays
  VARIANT 178: note = Ancestral polymorphism is R, Derived polymorphism is H
  VARIANT 201: note = Ancestral polymorphism is P, Derived polymorphism is L
MEAGTWAAAAVAAVALYVAWFWRMSRGLSGPRVWPLLGSLPGLVQHAEDMHEWIAANLRRAGGTYQTCIFAVPGVARRGGLVTVTCDPRNLEHVLKARFDNYPKGPFWHAVFRDLLGDGIFNSDGDTWVAQRKTAALEFTTRTLRTAMSRWVSRSIHARLLPILADAHVVDLQDLLLRLTFDNICGLAFGKDPETLARGLPDNAFASAFDRATEATLNRFIFPECVWRCKKWLGLGMETTLARSVRHVDRYLSAVIKARKLELSAATRKDLLSATPHDDLLSRFMRKGTYSDESLQHVALNFILAGRDTSSVALSWFFWLVSTHPAVERNIVRELCAVLAGSRGVEDPALWLAAPLDFEELDRLVYLKAALSETLRLYPSVPEDSKHVVADDVLPDGTFVPAGSSVTYSIYSAGRMKTVWGEDCLQFRPERWLSDDGTRFQPHDSYRFVAFNAGPRICLGKDLAYLQMKNIAGSVLLRHRLTVAPGHRVEQKMSLTLFMKHGLRMEVRPRDLSVVIDELRGAGEYDAAARATAASA

SEQ ID NO: 5577 - protein, 247 aa, Zea mays
  VARIANT 8: note = Ancestral polymorphism is S, Derived polymorphism is F
  VARIANT 15: note = Ancestral polymorphism is R, Derived polymorphism is L
  VARIANT 24: note = Ancestral polymorphism is R, Derived polymorphism is W
  VARIANT 42: note = Ancestral polymorphism is L, Derived polymorphism is M
  VARIANT 130..247: note = Derived polymorphism lacks residues 130 to 247
  VARIANT 204: note = Ancestral polymorphism is D, Derived polymorphism is N
MEPSSTSSSPAVERRLSPEVRRVRKRELKEALEQVQRAVEMLRDADADLGVSLSEETTAAPPEGEDREADVGANGYGAETSSVASDSDYETAQMCDLLKSKVGSLEFLQKLNGIQKSVGQNGAVEPDTSWDIITSVDLWEDGGSDDGYVLVKQEDVVDGMTSFMAACLVSIKKTKDLPPDQLQKVLRKTFSAEKKKSKIRKAWDGTKVVYNVASWGATAVGVYNNRALLTVATTVFQTSCRVISKFL

SEQ ID NO: 5578 - protein, 616 aa, Zea mays
  VARIANT 298: note = Ancestral polymorphism is A, Derived polymorphism is V
MASISGAAAPPSSAVCRLRLRRHLLLRPSHLRLRAPHSIADLSRSSNSAPSPARPALGSGPENGSGGVRAVEKDPIKLWERYVEWLYQHKELGIFVDVSRMGFTEEFLRQMEPRMQQAFVDMRELEKGAIANPDEGRMVGHYWLRDPALAPNSFLRNKIETALDRILAFSQDVVSGKILSPSGRFTSILSIGIGGSALGPQFVAEALAPDNPPLKIRFIDNTDPAGIDHQIAQLGPELATTLVIVISKSGGTPETRNGLLEVQKAFRDAGLQFSKQGVAITQENSLLDNTARIEGWLARFPMFDWVGGRTSEMSAVGLLPAALQGIDIKEMLVGAALMDEETRNTVVKANPAALLALCWYWASEGIGKKDMVVLPYKDSLLLLSRYLQQLVMESLGKEFDLDGNRVNQGLTVYGNKGSTDQHAYIQQLREGVQNFFVTFIEVLRDRPAGHDWELEPGVTCGDYLFGMLQGTRSALYANDRESISVTVQEVTPRAVGALIALYERAVGIYASLVNINAYHQPGVEAGKKAAGEVLALQKRVLTVLKEAICENPTEPLTLDEIADRCHCPEDIEMIYKIIQHMAANDRALIAEGSCGSPRSVKVYLGECSVDEDMQAA

SEQ ID NO: 5579 - protein, 181 aa, Zea mays
  VARIANT 117: note = Ancestral polymorphism is V, Derived polymorphism is G
  VARIANT 107: note = Ancestral polymorphism is S, Derived polymorphism is Y
MAFAARAALVRVLPPRPSPTSQPKQLKQGLGGRGGSSLAVRAKDSDDFGALLSEKLDAQAPEKRDGRDGFGREASSVEEEKEVQGEPASWGVLNQIGVELDSDKSYSALIYGTSALVAIWISSIVVSALDSVPLVPQVMEVVGLGFTIWFTSRYLIFKENRDELFTRVSSIKKQILGSHEN

SEQ ID NO: 5580 - protein, 226 aa, Zea mays
  VARIANT 25..226: note = Derived polymorphism lacks residues 25 to 226
  VARIANT 58: note = Ancestral polymorphism is A, Derived polymorphism is T
  VARIANT 72..226: note = Derived polymorphism lacks residues 72 to 226
  VARIANT 109: note = Ancestral polymorphism is I, Derived polymorphism is V
  VARIANT 118: note = Ancestral polymorphism is P, Derived polymorphism is L
  VARIANT 130: note = Ancestral polymorphism is A, Derived polymorphism is V
  VARIANT 132: note = Ancestral polymorphism is P, Derived polymorphism is S
  VARIANT 138: note = Ancestral polymorphism is R, Derived polymorphism is M
  VARIANT 149: note = Ancestral polymorphism is V, Derived polymorphism is A
  VARIANT 161: note = Ancestral polymorphism is R, Derived polymorphism is W
MEKNFYSSENAKILGCEKVPSNVDWECSFMYRHQPESNIHDILSCFEEVIKLAEQLAAAMSENLGLDKGYIEKAFSKPSVGVKVAKYPRCSHPELVMGLREHTDAGGIILLFQDELIPGLEFLKDGRWMAVPPTQGNMILVNLGDQIEAITNGTYRSICHRVLPNKNGSRLSIATFYNPGADAIICPASKLTYPSQYCFQDYLDFYSTTKFTDKVFRFQTTKAILK

SEQ ID NO: 5581 - protein, 361 aa, Zea mays
  VARIANT 47: note = Ancestral polymorphism is P, Derived polymorphism is S
  VARIANT 56: note = Ancestral polymorphism is E, Derived polymorphism is K
  VARIANT 74: note = Ancestral polymorphism is D, Derived polymorphism is Y
  VARIANT 77: note = Ancestral polymorphism is E, Derived polymorphism is V
  VARIANT 82: note = Ancestral polymorphism is G, Derived polymorphism is E
  VARIANT 83: note = Ancestral polymorphism is G, Derived polymorphism is S
  VARIANT 84: note = Ancestral polymorphism is T, Derived polymorphism is P
  VARIANT 87: note = Ancestral polymorphism is R, Derived polymorphism is H
  VARIANT 103..361: note = Derived polymorphism lacks residues 103 to 361
  VARIANT 104: note = Ancestral polymorphism is G, Derived polymorphism is S
  VARIANT 106: note = Ancestral polymorphism is G, Derived polymorphism is S
  VARIANT 109: note = Ancestral polymorphism is T, Derived polymorphism is I
  VARIANT 110: note = Ancestral polymorphism is A, Derived polymorphism is V
  VARIANT 111: note = Ancestral polymorphism is C, Derived polymorphism is Y
  VARIANT 115: note = Ancestral polymorphism is N, Derived polymorphism is S
  VARIANT 155: note = Ancestral polymorphism is P, Derived polymorphism is S
  VARIANT 160..361: note = Derived polymorphism lacks residues 160 to 361
  VARIANT 183: note = Ancestral polymorphism is T, Derived polymorphism is M
  VARIANT 255: note = Ancestral polymorphism is D, Derived polymorphism is A
MAPSSYEMAASTLLCGEDSSSILDLEAGGQEEEEEVLLARSRTRGEPSVVFPVPSEECVAGFVEAEAAHMPREDYAERLRGGGTDLRVRTDAIDWIWKVHAYYGFGPLTACLAVNYLDRFLSLYQLPEGKSWTTQLLSVACLSLAAKMEETYVPPSLDLQVGDARYVFEAKTVQRMELLVLSTLRWRMRAVTPFSYIDYFLHRLKDGGAPSRRAVLRSAELILRVARGTCCLGFRPSEVAAAVAAAVAGEEHAVDIDKACTHRVHEERVSRCLEAIQATVALLAPAQPLKAEGPSSGRSRASSSSATVPRSPTGVLDAGCLSYRSDDAAAAAAASHASSAWRDEDGDCSPAVCSKRRKTSR

SEQ ID NO: 5582 - protein, 343 aa, Zea mays
  VARIANT 277: note = Ancestral polymorphism is G, Derived polymorphism is E
  VARIANT 184: note = Ancestral polymorphism is A, Derived polymorphism is V
  VARIANT 180: note = Ancestral polymorphism is M, Derived polymorphism is T
  VARIANT 173: note = Ancestral polymorphism is T, Derived polymorphism is R
MAATRSTTAVPELALPSGNARPVPVIGLGTAVMFQPPETTKDAVLAAIELGYRHFDTASLYGTEKPLGEGVAEAVRRGLIESREEVFVTSKLWCTQCHPDLVVPSLRQTLENLQMDYLDLYLIHMPVCQKPGPPVFPARREDARPFDFKGVWQAMEECQRLGLARAIGVSNFRTKHLDKMMPFATITPAVNQVADLITSRRMITRTKVEVNPVCQQLKLRGYCAEKGIHVQAFSPLGGQSWAAERNAVLESEVLAEIAKARGKTVAQVSLRWVFEQGVSFVVKTYKKERLKENLEIFDWELTDEDRVKISRIPQKKLSGFSFMFKPEGEFTSVDVSEINPIEE

SEQ ID NO: 5583 - protein, 281 aa, Zea mays
  VARIANT 82: note = Ancestral polymorphism is S, Derived polymorphism is R
  VARIANT 25: note = Ancestral polymorphism is N, Derived polymorphism is H
MDVEASHESPPLRSKTMRRLLVATNCVMLALGVTGGQLLSRLYFSKGGHRQWLSGWLQTGGWPLLLPPVAASYVRRRARYRSAPALLTQTQPRILLAAAGLGLIAGVDNLLYAWGLEFLPVSTSAILISTQLAFTVLFAFLIVRQRLTMATVNAVALLTVGAVVLGLHVSSDRPAGVTRSQYWLGFTLTLGAAVLYGLFLPLVELTYKCAAGGGRAVTYALVVELQLVMGFVATAFCTVGMIVNKDFQVRDAPHIRVAYIRTFHFNSPLAGLQPLAIYAER

SEQ ID NO: 5584 - protein, 200 aa, Zea mays
  VARIANT 63: note = Ancestral polymorphism is R, Derived polymorphism is H
MATLALPPTTKAAGQDATQESLAENPAKDAADPGSMESEWVLLGKSDIVPADVAAAAAAGHHHLNFSPLPMIPIWVQMVLGGVVYTAVPFYKRVLKVEGETLANVETAVEVVEHVAEVTEKLAADAASSLPENGSLHKVAVEVECVAEAVDKDAHEVEAVIDKVEEVSEKIDATVEPVIEELEKDLIPNPRSSSGSDAQK

SEQ ID NO: 5585 - protein, 126 aa, Zea mays
  VARIANT 26: note = Ancestral polymorphism is Q, Derived polymorphism is R
  VARIANT 17: note = Ancestral polymorphism is S, Derived polymorphism is C
  VARIANT 16: note = Ancestral polymorphism is Q, Derived polymorphism is L
MQCTSLLLTLPSCLRQSLRKLEWLRQVILKRSHGCNKYTHPDIVHKTITTWQTQVISTHRSQKSLSLGEASIHSLLNILAFLCSIFVLYLDSIKLFLSSNICWTMDAPEPFAFIHLFTRVVEDCLH

SEQ ID NO: 5586 - protein, 418 aa, Zea mays
  VARIANT 19: note = Ancestral polymorphism is A, Derived polymorphism is T
MSGALGLVRWVVAPGILCAMTMAMPFWGLSQGLGAFGGGRSSPFLRDGRNSSLGREARDRSRTCQPPVSNQGTACQISCIVDTSELHNIADPLLDCLLADWETRHSHQPSRIFIAPSCLDLTVDLGGFGPQSSNWSGISTASRDWIGLQLCPPINYLKPFLRVNLSGFSLSSGMAYGGATTVKIFYQRRRKTTAGNNIATIIDDDIAEAHALGLGLDVDVTAVTPSDPPSDVEGAADTPSETISRFQGPLLLEYNGTVRRADADSTVPLRHEVGDPGMKGVFATRVSGSADLYQVNNRKPYHSVNFVIAHDGFTLCDLVSYNSKHNDANGEGGRDGCNDNYSWNCGIEGGTNDLNVLSLRSRQMKNFHVALMISQGTPMMLMGDEYGHTRYGNNNSYGHDTHINNFQWGQRYANVLSN

SEQ ID NO: 5587 - protein, 279 aa, Zea mays
  VARIANT 254: note = Ancestral polymorphism is M, Derived polymorphism is I
  VARIANT 243: note = Ancestral polymorphism is S, Derived polymorphism is F
  VARIANT 160..279: note = Derived polymorphism lacks residues 160 to 279
  VARIANT 95..279: note = Derived polymorphism lacks residues 95 to 279
  VARIANT 79: note = Ancestral polymorphism is S, Derived polymorphism is L
  VARIANT 78: note = Ancestral polymorphism is V, Derived polymorphism is A
  VARIANT 41: note = Ancestral polymorphism is S, Derived polymorphism is Y
  VARIANT 38..279: note = Derived polymorphism lacks residues 38 to 279
  VARIANT 32: note = Ancestral polymorphism is N, Derived polymorphism is I
  VARIANT 30: note = Ancestral polymorphism is G, Derived polymorphism is E
  VARIANT 18: note = Ancestral polymorphism is K, Derived polymorphism is I
  VARIANT 14: note = Ancestral polymorphism is Y, Derived polymorphism is H
MGHTSSGNEVPLKYSSGKAFPLGVSQVDDGLNFAIFSQHASSVTLCLKLPERGTQDDADIIEFALDRQKNKTGDIWHVSVELFGTYDFDSSPFDWGDNYKLPNLPETDLVIYEMNVRAFTADESSKLGPAIRGSYLGVIDKIPHLLELGVNAVELLPVFEFDELEFKRFPNPRDHMVNTWGYSTINFFAPMSRYASAGGGPVAASKEFKQMVKAFHNAGIEVILDVVYNHTNEADDANPYMTSFRGLDNKVYYILDLNNSAQLLNFSGCGKTMVLSFSF

SEQ ID NO: 5588 - protein, 305 aa, Zea mays
  VARIANT 137: note = Ancestral polymorphism is T, Derived polymorphism is I
MKRPRGATPSLSAMPNHQEGIHCSGLLWGWVMSWRECVRNEDLSPCACVFPDDGYGVLGMEADVDVDVDEEMMAFGGGGGGEKKRRLSAEQVRALERSFEVENKLEPERKARLARDLGLQPRQVAVWFQNRRARWKTKQLERDYAALRRSYDALRLDHDALRRDKDALLAEIRELKAKLGDDEDAAASFTSVKAEPAASDGPAPAGVGSSEISDSSAVLNDADPPVAEAPAPAPEVQGTLLVAPAGPVAGAAAANHGGVFFHGSFLKVEEDETGLLDDDGPCGGFFAVEQPPAMAWWNEPAEHWN

SEQ ID NO: 5589 - protein, 60 aa, Zea mays
  VARIANT 43..60: note = Derived polymorphism lacks residues 43 to 60
MWCHTTGCQRPGRKVVWMPCSCLPLQGCSDSPSSLGSLDSPTRRCFPVSAYLSLYHTSTY

SEQ ID NO: 5590 - protein, 97 aa, Zea mays
  VARIANT 15..97: note = Derived polymorphism lacks residues 15 to 97
  VARIANT 44: note = Ancestral polymorphism is G, Derived polymorphism is R
  VARIANT 45: note = Ancestral polymorphism is S, Derived polymorphism is L
  VARIANT 57: note = Ancestral polymorphism is E, Derived polymorphism is K
MSMGSQGGSRPLQLQEMACWRVVAAAGGQADLRGGQEAHVMGTGSESEVFTWESRTEVREDMELSVGDGAVASGMEEESRGSGGGAAVSESSKAGDG

SEQ ID NO: 5591 - protein, 165 aa, Zea mays
  VARIANT 111..165: note = Derived polymorphism lacks residues 111 to 165
  VARIANT 82..165: note = Derived polymorphism lacks residues 82 to 165
  VARIANT 63: note = Ancestral polymorphism is R, Derived polymorphism is I
  VARIANT 53..165: note = Derived polymorphism lacks residues 53 to 165
  VARIANT 35: note = Ancestral polymorphism is R, Derived polymorphism is C
  VARIANT 31: note = Ancestral polymorphism is M, Derived polymorphism is T
  VARIANT 15: note = Ancestral polymorphism is C, Derived polymorphism is Y
  VARIANT 6: note = Ancestral polymorphism is I, Derived polymorphism is S
MIVLRIESLLSCLHYSSIGSSQVIAPGSAHTSQGRRMGGSSRGSILRTHYSSQSPAVGEFRAIYFVALSLVLLCAYEANSKQEKPTTSEGKKASDEINRNGQYCIHPLQTRRCSSGVGAMRRPTATRSTPPHAHIGRRSTISGEVRDRGVALGGDLRWGLGPDIT

SEQ ID NO: 5592 - protein, 94 aa, Zea mays
  VARIANT 19: note = Ancestral polymorphism is A, Derived polymorphism is V
  VARIANT 44: note = Ancestral polymorphism is N, Derived polymorphism is K
  VARIANT 80: note = Ancestral polymorphism is I, Derived polymorphism is T
MPGVESMGHGSQFTYFLTAPMQAFCQLAGITSDIDTDTYANAENILFSALEEYEGILCTSVGLNNVWGQILPDPFLRRLILRYLVHIFATFKSV

SEQ ID NO: 5593 - protein, 408 aa, Zea mays
  VARIANT 224: note = Ancestral polymorphism is H, Derived polymorphism is Y
MARRLFCATRTLLLPAPAPVPAPTSASSAAAAEASASLLPLLPCKRRKKLLRKLNSPRVAPIEPEAARRVPALDAVLDRDTAFRFLHRARSFLASLPPPHRIPLAEAGKLYRELGFPRGRKVSRSATRHPLLFHLPVVDSVPHLALTPFMCSLLEEERRIHDDLLPSRVLAVRKLLMLTAHRRVPLAKLHHCRAVLGLPDDFRDRVQDFPDDFRVVVDPRDGRHFLELARWDPALAVSALERDFVVDERRVRRTFRFAVPHRRLMPLDAEDADRLDMATTFPLVSPYTNGALLKPWTPEAEKYRVGVVHEFLNLTLEKRAMIHHIVEFKEEFGLTRHMYESLQKQNRAFYLAGTEMNWALFLRDAYDENGVLKEKDPLVLFNEKLQHYACMSKIDSRETMIDTAGLTE

SEQ ID NO: 5594 - protein, 191 aa, Zea mays
  VARIANT 106..191: note = Derived polymorphism lacks residues 106 to 191
MASSPWLRTAGAAPVPPPEAAAAAATAAATPAPTSEQHRVKEEGNAAAATVPKQEEAKLHLPRDNDSEAVTQEHGQKINRYQAILAARLKAKFFSKKAFDRGNIFESETIVGGETIRSSRWPCTRSFANPEFFSRDKNSHEKGNSPSSAADFSAKNNSPPLAGEASPKNNASALVTENNLTTGNRQQSKKN

SEQ ID NO: 5595 - protein, 875 aa, Zea mays
  VARIANT 584: note = Ancestral polymorphism is V, Derived polymorphism is E
MANAGTGRGGQTPESTHQHTLRTAVSNTREAAESPPLAVDDKIFVAVPEELKHGKSNLLWALHNLARDASSSRIAIAHVHVPAQMITTNCSTVPEEINLSDYRQINILCTKFCHEVNCDIVAIQNDDIANGVINLISLHGIKKLVVGAASDKKYSKTMKAPTSNTALKIMEGAASPCKIWFTCKGSLIVVKGGNADTPTVPSSQNTAPLPVFNISSQMRSMMIHNSKDKASSSNLSMANDMGESRTDVPCSLYENAGDTLLQSFEDVESTFKGKPRRLRSLEDFTVDSGRSQTQNSDSSCPPNDGAASISRTAVVDNDNISEVASNMHLSTNNSYDHISPTPHDLDKLKETLTKIQLLEKEVQEECNKQQNAERELQSALQKSKELEKSYMNELRQQKALKEMLEKQRQEIDVMRRQQEEAYAALYNANEQKVTLEQRISEIELYVKDKEDELARNKHQLEALQADCDRIQQERDAAIREATELHEKNRLGVFAPSEALNTKFSLIELQQATQDFNPMFKVGEGGFGSVYKGFLRNTTVAIKLLHPESMQRQSEFHQEASVLSTVRHPNLVTLIGTCPEAFGLVYEFFPNGSLEDCLGCKNNTRPLTWQTRTRIIGEMCSALIFLHSNKPHPVVHGDLKPDHILLDANYSSKLGDFGISRLLIQTNTCSTNLYRTTNPRGTFSYMDPEFLTTGELTPRSDVYSFGIIILRLLTGKQPQRIAEIVEDAIEKENLHSIIDSTAGSWPFIQANQLAHIALRCAELSRRRRPDLTVDVWKVVEPLMKAASMTARPLSCTAPSDETCIPSYFICPILQEIMRDPYVAADGFTYEGEAIRGWLDSGHSTSPMTNLDLERSLLVPNRALRSAILEWNQQERQ

SEQ ID NO: 5596 - protein, 380 aa, Zea mays
  VARIANT 78..380: note = Derived polymorphism lacks residues 78 to 380
  VARIANT 79: note = Ancestral polymorphism is A, Derived polymorphism is S
  VARIANT 88: note = Ancestral polymorphism is L, Derived polymorphism is P
  VARIANT 221: note = Ancestral polymorphism is P, Derived polymorphism is L
MGSFVLGLVFFSTGTPDLVDFNWDDLGFQLIPTDFMYLMSCSSDGVFMNGKLVPYGSIELNPAAAVLNYGQGLLEGLRSHRKEDGSILLFRPHENARRMEIGADRLCMPAPSVEQFLEAVKLTVLANKHWVPPFGKGSLYIRPQLIGSGAMLGVAPAPQYTFIVFVCPVGHYFKGGLAPISLLTEEEYHRAAPGGTGDIKTIGNYASVMRKCEFSKYFLIPHSTSISVPYNRVVSAQRRSKEKGHSDVLYLDPLHNKFVEEVSSCNIFMVKDNIISTPLLTGTILPGITRRSVIEISQNLGFQVEERLITIDELLGADEVFCTGTAVVLSPVGSITYRGRRVEYGKNQEAGVVSQQLYAALTAIQKGLTEDSMGWTLQLT

SEQ ID NO: 5597 - protein, 539 aa, Zea mays
  VARIANT 174: note = Ancestral polymorphism is G, Derived polymorphism is R
MGIQGNKAATHEHDFLSLYAAAAAAAAAKDAPLLLHDSKTPPPSQGNFLLKTHDFLQPFDQKPGAPPEPSPLPAPAAEIRHRQQVAVAKQRALPLPLPGGVGTFSISPAPVSVALPSAVVKSEPPPFVLWGQPAATLQPGARGHQQQWALPFAGSLQVSPPPQQAQPDRKGRGGGGVMDSGSRSSGGAGFDDEDGLTTRREVSSSLQDLAVRVDWKGGSCSDGGTNQGPNTPRSKHSATEQRRRSKINDRFQILRELLPHNDQKRDKATFLLEVIEYIRFLQEKAQKYEATFPEWNQENPTMLPWSKGQIPGDSPPDPSHFVRNGSSPGSNFTGKLDDNHTSAAASGALDQAETNHVASGCYRSSETPANITSMIDGSHMILHYSQKYFLRLEAALVTYDSSLHVDNAISQSQPQWTGPSPVDDSAVKSEMLNSQELAIDEGMISVSSTYSQELLISLSHALQSSGVDLSQTSISVQINLGKRAGKRSASAGGVSSNSKEPPADPASSNELGGHHVTTLGASADGLLPHATKRHKRDNS

SEQ ID NO: 5598 - protein, 271 aa, Zea mays
  VARIANT 23: note = Ancestral polymorphism is T, Derived polymorphism is P
MRRLSRAVAFLLLLLPLALAATTTMAAAVVAKAPAAAAAPPNVTAEMAKGGCKAFADLIAASPDASSTYQSAVEGGMTAFCPSDDAVRAFLPKYRNLSADGKAELLLFHAVPVHYSLGSLKSNNGPMNTLATDGAARSFNFTVQSQGDAVTIRTAAAAAPARVESTVLDKDPLAIYVIDAVVEPVELFKPAPSPSPTPAPAPAADAPKAGNGKAAARQRHPAPAVADAPGPAAEDDAAPVDQKDVKKSAADGAPCSRWWLAAALAAASALV

SEQ ID NO: 5599 - protein, 616 aa, Zea mays
  VARIANT 13..616: note = Derived polymorphism lacks residues 13 to 616
  VARIANT 45: note = Ancestral polymorphism is S, Derived polymorphism is F
  VARIANT 46: note = Ancestral polymorphism is T, Derived polymorphism is I
  VARIANT 50..616: note = Derived polymorphism lacks residues 50 to 616
  VARIANT 55: note = Ancestral polymorphism is L, Derived polymorphism is S
  VARIANT 93: note = Ancestral polymorphism is A, Derived polymorphism is V
  VARIANT 218: note = Ancestral polymorphism is S, Derived polymorphism is L
  VARIANT 240: note = Ancestral polymorphism is S, Derived polymorphism is I
  VARIANT 262..616: note = Derived polymorphism lacks residues 262 to 616
  VARIANT 267: note = Ancestral polymorphism is S, Derived polymorphism is Y
  VARIANT 286..616: note = Derived polymorphism lacks residues 286 to 616
  VARIANT 312: note = Ancestral polymorphism is S, Derived polymorphism is L
  VARIANT 324: note = Ancestral polymorphism is H, Derived polymorphism is Y
  VARIANT 345..616: note = Derived polymorphism lacks residues 345 to 616
  VARIANT 429: note = Ancestral polymorphism is I, Derived polymorphism is N
  VARIANT 473: note = Ancestral polymorphism is P, Derived polymorphism is T
  VARIANT 480: note = Ancestral polymorphism is P, Derived polymorphism is S
MKLKRLARRLQSWGHKAVGNVNSQLGLAREVLHRLEVAQDSRLLSTEEVWLLQKLKQHCLVLASLERTVARLRSRLHYLRDGDANTKFFHLQARLRKKRNFISHLECEGRTVASHEEIQEVLDDFFYNLLGSNVQRPFSLNLIACHRDAIDLSSLEAPFSEKEVRDTIGALPSDKAPGPDGFTGKFYKCCWHIIKSDMIAALNSLHQGNAHKLGMLNSAYLALLPKGDVALSARDFRPISLIHSFAKLVTKMLANRLGPYLQELVASNQSAFVRGRSIHDNFMLVQQSIKSLHKKRVSSLFLKLDISKAFDSVSWAFLFEVLSHLGFGPVWRNMISNILVSSSTQVLLNGSPGIPIRHRRGLRQGDPLSPMLFVLVMDVLNSLFNLAERRGLLHSLEGANIRSRLSVYADDVVLFVQPFEEDFQCVKTILDCFGSATGLVSNLQKSFVIPIRCNDQAVQLGCNILQCTSSTFPCTYLGLPISDTKLRKSDLMVWVDKVADRLPNWKARLLSLAGRTAMVRFVLSAIPVYLLIAMKIPKWVINSIDKIRRGFIWRGRKEVNGGSCLVSWDIVTRPLYLGGLGISNLLYQSWALQAKWLWLQKTDPNKPWSGLEFPIQ

SEQ ID NO: 5600 - protein, 860 aa, Zea mays
  VARIANT 21..860: note = Derived polymorphism lacks residues 21 to 860
  VARIANT 542..860: note = Derived polymorphism lacks residues 542 to 860
MFSAIMAKKNYKQHSKSEKIQGGCMSGLIRMLDFRRSPKLLSDGRVKRDKKGLDDIHGNISANNGKDHRVELIYVGRSSIRTLMEEEMASSTQPLKQAQSNVAGICSEDIDLNLAGSLMEIYRSHTEGQETRRSIESGRSSISTDEEKNTDPPAHHYQIPSSIQRALEDVAEAVIRHQSANKKYINSGDETRSREFVDALQLLSSNKELFVMLMQDPSSRLLECLQNLYMSLGSTRLDSEEYDEGTELQGTTDSLEQSATSPSKVKRRHNSFLKEDGLVTRKPPKLNDGSRGLSRIVILKPSPARGHSSLISGSATSSPLSNHIDWQVQEGSDKHDCHFSLRELKRRLRIAISNNQKDHQLNSTSSDIHEAEADSGKLLPVTSMSETESLASTDSSDRAKEPSIVDEKIVPEDSESGMRNDVAHGVGVSSFSYEKAKMYIIERLNDQGEESCQIVQKSESFERLISLPENGTFSPIDFPQEEKISIAHEATKPLNLHTVEQEDGSASPYSTMQYEETESADTSNLGTETLIEPTIDHGSYSQNEGAISQELVREGVKIMLDIMENSSLCAETGTSQEGVGVKNPDECSLEEPQSMNLLPEPALYSPDDFVNEQENHSPSEIVELVKPSVLTFPYSPENTNDKEEKLSPQSVLDPIAEVTSPRHKTPKQDEFSMPTSRVLFKEVDAPSASPTLWNGPQVAILDDRATRVSFIKAVLEASGLLSEENSQIWYTEEPLLDVSVLAEVGNSYCLTDDAVLLFDYVEEVLLEIRDKFFGSDPWVNSLKHNVRPAPVGRRLVREVAKGIDSLVGKEFPHTLEQVMMKDLDSGSWLDLGGDTGSVVVELWDGLLDDLLEELVFDLWL

SEQ ID NO: 5601 - protein, 577 aa, Zea mays
  VARIANT 194: note = Ancestral polymorphism is Y, Derived polymorphism is F
MAGQTAKAKEAEKDDRQEPGAEGAKNKLLPSHQQQDSPASVADNDSSGVSSVPGDESPVLDGDSGELKVEENLDGNGSKEKKTSQKSSTSDGFASAKVSDGTSSLRKTSGSATMSTRADFTESGKSSMCRVSTASDISDESSCSSMSSATTKPHKGNDSRWEAIHVVKSRDNVLGLNHFRLLKKLGSGDIGSVYLSELSGTRSYFAMKVMDKTSLASRKKLLRAQTEREILQSLDHPFLPTLYTHFETDKFSCLVMEFCPGGDLHTLRQRQPGKYFSEQAAKFYVAEVLLALEYLHMLGIIYRDLKPENVLVREDGHIMLSDFDLSLRCSVSPTVIKSANPGLDAMQRNNAAYCAQPACIEPSCIQPSCVAPTTCFGPRFFSKSKSKSKSKSKKDKSKPDAPNQENLFPELIAEPTDARSMSFVGTHEYLAPEIIKGEGHGSAVDWWTFGIFLYELLFGKTPFKGSGNRATLFNVVGQPLRFPESPIVSFSARDMIRGLLVKDPQHRLGYKRGATEIKQHPFFEGVNWALIRCASPPDIPKPVELECRPKQVPSANGKVAPAPNQKGPDNYLEFEFF

SEQ ID NO: 5602 - protein, 98 aa, Zea mays
  VARIANT 26: note = Ancestral polymorphism is V, Derived polymorphism is A
MARALAYGGAAAAAGFVSPWLAVLGVAMLSVWTITLAILLCGDSSDNPRPPRYNPAVSAAIAAGGGGGCGGGGGGGGGGCGGGGGGGGGCGGGGGGGC

SEQ ID NO: 5603 - protein, 157 aa, Zea mays
  VARIANT 69: note = Ancestral polymorphism is A, Derived polymorphism is T
  VARIANT 16: note = Ancestral polymorphism is Y, Derived polymorphism is N
MGISSMPEPRDSLLGYLVYNTVISIAALAGLVRAALVFLDLQAALPPGDDGGDRLAASAPGLAERFLRAFRPALYEVLASTATTCEADGGGGGDDCSVCLAGFRARAVVNRLPCGHLFHRACLETWLRYERATCPLCRAHVPLPADETPLLRYPEFE

SEQ ID NO: 5604 - protein, 442 aa, Zea mays
  VARIANT 37: note = Ancestral polymorphism is R, Derived polymorphism is I
  VARIANT 72: note = Ancestral polymorphism is W, Derived polymorphism is C
  VARIANT 88: note = Ancestral polymorphism is A, Derived polymorphism is V
  VARIANT 339: note = Ancestral polymorphism is D, Derived polymorphism is G
MLGTVDAQNDTRKAFTVLCLLNVFAMEIEEHTDSLSIEEPITRLPPDIIEGILLRLPVNSLMRLRQVCKQWWNMVSVPRFIKEHAYHAPKHLLLYLPKLNISASLHPKTAKPCLATIINEKWSPLTWASSHMDPDDHLFASCNGLLCFYKTYTLKISNPATGQCLHLLKPDGILLYDFHYLYSFGFHPITGEYKLVHFLREPQRYKSGQPFHFDTIQVYTLGEDKWRAIRAPIPCCMVHLGVVNVDGVMYWLTEDKGTSCGMAVVSFDLREEMFALIHLPALEVKETASCATIKVAYYMTEIDDKVCVVTMPYQSHAPRWRRNNAELSGRTDIWALESDKWFLKYSIQSPSLSRYVPQPCFIHREKIILQDSESNVWYHDLRGKNVQIEHADGAKLLHLGDNRFYETQSYFYKETLAPLSIYARAAIVRAPPEPLARSVALH

SEQ ID NO: 5605 - protein, 713 aa, Zea mays
  VARIANT 57..713: note = Derived polymorphism lacks residues 57 to 713
MPRVRRRCRGAMLLLLVASVLAPLVLYGGSPVSVAPLPDSTVASGAFDPEGASNLVWSHMAASAVSLAKGLITERLGEHKNRVLSATDHWQVVEAGSRNRASGKSGTAGVREDHHLPNSEEEGDLVVVESGSARFGQEDVIKEVVGSQRRADGSGEPGDSMEVDEQKAKEVGIELPHATDVLHKNGSDGLEMNDVSGLRTVGILNTSSAKESDVHSLSNKMKHPNISREQQTRTSNSNAAHHATNSITDQTTALPDATIRIIKNQLTTAKMYLGLFASRGNHGFTRELRARMRDIQRALGDARSDRQLPHNVHSKTRAMEQTLVKVRKIHDGCSSAVNRLHTVLHSTEQQLESNKRQANYLAQVAAKSLPKGLHCLTLRLTNEYYFTNSKNKDFPYVEKLEDPKLYHYALFSDNVLAAAVVVNSTLVHAKKPEKHVFHIVTDSLNYAAMKMWFLANPFGKAAIQVQNIEEFTWLNSSYSPVLKQLETRFMIDYYFRTGHARHDENPKFRNPKYLSILNHLRFYLPEIFPRLNKVLFLDDDTVVQRDLSALWLVDLKGKVNGAVETCRQDFHRFDKYLNFSNPLIAKNFDPHACGWAYGMNMFDLSDWRKQNITEVYHTWQKLNENRLLWKLGTLPAGLVTFWNRTFPLDRSWHQLGLGYNPNVNVKDIRRAAVIHYNGNLKPWLEIGLPKYRKYWSAHVNYDQVFLRECNINP

SEQ ID NO: 5606 - protein, 170 aa, Zea mays
  VARIANT 129..170: note = Derived polymorphism lacks residues 129 to 170
MALTFPCQNALSRATRAACRRRPRSRRCSTAHRHGERQTRWSTTVGSARTARPCPCRGCPCTGPARGRRRRRRPCRRAGAPARGSRSSPRIVRWYVLVRQLMMLSFLVFDGELFFSLLSVRPCNQEISWRICTKEWLATTRESGLREATRGQSVDELRERHSHAERVDNL

SEQ ID NO: 5607 - protein, 86 aa, Zea mays
  VARIANT 64: note = Ancestral polymorphism is S, Derived polymorphism is P
MGADRFPSVAEGGLGGEALYCAVILWLSVTSWIIFTWAGDGGEGGRRRRGGGRSRGSPAFVGASGLCDGTGPECSGGYGICGTCLD

SEQ ID NO: 5608 - protein, 279 aa, Zea mays
  VARIANT 146: note = Ancestral polymorphism is E, Derived polymorphism is Q
  VARIANT 190: note = Ancestral polymorphism is R, Derived polymorphism is W
MDPSQSGTPSLFPVMDIPVAYPPAAYPPCEVAVAAAAYPRLLYAPPDAAAAQQAAAAQQQQQLLGAPVVCPPAAYPPGEVAVAAAAYPPQLYAPPDAAAAQQATAAQQQLLGAPVRVAYAPPDAAAVQQAAAAQKHKHQLQMLWLELRREIEATTDFKKHNIPLSRIKKIMRADPDVCAITAEVLVVFPWACEMFILELTRHGWAHAEANKRRMLQKSDIVAAIARTDVFDFFRDTVLHDDAKEGADAAPAAAAAAEKAHPAAGAPATDPLANYPMPQQ

SEQ ID NO: 5609 - protein, 599 aa, Zea mays
  VARIANT 261..599: note = Derived polymorphism lacks residues 261 to 599
MSVSHADEHEISLCDPSSEDDRRRRKIGSLPLKAIHALRKKRARRRVTDFRFPAAISIEDVRDAEEERAVAAFRDRLAAHRLLPDKHDDYHMMLRFLKARKFDSDKAMQMWSEMLRWRKEFGTDTILEDFEFDELNDVLHYYPQGYHGVDREGRPVYIERLGKVDPNKLMQITSVDRYIKYHVQEFERAFRERFPACTLSAKRHIDSTTTILDVHGVGFKNFSKTARELVQRMQRIDSDYYPETLHQMYVVNAGSGFKLIWNSVKGFLDPKTSSKIHVLGSNYQSRLIEVIDSSELPKFLGGSCTCSEKGGCLRSNRGPWNDPVIMKLIHSMEGGSTREIKQVSDGDERSGSSLRAENLKGMLSDISNAESESDVDDVGLTVVQKSTDHSLLTPVHEEVKGSDTSIFCSSSSKHLLDTTPGAPQATPQMEMPIQLTCRKYFPTFGWLNNLGNAYISLHGTSAGRTLENLATGLITLLIRISSFFHLSVYRQERFIETVQPCAAAQEPEPQREEDMSACLRRLKKLESLCDHLMSKPPDMPKEKELVLMQSFDRIKSLEAELEATKNALQAAVEKQMELVETVEALQHQSTSVRRRFCCS

SEQ ID NO: 5610 - protein, 145 aa, Zea mays
  VARIANT 57: note = Ancestral polymorphism is L, Derived polymorphism is Q
  VARIANT 103: note = Ancestral polymorphism is A, Derived polymorphism is G
MAATSTAAAVLSPPSVAGLRLAPSPGRARVSFRAAPAPARRSVAARAELSSALVISLSTGVSLFLGRFVFFNFQRENVAKQVPAQNGKTHFDAGDERAKEFAALLKSNDPVGFNLVDVLAWGSLGHIVAYYILATSSNGYDPNFF

SEQ ID NO: 5611 - protein, 248 aa, Zea mays
  VARIANT 202: note = Ancestral polymorphism is P, Derived polymorphism is H
  VARIANT 192: note = Ancestral polymorphism is T, Derived polymorphism is K
  VARIANT 181: note = Ancestral polymorphism is V, Derived polymorphism is L
  VARIANT 98: note = Ancestral polymorphism is A, Derived polymorphism is V
  VARIANT 79: note = Ancestral polymorphism is G, Derived polymorphism is D
  VARIANT 77: note = Ancestral polymorphism is I, Derived polymorphism is L
  VARIANT 56: note = Ancestral polymorphism is H, Derived polymorphism is Y
  VARIANT 49: note = Ancestral polymorphism is L, Derived polymorphism is V
MASAGAGEGKETAAGSSLHSKTLLKSQPLYQYILESTVFPREPDCLRELRVATATHPMAGMAASPDEVQLLQLLIEILGAKNAIEVGVFTGYSLLATALALPDDGKIVAIDVTRESYDQIGSPVIEKAGVAHKIDFRVGLALPVLDQMVAEEGNKGKFDFAFVDADKVNFLNYHERLLQLLRVGGLIAYDNTLWGGSVAASPDEPLSERDRALAAATREFNAAVAADPRVHVCQVAIADGLTLCRRVA

SEQ ID NO: 5612 - protein, 761 aa, Zea mays
  VARIANT 565..761: note = Derived polymorphism lacks residues 565 to 761
MQSFNFSMLTTLVPFLLLAAVAVVARDELTTFIVHVQPLQENRMLATDDDRNAWYRSFLPEDGRLVHGYHHVASGFAARLTRQEVDALSSMPGFVTAAPEQIYELHTTHTPQFLGLDAREARKSYPVAERGAGVIIGVLDTGVVPSHPSFSGDGMPPPPPRWKGRCDFNGRAVCNNKLIGARSFVPSPNATSNSTSNDWRAPPVDDNGHGTHTASTAAGASVPGAQVLGQAMGTATGIAPRAHIAVYKVCTETGCPDSAILAGVDAAVGDGCDIVSMSIGGVSKPFYQDSIAIATFGAIEKGVFVTMSAGNSGPNVSSVTNEAPWMLTVAASTMDRSIRSTVRLGNGFVFHGESLYQPHAWTPTFYPLVYAGASGRPYAELCGNGSLDGLDVRGKIVLCELGGGPGRNITRVLKGAVVQSAGGAGMVLLNRFAQGYSTPADAHVLPASHVDYAAASAIKSYVNSTSNPTAQILFEGTILGGTAPPAPSIVFFSSRGPSLENPGILKPDITGPGVNVLAAWPFQVGPPSSAPLLPGPTFNVISGTSMSAPHLSGVAALIKSKHPRWSPAAIKSAIMTTADATDRAGNPILDEQRVAADWFATGAGHVNPEKAADPGLVYDIAASDYVGYLCSMYNSQNVSVIARRPVDCSAVTLIPESMLNYPSISVAFQQTWNRSAPAVVERTVKNVGEAPSVYYAAVDIFDDDVTVAVYPRELVFTQVNQERSFKVVVWPRQNGAPLVQGALRWVSDTYTVRSPLSISFA

SEQ ID NO: 5613 - protein, 185 aa, Zea mays
  VARIANT 33: note = Ancestral polymorphism is R, Derived polymorphism is C
  VARIANT 40: note = Ancestral polymorphism is A, Derived polymorphism is S
  VARIANT 102: note = Ancestral polymorphism is T, Derived polymorphism is I
  VARIANT 124: note = Ancestral polymorphism is V, Derived polymorphism is M
  VARIANT 135: note = Ancestral polymorphism is A, Derived polymorphism is S
  VARIANT 136: note = Ancestral polymorphism is G, Derived polymorphism is E
  VARIANT 170: note = Ancestral polymorphism is G, Derived polymorphism is S
MDVTFVCSGEEAFKMEVGYFDTVQDVKEKLQSCRGWPAAATTLLHNGAVLEDVDGGGIERHGIVEGSVIHVALLDGQHLQQPHDKRTEKRRGEGPVPPLRVIVVSGCAEGRVEMAVGARAAVSVLRAELERARGAGARFPLPRDGAYFFIHEQSVMDESRSFEWHGVAAGDEIVVFNGSVVRNPA

SEQ ID NO: 5614 - protein, 574 aa, Zea mays
  VARIANT 113..574: note = Derived polymorphism lacks residues 113 to 574
MSGASNYGSLIDEWLLPPTPSPRTLMSSFLNEEFSSAPFSGPHDQSEKSREVLNSSDEVPSHAVKGPFQNGFPNLFSAKSNSNGGLAERRAARAGFSVPKIDTSRVGSSTVIRSPVSIPPGLSPTTLLESPVFLYNKMAQPSPTTGTLPFLMATNDKSTISPAAKITEDSTFDNDVFSFQPHLGSEQTGFSTAEKKNVFYLQDYGAYERKQSLSNIHQQESSLQSSFTAVKDNTSATIVKAKPSSSSMFSDSHYSADQQQADETNIKVQGKGVEARSAAFAPVSAHSDASLLESQEALDVSSTLSNEEDERATHGTVSIECDGDEADAVSKRRKLELDALEATATATTSTTNTIDMGPAASRAVREPRVVVQTTSEVDILDDGYRWRKYGQKVVKGNPNPRSYYKCTNPGCSVRKHVERASHDLKSVITTYEGKHNHEVPAARNSGQGSSSAPSASQAVGSHRRQEPAQASFAHFGTASFSSFGLPPSGQLGPTTGNFGFGMVPPGMTIPVPSLGSLAPVKMVGNSSTMQGYPGLMVPGEPKAEPVSQPLIQMANASPPAYQQILSRPPFGHQM

SEQ ID NO: 5615 - protein, 156 aa, Zea mays
  VARIANT 56: note = Ancestral polymorphism is N, Derived polymorphism is H
MAFAAVLRARLLPVPTPLSSSSPPPFFAPSAYVRVPRLTAAAARTVRYRRRGGRPHRAAAAITASLDLTEDNVRVALDEAKSELGQLFDTSVGITGQVDLAELDGPFVKLRLKGKFWHTRATVVARIGNYLKNRIPEILEVEIEDEKQLDDSPAAF

SEQ ID NO: 5616 - protein, 80 aa, Zea mays
  VARIANT 75: note = Ancestral polymorphism is T, Derived polymorphism is I
  VARIANT 65: note = Ancestral polymorphism is F, Derived polymorphism is L
  VARIANT 64: note = Ancestral polymorphism is Y, Derived polymorphism is D
  VARIANT 62: note = Ancestral polymorphism is K, Derived polymorphism is T
  VARIANT 53: note = Ancestral polymorphism is I, Derived polymorphism is M
  VARIANT 43: note = Ancestral polymorphism is A, Derived polymorphism is T
  VARIANT 42: note = Ancestral polymorphism is A, Derived polymorphism is D
  VARIANT 41: note = Ancestral polymorphism is D, Derived polymorphism is G
  VARIANT 27: note = Ancestral polymorphism is A, Derived polymorphism is V
  VARIANT 12: note = Ancestral polymorphism is A, Derived polymorphism is T
  VARIANT 11: note = Ancestral polymorphism is P, Derived polymorphism is T
MHILAYTCPWPADHPKANEYYPDPRLVAYVVPYAPILSCTDAAKNSLRRKVEILKLKPHWSKAYFYLWDEVRYFTFSAMS

SEQ ID NO: 5617 - protein, 337 aa, Zea mays
  VARIANT 256: note = Ancestral polymorphism is R, Derived polymorphism is H
  VARIANT 248: note = Ancestral polymorphism is R, Derived polymorphism is C
  VARIANT 242: note = Ancestral polymorphism is G, Derived polymorphism is E
  VARIANT 233..337: note = Derived polymorphism lacks residues 233 to 337
  VARIANT 40: note = Ancestral polymorphism is S, Derived polymorphism is G
MEDVLSLLPHVKKDNQDKVESKQSKGNTLNKLLEFRSCFSCLSSRKERKGESVRRKKSLKADFVLPVETRRLEDIRAQHRTTARGKARSSRRQQEDVIDGDLCEQYPSLLADMQRKIADELDRSPTPAALLGEDCQGGRLEQARAALKIAYCCLPTPTTLTRLLPRARREVKKPKKPKVKKPKVKQRFSWMPHMFCKTLMASDTSMHVGFSVLRRSAEDCFPPLDYSQQRSSQELVAKDLHGTEWRFRHIYRGQPHRHLLTTGWSAFVNKKLVSRDAVLFLRGDNGELRLGVRRAAQLKNGSAFPALYNQCSNLGSLPNVAHAVATKSVFHIYYNPR

SEQ ID NO: 5618 - protein, 263 aa, Zea mays
  VARIANT 128: note = Ancestral polymorphism is A, Derived polymorphism is S
  VARIANT 116: note = Ancestral polymorphism is L, Derived polymorphism is V
  VARIANT 52: note = Ancestral polymorphism is L, Derived polymorphism is V
MGSKAVILAAAVLAVLLSTPALAQKGSPPAPVSLPPAPAPAPAPHYVDLAELLSVAGPFHTFLSYLERTNVIETFQGQANDTKVGITVFVPKDSAFSALKKSTFSNLTSDQLKKLLLYHALPRFYSLAEFKNLSSLNPVDTFAGSPYTLNLTDDMGTIYVQSMWSRPKIASSVYATRPVAVYALNKVLLPMQLFSKDPPLAPAPAPAPESGASDAPSPAAAGKAGGLTGGKGDSTSAAHSTGAVGVASSLLLAAAARLILLWW

SEQ ID NO: 5619 - protein, 23 aa, Zea mays
  VARIANT 1: note = Ancestral polymorphism is M, Derived polymorphism is I
  VARIANT 6: note = Ancestral polymorphism is T, Derived polymorphism is I
  VARIANT 11: note = Ancestral polymorphism is S, Derived polymorphism is Y
MCFIRTMSRRSMKTSVAKHLLQQ

SEQ ID NO: 5620 - protein, 161 aa, Zea mays
  VARIANT 133: note = Ancestral polymorphism is G, Derived polymorphism is A
MAQRDKKEEPTELRAPEITLCANNCGFPGNPATQNLCQSCFSASRSPSSPTSSSSSLASAASQPRPAALVVDAAAVEALAAPAAAAVGQATEAAARASASRCSSCRKRVGLTGFRCRCGELFCGAHRYSDRHGCSYDYRGAARDAIARENPVVRAAKVVRF

SEQ ID NO: 5621 - protein, 438 aa, Zea mays
  VARIANT 17: note = Ancestral polymorphism is A, Derived polymorphism is T
  VARIANT 95: note = Ancestral polymorphism is A, Derived polymorphism is G
  VARIANT 97: note = Ancestral polymorphism is A, Derived polymorphism is V
MSMTPSMEIDLHVVRAARVLGRGAMGTVFLAVDGGTGEAYALKVFDKRSAAAASRPAAGADAARRAQWEVSVLSRLAHPHLPSLLGCAETPDLLGWALPYCPGGDLNELRHAQPDRVFSPAAIRFYVAEVVSALAELHAAGIAYRDLKPENVLLRADGHVMLTDFDLSRQLPPPRSPSASTSTSSSSCSATSSPLPQTQTTHMKNIFKRSESAVTAPTSGQEEPRNLAWYLSKSIDGGSDQVKKAKSARVTPVDRGKELPSFCPAAAAAAGERSFSFVGTEEYVAPEVVRGDGHEFAVDWWALGVLVYEMSHGRTPFRGRSRKETFRNVLLREPGFTADARRRWPELTDLVSRLLEKNPARRLGFAGGADEVRAHPFFAGVAWDLLGDVSRPPYIPAPPDDSIASCEGFSVAEYFDRLHQPPLSPAKHSPEEELLPEF

SEQ ID NO: 5622 - protein, 63 aa, Zea mays
  VARIANT 12: note = Ancestral polymorphism is V, Derived polymorphism is I
  VARIANT 27: note = Ancestral polymorphism is E, Derived polymorphism is K
  VARIANT 31: note = Ancestral polymorphism is E, Derived polymorphism is D
  VARIANT 38: note = Ancestral polymorphism is I, Derived polymorphism is V
MASHVLQMPITVYMHDKAAGGLIAIAEYGQEHGTEAPVQVLYHGYGHYDALQIPGEGGPRSRL

SEQ ID NO: 5623 - protein, 217 aa, Zea mays
  VARIANT 35: note = Ancestral polymorphism is A, Derived polymorphism is V
  VARIANT 50: note = Ancestral polymorphism is P, Derived polymorphism is T
  VARIANT 63..217: note = Derived polymorphism lacks residues 63 to 217
MGGRRIRCRNDQTKYLFQHFTSAPASPRRAAAIYAHVAEGSGSDDQEFQPRRRLYATGGSSVSFDWEERPGTPKRGLGGGVPAADVAAWDTGFEFGKAAPAETLTAADELFEKGKIRPLKPRPKKTADDEPKIRPLKPPPGLLDGGSVTPSPRSPVVARGAGATWSPRRRSRVGSGVDFDPFAAALLEATKAPSPLGGKDDEGARRARQEGERSSRR

SEQ ID NO: 5624 - protein, 66 aa, Zea mays
  VARIANT 17: note = Ancestral polymorphism is P, Derived polymorphism is H
  VARIANT 43: note = Ancestral polymorphism is A, Derived polymorphism is V
MSSSDPDDAPDGGEDSPLFRRSGGPSSGGTVGDVPVSQSLIKAASNVCFSLFVLAVLVVTVVAVTY

SEQ ID NO: 5625 - protein, 450 aa, Zea mays
  VARIANT 115: note = Ancestral polymorphism is S, Derived polymorphism is L
  VARIANT 290: note = Ancestral polymorphism is L, Derived polymorphism is I
MVVGAFGEATPPPDLPPSRVSVSSPSPHPRRRCALASRFQEPAAPRRHAWVSLQGRLIGADEASCAASAAPGLLPDEAVAWELFSPLHRVLLVATVAAASSRSHAARRIEQLQRSIHLRDEVLESMQQKLDDLLVEMSSLQQQYVKCDSYISEEREINEIETGSKTIGYGEESRCCVCTKLEAATPQKAKDLRGTDDARSDMVDCSSLVFMDHEERRLSDLSDFCRSVVSSVDNQINWDSQLSFLAADQQLYNLQKECEEKDATIKELAAAAHASSTSDAKRIAELQEVLKRKNMVISKLKKDMSALKHMVVELSRAKRVSSAISPICTDLPVMSNNVLYDMSSSSSSDPESPVALREYLDEHLVDSTPGDGDSRRSCEVSVAKASLPSKTSSVHKLRSTSPLKEIHINPKVETKSFGRQKQPTSSNGDFKRIRRQSQQDPRNKATRRWM

SEQ ID NO: 5626 - protein, 607 aa, Zea mays
  VARIANT 429..607: note = Derived polymorphism lacks residues 429 to 607
  VARIANT 39: note = Ancestral polymorphism is R, Derived polymorphism is L
MAVVAAGAEAFDPAAPSPPRAPASRQDVQAAIAKAVELRQLRATLLQRGAPNARARACASRSPAVIRLPPVASPTRSRAADEEYPVFTPAYDDEERVATVALNHICQDNRSRSENWTGVALDHDDAALSDYDGLHAFSSSNSEVLLPYSNDHRIRNRGTVYKIHPAFMHSAPSADRFLPPTGRAAYTTEFKLPPATCGNAFRPTTISSTRVPLPPQSAHSRTKQRGPPQILSWLFPKSRKKAKPPEMASPTAIERGNMPQLLTEWGALSLESLKKELAEANAHRDAALREAAEVRSSLGELATKLVSVEAYCSELKKALRQATNSPSVSRRSTRSVEARRELPTPVSHEVMVEGFLQIASEARLSVKQLCKALIQQGNEESCDGLSDRLNLLLRPYQLALSGSTGKHCSKATLYHLEAIMNQAMFQDFENPAFQRNGSPRCLDPAEDRQQSFAAFVALRNLSWNEVLRKGTKYYSEDFSRFCDRKMSGVVATLGWSRPWPEQLLQSFFVATKCVWLLHLLAFSFGPPLTILRIQDGRAFDEMYMEDILHDRQQVQGPCQVKIMVMPGFYVQDRVLKCRVLTTRSAAAFFDQQLVWCQLPRVTSFFLS

SEQ ID NO: 5627 - protein, 108 aa, Zea mays
  VARIANT 38: note = Ancestral polymorphism is A, Derived polymorphism is V
MWAPGSPGRLPAMVECDEDGHGDAYHGTMASCWGRFGAAALWRRLRRRVSLVRRRRRRGRSLLGGLNYDPLSYAQNFDDGCLEEREPDFSARFAPARHAAAGSPRPTA

SEQ ID NO: 5628 - protein, 161 aa, Zea mays
  VARIANT 119: note = Ancestral polymorphism is R, Derived polymorphism is H
  VARIANT 81: note = Ancestral polymorphism is T, Derived polymorphism is A
  VARIANT 75: note = Ancestral polymorphism is H, Derived polymorphism is N
  VARIANT 36: note = Ancestral polymorphism is A, Derived polymorphism is T
  VARIANT 10: note = Ancestral polymorphism is E, Derived polymorphism is K
MAAAGEGEAERVSALLREITGEGGFAFVASAEKAGAGDLRAAEAAREMAWEQLHSGPWSEVGTAWRDAYALACLNVARLRTHAASGGDSDRSAALRALDMGLIMGGNLLRADLEAALARISAEACGGSEGGEGVVDKENQRWREALDRNRDIADVRSLLPL

SEQ ID NO: 5629 - protein, 503 aa, Zea mays
  VARIANT 433: note = Ancestral polymorphism is A, Derived polymorphism is T
  VARIANT 340: note = Ancestral polymorphism is H, Derived polymorphism is L
  VARIANT 265: note = Ancestral polymorphism is G, Derived polymorphism is S
  VARIANT 223..503: note = Derived polymorphism lacks residues 223 to 503
MQLQRSVDRPVHPSMVSGGSIKEQQHEMNISFAMVNHHHHHQQPPSSSSSSSMHAAAASFMSGKEASSGAYAYDHLGELDQALFMYLDHGRSHGGTPQQEQRQTLNIFPMHVEPSPKGEISLVLPPAPVGYKQPRSPDHHHHQHAAMEELLAESRRQQEHQPFAAAAEPAAAPGMIKGVKPLAKKDHRRGTSTTERDPKTLRRLAQNREAARKSRLRKKAYIQQLESSRIRLAQLEQELHTTRAHQGVFFPNGGILAGQSVVGKGVPIGGIDSLSSEAAMFDVEYGRWQEEHYRLMYELRAALQQHLPEGELQMYVESCLAHHDEMLGIKEGAIKGDVFHLISGVWRSPAERCFLWLGGFRPSEVIKMLLSHVDPLTEQQIVAVYGLQQSALETEETLSQGMEALYQSLSDTILSDALSCPSNVAIYMGQMAAAMNKLSTLKGFVRQAENLRQQTLHRLHQILTARQMARSLLAMSDYFHRLRTLSSLWVTRPRAPQEQQGHS

SEQ ID NO: 5630 - protein, 505 aa, Zea mays
  VARIANT 12..505: note = Derived polymorphism lacks residues 12 to 505
  VARIANT 31..505: note = Derived polymorphism lacks residues 31 to 505
  VARIANT 76..505: note = Derived polymorphism lacks residues 76 to 505
MLMEASKVESAWASRPSDGLNWKRESVTRRRQAPVGLRLRLSANMDKGVAPAVSMLDSKLVAVAPAAVGVAVSYRQRTRWCLDPAGVLQVLTVRLSRCFRRGYEGGGIQPLRQQRIGSSPFIVGTDDDLPPAQNRGLRGRSFSGNVVASAGAFPYMRANNDLESEIHRVEQDAYTGILRAFKVQSDAISWEKESLITELRKELRVSDEEHRELLNKVNEDGTIRRMRELRQAGGSPSGLHHGNMVLYGAEPGSTTKRQRASHSIPLQSAGLQSPMMPSHSVSSAKWGPLQARGTKARTPIPLALPSVDPSSLINHKVYTRWPEDNNFYEATITRYNPVTGEHGLVYDMGTQAESWESVRLCDMAPEDIRWGFDGHLSNRDVWSPSGPMLMRHMTNNGAMAGSIKGRGRLSINETIKDYAPPENGTNRNFDHVDIPNTGSVVMEVKRVLFNPNMPEIEKARKLLKDQEQSLLDAIARLDEASDSDNEDMAMEGRMGSAGERNGITT

SEQ ID NO: 5631 - protein, 366 aa, Zea mays
  VARIANT 219: note = Ancestral polymorphism is A, Derived polymorphism is V
  VARIANT 200..366: note = Derived polymorphism lacks residues 200 to 366
  VARIANT 12..366: note = Derived polymorphism lacks residues 12 to 366
MKASIKFRDDDRPLLRAKVPIGVLGLPFLSGLAAGGDAKDLRFDLSTAFSSGPALRLSYRPNEPLQPFALSVRTGLGPLGSPARAPFALAAEFNLTSSNPPAFSLLFKPRIGDFAVASSVRSPPTPPPTSTPPPLAIKMVDLTTNGDDHDCEAHGNGFSFNGNVLGANVAAVTGTDGGGGGVGALLSGMRLTTRSMLPLWSKASLRFQWGLRVPPEIKATLADNGYGRKAGSLAISKLPLLVMNKITIEHTPKVPSQSETDKKRKKDTPPAAKDEELSFMKRQLDKLNVENTMLRRAVEDLRAEIGAGKGDDRKLPTAVPPQQHSLVSKPDRHFHINAKELVDSGTKPASNEASEELKKVLEGRRK

SEQ ID NO: 5632 - protein, 124 aa, Zea mays
  VARIANT 112: note = Ancestral polymorphism is L, Derived polymorphism is R
  VARIANT 110: note = Ancestral polymorphism is S, Derived polymorphism is L
  VARIANT 103: note = Ancestral polymorphism is D, Derived polymorphism is G
  VARIANT 102: note = Ancestral polymorphism is V, Derived polymorphism is D
  VARIANT 100: note = Ancestral polymorphism is P, Derived polymorphism is S
  VARIANT 97: note = Ancestral polymorphism is P, Derived polymorphism is S
  VARIANT 82: note = Ancestral polymorphism is R, Derived polymorphism is C
  VARIANT 79: note = Ancestral polymorphism is Q, Derived polymorphism is E
  VARIANT 76: note = Ancestral polymorphism is E, Derived polymorphism is D
  VARIANT 59: note = Ancestral polymorphism is R, Derived polymorphism is H
  VARIANT 58: note = Ancestral polymorphism is R, Derived polymorphism is H
  VARIANT 52..124: note = Derived polymorphism lacks residues 52 to 124
  VARIANT 23: note = Ancestral polymorphism is D, Derived polymorphism is N
  VARIANT 22: note = Ancestral polymorphism is A, Derived polymorphism is T
  VARIANT 17..124: note = Derived polymorphism lacks residues 17 to 124
MSVRIKAVVDRFVKELQEALDTNIQDRIMKEREMQSYIEECEREVAEQEVAWKAELSRREVITVGPQLFFHSPVLELKQSVRVAPACVLYLPLMSWPMLPIVDTFSFLQSMRVVRYRHTTLEVM

SEQ ID NO: 5633 - protein, 628 aa, Zea mays
  VARIANT 62: note = Ancestral polymorphism is R, Derived polymorphism is C
  VARIANT 162..628: note = Derived polymorphism lacks residues 162 to 628
  VARIANT 527..628: note = Derived polymorphism lacks residues 527 to 628
MVSSPPSGPFPCLTASQRWSKARGFAGFTERALVAAGAAVVSAILVNPLDVAKCTGKGKGGRRRHRRGTSESGGGEDGSWWTERLRAAHNRLVPVSLFQKPIVKVKLADLMAATHDFSTSHIVVAGSSQAGIAYRAVLRDGSALTVKRLHSCPLSEKAFRAEMGRMGQLRHPNIVPLLGFCVVEDERLLVYKHMESGALSSVMKKPGEAPLDWATRLRIAVGAARGLAWLHHGFQVPQIHQNLSSSAVLLDEDYDARITDVGLTRLVRMAPGEGGDTSPFLNGDFGEFGYVAPEYASNPVGTMKGDAYAFGVILFELVSGQESAAVVTDVTGEGFKGTLVDWVNQLKASGRISDAIDKPLRGKGHEAEIQEFLKIAFACTQPHVQREMKNVEKDIRVATKRNDMLSAKKPCLHAELMLLGVISLLLSQTARFISEICVPSSLFTSRFYICSESDYQDLLRNTDANQTALDKNMFGGQRLHVCGEGHEPFVSYEGLEQLHRFLFILGITHVLYSFVTVVLSMIKIYSWRKWETLAGPIAAEELKARRTKVMRRQSTFVFNNASHPWSKNKILIWMLCFLRQFKGSIIRSDYLALRLGFVTYHKLPHSYDFHKYMVRSMEDYYNGTIGIR

SEQ ID NO: 5634 - protein, 148 aa, Zea mays
  VARIANT 11: note = Ancestral polymorphism is E, Derived polymorphism is K
  VARIANT 85: note = Ancestral polymorphism is R, Derived polymorphism is M
  VARIANT 111: note = Ancestral polymorphism is P, Derived polymorphism is L
  VARIANT 130: note = Ancestral polymorphism is Q, Derived polymorphism is K
MDAGTNASDMEPSGPYFLGRPRFFLVPGSPAPPECTGAPPLPPTPAKLEADAALPPTGWYVAVAGGTELTGVKMAVPSVVYAMRRPCVPPEDGGVAGVFGSPNGSLPAITPCSGDGLTSIIPHRTGAPKQKRNYESGNLRLSSAIFLD

SEQ ID NO: 5635 - protein, 430 aa, Zea mays
  VARIANT 111: note = Ancestral polymorphism is S, Derived polymorphism is F
  VARIANT 37: note = Ancestral polymorphism is L, Derived polymorphism is M
  VARIANT 11: note = Ancestral polymorphism is G, Derived polymorphism is R
MMEVSPSPEQGVMAGREPFGLPKTPATPPSSGGTQGLRMAYTTDGTAIFTPVSSVPPATATYQPVGGSAASASSLAGVGGNGGAPVHSGGAGEPGTKKKRGRPRKYGPDGSMSLALVPASMAGEPAPAALGASGPFSPNGPKAPNTAPSASPDGAKKRGRPKGSTNKKHVAALGPAGAGFTPHLIFVKAGEDVSAKIMSFSQHGTRAVCILSANGAISNVTLRQSATSGGTVTYEVRILNATSYEYRVHFDTDSQLEYFTARYTGTAIQKSDLTDVYCLYRESSLSLGRFEILSLSGSFLLSENGGQRSRTGGLSVSLAGPDGRVLGGCVAGLLTAASPVQIVVGSFDAGGKKQPKQQQQQQLAPSPAPLNLAPTGVAAGPSSPPSRGTLSLSESSSGAPPSPPHAGASGGHGQQQQQPQPGGFSGLFWK

SEQ ID NO: 5636 - protein, 681 aa, Zea mays
  VARIANT 503..681: note = Derived polymorphism lacks residues 503 to 681
MAFGALVTSRLVRSGHTLASAVAQGPVAQRIAPPLLSRLGAVARLLSTKPAATDVIGIDLGTTNSCVSVMEGKTPRVIENAEGARTTPSIVAKNQNGDLLIGITASRQAVTNAQNTIRGSKRLIGRTFDDPQTQKEMKMVPYKIVKAPNGDAWVEMGGQQYSPSQIGAFVLTKMKETAEAYLGKTVSKAVITVPAYFNDAQRQATKDAGRIAGLEVMRIINEPTAAALSYGMNNKEGLIAVFDLGGGTFDVSILEISNGVFEVKATNGDTFLGGEDFDGALLEYLVSEFKKSDNIDLSKDKLALQRLREAAEKAKVELSSTMQTEINLPFITADASGAKHFNITLTRSKFESLVSNLIERTRIPCVNCLKDAGISAKEIDEVLLVGGMTRVPKVQEVVSQIFNKPPSKGVNPDEAVAMGAAIQGGILRGDVKELLLLDVTPLSLGIETLGGIFTRLINRNTTIPTKKSQVFSTAADNQTQVGVKVLQGEREMATDNKLLGEFQLEGIPPAPRGMPQIEVTFDIDANGIVKVSARDKATGKEQEITIKSSGGLSEVEIEKMVKEAELHSQKDQERKSLIDLKNSADTTIYSIEKSVSEYKDKVPAEVTKEIESAVSDLRAAMAEDDLDKIKQKLEAANKAVSKIGEHMQQGGGSGSAGGSGSSSGGDQTPEAEYQDAKEAKM

SEQ ID NO: 5637 - protein, 332 aa, Zea mays
  VARIANT 141..332: note = Derived polymorphism lacks residues 141 to 332
  VARIANT 81: note = Ancestral polymorphism is V, Derived polymorphism is D
  VARIANT 69: note = Ancestral polymorphism is A, Derived polymorphism is T
  VARIANT 45: note = Ancestral polymorphism is L, Derived polymorphism is I
  VARIANT 43: note = Ancestral polymorphism is A, Derived polymorphism is D
MASPRVCVTGGGGYVASWLVKLLLSRGYAVHATVRDPSDPKNAHLRRMEGASESLLLFKADMLDRDALAAAVSGCEGVFHVASPVPADKAEVLSPAVKGTLNVLQACSANNVRKVIVVSSTAAVHFNPSWPQGIIQDESCWSDKFFCTKSEEWYIAAKTIAEETALEYGEKNGLLVVTVCPCVVLGPLLQPLINTTSEVFVYIIKGGPRAMKNITWNIVDVRDVADALLLVYEKVESSGRYICAPNRISTYDIANLFRKFYPNYNYVKCSDEDHESEMPPVTSEKLKSLGWKPRKLEETLLDSIEHYEKAGFLQDVEGCPCRLPYLFHFASN

SEQ ID NO: 5638 - protein, 573 aa, Zea mays
  VARIANT 62: note = Ancestral polymorphism is R, Derived polymorphism is S
  VARIANT 360..573: note = Derived polymorphism lacks residues 360 to 573
MDMDVRRRVPPPHGSVPRRQQATGAEGERVRVQAGDALPLPIRHTNLIFSALFAASLVYLMRRWRGKIRASTPLHVVSPAEIFAICGLVASLIYLLSFFGIAFVQSVVSSSDDDEDFIVDSRHARARAPPTPAQTPCALLGSPAAATEKMPEEDEEIVAAVVAGKIPSYVLESRLGDCRRAAGIRREALRRITGRDMDGLPLDGFDYASILGQCCELPVGYVQLPVGVAGPLLLDGRRLYVPMATTEGCLVASTNRGCKAIAESGGASSVVFRDGMTRAPVVRFPSARRAAELKAFLEDPANFDTLAVVFNRSSRFGRLQGVKCAIAGRNLYMRFSCSTGDAMGMNMVSKGVQNVLDYLQADFPDMDVISISGNFCSDKKSAAVNWIDGRGKSVVCEAVIKEEVVKKVLKTNVQALVELNVIKNLAGSAVAGALGGFNAHASNIVAAIFIATGQDPAQNVESSQCITMLEAINDGKDLHVSVTMPSIEVGTVGGGTQLASQSACLDLLGVKGANRESPGSNARLLATVVAGAVLAAELSLISAQAAGHLVQSHMKYNRSSKALAEETDKPKKC

SEQ ID NO: 5639 - protein, 264 aa, Zea mays
  VARIANT 244: note = Ancestral polymorphism is E, Derived polymorphism is V
MSSRELSGHRLPSSSSEDDAPETRDRVVDGPEAEAEMVHFSHPEHRLARFDFPHLFMCMGCKEYGAGKRFMCQACGFQLHESCALAPPSLHEHPFHPKHPHLLFFVKPASGGFLRCRCDVCGKPVRGFSFRCASCSFDMHPCCAAMARRMELPAVHEHPLLLLARDGAEQTSFVCQACRRTRRAGQHAYQCLPCGYYLHARCAKDVVNGLYVHGVVPPEKRSALATAARVTVNALFGVIGGLIEAIGEGIGEAFVENIGRSRRI

SEQ ID NO: 5640 - protein, 75 aa, Zea mays
  VARIANT 3: note = Ancestral polymorphism is T, Derived polymorphism is M
  VARIANT 8: note = Ancestral polymorphism is H, Derived polymorphism is Y
  VARIANT 12: note = Ancestral polymorphism is Q, Derived polymorphism is L
MATPHSTYVYRLLVCCSAKKGQHSIGTPAHRLSMVEFHPQCVRNTPTASCLSTTSCGHQLARCPRMVSTPEKVTL

SEQ ID NO: 5641 - protein, 129 aa, Zea mays
  VARIANT 32: note = Ancestral polymorphism is V, Derived polymorphism is M
  VARIANT 27: note = Ancestral polymorphism is C, Derived polymorphism is Y
  VARIANT 23: note = Ancestral polymorphism is C, Derived polymorphism is S
MESLCAGVPMLCWPFFAEQQTNSRYTYVEWGVAMEIGQDVRREAVEEKIREAMGGEKGMEMQRRWAERREWRCSAAWESGSRLVSARRGPEGAHMPTSTSWSPTCSSRVAARVLRRVSLRTPPLSNDSD

SEQ ID NO: 5642 - protein, 297 aa, Zea mays
  VARIANT 244: note = Ancestral polymorphism is T, Derived polymorphism is A
MSQPLPETPSLAGRRVAFTTPQTGGGGAYGGRLGALLRQRGAHPVAVPTIAVHPHDPDRLRPYLLPSALDPFAALAFTSRSGISAFARALSSSHRPLSHASALPFTVAALGSDADLLDHAFLSRLCGDAGTRVSVLVPDVPTPAGLVEALGRGSGRRVLCPVPDVVGLREPPVVPDFLAGLEAAGWVAVRAPAYTTCWAGPRCAEALVDPDAAPLDAVVFTSTAEVEGLLKGLEAVGWTWARLAARWPGMVVAAHGPVTAGGARSLGVEVDIVSTRFSSFHGVVDALAAAFPSQKIV

SEQ ID NO: 5643 - protein, 190 aa, Zea mays
  VARIANT 21: note = Ancestral polymorphism is T, Derived polymorphism is M
  VARIANT 57: note = Ancestral polymorphism is P, Derived polymorphism is S
  VARIANT 76: note = Ancestral polymorphism is C, Derived polymorphism is R
  VARIANT 81: note = Ancestral polymorphism is A, Derived polymorphism is V
  VARIANT 86: note = Ancestral polymorphism is P, Derived polymorphism is L
  VARIANT 96: note = Ancestral polymorphism is K, Derived polymorphism is N
  VARIANT 116: note = Ancestral polymorphism is A, Derived polymorphism is D
  VARIANT 127: note = Ancestral polymorphism is G, Derived polymorphism is V
  VARIANT 138: note = Ancestral polymorphism is A, Derived polymorphism is V
  VARIANT 140: note = Ancestral polymorphism is K, Derived polymorphism is N
  VARIANT 153: note = Ancestral polymorphism is A, Derived polymorphism is V
  VARIANT 156: note = Ancestral polymorphism is P, Derived polymorphism is L
  VARIANT 158: note = Ancestral polymorphism is S, Derived polymorphism is L
  VARIANT 162: note = Ancestral polymorphism is E, Derived polymorphism is K
MLASEFPLLLNNRSSLPRLVTLCDQTPSTPFDVVRNVVEKQLGKNFDDMFEFFDVEPVGSASIAQVNGPVLVEDTCLCFNALKGLPGPYIKWFLENIGHEGLNNLLKAYEDKSAFAMCIFSLALGPGEEPITFVGKTAGKIVPARGPNDFGYAEMPKSVKNEISHRGKALALVKEHFASASYTVQSDDSA

SEQ ID NO: 5644 - protein, 251 aa, Zea mays
  VARIANT 150..251: note = Derived polymorphism lacks residues 150 to 251
MAEDLVLDTAIRDWVLIPLSVVMVLIGVLRYFVSKLMRSPATSPSPDPKLVKEGQVVIRARNLRTNAQFIPAKAFKARKVYYTNEENGLLHVPKEDAQKAQAAMFSDPNMAMDMMKKNLSMIVPQTLTFAWVNFFFSGFVAAKIPFPLTQRFRGMLQNGIDLSTVDVSYVSSRSWYFLNLFGLRGLFSLILGEENATDDAQKMMQMGGGFGFNPTMSLGAEKDSLDIMQHDWALPKMERHAEDVLKQLLKK

SEQ ID NO: 5645 - protein, 377 aa, Zea mays
  VARIANT 202..377: note = Derived polymorphism lacks residues 202 to 377
MHRCRSSSSSPLPRGQAKGPAMARSPRLLALLLAVVWICGAALVARADPMLERFEQWMGRHGRLYADAGEKQRRLEVYRRNVELVETFNSMGNGYRLADNKFADLTNEEFRAKMLGFGRPRSGGGAGHSTAPSTVACIGSGLMGRQGYSDLPKSVDWREKGAVAPVKSQGDCGSCWAFSAVAAIEGINQIKNGKLVSLSEQELVDCDTKAIGCAGGYMSWAFEFVMKNRGLTTERNYPYQGLNGACQTPKLKESAVSISGYMNVTPSSEPDLLRAAAAQPVSVAVDAGSFVWQLYGGGVFTGPCTAELNHGVTVVGYGETQGDTDGDGSGVPGKKYWIVKNSWGPEWGDAGYILMQREASVASGLCGIAMLPSYPVM

SEQ ID NO: 5646 - protein, 293 aa, Zea mays
  VARIANT 160: note = Ancestral polymorphism is E, Derived polymorphism is K
  VARIANT 21: note = Ancestral polymorphism is R, Derived polymorphism is G
MDPAVVWPQPPATGRYGRRIRSCLHLLIFTSTHPTRRPALVRPFLAGAVSSADRSVGRGSRFFLQLMADRSDGPIGRLPEHLIIEILIRLPVYEWVQLACVNKHWASIFQGECVWQTAIARNWPSAGLRKRWPGPIPRGSARRRFQALYVSENLVPSGGEIDELVGHTYLYLKEQLERPVMPPSSILHGTIIDQFIACGNTGEKAHDLASKIWLAVIDSLEENQQTFLLLKRVAQEGEFFLPFPYSRSYRVLWRVFDKLFTDFRDCFSGAEYHDVLSTAKSRFQPVPSTWLGH

SEQ ID NO: 5647 - protein, 493 aa, Zea mays
  VARIANT 5: note = Ancestral polymorphism is R, Derived polymorphism is S
MWIASRLFLAAAALLMAVLLLVAGPVAAQDAAVEGVAPPAEEIAANARAKEAAVLAAELVQLRAKISALESRIAEQNLEFKTKNDAIETLNMIVKEKSQKIATMQNEVTSLEAKGSLAAEEQASKANALAIELKKQVTEKLKKDITEQKIKKAALEARAGNADKKVQELNMKLEKLQRTSSDQKRRIQKTEHALKAAEEELMKAQLETTTKVKQLREVHGAWLPPWLATHAARSMEVMSNHWNEHGKPAFDSFLQKASEKTVQTKKWAEPHLETAKTKWMPVAKEKWVTLKKHAKPYVQMVSEKSLEAYQTSSDFVRPHLVNAHQVVDPYFQEAKKLSKPYVDQIATATKPHVEKVRTALKPYTERARHVYGQFLETATTYHQQAQATISDYLHRHEFTKQFVTKELVWYLASALLVTPFFVLYTLLTETFWFVLHFWCPAIPRRRRKHLGAVIPTMVIGDISAGMLTSKTLINHGHYFFYNDLGSLTIYLSL

SEQ ID NO: 5648 - protein, 624 aa, Zea mays
  VARIANT 364..624: note = Derived polymorphism lacks residues 364 to 624
MEVVSTPAGAGAAASSSSSSSSSTPSPSTRRPTTTLRLLCPSSRVATLRPSRDLHVDHPPVGDEAVLVISGPDTPAAAVRAWEHVVGHRVEGDEAMGGEEEEREVTGAVGCRMLAAGWQVGCVLGKGGKTVERMRQECGAQIRVFRNREQLPPWAPPGDELIHISGSFSQVRKALLAVSTCLQDNPRPDTHNIPIGRPFGLPGSGTGCPPGMDPHSQRSYLPPHIPDYHTRNYPSNAGPPGPRFFFEQEIVFRMIILNEMVGSIIGKGGSTIRALQSETGACIKILEPVADSDERVVAITARENSDMLHSPAQDAVVRVYSRISEASIDRSSHTPARLLVPSQHIGCLLGKGGSIISEMRKITGANIRIFGNEQIPRCAQRNDEMVQVTGSFQSIQDALLHITGRIRDVILPKPHPSGGMPPYPPVGNIPVHQSRQEQPPPHLHPSGGMPPYPMHPFRPDAPMGHFEMGDHRPPPVHSMEYMGADRMPYLYGVEQGGPRPFLEQPSPRTCPPEAPRTNSEVPRNMSDAVPATDFRKGPVAIENQVATPTGTTEVIIPCNYIGFVCGNNGSEIEEIEKMSGASITVHDPKAGDANSKVVICGDPEETKKAQSLIHAFIFCGLYQT

SEQ ID NO: 5649 - protein, 606 aa, Zea mays
  VARIANT 40..606: note = Derived polymorphism lacks residues 40 to 606
  VARIANT 83..606: note = Derived polymorphism lacks residues 83 to 606
  VARIANT 95..606: note = Derived polymorphism lacks residues 95 to 606
MTLASLARALGRICQQLADCGSAASSAALGKPVVDETVDWRYILARPQFRRLFSNDTLGRSASFMILDYENYYPKGKKEVQKGDGSKKSESKRKSSRFGRLQGVKCVIAGRNLYMRFRCSIGDAMGMNMVSKGVQNVLDYLQADFSDMDVISISGFPMSAGRFLLAIRYSDSMQYSRSNLFGMQYSRKRYFVLEDAALRCFKSAPSSKGEVSWQLSYVSSTNQKYTRGNENVFDAFFCCATCCAGGFFHGVRSISFGVDLQEIRLMGVLQTGRKPSRLCGAALYIAALSHGCNYTKADIVSVVHVCEATLTKRLIEFENTDSGSLTIEEFLATADESNEEPVSKHSPKSGEILCKHKDKGFEHFAHGLCEKCYNKFTKLSGGLEGGSDPPAFQRAEKKRLEAAKRAEEAAAAKEAALEESLCDTQNSEVESAMTPRKRREKVGALILMSPRALVLVNVKTLSVYIVSCLFQDKPQPPPEGRLPDATKGSDHLRQVFGKQMGLSDQDIVALSGGHTLGRCHKERSGFEGAWTTNPLVFDNSYFKELLSGDKEGLLQLPSDKALLSDPVFRPLVEKYAAVCPWMRRHSLMTTKRPTSSSPNWDEYADA

SEQ ID NO: 5650 - protein, 421 aa, Zea mays
  VARIANT 288: note = Ancestral polymorphism is P, Derived polymorphism is H
  VARIANT 195: note = Ancestral polymorphism is N, Derived polymorphism is S
  VARIANT 23: note = Ancestral polymorphism is N, Derived polymorphism is K
  VARIANT 4: note = Ancestral polymorphism is D, Derived polymorphism is Y
MAVDPRQVVAGFLTLSMFVMLGNMIKHDHFSPVTEELGFEATGVVSNTRKLDNDAEMSSVDTAGVEDLMDAVEEVKPCWTKPSPKNQPSNGFVTFSLTMGPEYHISQITDAVVIARYLGATLVLPDIRGNELGNKRKFQDIYNVDKFVRSLDGVVEVIEDIPDEVSAKKPAVIRVPNRVTESFITGTIQPIFQKNKYLRLAVIFSSVSLRPKETNNKDMDATACLAMFGGLELKHEYSEVARKMLDRLQELSKKSDGKVLAIDLRTDLLEKKSCKTTRGARRKGCYSPDEVLAFLRSVGFSANTTIYLTETSWYKGLDVLKEEFPNTWYKGDIMPAENKAEFLKSSNADLARALDLEICSQSDVFVPAVAGLFYGHVTGKRIASGRTQIVVPSQSSTSTHASDFISTYISNKNHLAYACYC

SEQ ID NO: 5651 - protein, 262 aa, Zea mays
  VARIANT 39: note = Ancestral polymorphism is G, Derived polymorphism is E
MSTAVAEARPRYGFPGSGKGGSGGGGGGHGKEADMAAVGKRRSDGFFIEEVAEEEVLTDTSSVGAPSPSGSSIGENSSSEAGGDDVDEEVESKLKEDDALDCLDALEDSLPVKKGLSSFYSGKSRSFTSLAEATSTVAAAKELAKPENPFNKRRRILANWSRRASCSSLATAAYLPPLLGPDHAVAEGDEGEEDDSDSDDVECSQLPPPHRGKNVRDARALPPLRLGGAGMRRRNGPNGGLGSFRSPRSFSLSDLHSSAEGE

SEQ ID NO: 5652 - protein, 304 aa, Zea mays
  VARIANT 136: note = Ancestral polymorphism is K, Derived polymorphism is N
  VARIANT 112: note = Ancestral polymorphism is G, Derived polymorphism is C
  VARIANT 91..304: note = Derived polymorphism lacks residues 91 to 304
  VARIANT 79: note = Ancestral polymorphism is S, Derived polymorphism is R
MALDSMSAALAVTDEVALPIRAVGDLAAAAEVSREEVAVITQCAALGGKLPFEDASVGAVLAVIKNVESLREQLVAEISRVLKAGGRVLVQSPAPSSSQKPNTEIERKLLMGGFAEVQSSAANSQDSVQSVTVKAKKASWSMGSSFPLKKTTKALPKIQIDDDSDLIDEDSLLTEEDLKKPQLPVVGDCEVGAAKKACKNCTCGRAEAEEKVGKLELTAEQINNPQSACGSVSIAYSVGWVMPSAVEPVPTEVFHHSSLARRFPCLATSLLLTYDGDASEHRQNKETGVTYVVSRVNCIPNSFC

SEQ ID NO: 5653 - protein, 350 aa, Zea mays
  VARIANT 8: note = Ancestral polymorphism is S, Derived polymorphism is I
MDSDYIASLLMGSSAPALSFAALDAGFLDTLRGGGGGGLFGVPAEAGCGGGSPEGSSVSDPAWARARDYGNARKRKAPPTGSAGGKEACLSKVAEAKGPDGKRCRVVGASDSPVKPKEEEEEAAASDALVEVKAQKKGKGKSSKPAVEPPKDYVHVRARRGQATDSHSLAERVRREKISQRMKFLQDLVPGCNKVVGKALMLDEIINYVQSLQQQVEFLSMKLATVNPELDFSNLSTLLHKDMYQQPCGGPSASSVFPLESAGAAFPFCEQADLFHSFGSGGSGSGSGMEDQCSLSLLLDTALPHAASPQFAFQKQQRDLWEDGLQHALPTPTTGSEQRQEEDGLLVPDL

SEQ ID NO: 5654 - protein, 557 aa, Zea mays
  VARIANT 307..557: note = Derived polymorphism lacks residues 307 to 557
  VARIANT 155..557: note = Derived polymorphism lacks residues 155 to 557
MAHSPPWFQESDEKSTALQLILSSKLPLRYGESQRHAPSDFTRAHTRSTSAPDTTLALQFSLTSGKQKIHGWRPSLALAMATDWFSFSHCANGGSTDSSLDGSEGHGFKPRTESRQDDLPVTKMDDTPVTNVDDVEFTFAERPQTDTLEDFFSIQKTNGFTKEEVCNKHIVPEIRTEDQFSTSQKHDTLLMNQASSVKNPFNLDDDKNDDLFELPTKSCLLEVQNVVESVDSTSLMVDQPTVSNQTRMAEVQQCHNSRMNKVRHKDYVEEQPQASDTKELGVVQNIENFEENKLIEGTDTGMNEVRQTDYVEEKAQASETKELRAVQNIENFEENKLVESIGAGMNDVRQTDYVEEQTQASDTKELGTTDYVEEQTQASDTKELGEVQSIENLEENKQTEDTDARETNARFNANDVEHKTQTAKEMAAAESTCSVEEKQPLNIMVGQDGGNNKLNEEIASTGAQLNPGRVRVPLKVLLAEASMENQVKRPSTKARVMSFRRRVTKDSSLSMKPGSPKSGSDDHHWSSPAKLSRKDVDKSSEEKKQPWMPFICCHSAR

SEQ ID NO: 5655 - protein, 172 aa, Zea mays
  VARIANT 101..172: note = Derived polymorphism lacks residues 101 to 172
  VARIANT 97: note = Ancestral polymorphism is E, Derived polymorphism is K
  VARIANT 73: note = Ancestral polymorphism is V, Derived polymorphism is M
  VARIANT 46..172: note = Derived polymorphism lacks residues 46 to 172
  VARIANT 39: note = Ancestral polymorphism is R, Derived polymorphism is C
  VARIANT 37: note = Ancestral polymorphism is K, Derived polymorphism is M
  VARIANT 25: note = Ancestral polymorphism is C, Derived polymorphism is Y
METDDKRHGGKEAAALSGGHLCHVCGYQYPNPHPSAKLRRSHRKHCGKARPAAAEAEALEEVEEGAVGVGVRVVGEREDRPGHRNRIAAGRTLLGREGGRQREETGTGEANGEGEASRGFAGQVDSSVEDKVVAADCGSLCLFVVFARTAFCDTLKRVKAAKGLAASPLFPG

SEQ ID NO: 5656 - protein, 372 aa, Zea mays
  VARIANT 159..372: note = Derived polymorphism lacks residues 159 to 372
MAAPSGTMRAVQYDRYGGGAQGLKHVEVPIPSPKKGEVLIRMEATSINVVDWKFQNGFARPFMPRRFPFISVLAFDVPSRVRVRMRTGELHRRVIVFAFWRTGYDLAGEVVELGAGVSSFKPGDKVIAINFPNGGGLAEYAVASASRTVARPPEVSAVEGVCVPIAAVTALRSLRTAGVTVTLDDPARAPATPKNVLVTAASGAVGHFAVQLARMGGHNVTATCGARNLGLVRSLGADEALDYKTPEGARLRSPSGRKYDAVVHCAAKGLPWSVFRPVLAASGTVVDITPGFVAVVTAILQVATFSKKRLVPLMVTPNKEEMELLLGMLKQGRLKTVIDSQHPLGSAHEGWAKSMSGHTTGKVVIEIGAAQP

SEQ ID NO: 5657 - protein, 358 aa, Zea mays
  VARIANT 107: note = Ancestral polymorphism is A, Derived polymorphism is G
  VARIANT 122: note = Ancestral polymorphism is G, Derived polymorphism is V
  VARIANT 154: note = Ancestral polymorphism is S, Derived polymorphism is R
  VARIANT 165: note = Ancestral polymorphism is R, Derived polymorphism is L
MVKAATWLLDRLLYVLKQDKGNDANTARDRRRRRRAPAGGAANAVGNDDGEEQHLNTFLDAANASSASSRVQFRNMASRARWVEEAGAAEVVENRGKLWLTTGVTRAGKLYYNVEETGYALGVLCIQHTSTNAALCESLKPFILPIMYSVLYMSCLTLTLFSSTRVLLVKAHCLMKTCRFLAEMGALILLNDKDETIGIEDIYGKLAGGNYGCSWDTFQAYKHLKSLGYIVGRFGVPWTMKHGGTHHTIAPQINILETDQSLNRVDGASNDITKLLKEIQIDGICPSFEVYLPNSKFKKSSPGCPSFLLCLLRGKPPSRVELEAVENNFRGIPLKYAHVDNGRVSFLSFDEVTLPSLP

SEQ ID NO: 5658 - protein, 458 aa, Zea mays
  VARIANT 104..458: note = Derived polymorphism lacks residues 104 to 458
  VARIANT 117..458: note = Derived polymorphism lacks residues 117 to 458
  VARIANT 216: note = Ancestral polymorphism is G, Derived polymorphism is R
  VARIANT 328..458: note = Derived polymorphism lacks residues 328 to 458
  VARIANT 352..458: note = Derived polymorphism lacks residues 352 to 458
MAENDYLLSGGLEGIGSTGKKCEVARRRNGLDTNKRKKAKKGQPDAIDGGPTGRELNIGQASFHSEPSNASNQFIPDQLMQGHYVLDHNFGPGSSQNLHDNLNQFDQASSAPTLQQQPFTGNGQLTQPKQFDLIQKTKPSSKTYTKPFEPKQFVPLILVEFSLKNEKDEKLLMAYIRVRAVLGARYYRVPWKSLSDLPAPPHTCLRRMALLLKTNGKIRGAVMCLCNLLGERYIRYLEKERSLKRRRLFPQISNRSQENSLDSDCEQFNWDDFEVPEIKSALNEVIELNQTEKIDQAKRIGPVNQKNINNDNDVTKDTICSQELPNNQAIRGETKTSAVLESGFCDPEKSCGHSNAESENMEVFYKPQEKIIKDHRNKIIERAYGNHWLLRNPIRVEVKTEAKSTSKVAGQHELGPSITPLGLRYFATCACVDYWVVVLALINSLKGSPIIASHGKMK

SEQ ID NO: 5659 - protein, 32 aa, Zea mays
  VARIANT 2: note = Ancestral polymorphism is S, Derived polymorphism is F
  VARIANT 21: note = Ancestral polymorphism is D, Derived polymorphism is Y
MSGYFNAVSTAAFQLGNRIEDFTRIELTINRA

SEQ ID NO: 5660 - protein, 365 aa, Zea mays
  VARIANT 31..365: note = Derived polymorphism lacks residues 31 to 365
MIGWGDVYKVVAAMAPLYFALGLGYGSVRWWKLFSPDQCDAVNRLVAYFAVPFFAFDFAARIDPFALSYRVLAADALSKLAVALALAAWATAAASASARRGGGGKGKDRALSWCITGFSLATLNNTLVVGVPLLDAMYGKWARDLIVQISVVQIIVYFPALLLALEARRAGKLAVVAEEAAGDADESGGGGSGGGTTAAQSLWPLVTAVWKKVARNPNVYAGILGVSWACVTNRWHIETPSIIEGSVLVMSKTGVGLSMFSMGLFMALQEKVIVCGAWPTVLGMALRFVAGPAATAAGAVALGLRGDVLRLAVMQAALPQSITTFVFAREYGLHPEVLSTAVIFGTLASLPVLIVYYIVLGLIRC

SEQ ID NO: 5661 - protein, 498 aa, Zea mays
  VARIANT 418: note = Ancestral polymorphism is P, Derived polymorphism is L
  VARIANT 376: note = Ancestral polymorphism is R, Derived polymorphism is C
  VARIANT 374: note = Ancestral polymorphism is A, Derived polymorphism is G
MPDKAVDDVMEAAVGAHFSGLRLEALRLSTSAPSSPSSSPAAAAHTHSNGAVYANGTTELPSPAAARQPFVIEFLLDFLKGVSGGTASGKTTVCDMIIQQLHDHRVVLVNQDSFYRGLTAEESAHAQDYNFDHPDAFDTEQLLECMGQLKCAQPVNVPIYDFKKHRRCSESFRKVNASDVIILEGILVFHDQRVRNLMDMKIFVDTDADIRLARRIRRDTVERGRDISSVLDQYGRFVKPAFDDFVLPSKKYADVIIPRGGDNHVAVDLIVQHIRTKLGQHDLCKIYPNVHVVQSTFQIRGMHTLIRDRDITTPDFVFYSDRLIRLVVEHGLGHLPFTEKQVITPTGSVYMGVDFCKKLCGVSIVRSGESMENALRACCKGIKIGKILIHRVGDNGQQLVYHKLPMDIAERHVLLLDPVLGTGNSVAQAIDLLIRKGVPEDRIIFLNLISAPEGIQCICKRFPSLKIVTSEIDYGLNEEFRVIPGLGEYGDRYFGTDN

SEQ ID NO: 5662 - protein, 221 aa, Zea mays
  VARIANT 110: note = Ancestral polymorphism is A, Derived polymorphism is T
  VARIANT 36: note = Ancestral polymorphism is G, Derived polymorphism is V
MSRRGDWVYENNGGTCVAIAGADYCVVAADTRLSVGYSILTRDHSKICDLADKCVLASSGFQGDIKALQKNLAARELLYQHQHNKRMSCPAMAQLLSNTLYYKRFFPYYAFNVLGGLDSEGKGCVFTYDAVGSYERTGYSAQGTGSTLIMPVLDNQLKSPSPLLLPVRDAVTPLSESEAIDLVKDVFASATERDIYTGDKLEIVVINKAGTMREYIDLRKD

SEQ ID NO: 5663 - protein, 56 aa, Zea mays
  VARIANT 52: note = Ancestral polymorphism is R, Derived polymorphism is M
  VARIANT 43: note = Ancestral polymorphism is R, Derived polymorphism is Q
  VARIANT 28: note = Ancestral polymorphism is E, Derived polymorphism is K
  VARIANT 21: note = Ancestral polymorphism is A, Derived polymorphism is V
  VARIANT 15: note = Ancestral polymorphism is T, Derived polymorphism is R
  VARIANT 8: note = Ancestral polymorphism is M, Derived polymorphism is I
  VARIANT 7: note = Ancestral polymorphism is E, Derived polymorphism is K
  VARIANT 1: note = Ancestral polymorphism is M, Derived polymorphism is T
MRKCMKEMEAMDGFTDEKSYAVEVFESEINREAFMSTMNHNVRRMWLKHKIMYAHS

SEQ ID NO: 5664 - protein, 203 aa, Zea mays
  VARIANT 59: note = Ancestral polymorphism is G, Derived polymorphism is A
  VARIANT 111: note = Ancestral polymorphism is P, Derived polymorphism is L
  VARIANT 121: note = Ancestral polymorphism is P, Derived polymorphism is L
  VARIANT 128: note = Ancestral polymorphism is V, Derived polymorphism is L
  VARIANT 139..203: note = Derived polymorphism lacks residues 139 to 203
  VARIANT 140: note = Ancestral polymorphism is S, Derived polymorphism is L
  VARIANT 149: note = Ancestral polymorphism is P, Derived polymorphism is L
MMGFANDAFVGCAHGNKQVKGFMFEKPVDLKVGVNHVVLLSSTMGMKDSGGELAEVKGGIQECLIQGLNTESGVDQLVEIIKVLGTPTREEIKCMNPNYTEFKFPQIKAHPWHKIFHKRMPAEAVDLVSRLLQYSPKLRSTALEALVHPFFDELWDPNTRLPNGRFLPPLFNFKPHELKNVPADFMVKLIPEHARKQCAFVGW

SEQ ID NO: 5665 - protein, 477 aa, Zea mays
  VARIANT 393..477: note = Derived polymorphism lacks residues 393 to 477
MIRTLVSLMRTLDPMPEERTILMKLLYYDDVTPEDYEPPFFKCCADNEAISIWNKNPLKMEVGNVNSKHLVLALKVKSVLDPCDDDNVNSEGDGMTVDNESDHDDDFSDTEVHPPKADHYIIAPNGKHVLSNVCICCFGIINRSFLTEGKDKDQDTGTISEDDTQDTAHEEELTSQVKEWICSRDSGTINVSDVLSNFPDISMELVEDIMDRLLKDGILSRASKDGYTVNQKADPKTPHIKKEAIMPDVSPTNVTKHNNGDLLYMKALYHALPMDYVTIAKLQGKLDGEASQNTVRKLIDKMVQDGYVKNSANRRLGKAVIHSESTNKRLLEIKKILEVNEGEKMAIDTNTEHPEPEHKDLLRVYEVGDGSTMGCLHSIGSDLTRTRELPELQQNVSMQSGQEASTVGKDSSRTPTSVRELAVPVCSLESGVLGKRIKRSLTGGNEMQSTQDKRSRKASMVKEAILQHVKCQNPQAQ

SEQ ID NO: 5666 - protein, 436 aa, Zea mays
  VARIANT 210..436: note = Derived polymorphism lacks residues 210 to 436
MSPKPAKPTPATEFEYCELCRHHHDHGRRHRYIVKHRRNLDAALTCFRSKLSDLRRAFLPGSPSSQPPRTRLWCPFCSIDLVDLDSRSAGNNAIYHMASSEHLKGVKDFLWKHGGRMDQVVSLRISEDVLAKWEKGPECLSTGTKKGTEELIGPSLKQIKDIQNEYACDSLDSFAQNNIPSFSNTASYVVMPLQNSTNGAYGSISTACHGASSSGSASHSAPYGTVGLPITPWGSAETHKLQGALSTNWFHSSGTETKGHQSTVFVNGASQSLSCSDHMLPLRVQQSHTGGNLSNGSKANVHTGAPPPWLKANEHDPKNLSLKSCGLSSRKGKLRKLNPNRVGAAWAERRRAEMEMEKQGEIVPATSDSSWLPNFGSVWQSGTRKESRKEFEKSHKIHDTKSDHDLSLEIKPYISKRMVDVVAWASLRKKPPGRAA

SEQ ID NO: 5667 - protein, 423 aa, Zea mays
  VARIANT 11..423: note = Derived polymorphism lacks residues 11 to 423
  VARIANT 109: note = Ancestral polymorphism is C, Derived polymorphism is F
MDWDLKMPVSWDLPDLEHDAMPPPPPVSAASTAAASGIAAAAAAPSSATAPSRAECSVDLKLGGLGEFGAADGTATKEPAAATAAPSASPMKRPRLGPGGAGGAQCPSCAVDGCKADLSKCRDYHRRHKVCEAHSKTPVVVVAGREMRFCQQCSRFHLLLEFDEAKRSCRKRLDGHNRRRRKPQPDTMNSGSFMTSQQGTRFSSFPAPRPEPSWSGVIKSEDSSYYTHHPVLSNRPHVAGTSTSPAYSKEGRRFPFLQDGDQVSFSASGAGTLEVSTVCQPLLKTTAAVAPPPPESSKMLAPVLDSDCALSLLSSPANSSSVDVSRMVQPAERIPMAQPLVPGLQHHQFGGSPVPDWFAGSGAVPAAGTGGFACPHSVESEQFNTVLVPSSDGGHEMNYHGIFHVGGEGSSDGTSPSLPFSWQ

SEQ ID NO: 5668 - protein, 251 aa, Zea mays
  VARIANT 8: note = Ancestral polymorphism is L, Derived polymorphism is P
MGRGRVELKRIENKINRQVTFAKRRNGLLKKAYELSVLCDAEVALIIFSNRGKLYEFCSGQSITKTLERYEKNSYGGPDTAVQNKENELVQSSRNEYLKLKARVDNLQRTQRQVDSTFELNLLGEDLGSLGVKELEQLEKQLDSSLRHIRSTRTQHMLDQLTDLQRREQMLCEANKCLRRKLEETSNQVHGQVWEHGANLLGYERHSPQQQAPSHVGNGLFFHPLEAAAEPTLQIGFAPEHMNNFMPTWLP

SEQ ID NO: 5669 - protein, 335 aa, Zea mays
  VARIANT 127: note = Ancestral polymorphism is C, Derived polymorphism is R
  VARIANT 82: note = Ancestral polymorphism is S, Derived polymorphism is L
  VARIANT 74: note = Ancestral polymorphism is C, Derived polymorphism is F
MEKWRRRRHLLLAVAAVALVAAITLPSAEAKLSPDYYRSTCPDVEAIVQAVVAKKVNETFVTVPATLRLFFHDCFVEGCDASVIIASRDNDAEKDAPDNVSLAGDGFDTVVRAKAEVEKKCPGVVSCADILAIAARDVVTMSSGPHWTVQLGRLDGLVSKAGNVAGKLPGPNMRVKDLAALFAKHNLTTLDMVALSGAHTVGFAHCTRFADRLYHHGVGDSDGASVDPSYNPAYARQLMDACPPGVGADIAVNMDPITPTAFDNAYYANLAGGLGLFTSDQALYSDGASQPAVRDFAKNQTRFFEAFKDAMVKLGSVGVKTGRHGEIRSDCTAFN

SEQ ID NO: 5670 - protein, 909 aa, Zea mays
  VARIANT 217..909: note = Derived polymorphism lacks residues 217 to 909
  VARIANT 331..909: note = Derived polymorphism lacks residues 331 to 909
  VARIANT 359..909: note = Derived polymorphism lacks residues 359 to 909
  VARIANT 711..909: note = Derived polymorphism lacks residues 711 to 909
MRVAVVGAGVSGLAAAHELARSGGSRVTVYEKEDYLGGHARTVAVEDADAASTVQLDLGFMVFNRVTYPNMLEWFEGLGVEMEISDMSFSVSTELGASGSRCEWGSRNGISGLLAQKSNALSPSFWRMIREILKFKNDALRYLEDHENNPDMDRNETLGQFIRSHGYSQFFQEAYLTPICACIWSCPSQGVLGFSAFFVLSFCRNHHLLQLFGRPQWLTVKGRSHSYVHKVREELESMGCQIKTSCEIKSVSSSEGGTANARSSSRISSGYHLVTHPKQVIGIVLFASGFRVTVFDGSEETYDRIIFGVHAPDALKILGAEATHEELRILGAFQYVYSDIYLHSDKSLMPRSLSAWSSWNFLGTTSKGVCVTYWLNLLQNIESTSRPFLVTLNPPHVPDHVFLKWYTSHPVPSVAAAKASLELHHIQGNRGIWFCGAYQGYGFHEDGLKAGKAAAQDLLGKESDLLVNPKQMIPSWSEAGARLLVTRFLGQYVSVGNLVLLEEGGTMFSFGEVGKKCHVKSVLRVHDPMFYWKVATEADLGLADAYINGYFSFVDKREGLLNLFLILIANRDANKSSSSAAGKRGWWTPLLLTAGVASAKYFLRHIARRNSVSQTRQNISQHYDLSNEFFSLFLDPSMTYSCAIFKTEDQSLEAAQLQKVCLLIDKAKVERDHHVLEIGCGWGSLAIQLVKQTGCKYTGITLSVEQLKYAQRKVKEAGLEDHISFMLCDYRQIPTQRKYDRIISCEMIEGVGHEYMDDFFGCCESLLAQDGIFVLQFISIPEERYEEYRRSSDFIKEYIFPGGCLPSLARITSAMSAASRLCIEHLENIGYHYYPTLIQWRDNFMANKDAILALGFDEKFIRIWEYYFIYCAAGFKSRTLGNYQIVFSRPGNDKLGDSGIHSLSKLSGS

SEQ ID NO: 5671 - protein, 143 aa, Zea mays
  VARIANT 136..143: note = Derived polymorphism lacks residues 136 to 143
MAMTVAVTWLPSTASRGRTLAAPLPPFAGPISIHMPLRAPPPIPFPTSRASPSPPHSSISPEGSVPRPIARIGVAVAAVSVALFLLKSIVSTALFVLAMMGLIYLGFLAMNPKEASDSRLDEATGDPSEDQIEEARRIMEKYK

SEQ ID NO: 5672 - protein, 258 aa, Zea mays
  VARIANT 181: note = Ancestral polymorphism is R, Derived polymorphism is L
MAPKRGGRAPVPAKKKTDKVTNPLFEKRPKQFGIGGALPPKKDLHRFVKWPKVVRIQRQRRILKQRLKVPPALNQFTRTLDKNLATNLFKMLLKYRPEDKAAKKERLLKRAQAENEGKTVESKKPIVVKYGLNHVTYLIEQNKAQLVVIAHDVDPIELVVWLPALCRKMEVPYCIVKGKARLGSIVHKKTASVLCLTTVKNEDKLEFSKILEAIKANFNDKFDEVRKKWGGGIMGSKSQAKTKAREKLLAKEAAQRMT

SEQ ID NO: 5673 - protein, 151 aa, Zea mays
  VARIANT 131: note = Ancestral polymorphism is R, Derived polymorphism is K
  VARIANT 112: note = Ancestral polymorphism is E, Derived polymorphism is D
  VARIANT 71: note = Ancestral polymorphism is H, Derived polymorphism is Y
  VARIANT 8: note = Ancestral polymorphism is V, Derived polymorphism is I
MLEKKLTVTGTGTAMAMATEKGRKPGLITKTLGRCRGARRRSRPPAPEGCFAVRVGAGRQRFVVRTECVNHPLFRALLEEAEEAFGYAAAGPLVLPCDADAFVRVLEQIQEEEEDAAGQAAPAVARCGLVRGHSAYRLLLVPARPLLVGRS

SEQ ID NO: 5674 - protein, 260 aa, Zea mays
  VARIANT 38: note = Ancestral polymorphism is L, Derived polymorphism is P
  VARIANT 79: note = Ancestral polymorphism is G, Derived polymorphism is R
  VARIANT 93: note = Ancestral polymorphism is T, Derived polymorphism is M
  VARIANT 176: note = Ancestral polymorphism is C, Derived polymorphism is S
  VARIANT 189: note = Ancestral polymorphism is P, Derived polymorphism is S
MERPAQAPTQLPPGFRFHPTDEELVVLYLRRKALARPLPAAVIPVVHDVAGLDPWDLPGASEGEGYFFSLRRAPATGRGSRRRRAGSGYWKATGKEEPVFLQCGGGGVGGKRQLLVGGKTALAFHRSEPSPPSSSRTGWVMHEYRLAAASRGVAEQRKKNASHGCCDAEPGEWVVCRVFLKKGARRSRPGRDGNHSRALRHRASAAPPQLREGVGGRQPLLFPAPQSPSSSCVTGVTDLSDEEDEVSSGSITRVAPQREA

SEQ ID NO: 5675 - protein, 321 aa, Zea mays
  VARIANT 29: note = Ancestral polymorphism is H, Derived polymorphism is N
MASLFPQLAQMEHGVAGASHGAPSFLFCNGAGAATADSASLETSSGVLDTSPRGGGADSGGRKAPTKPREDSASASASFSFSSAHSKRITVLDRVWFRELNKQDSSSKGSTKNRGGKRGRSSKEVDEEEEPKGYIHVRARRGQATDSHSLAERVRRERISERMRVLQALVPGCDKVTGKALVLDEIINYVQSLQNQVEFLSMKIASLSPVLYGFGMDTTDAFSTDHTTQKIEGMLQLHHEALAVPSSALSRPPFEAIADSTHATASASSPRSYELHGDGGGGGASISFPQDGGGYMAQTVGGPRPELFNQVVFSNHMCSFQ

SEQ ID NO: 5676 - protein, 465 aa, Zea mays
  VARIANT 111: note = Ancestral polymorphism is L, Derived polymorphism is I
  VARIANT 93: note = Ancestral polymorphism is I, Derived polymorphism is N
MSMESVAVAVVAVPFPAQGHLNGMLHLSLLLASRGLSVHYAAPGPHVRQARARVHGWGDDAHRRIEFHELEVPAYATPPPDPVAPSPFPTHLIPMSEAFLAGARAPVASLIGRVSARHRRVVVLYDRLSSFAAPEAARIPNGEAFCLQCVAACFDAAWTDAGQRLLRKHGLDAPHPGACMPREFVEYIVRTQEDSRSPAFAGVVANTCRAIESEFIDVVAGDPENRGKRVFAVGPMNPLLNVTAPTAGQSARHECLDWLDKQPPASVLYVSFGTTSSLRAEQIAELAAALRDSKQRFVWVLRDADRGVVHEEEAVESRHARFLSEFTEETQGIGLVITGWAPQLEILAHGATAAFMSHCGWNSTMESLSHGKPMLAWPMHSDQPLVAELVCKCLKAGLLVRPWEQHSAVTPAETIREVIEKVMARDEGLAVRERAKELMEFIRRSVAEGGSSRKDLDDFVAYIAR

SEQ ID NO: 5677 - protein, 220 aa, Zea mays
  VARIANT 194: note = Ancestral polymorphism is A, Derived polymorphism is V
  VARIANT 30: note = Ancestral polymorphism is S, Derived polymorphism is L
MAAAAVGRRGSTTSTFVSLAVAMAIAALSSLPPSSTAAKAAPCSSHTFSGTTGGQNPYASCADLPRLGATLHYNYTAATNTVAVAFRAPQAKGDDGWVAWGINPSGRAGMVGTQAVVAFQRSDGSLVAYPTLLDSYAPSMAPAAPGDLAFPVSDVAAEYVDGKEMVLYATLALPAGNGQQGSSKFTHVWQQGTAVVNDVPAAHPTTGDNILSTATIDFSD

SEQ ID NO: 5678 - protein, 205 aa, Zea mays
  VARIANT 38: note = Ancestral polymorphism is A, Derived polymorphism is S
  VARIANT 41: note = Ancestral polymorphism is G, Derived polymorphism is R
  VARIANT 46: note = Ancestral polymorphism is K, Derived polymorphism is T
  VARIANT 47: note = Ancestral polymorphism is G, Derived polymorphism is D
  VARIANT 51: note = Ancestral polymorphism is L, Derived polymorphism is P
  VARIANT 107: note = Ancestral polymorphism is A, Derived polymorphism is T
MAENPQLFGNGMPVPFYSEMFVLARDGVEFHVDKIPSAPGGHVKTKGTIYLSNIRMVFVANKHVGNFFAFDMPLLFVHGQKFNQPIFHCNNISGFVEPVVPDNQNRALYSTHTFKVLFKDGGCGTFVPLFLNLTASVRRYNQFETQSAASMAPRVDPLQAVQTPVDDMMRHAYVDPNDPTKIFLQQPAPESQLRRRNYHGPADAN

SEQ ID NO: 5679 - protein, 387 aa, Zea mays
  VARIANT 15: note = Ancestral polymorphism is G, Derived polymorphism is R
MAPPARWLRREVFVGLALGQFVSLLITSTGFASSELARRGVNAPTSQSLLNYILLALVYGGTLLYKRQNMTIKWYYYLILGIVDVEANYIVVKAYQYTSLTSVMLLDCWSIPCVIVLTWIFLKTKYGLRKFIGVGVCVAGLILVVFSDVHASDRAKGPNPLKGDLLVIGGSMLYAISNVTEEYFVKKSNRIEVMAMLGVFGAIISGIQIKYSPSFYFLDNSKEVYLSKKSSDRLTGLLILPFIGFALAMFLFYSTVPIILKICGATMLNLSLLTSDMWAVLIRIFAYKEKVDWMYFVAFAGTATGLVIYSYRYCAFSVLLALNMDYCSQIQTATSRGSRQISEETAQVTQAIDEEAATANSAAQVPGVGDDGPASNKDFSLAATASR

SEQ ID NO: 5680 - protein, 218 aa, Zea mays
  VARIANT 200: note = Ancestral polymorphism is R, Derived polymorphism is T
  VARIANT 186: note = Ancestral polymorphism is S, Derived polymorphism is R
  VARIANT 44: note = Ancestral polymorphism is A, Derived polymorphism is T
MSRGRDPLALSQVIGDVLDPFIKSATMRINYGDKEITNGTGLRASAVLNAPHVEIEGHDQTNLYTLVMVDPDAPSPSKPEYREYLHWLVTDIPEARDICSGNEIVPYESPRPPAGIHRIVFVLFKQQARQTVYAPGWRQNFNIRDFSAIYNLGAPVAALYFNCQKESGVGGRRIGVFFPKVLKAISKLCFWDQAEEKIQRNIYMEAVPFTIQKLVHLK

SEQ ID NO: 5681 - protein, 1150 aa, Zea mays
  VARIANT 768..1150: note = Derived polymorphism lacks residues 768 to 1150
MGGWYSAIAATRLKMLRRGCRGAAAVLPVASHDSVTGKERKRKRRKHASILGDSGTVDPDFSRRYRLGAELGRGEFGVTRRCEDAATGEALACKTIRRKRLLLRRAGLDADDVRREVEITRRMSEAGGGRVVRLREACEDDDGVHLVVELCEGGELFDRIFEREHYSERAAAKLARTIVEVVQVVAMNLPTEEVDQYNQMFRTMDKDNDGNLSLEDLKEGFRINGHPVPEEEIKMLLQAGDIHGSGTLDCEEFVTVLLHIKKLSNDEYLPKAFKFFDKDKNGFIEMAELMEALGDGELKPNEQVVNDIIREVDKDKDGRISYPEFELMMKGGSDWRNASRRFLVQETLIALCLLLSFPPGIASIHSSTLNMSCILEERAALLSIKASLLDPNNYFYLSSWQGQDCCSWKGIRCSQKTGNVVKLDLRRINPGNFVAVDWAHEINMLSTLKELLLQQSGLRSTAPSLRQFNLTILEVLDISGNIFNTSIAPNWFWNATSLTFLNMKQCYFYGSIPDEIGRMTSLEQVSFNTNNHMSTMIPSSFKHLCNLKMLDLSANNISGELPNLPGPLTNLTYFVLSDNKLTGTIPAWVWTLRKLFILELRWNKINGVVNEGHLNGLTDLVFLGLGLTQLQIKIRPDWIPPFKLQAVLLDSLQLGPAFPSWLKSQTSMKILSISNASINAIPDWFWVVFSGAELLNLSDNQIFGALPATLEFMATNTMVLSNNRFNGTVPKFPKNITYIDISRNSLSGPLPYDFVAPWLSKLLLYNNSISGTIPSSLCSLEKLELLDLSRNMLTGEFPNCQENSEPFMKLRILNLNTNNLSGEFPSAFKGRQFVAFVDLSYSQFSGNLPVWIWEEMPTLALLRLRSNMFYGHIPEITTSKQLQFLDLAYNNFSGSIPHSIVNLSAMARTSGYSYFLDIILVGIGYQLYNSEFYWVSFREQVSVSTKGQQLELSSELSHMVILDLSCNSLTGVIPQDIGALVALKGFNLSWNQLSGEIPVTIDQLKQLESLDLSHNQLSGSIPSSMSGLTYLSRMNLSYNNLSGKIPTGNQFDTYDASVYIGNIDLCGFPLPSICTGNTSNQGTHGNSNYRDLDLAMAIGFVINLWWIFCVMLFKKSWRSAYFMFVDELHEKIYVIVAVRCAILKRKFGKK

SEQ ID NO: 5682 - protein, 326 aa, Zea mays
  VARIANT 85: note = Ancestral polymorphism is A, Derived polymorphism is S
  VARIANT 188: note = Ancestral polymorphism is I, Derived polymorphism is V
  VARIANT 244: note = Ancestral polymorphism is G, Derived polymorphism is A
MEHTKSGPSSWPELADVVPVPQDDGPSPVVSIAYRDDFREVMDYFRALYLTGERSPRALRLTAEAIELNPGNYTVWHFRRLILESLDFDLLEEMKFVEKIAECNPKNYQIWHHKRWLAEKLGPGIANKEHEFTMKILAIDAKNYHAWSHRQWVLQALGGWETELEYCDHLLKEDVFNNSAWNQRYFVITRSPFLGGLAAMRDSEVDYTIEAILANAQNESPWRYLKGLYKGENNLLVEDERISAVCFKVLKNDWTCVFALSLLLDLLCTGLQPSDELRSTLETIRSSHPETADDDPAAAVCCILQKCDPLRVNYWSWFKDTLSQIS

SEQ ID NO: 5683 - protein, 159 aa, Zea mays
  VARIANT 108: note = Ancestral polymorphism is P, Derived polymorphism is S
MAIAARALRRLPLHLSPSISRSFCAVSPAAASAPAAASAKVADRIVRVLAIDPDGARRDVVGLSGQTLLRALANAGLIEPASHRLEDIDACSAECEVHIAQEWLDKLPPPSYEERYVLTRASRNRELNKHARLGCQVVLAPELQGMVVAIPEPKPWDIP

SEQ ID NO: 5684 - protein, 213 aa, Zea mays
  VARIANT 50: note = Ancestral polymorphism is C, Derived polymorphism is S
MELSTPVGSSLARTATMALVSPSFKITNQMCARGMPLECQFPHRLPSVACSMLLNTQPSQRTNHKDCGLLQVQCTENLMQSPVSFSDFSVSVCAQEDGLIKLQVNVSGTMTDSIFEKVFTKNVAAAQPLPGFRRMKGGKTPDIPKEVALHLIGPSKVKKETIKKIISSTVAEYVQKEGLTVSKNMKVQQSYEELEAAFEPGKEFCFDATVHLQ

SEQ ID NO: 5685 - protein, 371 aa, Zea mays
  VARIANT 204..371: note = Derived polymorphism lacks residues 204 to 371
MNKDKAPMPGDGGPSDGLPPQSTRRAGAPPSSSTPPLECDISRMPDFPTRSTGHRRAHSEILGLPDDLDLSAPGGGEGPSLSDENDEELFSMFLDVDKLNSSCGASSEAEAESSSAAGGGGEGAELADAPRPRHQHSQSMDGSMSIKAEQLVGAPGMEGMSSAEAKKAVSAAKLAELALVDPKRAKRIWANRQSAARSKERKMQYIGELELKVQTLQTEATTLSAQLALLQRDTTGLTTENSELKIRLQTMEQQVHLQDALNDTLKTEVQRLKVATGQVGNGGGGMMLNFGAMPRLVGGNQQMFHSSQAMQSVLATHQLQQLQLHSQPQQQQLHSLQLQQVARDLKMKGHLGGQGQWGDGKSGSGSRSSGS

SEQ ID NO: 5686 - protein, 572 aa, Zea mays
  VARIANT 108: note = Ancestral polymorphism is S, Derived polymorphism is F
  VARIANT 105: note = Ancestral polymorphism is S, Derived polymorphism is F
  VARIANT 77: note = Ancestral polymorphism is A, Derived polymorphism is T
  VARIANT 67: note = Ancestral polymorphism is Y, Derived polymorphism is H
MATAEPGPSPPAPKPTCAVTFGRSTLLGRYLAAALAASGRWSAVAILDPSPTSPSPPPGPPASHIVYHHDVDFSDPARLVSALAGAAAVFHVDATTAAASGSDGSFLSLHRLAVEGTRRLLAACRAAGVGRVVYTGSADVVAAVARDVINADEDSAPYPDKFGNAMSELRAQVEMMVLGADGVDGVRTCVLRPSNLFGPGDSSLVRFVAGYARSPLGKFVIGSGSNMSDFTYVENVAHANICAEQALSSNAASVAGKPFFVTNDEPMETWEFMNCMMEAMGCQRPRINLPAKMLLFAALFSKMIHHRLGFQMLSTPLLHPDTIYFLSCTRTFNTSRARRLLGYHPIVSLEDGIMRTLGSFSELADNLGLSRKQGSCGSSKADKLLGSGTAADILLWRDEKRTFSFVTVLFLLFYWFLLSDRTFVSSAAKFLLVLSLALFIHGVLPSEVFGFTVEKVTSDHFEVSHSALRNSLMCVASAWNGSFHKLRLLAEGEDWSLLLKVFAFLYSIKLMLNFQFRFLMGLVLASLFIVFIVYEQCEEEIDSLVANASVKVKWLTDRVVRNLPAFLKAYIA

SEQ ID NO: 5687 - protein, 761 aa, Zea mays
  VARIANT 16: note = Ancestral polymorphism is M, Derived polymorphism is T
MASLVPGVLVKLLQHMNTGVKVGGEHRSSLLQVVSIVPALAGSDLFTNRGFYLKVSDSSHATYVSLPEEQHDLILSDRIQLGQFVHADRLEAATPVPILRGVRPVPGRHACVGTPEDLVLTASSSNSHGGGKNKKARPSNAKTKDASASVLSLDKESSKLEKINASRKPTATGAENKKPTLTRSNSSLPREALDGRIGDDKVAAVKSKKVKPGVTRSTPSSPTSVYSLPASFDRFSNDLKQRNRVKGAENKASSSSRLSLLEKAASVLKATSAAGRVSSAGIPIGSSVLSIGSSGPKALRRSWEGNTDVKGKGKPESRTAKPDRKSDSKIPMTPRRKSPVDEKVAPHKDDNSQKAARKSTTSAPASDDAADKAVKKKHIPTAKRTSGGLGNWSVTNLVKIPPSSRKLADVSASWTSLPPSLAKLGKELLRHRESAQIAAVEAMQEASAAESLLRCLSSYAEVSSTAEEQNPQPAVEQFLTLHAALSRATVITDTLAKSATSAASPDCSAASDAGTVCSATDEEAAAITAERRRRATSWVSAALATDLSAFGIYKLKPPPATVSSPLAVVVVDEPAKLAAAAATKSSPSPKSRLSPAKGKARTGAAAAAGALATTPAPPEWERGGGAEERGELATRLGEESRGWFLGFVERFLDADVAATAQWDRERAARMLPQLKRVNDWLGEIGKRSETETSSLPPADADGEATTTSTAPVPSNGGCGVPEETIERLRKKIYEYLLTNVDSAAAMLGGGGLAAPTNGKKG

SEQ ID NO: 5688 - protein, 546 aa, Zea mays
  VARIANT 424: note = Ancestral polymorphism is S, Derived polymorphism is C
MAPQAAGSTPAVAALGFLLPTCWEIEVTCAAAMILVALYAAYELLNPRPFQAAAAGDADELLVRGLDGTNKLELLAARNLMAANLNGTSDPYALITCGAEKRFSSMVPGSRNPMWGEEFNFFVDSLPVKVILSSLLINVTIYDWDIVWKSTILGSVTVPIESEIPSGPVWHTLDSTSGQVCLHIKVIKVHESSSRALNSSAEAGARRRISLDKQGPTVVHQKPGPLQTVFELPPDEAIVSLSCTFQVVDHSYSCALERSFLYHGRMYVSSWHICFHSNVFSKQIKVVIPLRDIDEIRRSQHAVINPAITIFLRMGAGGFGVPPLGCPDGRVRYMFASFWNRNHTFRALQRAVKNFQMMIEAEKQERAQSALRAHSSSRKNSKKEINIPEDCAALTGQLQPFVKEEVLVPVFNGTFPSTAEHFFSILLSDDSNYITEYRTFRKDKDINLGQWHIADEYDGQVHCRWSVKTISSSLCSLNISAGAHFKKWCIMQSKIKSGAVDELKKEVKEMLDFAQGYILKVRSPDQENSNLAQQDNMAPDAVSGDQ

SEQ ID NO: 5689 - protein, 145 aa, Zea mays
  VARIANT 103: note = Ancestral polymorphism is T, Derived polymorphism is I
MLDISQSIRFDGDVEDGKSHELKVYSLDRIRAATINFSDSNKLGEGGFGPVYMGTLPGGEEVAVKRLCRNSGQGLEEFKNEVILIAKFQHRNLVRLLGGYMSIEYAMEGIFSVKSDVYGFGVLILSFHCHEDSLNIAGYVNTGGY

SEQ ID NO: 5690 - protein, 97 aa, Zea mays
  VARIANT 79: note = Ancestral polymorphism is A, Derived polymorphism is S
  VARIANT 44..97: note = Derived polymorphism lacks residues 44 to 97
  VARIANT 41: note = Ancestral polymorphism is E, Derived polymorphism is K
  VARIANT 19: note = Ancestral polymorphism is I, Derived polymorphism is T
MVGVGDGPWDAMQHFEDCIPERSFDNFQFLAYWPSENLIDELLQFVNFTGIMSTSKDMSKKEVAFALAALMEIPSQYKATQGLRPPEYQFLLSYLWS

SEQ ID NO: 5691 - protein, 475 aa, Zea mays
  VARIANT 21: note = Ancestral polymorphism is H, Derived polymorphism is P
  VARIANT 46: note = Ancestral polymorphism is Y, Derived polymorphism is C
  VARIANT 173: note = Ancestral polymorphism is L, Derived polymorphism is H
  VARIANT 195: note = Ancestral polymorphism is Y, Derived polymorphism is H
MGMDSYAGENEPKVGSGVGSHVLLLPYPSQGHVHPMLQFGKRLAYYGLRPTLAVTRFILATCAPGDAGVRLAAVSDGFDRGGFGECGDVAAYLSRLEAAGSETLGELLEDEAARGRPVRAVVYDAFLPWAQGVARRHGARAAAFFTQPCAVNVAYGHVWRRRLRVPVDGVLRLPGLPALDPDGLPSFLKVGTGLYPAYFEMVVRQFQGLEQADDVLVNSFYELEPEEAEYMASAWRGKTIGPTVPASYIGDDRLPSDTKYGLDLYEPTAAPCIAWLDAHPPRSVVYASFGSLSDLDPLQMREVAHGLLDAGRPFLWVVRASEAHKLPAGFEGACGGRGLVVSWCPQLEVLAHRAVGCFLTHCGWNSTAEALVTGVPMVAVPQWTDQPMNARYVEAVWRVGVRARPAPPDDSLGLVRRGEVVMRVEEVMDGDKSAEFRRSADVWMAKARAASREGGSSDRNIAEFVAKYAHRTPSE

SEQ ID NO: 5692 - protein, 338 aa, Zea mays
  VARIANT 51: note = Ancestral polymorphism is K, Derived polymorphism is N
  VARIANT 183: note = Ancestral polymorphism is P, Derived polymorphism is L
  VARIANT 210: note = Ancestral polymorphism is P, Derived polymorphism is L
MGSKDGTGDISEAQGYAADIDSIREAQARIAPYVHRTPVMSSTSIDAMVGKKLFFKCECFQKAGAFKIRGASNSIFALDDEQVSKGVVTHSSGNHAAAVALAAKLRGIPAHIVIPRNAPACKVENVKRYGGHIIWSDASIESREYVCKRVQEETGAVLIHPFNSKYTISGQGTVSLELLEQVPEIDTIIVPISGGGLISGVALAAKAINPSIRILAAEPKGADDSAQSKAAGKIITLPSTNTIADGLRAFLGDLTWPVVRDLVDDVIVVDDTAIVDAMKMCYEILKVAVEPSGAIGLAAALSDEFKQSSAWHESSKIGIIVSGGNVDLGTLWQSMYKH

SEQ ID NO: 5693 - protein, 440 aa, Zea mays
  VARIANT 40: note = Ancestral polymorphism is R, Derived polymorphism is Q
  VARIANT 85: note = Ancestral polymorphism is Y, Derived polymorphism is C
  VARIANT 119: note = Ancestral polymorphism is F, Derived polymorphism is L
  VARIANT 123: note = Ancestral polymorphism is A, Derived polymorphism is T
  VARIANT 194..440: note = Derived polymorphism lacks residues 194 to 440
MAERVSQHIVHVLLLPNPTQGHINPILEFGKRLAAHRGVQCTLAVTRFVLSKSGQSSAGGAVHIAPISDGCDRGGYGEAGGIEACTARLESAGSATVGELLRSKAERGRPVRALVYDAFLPWAQRVGRRHGAACAAFFTQPCAVDVAYGHAWAGRVEPPLPLGEEQLEPLPGLPGGLRPCDLPTFLTDKDDRAYLDLLESDYMASTWRAKTVGPAVPSAYLDNRLPDDTSYGFHLYTPMTETTKAWLDARPARSVVYASLGSIAKPDAAQTAEMAEGLYGSGKAFLWVVRASESAKLPENFAGRTTEERGLVVTWSPQLEVLAHPAVGCFVTHCGWNSTMEALGAGVPMVAMPQWSDQTMNAKYIEDVWRVGVRVRPDGRGVVRKEELERCVREVMEGERSLDYIRNAAGWKEKARSAMSEGGSSDKNVLDFLGALGLKK

SEQ ID NO: 5694 - protein, 148 aa, Zea mays
  VARIANT 96: note = Ancestral polymorphism is S, Derived polymorphism is F
MAIGGPLEDARGLAQRYSRMRHEAEILSTEIARRKARVREAPIAEHTTKLQQSEARMIEHKASMAVLGKEAAAALAAVESQQQRVTLQRLVGAMSSEKQRRESAPPIISSHKRAEKAQYFLAEVMHNFNGTTEKELSLIVGDYVVVRQ

SEQ ID NO: 5695 - protein, 416 aa, Zea mays
  VARIANT 185: note = Ancestral polymorphism is A, Derived polymorphism is T
MRRAAVAATTTTTRMAAEEMRRASASTATAEMPASPAPAQAGSRWARVWPRALRWIPTSTDRIIAAEKRLLTIVKTGYVQERVNIGSAPPGSKVRWFRSASDEPRFINTVTFDSKENAPTLVMVHGYGASQGFFFRNFDALASRFRVIAIDQLGWGGSSRPDFTCKSTEETEAWFIDSFEEWRKAKNLSNFILLGHSFGGYVAAKYALKHPEHVQQLILVGPAGFSSETEHSSEWLTKFRATWKGMLMNRLWESNFTPQRVIRGLGPWGPGLVQRYTSARFGTSSTGELLTDEESALMTDYMYHTLAAKASGELCLKYIFSFGAFARKPLLQCASDWKVPTTFIYGQQDWMNYQGAQQARKDMKVPCEIIRVPQGGHFVFIDNPSGFHSAVFYACRNLLSVNGEEGFTFPDGLISA

SEQ ID NO: 5696 - protein, 217 aa, Zea mays
  VARIANT 1: note = Ancestral polymorphism is V, Derived polymorphism is M
  VARIANT 20: note = Ancestral polymorphism is L, Derived polymorphism is R
  VARIANT 25: note = Ancestral polymorphism is R, Derived polymorphism is C
  VARIANT 57: note = Ancestral polymorphism is R, Derived polymorphism is C
  VARIANT 62: note = Ancestral polymorphism is S, Derived polymorphism is F
  VARIANT 74..217: note = Derived polymorphism lacks residues 74 to 217
  VARIANT 75..217: note = Derived polymorphism lacks residues 75 to 217
  VARIANT 94: note = Ancestral polymorphism is G, Derived polymorphism is D
  VARIANT 107: note = Ancestral polymorphism is A, Derived polymorphism is T
MARLVTHVSIALAAIAALSLLYLLRPTSIYCFPASHPLALTISHTPFPSTSCDATSCRVVPSNHRLAKLCASPCWRYHATSLSTSMFLPLYGIDILVAPSRVLCLAASVGHTVDDFHAAGTRDTTWDLIDFPLLVHHVDPHDLPFSDSAFDLVFSDDLSVTSDLLFPSRLAREAEHVVRRGGGIALMLDREVEDVVVATLFKGSRVVDVKDVILDGS

SEQ ID NO: 5697 - protein, 479 aa, Zea mays
  VARIANT 19: note = Ancestral polymorphism is P, Derived polymorphism is L
MDEDWSTDPAHRRRRLLLPTSCQTQTQNPPQTQPPLPMDLASQYNRRFAPSLFLPPMAPRLASSSGFSVFSNYQSPPTLVPTAAGAGSHLARSLPKLPLFSMDSLGLLPYSTNPAAGAAVPRSLSSPGGSEQQVPSASGLPPRGAGHRRSRSDFLVGFSRPNQLSLPMTPAAGEYRSREASVLEELFRSYRDPNLSSSGDNNSERNDHLGRQLTGQGAWSPGDSSDNDAESWAASGSAAAGTSASHSHTRHCRSLSVDSIMGNLNFGGLGQVSLRLPPPSPVAGAGGSLSRAGSGASGGAVATASSQPANGEFSESEMKKIMANDRLAELALVDPRRVKRILANRISAAKSKERKVKYMGELERKVRVLQMETSTLSSKAASSQRECEALRILNNEMKIRLQAMEQQAQLKDALNEALTAEVQRLKQIAGEASDPHVPNMSRKIVEQQLQKQPSEAQLAEQQQPQESEEFKAQQKQWNH

SEQ ID NO: 5698 - protein, 178 aa, Zea mays
  VARIANT 118: note = Ancestral polymorphism is A, Derived polymorphism is D
  VARIANT 104: note = Ancestral polymorphism is A, Derived polymorphism is T
  VARIANT 21: note = Ancestral polymorphism is K, Derived polymorphism is Q
MRRARQCVHAPPNKKPKATTQALRRGEARRDLSLYIALKPLEHFISKLSRRALKNLARSRPPTPSAVHSNMCSGSWFWSSSGSGKEHPSLVVVNLERQLKKTLAVRRRRRLRLRRLRDGGAEAMEMVNLKLYLENRCIIAENERLRERASALRRENLALLQNLSSRTAAVPEPGAGAA

SEQ ID NO: 5699 - protein, 485 aa, Zea mays
  VARIANT 397: note = Ancestral polymorphism is R, Derived polymorphism is W
MASPLLSLATAALAVAVLISTTEAWRATPTPLPVLPIPSAAQLKWQRREVIMFFHFGMNTFTDSEWGTGWEDPSLFYPARLDATQWMDAARAAGASLAILVAKHHDGFCVWPSEYTAHSVRASPWRGGRGDVVREFVDAARARGVDTGLYLSPWDRHDERYGQEVAYNEYYESQLHELLTGYGSVSEIWFDGAKGKDATNMTYHFQEWFQTVKQLQPSINIFSAVGPDVRWVGDETGEAGTTCWSTVNRSMITIGEASDEKYLNEGDPRGSDWVPPECDVSIRPGWFWHKSETAKPLRQLLEIYYNSVGRNCVLLLNVPPNSTGLVEDADMARLREFGAAVATIFGTDLAAGSEARASSVRGAGFAARNVLDGREDTYWAPTAEDGRRDVYWIELRRPPGAQARPFNVVRIQEHVALGQRVERHAVYVDGAPVAYGTTVGHKRLHRLPCPVAGGTVRVWITARRGPPLLSAVGLHYDPFVAAATM

SEQ ID NO: 5700 - protein, 276 aa, Zea mays
  VARIANT 124..276: note = Derived polymorphism lacks residues 124 to 276
MANKRQRDARKRFREANPDLFPPQTAPSADGTKNKSKKKKNKSMFKKANKGGTGRFKHPLRVPGMRPGERCFICKSTDHVAKACPEKALWDKKKICLLCRERGHSLKNCPDKSEGNLMKFCYNCGESGHSLSKCPKPIENGGTNFASCFICNQQGHLSKNCPENKHGIYPKGGCCKVCGEVTHLARHCPNKGRQDLISSRDDDVNMEEHSQECPAVHHGGDDLEDDFVNEEEPKPAKSKKAKQSGSRPATGTGNDVKSASAKTKAKQAPKVVKFFG

SEQ ID NO: 5701 - protein, 330 aa, Zea mays
  VARIANT 117: note = Ancestral polymorphism is L, Derived polymorphism is Q
MESQAPGRGEEGTKALYLAPEVIGNGTAAGAVAVDAMVSVEAGGSGLPKPEPVPVEFLGSGGLQLSKPRPAPRYRDRHTKVEGRGRRIRMAAACAARVARLTRDLGHKSDGETIRWLLQQTEPSIIAATGTGTVPAIAITGTDGVLRLPAEPASEDASGEQQEPAPKRRRKLQPTRAAVGPAVPAPAAYYPVVADPRLQANGGGAISVSSGLAPASAPAAPAGAIPFIAIAAPRPSAAGDGKQMIPPAAMWMVPQQAGAGNQPTHYWAFTTNSEFLSYQQQSVFQQQVVYDGEQLVGDGESQGQQTGGYQHGDGEGVDEEIAVTDSSSEE

SEQ ID NO: 5702 - protein, 363 aa, Zea mays
  VARIANT 55: note = Ancestral polymorphism is P, Derived polymorphism is S
MASAVVVDAGDAPEPTVRNLLDQESLKWVFVGGKGGVGKTTCSSILSVLLAGVRSSVLVISTDPAHNLSDAFQQRFTKFPTLVRGFTNLYAMEIDPKVENDDLSNEGMEGFLSELTNAIPGVDEAMSFAEMLKLVQTMDYSVVVFDTAPTGHTLRLLQFPATLEKGLEKMMELKNRFGGLLNQASRLFGLGDELNEDAMLGKLEGMKDVIEQVNRQFKDPDLTTFVCVCIPEFLSLYETERLVQELAKFEIDSHNIIINQVIFDEEAVESKLLKARMKMQQKYIDQFHMLYDDFNITKLPLLSEEVCGVQALQNFSQHFLTPYKSTLKRGTVEELEQRITILKSALQEAETELDRVRKGKQSV

SEQ ID NO: 5703 - protein, 673 aa, Zea mays
  VARIANT 102..673: note = Derived polymorphism lacks residues 102 to 673
MGVGGSFWDLLKPCARHEGAGYLRGRRVAVDLSFWVVSHTTAIRARLPRARSPHLRTTFFRTLSLFAKVRCHWRFNLAGANDCIARFFGSRIHLFPLGLSLQFLQMGAFPVFVVDGEPSPLKSQARAARFFRGSGMDLAALPVTEAESSAAAAPVKKRNAAFTRAVEECVELLEYLGMPVLRANGEAEALCAQLNSEGHVDACITADSDAFLYGAKTVVKVLRSNCKEPFECYHIADIESGLGLKRKQMVAMALLIGSDHDLHGVPGFGLETALRFVQLFDEDEILDKLHEIGRGVYPFVEGFDNAHIDDLPSSSTKSPVVKLPHCSQCGHPGSKKNHSKDGCNYCLVDSLENCMEKPTGFKCECPSCDEARELKEQRRHENWQIKVCKRIAAETNFPNDEIIKLYLSDNNLVEEKGVPLLTWNKPDVEALVDLLSYKQNWEPSYIRQSMLPMLSTIYLREVASSPSTPLLLCDQYEFDSIQRIKIKHGHPYYLVKWKRATRGMNSIMSSNKPVMEGETSSEVVLLDEDDDLDAVVCESPELLDEPDVPQVLIDDGCCFVLTDEDIQLVGAAFPKETARFQEEQRLKEARSRSRKSKSSLADSACKTPEGPRPSGVQLSITEFYRSKKAQNVESGKKPAGEGHAARGGSRKSSDRDLDKSLPKSVRRRLLFDC

SEQ ID NO: 5704 - protein, 230 aa, Zea mays
  VARIANT 130: note = Ancestral polymorphism is L, Derived polymorphism is H
  VARIANT 64: note = Ancestral polymorphism is S, Derived polymorphism is R
MCPIKRETTSAESGSPCSSSTSTSSSSEHHQTAWASPPKKRPAGRTKFRETRHPVFRGVRRRGRAGRWVCEVRVPGRRGCRLWLGTFDTAEAAARAHDAAMLAVAAGAARLNFADSAWLLAVPTASYASLADVRRAVAEAVESFLRRREEEEGDALSAASSTSPNDKDGDESSSATTTDDDSPFELDMFGGMSWDLYYANLAQAMLVEPPPIVPALCDDGVASELPLWSY

SEQ ID NO: 5705 - protein, 448 aa, Zea mays
  VARIANT 152..448: note = Derived polymorphism lacks residues 152 to 448
  VARIANT 135..448: note = Derived polymorphism lacks residues 135 to 448
MRSQRREWEGRMNVAMSNSVTTAIRDSIRDTAIGKIRNTEKADRATVEQAIDPRTRMVLFKMLNRGVFNNINGCISTGKEANVYHATKTDGQELAIKVYKTSVLVFKDRDRYVQGDYRFRHGYCKHNPRKMVKTWAEKEMRNLLRVRAAGIRCPAPLLLRLHVLVMEFIGKGGWAAPRLKDAVLSDDKLHESYFEGVCCISAYLFDIKHKNKKKSCKFLSEDFLILLTAPFQIITTMRTLYQTCKLVHGDLSEYNILYFEGHLYIIDVSQSVDLDHPSALDFLKEDCLHVSAQQKILENGGAVPNDDEITPTVMVQTLDYVKQCEADIVNMSIMQRSSSGYEPTADKLYDQPLLGFVRTKNTHTEKEQGQPARNLVEVEEDESESCSSSDEDDSWHEDDPKVGPEERKAARKENKKKVKEEKREARKTKIPKAEKKKRKKMAKAKCKR

SEQ ID NO: 5706 - protein, 349 aa, Zea mays
  VARIANT 315..349: note = Derived polymorphism lacks residues 315 to 349
  VARIANT 311..349: note = Derived polymorphism lacks residues 311 to 349
  VARIANT 302..349: note = Derived polymorphism lacks residues 302 to 349
  VARIANT 297..349: note = Derived polymorphism lacks residues 297 to 349
  VARIANT 79..349: note = Derived polymorphism lacks residues 79 to 349
  VARIANT 73: note = Ancestral polymorphism is E, Derived polymorphism is K
MMRARPKGTFADAMRESSPPPAAASAAAVKEDEWEVRPGGMLVQRRSPDADAPAGAPVPTIRVKVKFNGVYHEIYINSQASFGKYSTSRMHRSRPAIPRAAPASDRDGGGGAPHPAGELKKMLSARTGLHPEDQKLVYKDKERDSKAFLDMAGVKDRSKMVLLEDPAAQAKRLLEQRRADKAERAAKSISRISLDVDKLVSALETIVVSKGGKVADADVVALTEALMNELVKLDSVAAEGEVKVQRRMQEKRVQKHVETLDAIRAKNAAAQAKANGSMDVDGHAKARAPHRPPPVSQRRNFQQPSPAPPAQSWESFDLLSSVPSTSSAAVTTTSPAVASPIPRFDWELF

SEQ ID NO: 5707 - protein, 303 aa, Zea mays
  VARIANT 151..303: note = Derived polymorphism lacks residues 151 to 303
  VARIANT 173: note = Ancestral polymorphism is G, Derived polymorphism is E
MRGANRRRTGASSSASIASTSTKREREEESASAADESSDGEVSFYSSDLLARIRGALTRVRWLPQEVPSSSASESESESGGEDAERERELERALADVPFGELQRARADGSLARATSAAKAAAEKKARRVSKRRPMEISTKVRPPKLREVIQVPKKVGRDPRFEPVYGSVDKEGFRKRYNFLFDEDFPAEKERLQKMIKKSKDPDAIGEMKSRVTWIDKQVKSHPPKNVESEILREHIKKEREAAKAGKRPYYLKKSELRERKLMNKYNELKEAGKLDAFMEKRRKKNASKDHRFMPYRRSGDA

SEQ ID NO: 5708 - protein, 327 aa, Zea mays
  VARIANT 149..327: note = Derived polymorphism lacks residues 149 to 327
MASDGDGKGRVATAPGAGGYGYGYGYAGFEGEEDRKWWPWLVPTVIVACIAVFVVEMYENNCPKNRSQLGGDCVAGFLRRFSFQPLRENPLLGPSSSTLEKMGALDWNKIVHQNQGWRLISCIWLHAGLIHLVVNMLSLLFIGIRLEQQFGFVRIGAIYLLSGFGGSVLSALFLRNNYISVGASGALFGLLGSMLSELLMNWTIYSNKAAAIITLLFIIALNLAIGILPHADNFAHIGGFATGFLLGFVLLARPQFGWMEHHELPQTNQPPKYKAYQYILWVVALVLLLVGFVISLVMLFKGKNGNDGCHWCHYLNCVPTSKWKCNT

SEQ ID NO: 5709 - protein, 350 aa, Zea mays
  VARIANT 227..350: note = Derived polymorphism lacks residues 227 to 350
  VARIANT 136: note = Ancestral polymorphism is A, Derived polymorphism is T
  VARIANT 135..350: note = Derived polymorphism lacks residues 135 to 350
  VARIANT 128: note = Ancestral polymorphism is L, Derived polymorphism is P
  VARIANT 125: note = Ancestral polymorphism is V, Derived polymorphism is A
MAATASFLSHLLLAPKRRPKTQPNPSHLPSQRITDRLPCRGRRSSVAVSAAASDLLSPAPSLKSRLAAGDTLYGLFLLSFSPTLAELAALAGYDYVVVDMEHGPGGIPEALACLRALDAARTPAVLRLPEASAVWAKKALDLGPAGLMLPAIESPEAAAEAVSHCRYPPRGVRGAAHPIVRASAYGFDDSYLSRCEDDTLVICQVETATAIAEIDAIAAVDGVDVVQMGPLDLSASMGYLWDPGNRKVRATLREAERKVLEAKKKKKAAAAASGGNAAYLGGFAMQNDPPEQLKLRGYHMVAGAVDIAMFRKAALDDVRRFREAVMEIGEEDDEDEVEKCEKENDGYWSE

SEQ ID NO: 5710 - protein, 252 aa, Zea mays
  VARIANT 122: note = Ancestral polymorphism is D, Derived polymorphism is Y
MRRRPGIAGLQNAAATRDQFRLVGENVAKVRTDVMKEQLATFRSQLEEFARKHKSDIRKNPVFRQQFHEMCAKVGVDPLASNKGVWAELLGIGDFYYELGVQIVDICIATRSHNGGLIDLLDLRKLLGQKRKATLESLSEDDCLRAISKLKVLGSGFEVISVGRRKLVRSVPTELNKDHSGILGLAQADGYVTVEQVEKEFSWSTGRAIDALETLLKEGLAMIDDGHRDGKRRYWFPCVTVSSDTAAVEVKS

SEQ ID NO: 5711 - protein, 118 aa, Zea mays
  VARIANT 71: note = Ancestral polymorphism is R, Derived polymorphism is M
  VARIANT 92: note = Ancestral polymorphism is T, Derived polymorphism is S
  VARIANT 97: note = Ancestral polymorphism is A, Derived polymorphism is T
MGRSSPNDKLLLVKALRARGHVVAVTGDGTNDAPALHETDIGLSMGIQGTEVAKESSDIIILDDNFASVVRVVRWGRLVYANIQKFIQFQLTVNVAALIINVVAAVSSGNVPLNAVQV

SEQ ID NO: 5712 - protein, 575 aa, Zea mays
  VARIANT 139..575: note = Derived polymorphism lacks residues 139 to 575
  VARIANT 370: note = Ancestral polymorphism is A, Derived polymorphism is V
  VARIANT 371: note = Ancestral polymorphism is A, Derived polymorphism is S
MKALRRSSTSSSPSSSSSPTAASSPPSSSWIHIRSLLVAAASSSSSSSSSAPAASGSAVAVVSAAAAAPSSSSPASSSPHSDRGGIKSPWSRRKRKRALSREQWESLFSANGKLRDGGKKFLKKVRSGGIEPSIRSEVWPFLLGVYDLNSSEEERNSVKIKKRKEYEKLRRQCQQILNGYKGNSLKAITEVNNEVCSSLEGTADGSESPCFEDANAIRAPVSLEELKPEQNEVDQPENIPCAVVECIEEDADELAYAYPCIAESESSDSESSDEDDPGRMSVSGEENCDPDPKFIRSTSFKADLFRSSRTPEDFATWQRIIRLDAIRSNSEWIMFSGNQAEVPKERALQSAASVGLKDYDHLEPSMIYHAARLVGLLEAYAVYDPEIGYCQGMSDLLSPIIAVMEEDDEAFWCFVGFMRKARHNFRLDEVGIRRQLKIVSQIIKRKDSHLYRHLQKLQAEDCFFVYRMVVVLFRRELTFEQTVCLWEVMWADQAAIRAGIGRSTWGRIRLRAPPTDDLLLYAIAACVLQRRKLIIEKYSSMDEILRECNSMAGQLDVWRLLDDAHDLVVNLHDKI

SEQ ID NO: 5713 - protein, 88 aa, Zea mays
  VARIANT 13: note = Ancestral polymorphism is F, Derived polymorphism is S
MATRLAAAAAATFMRRLAPARPPVPILAAASTAEAVTCGRGDKKTKRGKRFKGSYGNARPKREKKIERIKDRVEVPRSTPWPLPFKLI

SEQ ID NO: 5714 - protein, 506 aa, Zea mays
  VARIANT 136: note = Ancestral polymorphism is R, Derived polymorphism is W
  VARIANT 234: note = Ancestral polymorphism is K, Derived polymorphism is M
  VARIANT 289: note = Ancestral polymorphism is I, Derived polymorphism is T
  VARIANT 395..506: note = Derived polymorphism lacks residues 395 to 506
MPPYLLAAGALIVFLYIIKNRRSRKLPPSPPSLPLIGHLHLIGRVAHRSLLELQVRYGGGGGLLFLQLGRRPTLVVSTAAAAADLFKNHDLAFASRPRSVGGDKLMYECSNVSFAPYGENWRRGKKIAVVHLLSPRRVESFAPVRAAEVAALVARTRRTAEAGEAVELRELLNGYANAVATRAATGAAGATAEKLKELMGNSEPEALMAGFQPEDVLPDAPARFVRWVTGLNKKLEDLVESWDKFLSDIVAAHKEKGGGDAEEDEDFLDVLLRLREEGADGLELTDDRIKATVKDMIAAATETSSQTLEWTMAELIANPRVMSKLQGEIARVVSADQTTIAEPDLNKMEYLRAVFKEVLRLHPPAPLLVPHESTTPAVVQGYEIPAKTALFVNVWAIGRDPAVWDAPDEFRPERFVGGSPSVDFRGTDYQLIPFGAGRRICPGINFALPVLELALVSLLHHFEWELPAGVGKADLDVGEAPGMTTPRRIPLVLVPKCRTLVQPALQ

SEQ ID NO: 5715 - protein, 253 aa, Zea mays
  VARIANT 101: note = Ancestral polymorphism is G, Derived polymorphism is R
  VARIANT 80: note = Ancestral polymorphism is P, Derived polymorphism is T
  VARIANT 77: note = Ancestral polymorphism is G, Derived polymorphism is V
  VARIANT 65: note = Ancestral polymorphism is P, Derived polymorphism is L
MALASTSATAPAAVLKTPFLGARRALANAAAPKPAPRRALLAVAAAAAKKSWIPAFKSDAEFINPPWLDGSLPGDFGFDPLGLGKDPAFLKWYREAELIHGRWAMAAVLGIFVGQAWSGIPWFEAGADPGAIAPFSFGSLLGTQLLLMGWVESKRWVDFFNPDSQSVEWATPWSRTAENFANFTGDQGYPGGKFFDPLGLAGTVKDGVYVPDVEKLERLKLAEIKHARIAMLAMLVFYFEAGQGKTPLGALGL

SEQ ID NO: 5716 - protein, 505 aa, Zea mays
  VARIANT 2: note = Ancestral polymorphism is P, Derived polymorphism is L
  VARIANT 3: note = Ancestral polymorphism is P, Derived polymorphism is L
  VARIANT 9: note = Ancestral polymorphism is G, Derived polymorphism is D
  VARIANT 394..505: note = Derived polymorphism lacks residues 394 to 505
  VARIANT 440..505: note = Derived polymorphism lacks residues 440 to 505
MPLYLLAAGALIVFLYVINNRRSSKLPPSPPSLPLIGHLHLIGRLAHRSLLELQLRYGGGGGLLFLQLGRRPTLVVSTAAVAADLFKNHDLAFASRPRSVGGDKLMYGCSNVSFAPYGENWRRGKKIAVVHLLSPRRVESFAPVRVAEVAALVARTRRTAEAGEAVEMRELLYGYTNAVVTRAATGAAGATAEKLKQLMGNSAALMAGFQPEDVLPDAPARFVRWATGLDKKIEDMAEAWDKFLSDIVAAHKEKGCGDAGEEAEDFLDVLLRLREEGADGLELTDDRIKATIEDMIAAATETSSQTLEWTMAELIANPRVMSKLQGEIARVVSADQTTIAEPDLNKMEYLRAVFKEVLRLHPPAPLLVPHESTTPAVVQGYEIPAKTALFVNVWAIGRDPAVWDAPDEFRPERFVGGSPSVDFRGTDYQFIPFGAGRRICPGINFALPVLELALVSLLHHFEWELPAGMRLEDLDMGEAPGLTTPRRIPLVLVPKRRTLVQTLLQ

SEQ ID NO: 5717 - protein, 334 aa, Zea mays
  VARIANT 254: note = Ancestral polymorphism is A, Derived polymorphism is T
  VARIANT 199: note = Ancestral polymorphism is N, Derived polymorphism is H
MAPLSHTAPAYIPTKRGAPWIPPPPASGLPTYISWMPTPPPRFLPWPHLAPPPPPPLPCWSVPQVPCATATGMVQRPLACVASAAAGNANEAATNQPSPRSVLAVTSPPISPTTSLPTSFPYRLAPPAPPPTAGHAAPTPPPTAKRSVAARPRHGRRSSRVRRTRSAPKPRRLFDPTSELTSFMIRNIPNDFTRARLIHILDQHCSIENEKIAPGGVRSQYDFLYLVVDFRSRANKGYAFVNMTSPEAARRLWTHLHGHLWAFKSSAKTCAVDYADLQGQDNLVSHFSGSRFDCDTDEYLPVRFEPPRDGTRPAEGAMNVVGRRITRSRPSDEN

SEQ ID NO: 5718 - protein, 386 aa, Zea mays
  VARIANT 120..386: note = Derived polymorphism lacks residues 120 to 386
  VARIANT 51: note = Ancestral polymorphism is A, Derived polymorphism is S
  VARIANT 24: note = Ancestral polymorphism is E, Derived polymorphism is D
MPKTLRAPPTPTTLTRPLPRARREVKKPLVKKPKVTVAEVVILIDAKNLVAHLLEILTHDDGLQIQSTSDEMDLSATCGQPAETTCIGAAIMNWRPQINGLLGNIDANTGDPQVGWDTNQFMIDIAEATLVMSSVVKNGGLAHGGFNFDAELGSRYLRVERCRVTATSNKKRSSSKIALVTWFCLRSIGTARIIRRLVCVDPPPFCRAVATPPLQFSVSHGSAFGQSVPSVSSDGSCASTRPSFCRVVATPPLQFFVSHASRVLSPPCRRLRSLSTPPPPFPIRTIAVHAGRLRSPSAPSPSTLVASVPHPHQRFWSRPTTVKQSRAGIAAGAPPRRGGGVAGQEMLSRREKATNFKPDYDIDIHMKVLAMSGQESSILTGYKLKC

SEQ ID NO: 5719 - protein, 684 aa, Zea mays
  VARIANT 539..684: note = Derived polymorphism lacks residues 539 to 684
  VARIANT 346: note = Ancestral polymorphism is R, Derived polymorphism is C
  VARIANT 216..684: note = Derived polymorphism lacks residues 216 to 684
MPTPKQRLPCSTFGRGGGGRRAACGSAVLPPVVVLVFLFVVAPSLFFVVRNGGRGYGHGHVAVASDPNGKNDDQEPTAMKNLKSFLPKEVFDAITARQQESDTLSLDFFRNHASPSWKTNDLVTEKSMDVDDKAKAEISLPEHDLPTNRSPKDPDEHQADNAAKVARRKLRETRREKRAMDLVHKDDEAHVKQENAAIERSKAVDSAVLGKYSIWRKENENSDSTVRLMRDQIIMARVYSALAKSKNKSDLYQKLQTRIKESQRAVGDASADAGLHHSAPEKIIAMGQVLSKAREEVYNCMAITQKLRAMLQSADEQVRCLKKQSTFLSQLAAKTIPNSIHCLSMRLTIDYYLLLLEERKFPRSENLENPNLYHYALFSDNVLAASVVVNSTIMNAKKPEKHVFHLVTDKLNFGAMNMWFLLNPPGKATIHVENVDEFKWLNSSYCPVLRQLESAAMKEYYFKADRPTSLSAGSSNLKYRNPKYLSMLNHLRFYLPEVYPKVDKILFLDDDIVVQKDLTGLWDVNLNGKVNGAVETCGESFHRFDKYLNFSNPHIARNFDPNACGWAYGMNIFDLKEWKKKDITGIYHKWQNMNEGRVLWKLGTLPPGLLTFYKLTHPLDKSWHVLGLGYNPSVDRSEIDSAAVVHYNGNMKPWLELAMTKYRPYWTRYIKYDHPYIRGCNLRE

SEQ ID NO: 5720 - protein, 284 aa, Zea mays
  VARIANT 216: note = Ancestral polymorphism is L, Derived polymorphism is R
  VARIANT 163: note = Ancestral polymorphism is Y, Derived polymorphism is H
MAAAASTMSLLPISQPRKQQQQGAGAVVVFQRRPWDARRRRYVVPTARLFGPAIFEASKLKVLFLGVDEGEGSSKHLHAHHPAPAPALLPRTYTLTHSDVTASLTLAVSHTINRAQLQGWYNRLQRDEVVAEWKKVRGRMSLHVHCHISGGHLLLDLIAGLRYYIFRKELPVVLEAFVHGDGDLFSRHPELEEATVWVYFHSNLARFNRVECWGPLRDAAAPAPAEDDSTAPAAASIAMEGQMPVGEWPHRCPQQCDCCFPPHSLIPWPNEQDMATAAGQVRQQ

SEQ ID NO: 5721 - protein, 157 aa, Zea mays
  VARIANT 113: note = Ancestral polymorphism is T, Derived polymorphism is I
  VARIANT 106: note = Ancestral polymorphism is G, Derived polymorphism is R
  VARIANT 99: note = Ancestral polymorphism is I, Derived polymorphism is T
  VARIANT 84: note = Ancestral polymorphism is D, Derived polymorphism is Y
  VARIANT 78: note = Ancestral polymorphism is A, Derived polymorphism is V
  VARIANT 70: note = Ancestral polymorphism is L, Derived polymorphism is F
  VARIANT 59: note = Ancestral polymorphism is A, Derived polymorphism is T
  VARIANT 53: note = Ancestral polymorphism is Q, Derived polymorphism is K
  VARIANT 46: note = Ancestral polymorphism is L, Derived polymorphism is F
  VARIANT 44: note = Ancestral polymorphism is R, Derived polymorphism is S
  VARIANT 40: note = Ancestral polymorphism is G, Derived polymorphism is D
  VARIANT 36..157: note = Derived polymorphism lacks residues 36 to 157
  VARIANT 19: note = Ancestral polymorphism is A, Derived polymorphism is V
  VARIANT 13: note = Ancestral polymorphism is G, Derived polymorphism is R
  VARIANT 7: note = Ancestral polymorphism is G, Derived polymorphism is D
MDASGAGSKGKKGAAGRKAGGPRKKSVTRSVKAGLQFPVGRIGRYLKKGRYAQRVGTGAPVYLAAVLEYLAAEVLELAGNAAKDNKKTRIIPRHVLLAIRNDEELGKLLAGVTIAHGGVLPNIHSVLLPKKAAEKAASGGSKEPKSPKKGAKSPKKA

SEQ ID NO: 5722 - protein, 1012 aa, Zea mays
  VARIANT 558..1012: note = Derived polymorphism lacks residues 558 to 1012
  VARIANT 537..1012: note = Derived polymorphism lacks residues 537 to 1012
  VARIANT 523..1012: note = Derived polymorphism lacks residues 523 to 1012
  VARIANT 478..1012: note = Derived polymorphism lacks residues 478 to 1012
  VARIANT 284..1012: note = Derived polymorphism lacks residues 284 to 1012
  VARIANT 238..1012: note = Derived polymorphism lacks residues 238 to 1012
  VARIANT 229..1012: note = Derived polymorphism lacks residues 229 to 1012
  VARIANT 226..1012: note = Derived polymorphism lacks residues 226 to 1012
  VARIANT 166..1012: note = Derived polymorphism lacks residues 166 to 1012
  VARIANT 153..1012: note = Derived polymorphism lacks residues 153 to 1012
  VARIANT 119..1012: note = Derived polymorphism lacks residues 119 to 1012
MALRKAFEKVVVKRLMTDIPFNVLLSGGLDSSLVAAVVVRHLAGTEAARRWGTKLHSFYVGLEGSPNLKAAREDDIDAIEDVIYHTETYDVTTIRASTPMFLMSRKIKSLGVKMVISSEGSDELFGGYLYFHKAPNKEELHRETCRKVKALHQYDCLRANKATSAWGLEARVPFLDKEFINAAMSIDPEWKMVRPDLGRIDKWVLRKAFDDEEHPFLPKVHILYRQKEQFSDGVGYSWIDGLKAHAASNIVLIFYLVCNFVGVIVCLSSVKLVEQELWQKEDKGLIGVLPVRDSEATAIGSLLSPGVGSDSGGGGSKAVGSAGESSKQHLKNGKEPIQWHTKGVAARALHLSRGVEKPSGRVTYIVVLEELEHAEQDADLIALSRQFKATAMELISVLEQKQKTVGRTKVLLDTVPVYRLADIFVASFEISFEEQLSMLDSVDLKVRLSKANELVDRHLQSILVAEKITQKVEGQLSKSQKEFLLRQQMRAIKEELGDNDDEEDDVAALERKMQNAGMPANIWKLAQREMRRLRKMQPQQPGYSSSRAYLELLADLPWQKVSEERELDLRAAKESLDQDHYGLTKVKQRIIEYLAVRKLKPDARGPVLCFVGPPGVGKTSLASSIAKALNRKFLRISLGGVKDEADIRGHRRTYIGSMPGRLIDGLKRVSVSNPVMLLDEIDKTGSDVRDRMEVIELPGYTPEEKLKIAMKHLIPRVLEQHGLSTANLQIPEAMVKLIIERYTREAGVRNLERNLAALARAAAVKVAEQVKTLRLGKEIQPITTTLLDSRLADGGEVEMEVIPMGHDMSNTYENPSPMTVDEAMLEKVLGPPRFDDTEAADRVASPGVSVGLVWTSVGGEVQFVEATAMVRARAADLNLSPASDINLLESRDIHIHFPAGAVPKDGPSAGVTLVTALVSLFSNRKVRADTAMTGEMTLRGIVLPVGGVKDKVLAAHRYGIKRVILPERNLKDLSEVPSPILSGMEILLVKHIEDVLDHAFEGGCPLKSRSKL

SEQ ID NO: 5723 - protein, 149 aa, Zea mays
  VARIANT 43: note = Ancestral polymorphism is Q, Derived polymorphism is H
  VARIANT 41: note = Ancestral polymorphism is W, Derived polymorphism is R
  VARIANT 29: note = Ancestral polymorphism is L, Derived polymorphism is M
MAVSFVARLLTLALGYACPAYDCYKTLELNAPPQVERLRFWCQYWILLAFLTALEGFAEWALPWYGEAKLALVGARHVYDDYLRPFLTAHEADIDRGLAELRARAADATASHLQAAVALGRACLSEVVRRVSPQLLQATGSAGPAAVGQ

SEQ ID NO: 5724 - protein, 421 aa, Zea mays
  VARIANT 94..421: note = Derived polymorphism lacks residues 94 to 421
MSDSYCPDCKKHTEVAFDHSAGDTVCTECGLVLEAHSVDETSEWRTFANESNDNDPVRVGGPSNPLLTDGGLSTVIAKPNGAQGDFLSSSLGRWQNRGSNPDRSLILAFRTIANMADRLGLVATIKVMDLMVIVHYVKLNANFVYVATWLLCLLVSASSQAMAKRQVADCLPFRITLLHRKPNIHSDLWFSFPFWMPKTVGTKRRGENEEDHKKLSVPPDLLFHCCHRSKNHRNLDRANEIFKKIEDLKSIRGRNQDAILAACLYIACRQEDRPRTVKEICSVANGATKKEIGRAKEFIVKQLEVEMGQSMEMGTIHAGDFLRRFCSTLGMTNQAVNAAKEAVQRSEELDIRRSPISIAAAVIYMITQLSEDKKPLKDISLATGVAEGTIRNSYKDLYPYASRLIPNTYAKEEDLKNLCTP

SEQ ID NO: 5725 - protein, 298 aa, Zea mays
  VARIANT 114..298: note = Derived polymorphism lacks residues 114 to 298
  VARIANT 93..298: note = Derived polymorphism lacks residues 93 to 298
MAAAPSSLASSHLSPIAAVSTPAVPHQLRIGCSRRRAGRIVAMAGSGKFFVGGNWKCNGTKDSISKLVSELNAATLETDVDVVVAPPFIYIDQVKNSLTGRIEVSAQNVWIGKGGAYTGEISAEQLVDIGCQWVILGHSERRHIIGENDEFIGKKAAYALSQNVKVIACIGELLEEREAGKTFDVCFRQMKAFADSISNWADVVIAYEPVWAIGTGKVATPEQAQEVHAAVRNWLKTNISPDVASSTRIIYGGSVNAANCAELAKKEDIDGFLVGGASLKGPDFATIINSVTAKKVAA

SEQ ID NO: 5726 - protein, 185 aa, Zea mays
  VARIANT 59: note = Ancestral polymorphism is R, Derived polymorphism is Q
  VARIANT 68: note = Ancestral polymorphism is R, Derived polymorphism is Q
  VARIANT 80: note = Ancestral polymorphism is R, Derived polymorphism is W
  VARIANT 81: note = Ancestral polymorphism is R, Derived polymorphism is P
  VARIANT 85: note = Ancestral polymorphism is R, Derived polymorphism is T
MDGSSWWYGNVRTPNPVMSQAASISASPGLTISTNHALESESDSDSESLYEVEGVPYERGNRSIETKRIRRMVSNRESARRSRRRKHAQLSDLESQVKMAEDMVARSVVSCGLGDLGLAPYVNSRKMCQALNVLTGLDLLGSDAFSGPTAGTRVQKSPVQSTASLESLDNRKSNEVTSCAADICP

SEQ ID NO: 5727 - protein, 332 aa, Zea mays
  VARIANT 254: note = Ancestral polymorphism is S, Derived polymorphism is N
MSGFGDGYVGTAQDAVKIRRLEKQREAERRKIEELKNKSADGQPGLLQFGSSTSEILETAFKKETVGLVTREQYVEKRVNIRTKIEEEEKEKLQKLQQEEEELQMQKRKKRRVKSDPRLSFCDDIENGSDEDDFENQETKKNGPAKLGKDPTVETSFLPDREREAEEQAERERLKKQWSHEQELIKNEPLSITYSYWDGTGHRRAIQVRKGDTIGEFLRAVQQQLAPEFREVRTTSVENLLYVKEDLIIPHQHSFYELIINKARGKSGPLFHFDVHEDVRTIADATKEKDESHAGKVVERHWYEKNKHIFPASRWEIYDPTKKWERYTIHGD

SEQ ID NO: 5728 - protein, 134 aa, Zea mays
  VARIANT 6: note = Ancestral polymorphism is P, Derived polymorphism is S
  VARIANT 13: note = Ancestral polymorphism is P, Derived polymorphism is L
  VARIANT 44: note = Ancestral polymorphism is F, Derived polymorphism is I
  VARIANT 60: note = Ancestral polymorphism is R, Derived polymorphism is Q
  VARIANT 71: note = Ancestral polymorphism is G, Derived polymorphism is S
  VARIANT 73: note = Ancestral polymorphism is E, Derived polymorphism is G
  VARIANT 79: note = Ancestral polymorphism is F, Derived polymorphism is S
  VARIANT 84: note = Ancestral polymorphism is P, Derived polymorphism is Q
  VARIANT 109: note = Ancestral polymorphism is G, Derived polymorphism is R
  VARIANT 130..134: note = Derived polymorphism lacks residues 130 to 134
MKLLHPDLGVELPERSYGADCRLYVPENPKNKFINIYETLFDEFVVAHILGWFGKAVMIRNQLLLWVLSIGFELMELTFRHMLPNFNECWWDSIILDILICNWFGIWAGMHTVRYFDGKTYEWVGLSRQRSIMG

SEQ ID NO: 5729 - protein, 290 aa, Zea mays
  VARIANT 20: note = Ancestral polymorphism is D, Derived polymorphism is V
  VARIANT 51..290: note = Derived polymorphism lacks residues 51 to 290
  VARIANT 64..290: note = Derived polymorphism lacks residues 64 to 290
  VARIANT 66..290: note = Derived polymorphism lacks residues 66 to 290
  VARIANT 76: note = Ancestral polymorphism is D, Derived polymorphism is A
  VARIANT 83: note = Ancestral polymorphism is C, Derived polymorphism is Y
  VARIANT 85: note = Ancestral polymorphism is G, Derived polymorphism is S
  VARIANT 107..290: note = Derived polymorphism lacks residues 107 to 290
  VARIANT 110: note = Ancestral polymorphism is T, Derived polymorphism is I
  VARIANT 136: note = Ancestral polymorphism is P, Derived polymorphism is H
  VARIANT 143: note = Ancestral polymorphism is D, Derived polymorphism is Y
  VARIANT 172: note = Ancestral polymorphism is L, Derived polymorphism is Q
  VARIANT 183: note = Ancestral polymorphism is K, Derived polymorphism is M
  VARIANT 199..290: note = Derived polymorphism lacks residues 199 to 290
  VARIANT 223..290: note = Derived polymorphism lacks residues 223 to 290
  VARIANT 238..290: note = Derived polymorphism lacks residues 238 to 290
  VARIANT 260..290: note = Derived polymorphism lacks residues 260 to 290
METIMNIGCMEIVALCGINDLSHMLLFQCCYDGVSRCAGCQGSGFKVQIRQLGPGMIQQMQHLCNECKGSGETISDKDRCPQCKGDKVVPEKKVLEVVVEKGMQNGQKITFPGEADEAPDTATGDIIFVLQQKEHPKFKRKGDDLFHKHTLTLTESLCGFQFVLAHLDNRQLLIKSNPGEVVKPGSFKTINDEGMPMYQWPFMKGKLYIHFSVEFPNSLSPEQCKALEVVLPPKPVSQYTDMELDECEETMPYDVNIEEEMRRRQQQHQEAYDEDDDVPSGGQRVQCAQQ

SEQ ID NO: 5730 - protein, 645 aa, Zea mays
  VARIANT 269..645: note = Derived polymorphism lacks residues 269 to 645
  VARIANT 447: note = Ancestral polymorphism is A, Derived polymorphism is T
MDDLKQILARPIQLAEQVIKWSDEAYTFRQECMELKAKVERLAGLLRQAARADLYERPARRIFDDTEKALDKALALVDKCRAHGLVRRVFTIIPAGSFKKMTNQLDNSVGDLSWLLRVSSSAGDDDDDLDAHIGLPPIAQNEPILFLIWEQIAVLYTGNLDARADAAASLVSLARDNDRYCKLIIEEDGVPPLLKLVKEPHLEGQENCALAIGLLGRDPECVEQMVQAGVCLAFAKVLKEGPMKVQAMLAWAVSELAANHPKCQDAFAQHNVIRLLVGHLAFETVQEHSKYAVTSKMSIHSVLMDRKNNAASAVQPDLLDAGEHAGMRYPTGHVPQGKNEIHSLVQSTMAAKPNGGSGKHSNISSTSNAGVAATKQHNASLSGTSTRGREFEDPETKAYMKANAAKALWQLAKGNAAICKNITESRALLCFAVLLEKGEGDVQYNSAMALMEICCVAEQNSDLRRSAFKPTSPAARAVVDQFLRVVEKAEYDDLLIPCIISLGCLSRTFRATETRIIGPLVKLLDEREADVSREAAIALTKFACTDNYLHVDHTKAIISAGGAKHLVQLVYFSEQVVQIASLTLACYIAHNVPDSEELAQAEILTVLEWASKQAYMVQDPVIDNLLPEAKIRLELYQSRGAKGYY

SEQ ID NO: 5731 - protein, 466 aa, Zea mays
  VARIANT 152..466: note = Derived polymorphism lacks residues 152 to 466
  VARIANT 356..466: note = Derived polymorphism lacks residues 356 to 466
MTPIVASLSLAHLVVALLLMLLALLCVDASVHDYDGERFATDGNAFVLHGGTVVVRVSTAPLRVARSSALRRSRSKDARVGDRSRGGRQPHDHGHSGHLQGRRPRRRRGHRRLRRWRAGALLHMGHGEGGEARGLHRGGAVMYRARNDNTGWPRVLAASFLPGGLDAAFPVEGVVVARTGMYTLLFVHCDASLAGGQVATAGKTIWKNSRCYLPDRMASLVPFYGAKSLALAASCCATLVIALGMMEASSWYFYLVEFNESGSAPAARRSGRPRPARSAARRRTCWCWPGHGVVQPALAGLKSARVAGLGVMFFAAAKALEVSKNADTVKRMTTKLEMYWRLNNALIIAVAVSLSWITFEVQFKSTDEYNERWRATWVIPTVCQLILFSLLYAVCLMWAPSQSAARYAYLDDEDEGEDSDMEDKRSLIRPDPLSYVDYWTISVSKDATTIILRTDSFVIGGGGKRV

SEQ ID NO: 5732 - protein, 249 aa, Zea mays
  VARIANT 24: note = Ancestral polymorphism is L, Derived polymorphism is H
  VARIANT 98: note = Ancestral polymorphism is T, Derived polymorphism is A
MARYDRAITVFSPDGHLFQVEYALEAVRKGNAAVGVRGTDTVVLGVEKKSTPKLQDSRSVRKIACLDTHIALACAGLKADARVLINRARVECQSHRLTVEDPVTVEYITRYIAGLQQKYTQSGGVRPFGLSTLIVGFDPYTDKPALYQTDPSGTFSAWKANATGRNSNSMREFLEKNYKETSGKETIKLAIRALLEVVESGGKNIEVAVMTKKDGLRELEESEIDEYVAEIEAEKAAAEAAKKGAPKNA

SEQ ID NO: 5733 - protein, 440 aa, Zea mays
  VARIANT 11: note = Ancestral polymorphism is D, Derived polymorphism is Y
MAASASSLLADAASSSCGAISPRPRLLRGAPAAAFVPSPSRHSCCSLRASPARRHRSRFVASAVPTMQPPAESRVSTVVDVDLGDRSYPIYIGAGLLDEPDLLQRHVHGKRVLVVTNTTVAPLYLEKVAWALTHNNPNVSVESVILPDGEKYKDMDTLMKVFDKAVESRFDRRCTFVALGGGVIGDMCGFAAAAFLRGVNFIQIPTTLMAQVDSSVGGKTGINHPLGKNLIGAFYQPQCVLIDTDTLNTLPDRELASGIAEVVKYGLIRDAPFFEWQEKNMPELLAREPNALAYAIKRSCENKAEVVAQDEKESGLRATLNLGHTFGHAIETGTGYGAWLHGEAVATGIVMAADMSHRLGWIDDSIKERVFAILKQAKLPIAPPETMTVEKFKNIIAVDKKVADGLLRLILLKGPLGRCVFTGDYDRNALDETLHAFCNN

SEQ ID NO: 5734 - protein, 871 aa, Zea mays
  VARIANT 393..871: note = Derived polymorphism lacks residues 393 to 871
  VARIANT 455..871: note = Derived polymorphism lacks residues 455 to 871
  VARIANT 480..871: note = Derived polymorphism lacks residues 480 to 871
MTVRAAAVLVATAALALLLPGWAAAEWSLTKKGSVVTYDGRSLMIDGKRDLFFSGAIHYPRSPPEMWPKLIERAKEGGLNTIETYIFWNAHEPEPGKYNFEGRFDLIKYLKMIQEHDMYAIVRIGPFIQAEWNHGGLPYWLREIDHIIFRANNDPYKKEMEKFVRFIVQKLKDAELFASQGGPIILTQIENEYGNIKKDHATDGDKYLEWAAQMALSTQTGVPWIMCKQSSAPGEVIPTCNGRHCGDTWTLRDKNKPMLWTENWTQQFRAYGDQVAMRSAEDIAYAVLRFFAKGGSLVNYYMYHGGTNFGRTGASYVLTGYYDEAPMDEYGMYKEPKFGHLRDLHNVIRSYQKAFLWGQHSSEILGHGYEVGNNFFNHFGFWKLILLFDSVLRPSNESSLVFVQHSERSFHTSDVTSKNNQWEMFSETIPKYRDTKVRTKEPLEQYNQTKDDTDYLWYTTSFRLESDDLPFRNDIRPVLQVKSSAHAMMGFANDAFVGNLDQLCNNLVPPKTLACCMNASKAIVQIKIPLHVGCARGNKQVKGFMFEKPVDLKVGVNHVVLLSSTMGMKVKICRNCGMCLECKKTDNTVLSDSQDSGGELAEVKGGIQECLIQGLNTGTLDLQVNGWGHKAALEGEYKEIYSEKGLGKVQWKPAENDRAATWYKRYFDEPDGDDPVVLDMSSMSKGMIFVNGEGVGRYWVSYRTLAGTPSQAVYHIPRPFLKSKDNLLVIFEEEMGKPDGILVQTVTRDDICLFISEHNPGQIKTWDTDGDKIKLIAEDHSRRGTLTCPPEKTIQEVVFASFGNPDGMCGNFTVGTCHTPNAKQIVEKECLGKPSCMLPVDHTVYGADINCQSTTATLGVQVRCGGGKKGA

SEQ ID NO: 5735 - protein, 140 aa, Zea mays
  VARIANT 104: note = Ancestral polymorphism is I, Derived polymorphism is T
  VARIANT 64: note = Ancestral polymorphism is P, Derived polymorphism is S
  VARIANT 62: note = Ancestral polymorphism is G, Derived polymorphism is E
  VARIANT 59: note = Ancestral polymorphism is D, Derived polymorphism is H
  VARIANT 46: note = Ancestral polymorphism is K, Derived polymorphism is R
  VARIANT 42..140: note = Derived polymorphism lacks residues 42 to 140
  VARIANT 39: note = Ancestral polymorphism is L, Derived polymorphism is H
  VARIANT 26: note = Ancestral polymorphism is P, Derived polymorphism is L
  VARIANT 12: note = Ancestral polymorphism is A, Derived polymorphism is V
MAKETGTNEIVALKKIRMDNEREGFPITAIREIKILKKLHHQNVIKLKEIVTSPGPERDEQGRSRMRFTVPQIKCYMKQLLTGLHYCHVNQVLHRDIKGSNLLIDNEGNLKLADFGLARSFSSDHNGNLTNRVITLWYSC

SEQ ID NO: 5736 - protein, 151 aa, Zea mays
  VARIANT 63: note = Ancestral polymorphism is E, Derived polymorphism is V
  VARIANT 54: note = Ancestral polymorphism is T, Derived polymorphism is I
  VARIANT 23: note = Ancestral polymorphism is A, Derived polymorphism is V
  VARIANT 6: note = Ancestral polymorphism is A, Derived polymorphism is V
MIFCVVVVRHQNNPLYLHSFTEADDALKLHHIVHCSLDVIDERVNNSKRTLNETFLGLLYPTENYRVYGYLTNTKVKFIMVTTDLNAKDADARNSTGSCSSPFPQFFRKFHAAYVDAVSNPFHVPGKKVASRSFGARVSTIVKSFGSGTTS

SEQ ID NO: 5737 - protein, 290 aa, Zea mays
  VARIANT 190: note = Ancestral polymorphism is G, Derived polymorphism is D
  VARIANT 183..290: note = Derived polymorphism lacks residues 183 to 290
  VARIANT 177: note = Ancestral polymorphism is G, Derived polymorphism is V
  VARIANT 69: note = Ancestral polymorphism is V, Derived polymorphism is L
  VARIANT 46: note = Ancestral polymorphism is D, Derived polymorphism is Y
MDRYQRVEKQREEAPIKENEIRITTQGRMRNYITYATGLLQDKGSDEVVFKAMGRAINKTVMVVELIKVLLMALVLANITYHLILIVTVITVKRRIVGLHQNTTTGSTDITDMWEPLEEGLLPLETTRHVSMITITLSKKELDTSSIGYQSPLPADEVKPLVKYENDEDAHSPGGRGRGRGGRGRGRGRGRGGRGNGFNDYADAGWEEDHTPAYMGNGYARGRGRSFRGRGRRGGYNNQPEYQQDGGYYEEAPVHAPALGRGRGRGRGPFRGRGRGGNANGVMHAAADSA

SEQ ID NO: 5738 - protein, 238 aa, Zea mays
  VARIANT 147: note = Ancestral polymorphism is S, Derived polymorphism is Y
  VARIANT 27: note = Ancestral polymorphism is L, Derived polymorphism is V
MARHPRAPLLRRLLLLAALAASCSYYLLFLQAQASVPPRYDGFAYGGGAATAWKDAVLVEAFLDPLCPDSRDAWQPLKLAVERYAPRVSLIVHPFPLPYHTYAFYACRALYIANKLNSSSTYPLLELFFKNQEKFYNSATSSLSGPSVALGMSKMAAQTVGNSVSEFLSGFSDGKTDSAARVSFKYGCTRGVFGAPFFFVNGFLQPGGGSPIDYSTWIGILDPLVSQNGERIEMFTSM

SEQ ID NO: 5739 - protein, 360 aa, Zea mays
  VARIANT 192: note = Ancestral polymorphism is T, Derived polymorphism is M
MGIGWRGLNRMMERFKDNMEFTKLKLKMAGIDPDDVYSEVPYEKGFQFLWRIEREIGRPAFDEFLKKYIATFKFQSIDTETFLEFLKTNVPGIENKIDLHLWVEGTGIPPDAMEPDSATYKKICSLATEFKSGKLPSEDEVAKWSGQEWELYIENLPADVEDSQISSVLLHMTIVIDKILEKGTVEYLIVHTAILEYFTIADKTSASDAICQLIPLLTQGALIIDGDEPTNAPELPKKAKAKKKRSKEPLIVRIMQTREGLKLGISCLKYGNAKMIVKIVVVCNDAIIGHSEHQYVATGMPTKAALKLWSRKCISTKETVMEEASPETVEEPLLVSAIRGKKVERAPIWLMRQAESASRF

SEQ ID NO: 5740 - protein, 463 aa, Zea mays
  VARIANT 177: note = Ancestral polymorphism is A, Derived polymorphism is T
  VARIANT 106: note = Ancestral polymorphism is V, Derived polymorphism is G
  VARIANT 90: note = Ancestral polymorphism is G, Derived polymorphism is D
  VARIANT 62: note = Ancestral polymorphism is C, Derived polymorphism is R
MGAAAAEVVAPRPPSAKRKSTTLKFLFELEKPDGGLLPGTAKLPPPSPEPEADSLIDKIASCNRAFTFVDAAEREEERDAKRDRLVEVLGAVRSSGGKRQPLDHRVMVALVEMVGANLFRAMPPPAYPALPPDGADEEAPAVALAPSWPHLQVVYDILLSVVAASDARTLRNHVDRAFLSALLALFASEDPRERDRLKTVYHQLYSKLTCERAFMRRSMAAAFLRLAYEAPAAERHCGAAELLEICGSIVNGFAVPLKEEHRMFLARVLLPLHRTRWAHTYHRQLAYCVLQFVRKEPGLADAVVTDILRHWPVTNCQKEVLLIEELEEIVELLEPVQFQRLAVPICSRIARCVSSYSSQVAERALYVWNNERFLELATASPDVAERILPAFVASVESNLERHWSKCVQQVTASVKSLLEQVAPDLYARCAADLATRRSEAEAAAAVRDARWRRLEAAAAAAAK

SEQ ID NO: 5741 - protein, 406 aa, Zea mays
  VARIANT 209: note = Ancestral polymorphism is G, Derived polymorphism is V
MEVKVLSSKLVKPSYPAGAPRPDTTKHVPSSVFDKATYHTQTVTIYYISPPVPSPDAIERGYATALGAYRLFAGQVRPGPDGAPGVLLNDHGARLVEASVDARLADIAPTKPPPAVLRLHPDLDIVEVVQVQLTRFACGSLAVGFTANPAVADGHATSDFLVAWDRAARGLPVGPSPPVHFPPRHDPPRAGFEHRGVEYYRPAPSLAHGHVHGDTTQHSIVVHKAHFTKDFVAGLRARASEGRGRPFSRFETILAHVWRTMTRARGLGSNPLQISTIRISVDGRPRLAAAPAGYFGNLVLWAFPRATVGSLLGRPLKHAAQAIHDAVARVDGAYDFQSFVDFAGSGTVEKEGLETTAPAQGGRAYFPTEGMLLLVPSYIGDGSIDAIVPVFEHNLDAFKQCCYSME

SEQ ID NO: 5742 - protein, 118 aa, Zea mays
  VARIANT 31: note = Ancestral polymorphism is E, Derived polymorphism is D
  VARIANT 35: note = Ancestral polymorphism is A, Derived polymorphism is P
  VARIANT 72: note = Ancestral polymorphism is V, Derived polymorphism is A
  VARIANT 92: note = Ancestral polymorphism is H, Derived polymorphism is R
MTLHPFVVTYKMQMAIIYAFPPPAPSTAAIENGLAAVLAEYRAFAGELGEAPDGTPAVLLNDRGARLVEATADADLVDMAPAKPTPELLRLHPDIERELRSKRWCSCILLVSSIVAVA

SEQ ID NO: 5743 - protein, 154 aa, Zea mays
  VARIANT 16: note = Ancestral polymorphism is V, Derived polymorphism is G
MIYVHAKGMIVDDEYVILGSANINQRSLAGSRDTEIAMGAYQPHYAWSTKNGHPDGQVYGYRTSLWAEHLGTIDDRFKDPSSLECVRFVNQIAVENWRRYTAEEMSTLQGHLLKYPVKVEADGKISPLPDQECFPDVGGKILGASTSLPDSLTM

SEQ ID NO: 5744 - protein, 559 aa, Zea mays
  VARIANT 214: note = Ancestral polymorphism is L, Derived polymorphism is R
  VARIANT 217: note = Ancestral polymorphism is T, Derived polymorphism is M
  VARIANT 256: note = Ancestral polymorphism is G, Derived polymorphism is W
  VARIANT 263: note = Ancestral polymorphism is R, Derived polymorphism is W
  VARIANT 335: note = Ancestral polymorphism is S, Derived polymorphism is L
  VARIANT 338: note = Ancestral polymorphism is M, Derived polymorphism is T
  VARIANT 356..559: note = Derived polymorphism lacks residues 356 to 559
  VARIANT 363: note = Ancestral polymorphism is F, Derived polymorphism is C
  VARIANT 366: note = Ancestral polymorphism is V, Derived polymorphism is D
  VARIANT 383: note = Ancestral polymorphism is R, Derived polymorphism is Q
MCAFSGRLRTLVKQEKKKKKGGGRKEAVSINLAGGFPGGADGFELVARFCYNDGRVLLCTSNLPLLHCAAVSLEMTEEVCACNLLAQAEAFVNGLYYWTWGDVLAAVRSCEPFAAAADASGLLDRLISALFSKITGATPGPGPGTPNRSSSSCSSSPDTAGLRRSSSSANKTPDSMRPCAGREWWFDDMTSLSPPTVEKVMRVLGCYGVENKNLILTRFLLHYLRAATRRPPALEREGAALAGLAETAVHGVALVGGTAFSCRGLFWVLRIVSAVGLSRECRHKLERLMGLMLDQATLDDLLVSGDDGGGVYDVNLVMRLVRVFVASEEEADAPSERMRKVGRLVDKYLGEISPDQGLKVSKFLAVAESLPDSARDCYDGVYRALDIYLESHPALSLEERTTLCRCLNYEKLTLEACKDLAKNRRIPPGVAVQALASQQCKLHISEPGPGGSATAAAGKERRPDPSSCSQSQTPRRRVARRATRSVDLGRRSGGDDDEKELLRLNLQRMQSRVVELERACKEMKGQMSRMAKGKSLSLSFGSGAASCHQTGGRGLPRLC

SEQ ID NO: 5745 - protein, 615 aa, Zea mays
  VARIANT 268..615: note = Derived polymorphism lacks residues 268 to 615
MAVEETAESCGSHAATAASGGGAAGPATSSSSAAAAAQARKQQQQQRHKLEVYTEVLRRLHDAGLPDARAPGFDDELWNHFNRLPARGFRCGRRSGLGSPGWIRFGFCSYAMDVNVERAEDVLTHKRLLEQAKDPAHRPAFAVRSVQVSPILDGNQTDSDSNTAGEEVASRLLNRQQSIYPPPAFGSSTNLEALALEASKSHDHDSTSDNGRSLYRPMHEITFSTIDKPKLLSELTSLLGELGLNIQEAHAFSTNDGYSLDVFVVVGWHDEETEDLVEAVQKEIGRIEETQAWSSSHSWSTPVEKMQIAENSAADRVEIPTDGASEWEIDVKLLKFGNKVASGSYGDLYRGTYCSQDVAIKVLKPERINADMQREFAQEVYIMRKVRHKNVVQFIGACTKPPNLCIVTEFMSGGSVYDYLHKHKGVFKLPALVGVATDVSKGMSYLHQNNIIHRDLKTANLLMDENGTVKVADFGVARVKAQSGVMTAETGTYRWMAPEVIEHKPYDHKADVFSFGILMWELLTGKIPYEYLTPLQAAVGVVQKGLRPTIPKHTHAKLSELLQKCWQQDPTQRPDFSEILETLQRIAEEVGEEHDGKHKDRTLGGFFSALRGRSH

SEQ ID NO: 5746 - protein, 271 aa, Zea mays
  VARIANT 79: note = Ancestral polymorphism is L, Derived polymorphism is R
  VARIANT 77: note = Ancestral polymorphism is G, Derived polymorphism is D
  VARIANT 68: note = Ancestral polymorphism is P, Derived polymorphism is L
  VARIANT 59: note = Ancestral polymorphism is A, Derived polymorphism is T
  VARIANT 53: note = Ancestral polymorphism is A, Derived polymorphism is P
  VARIANT 19: note = Ancestral polymorphism is P, Derived polymorphism is L
MTSMTAATDVKPAPAAGGPQLKLLVDRRSRRVLYAEARKDAVDFLIGLLRVPAGLAARALAKRGEPAPGSLGSLYAGALALDDAFFVSSSPNRDALLSPSTLPSAALPLLLGEGAVPPAPAPPPPQRFFRCNAYAPPCRGNPTNVTDVAGLPCPACRQPMTMEMRLPPGDAHGKQLALARAQEAAGLGAGGYVKEVVTYLVMDDLTVAPMSTISAIMLLKKFDVKDCSALEETTVELGTKEAVMLLKASLQSSTALTDVFSGGVSIDRISG

SEQ ID NO: 5747 - protein, 326 aa, Zea mays
  VARIANT 183: note = Ancestral polymorphism is S, Derived polymorphism is Y
  VARIANT 166..326: note = Derived polymorphism lacks residues 166 to 326
  VARIANT 145: note = Ancestral polymorphism is E, Derived polymorphism is G
  VARIANT 113: note = Ancestral polymorphism is S, Derived polymorphism is W
MATSSKPAAPVDPMVVLAHEFPEVSFDYDERDVALYALGVGACGDDAVDEKELHFVYHRDGQPHIKTLPTFVSLFPNKNSNGLGFVDVPGLNFDASLLLHGQQYIEIYRPIPSYASVVNRVKVAGLHDKGKATILELETTTSLKESGEILCMNRSTIYLRGAGGFSDSSRPYSYATYPANQVSRISIPNSAPSAVCDDQTKQSQALLYRLSGDYNPLHSDPDIAQLAGFTRPILHGLCTLGFAARAVIKSFCNGEPTAVKSIFGRFLLHVYPGETLSTEMWLDGQKVHYQTKAKERNRAVLSGYVLLQHIPSSLMDDKIKDNKVVQ

SEQ ID NO: 5748 - protein, 198 aa, Zea mays
  VARIANT 51: note = Ancestral polymorphism is L, Derived polymorphism is H
  VARIANT 43: note = Ancestral polymorphism is R, Derived polymorphism is W
  VARIANT 12: note = Ancestral polymorphism is G, Derived polymorphism is D
MAAWERPQGPVGTQQSAHAHRSKAELDKVWTDKAKIIKLSDSWPLHSSIQLYSLKISKAFSGEDAARDLVAFELQVAKEMHLPEGSDQCSAVSSANESVQLQRPEFGHLEQWAVILIPFFFSSHHSCVQLANCSLISGHQLLNLASEDLSLIWQGHVAGIYMASVFPYYYTVPASNAYYTCLHIVIFVQVLQADGVLI

SEQ ID NO: 5749 - protein, 117 aa, Zea mays
  VARIANT 71: note = Ancestral polymorphism is Y, Derived polymorphism is H
  VARIANT 102..117: note = Derived polymorphism lacks residues 102 to 117
MSKVKNNNGYHGVTEPISLSGPTEKYLMQTAEVEKYLSDARLYERQDEAILREEVLGKLDQVEQFSTEIYYFASFKIFFSLAAVDEGTTSRSMMGTSENPLRAGLEIMVWSLGHGDG

SEQ ID NO: 5750 - protein, 149 aa, Zea mays
  VARIANT 35: note = Ancestral polymorphism is D, Derived polymorphism is E
MMSAKRLVQMSSSRWRRMAALARKRLASTPVKETDGSSCSTSSVAGKGHCAMYSADGRRFEVPLVFLGTALFGELLSMSQEEFGFAGDDGRITLPCESLVMEYMMCLLTRDASEEVKRLFLSSMARPCHYGSGLVQTMHHTQRTVVPSF

SEQ ID NO: 5751 - protein, 137 aa, Zea mays
  VARIANT 29: note = Ancestral polymorphism is T, Derived polymorphism is S
  VARIANT 36: note = Ancestral polymorphism is K, Derived polymorphism is R
  VARIANT 93: note = Ancestral polymorphism is I, Derived polymorphism is T
  VARIANT 117: note = Ancestral polymorphism is Q, Derived polymorphism is P
MINPKKLAQLARKWQRVKIATKDDDRCCTISPIAGRGHCTVYTVDGSRFEVPLAYLRSVVFSELLRMAAEEFGFTGNGRITLPCDAAVVEYMICLLQRNASEEVEKAFLSSVVMPCQQSSYPTPPVVLHQQFAVCSS

SEQ ID NO: 5752 - protein, 152 aa, Zea mays
  VARIANT 16: note = Ancestral polymorphism is R, Derived polymorphism is T
  VARIANT 33: note = Ancestral polymorphism is A, Derived polymorphism is V
  VARIANT 48: note = Ancestral polymorphism is V, Derived polymorphism is M
  VARIANT 58: note = Ancestral polymorphism is E, Derived polymorphism is Q
  VARIANT 74: note = Ancestral polymorphism is R, Derived polymorphism is W
  VARIANT 102: note = Ancestral polymorphism is C, Derived polymorphism is R
MISTKRISQMVKKWQRMAVLGRKRLSWRVEREVEDRSCASVASKDHCMMYSLDGRRFEVPLAYLGTLVFAELLWMSYEEFGFVSHGRITLPCDAAAVEYAMCLLRKGSSADVEKAFLSTMAVSCHYASCIAIAPFVGVSHQAVICSSWLTVK

SEQ ID NO: 5753 - protein, 130 aa, Zea mays
  VARIANT 4: note = Ancestral polymorphism is K, Derived polymorphism is R
MARRRLTATLAKEADGSCGTSMPVAVRGHCVVYSSDGTRFEVPLAYLGTAVFGELLSMSREEFGFTGDDGGRITLPCDAAVMEYAMCLLRRDASEEVVRAFLSSMVRPCHHSVGGSVPPMGLGRQPAICV

SEQ ID NO: 5754 - protein, 138 aa, Zea mays
  VARIANT 125: note = Ancestral polymorphism is F, Derived polymorphism is L
MAGWRPSPIGGTEPPTLWWQGLTMELKNALTTSSEASRLSKHIAYSITAASQGSVILPPSSPVNPNSSRDMLRSSPNTAVPRYASGTSNLVPSEEYTTQWPLTATGIDVPHEPSASFASVAVSRLLAMAAVACHFFAI

SEQ ID NO: 5755 - protein, 146 aa, Zea mays
  VARIANT 2: note = Ancestral polymorphism is I, Derived polymorphism is T
  VARIANT 40: note = Ancestral polymorphism is S, Derived polymorphism is Y
  VARIANT 109: note = Ancestral polymorphism is R, Derived polymorphism is K
  VARIANT 111: note = Ancestral polymorphism is A, Derived polymorphism is T
MISAKKIAHLAKKWQRMAAQGRKRLALGAAAKQADECCSYVASKGHCAVYTADGARFEVPLACLSTPVFVELLQMSQEEFGFTGGDGTGRITLPCDAAIMEYAMCLLRKGASAELEQAFLSTMAMSCHCASHMAPYVGRARQQIVV

SEQ ID NO: 5756 - protein, 138 aa, Zea mays; identical to SEQ ID NO: 5754
  VARIANT 125: note = Ancestral polymorphism is F, Derived polymorphism is L

SEQ ID NO: 5757 - protein, 130 aa, Zea mays; identical to SEQ ID NO: 5753
  VARIANT 4: note = Ancestral polymorphism is K, Derived polymorphism is R

SEQ ID NO: 5758 - protein, 152 aa, Zea mays
  VARIANT 70: note = Ancestral polymorphism is G, Derived polymorphism is V
  VARIANT 87: note = Ancestral polymorphism is G, Derived polymorphism is D
  VARIANT 109: note = Ancestral polymorphism is A, Derived polymorphism is T
MISAKKIAHLAKKWQRMAAQGRKRLALGAAAKQADECCSYVASKGHCAVYTADGARFEVPLACLSTPVFGELLQMSQEEFGFTGGDGRITLPCDAAIMEYAMCLLRRGASAELEQAFLSTMAMSCHCASHMAPYVGRAHEPDSRLLFSFCSV

SEQ ID NO: 5759 - protein, 144 aa, Zea mays
  VARIANT 130: note = Ancestral polymorphism is S, Derived polymorphism is I
  VARIANT 124: note = Ancestral polymorphism is M, Derived polymorphism is I
  VARIANT 102: note = Ancestral polymorphism is A, Derived polymorphism is T
  VARIANT 98: note = Ancestral polymorphism is V, Derived polymorphism is I
  VARIANT 88: note = Ancestral polymorphism is G, Derived polymorphism is C
  VARIANT 82: note = Ancestral polymorphism is G, Derived polymorphism is S
  VARIANT 71: note = Ancestral polymorphism is G, Derived polymorphism is V
  VARIANT 50: note = Ancestral polymorphism is V, Derived polymorphism is G
  VARIANT 41: note = Ancestral polymorphism is S, Derived polymorphism is Y
MINAKKIAHLAKKWQRMAAQGRRRLTLGATSANGADECCSSVASKGHCAVYTADGARFEVPLACLSTPVFGELLQMSEEEFGFAGGDGRITLPCDAAVMEYAMCLLRRGASAELEQAFLSTMAMSCHCASHMAPYVGATHQIAV

SEQ ID NO: 5760 - protein, 149 aa, Zea mays
  VARIANT 138: note = Ancestral polymorphism is Y, Derived polymorphism is H
  VARIANT 134: note = Ancestral polymorphism is H, Derived polymorphism is Y
  VARIANT 96: note = Ancestral polymorphism is P, Derived polymorphism is A
  VARIANT 27: note = Ancestral polymorphism is T, Derived polymorphism is A
  VARIANT 2: note = Ancestral polymorphism is M, Derived polymorphism is T
MMMSAKKIAHLAKKWQRMAAQGRKRLTLGAAAAKEVDECCGSVASKGHCAVYTADGARFEVPLACLSTPVFRELLQMSQEEFGFAGGDGTGRITLACDAAVMEYAMCLLRRGASAELEQAFLSTMAMSCHCASYMAPYVGRARQHQIVV

SEQ ID NO: 5761 - protein, 872 aa, Zea mays
  VARIANT 3..872: note = Derived polymorphism lacks residues 3 to 872
  VARIANT 29..872: note = Derived polymorphism lacks residues 29 to 872
MQCVRDELCRAGSEESVTCICMEEGGDPQLPSISVARTTSEGAGAVDLDLLEQLLSGDNGWLEVVSRSPNSVAFPPPSAFFSADATATTVTTTAAPAANASWLIQTGGASTPSVRERFSQALSYIRDTQSDGDVLVQLWVPVNRDDGKLVLTTSGQPFTLDHRSDSLIRFREVSTKYQFPADVRSGESPGLPGRVFIGRLPEWSPDIRCFTSYEYARVTDAKYLDVHGTMGLPVFEKRSYSCLGVIELIMTKQKLNFTSELNTICSALQAVNLRSTEVSSIPRKKFSTASYKDALPEILEVLRAACLTHKLPLAQTWVTCTQQGKRGSRHSDENYRYCISTIDEACFVNEAEMRGFHEACSEHHLLRGEGVAGKALTTNQPCFLPDIGSSTKLEYPLSHHAKIFRLKGAVAIRLRCTRTGIADFVLEFFLPTDCEALEEQKTVLDSLSGTMRSVCQTLRVVTDREMEGEAALEMNELNSFTPPEKDKDELSFGGNSADRRGASWTSLAGTSQQEPELAALRMHGTFSPVGQGPSLSGVQATAEGSKTKRRTKAEKTVSLQVLRQYFAGSLKDAARSLGVCPTTLKRICRQHGITRWPSRKIKKVDHSLRKLQQIIDSVHGAETAFQLNTLYKDLTDTSISSDNNLSGSVTVPPTNQSNLTDFNKHQPHKSSSNMPSTSHSHSSCSHGSQSSPSCSVGATEHAQQGIIDLMKSENPVKDSSIQTMQTENTSLYEHFSVHEAPIDLLQDVTEKANGAHHSSRSLSSPNPKQNTDANMRVKATFGSEKVRFRLNPECNFQGLKHELAKRLSIVDTNPLVLKYLDDDSEWVLMTCDADLQECLHVYKLADIQTIKISVHLAVSPATRVTAGHTGLS

SEQ ID NO: 5762 - protein, 408 aa, Zea mays
  VARIANT 31: note = Ancestral polymorphism is R, Derived polymorphism is H
  VARIANT 54..408: note = Derived polymorphism lacks residues 54 to 408
  VARIANT 88: note = Ancestral polymorphism is P, Derived polymorphism is L
  VARIANT 112: note = Ancestral polymorphism is K, Derived polymorphism is E
MLRSRYASQTSKQNPGTNQQLEIEMTAEKSRRLITSDCGGGGADAKPEAPVSEGVVNGDKWPRFADLGGMEQVLDHLLVEVVVPLRRLELPNYLGVMPVAGLLLYGPPGCGKTTLAHAIANETGVSFYKISAPDIVSRVSGFMQKTSHNACVLAGGSEENIRGLFQKAYRTAPSIVFIDEIDAIASKRENREMERRIVTQLMTCMDEFHQNIGGDGSDVDSSKKKPDYVIVIGATNRPDAVDQALRRPGRFDRDIYLGVPDVNLRKQILMMLAWKLRLEVQFDFLKIARATPGFVGADLKALVNNAWYLAMKRLINKRRAQYCSQVKVKWWKQLSWDAGEMESVHVTMNDFEVDEAAMLALEDRWRYLDSGTSMSPPFLIEPSHFEQALSKVKPSVSKKDDGLNWEII

SEQ ID NO: 5763 - protein, 642 aa, Zea mays
  VARIANT 98..642: note = Derived polymorphism lacks residues 98 to 642
MGKQQQAPPARRSTAMSAPPPPKRRKKKGRPSLLDLQKRSLRLEQQLQQQQPKGRRSNRRSAGSADEDDDGPASGSGRREKKLRLVMGLHDGSPKQVEKTRKATDGHEGWCSLLCAIYSSGFCRQKNLPGQICTRSRQIPGPQHLCQTKSYCSSSLIGYRSELLCSLSFSSSFSPPGPLIFVCPGLLVSCRKDTYGVFSEPVDPEELPDYHDIVKHPMDFSTIRKKLDKGAYSNLEQFEDDVFLISTNAMCYNSPDTIYYRQARGIQEIAKKDFENLRQDSDASDPEPEPELELEPEPEEPKPQPRRGRPPNKNNAKQKVGKPPTERATADFSGATLATAANIGRHAQADVDLSRRAMDKAMMDMLRASFANRRNEHNWSGERKFERFEECSGFKLSPFSRSFKNCPLKGYRGTWSAKMGKRPILMEDSRRSTYCETQPSNSIYELPVGVQLQQSYSRSLARFAAQLGPVCWEIASRRIERSLAPGTKFGRGWVGDGETPNSFQPPVLAAFSETTTPQDRTAASGEQPCPSMSSPPATEACAGNDRSHLAGSQPDATPYASTSTTQRMSSEALASQQCGSLPQISINRAERTLEMMKGSPNNLHGHPGMQQTANGFNAVPGPMMFPHVAQLVVNQMQTHTAD

SEQ ID NO: 5764 - protein, 1469 aa, Zea mays
  VARIANT 96..1469: note = Derived polymorphism lacks residues 96 to 1469
  VARIANT 149..1469: note = Derived polymorphism lacks residues 149 to 1469
  VARIANT 154..1469: note = Derived polymorphism lacks residues 154 to 1469
  VARIANT 165..1469: note = Derived polymorphism lacks residues 165 to 1469
  VARIANT 226..1469: note = Derived polymorphism lacks residues 226 to 1469
  VARIANT 327..1469: note = Derived polymorphism lacks residues 327 to 1469
MDKQSDGQGVERVAEEKELASRTPPSSAAPPPPPTTLPDAPRERPRVYARRPRTTPALPEYVAEPALHVVDDPASSSPAPPPPPPPPEPRRVTRTQSGAIQPVRYVGLSATATTPASPIPGNYRSGLADPNWRAAMAEEYQALIDNDTWRLVPRPPGANVVSGKWIFKHKYHSDGTLARHKARWVVRGFSQQHGIDYDETFSPVVKHPTIRTVLNIAASRSWPIRQLDVKNAFLHGHLEETVYCQQPPGFVDPAAPDHVCLLQRSLYGLKQAPRAWYQRFATYIRQLGFTASSDVSLFVYKEGESLAYLLLYVDDIILTASSTDLLQRFITLLHSEFAMTDLGDLHHFLNISVTRSSDGIFLSQRQYAVELPQRAGMAECHSTSTPVDTHAKLSATDGAPVADPSIYRSIAGALQYITLTRADLAYVVQQQLDEKELERKLKKDQKAKEKEEKKLKAKQKEAARLQAQATSDGTKKTEKKLRKKAVEDENPEDFIDPDTPNGQKKLLAPQMAKQYSPSAVERSWYAWWESSGYFGADSASTKPPFVIVLPPPNVTGALHIGHALTVAIEDAMIRWRRMSGYNALWVPGVDHAGIATQVVVEKKLMRERKLTRHDIGREKFVSEVLKWKDQYGGTILNQLRRLGASLDWSREAFTMDEQRSKAVTEAFVRLHKEGLIYRDYRLVNWDCTLRTAISDIEVDHIDLKEETMLKVPGYANPVQFGVLISFAYPLEEGLGEIVVATTRIETMLGDTAIAVHPEDERYKHLHGRYAVHPFNGRRLKIICDAELVDPTFGTGAVKITPAHDPNDFEVGKRHNLEFINIFTDDGKINSNGGAKFDGMPRFTARVAVIEALKEKGLYKDTKKNEMSLGVCSRTNDVVEPMIKPQWFVNCNHMAKAGLDAVRSKKIEIIPQQYEQDWYRWLENIRDWCVSRQLWWGHRVPAWYVTLEDDLDKNLGSANDRWIVARNESDANLEAQKKYAGKKLRLDQDPDVLDTWFSSGLFPLTVLGWPSDTADLRAFYPTSVLETGLDILFFWVARMVMMGMQLGGDVPFQKVYLHPMIRDAHGRKMSKSLGNVVDPLEVINGMSLDGLLKRLEEGNLDPNELNIARDGKKKDFPDGIAECGTDALRFALISYTSQSDRINLDIKRVVGYRQWCNKLWNAIRFAMGKLGDHYIPPATVDVSLMPPICKWILSVLSKAVGKTVSSLEAYKLSDATSAIYSWWQYQLCDVFIEAIKPYFFNDSQELESARAASRDTLWICLDTGLRLLHPFMPFVTEELWQRLPQPKDSCRKGSIMISQYPSLVEEWSNGRLENEMDIVLDAVNKIRSLKPPTDSNERRPAFALCRGQEIAATIQCYQSLIVYLSSISHLKILTENDETPADCATAVVNKDLSVYLQLQGALNADAEREKLKKKKDEIQKLQNALAQKMDASGYREKAPQSVQEEDMRKLTALLEQLEVISEAEKKLDAN

SEQ ID NO: 5765 - protein, 175 aa, Zea mays
  VARIANT 5..175: note = Derived polymorphism lacks residues 5 to 175
MLLVWVVADGFIGFGSVGLEMKSRARSGGGDSRLSVRKTKVEKDPNKPKRPPTAFFVFMEEFRKDYKEKHPNVKQVSVIGKAGGDMWKSLSDAEKAPYVSKAEKLKVEYTKKMDAYNNKQSGGGPTLSGDSDKSKSEVNDGDEEVKANPPVPCPDSCFPLLVLLCGSQTLLVPSI

SEQ ID NO: 5766 - protein, 1520 aa, Zea mays
  VARIANT 424..1520: note = Derived polymorphism lacks residues 424 to 1520
MGWDGSAGSTQDAGIAGAPSLELGLASRWSGREGTGGPQNGSVYVCNLPPGTDENMLAEYFGTIGLLKKDKRNGRPKIWIYRDKVSNEPKGDATVTYEDPHAASAAVEWFNNKDFHGSTIQVHIAESKSKDAFDNPTNLNTIAGVSEQDEVDNGAGRGRGRGDGPGKAWQQDGDWMCPNTSCGNVNFAFRGVCNRCGAARPAGAGGTGGGGGGRGRGRGNSDARGSSRAGAGAATGGGPPGLFGPNDWPCPMCGNINWAKRTKCNICNTSKPGTNEGGVRQVCIAIFLHFRGGRGGGYKELDEEELEEVKKRRKEAEEDDGEIYDEFGNLKKKFRSKALHTGSAQTLPGSGRAGWEVEHRGSSEREGRERSRDRGRDDYDEKETRSIDRARFEEMQTIKRLPKSVHSSLRSGVILSDLPRVIEELIYNSIDANASKIDIAVNIRACYVKVEDDGCGITRDELVLLGEKYTTSKFHVMVDEELSFRSFGLNGEALASLSDISVVEGSKCLHLGIDDKREVVGTTGECSIFSLKQSSAWLVIGPFNFAVVVRELFYNQPVRRKQMQSSEKRELHHVKKCVLQIALIHPQISLRLLDNDSEDELLYTEISSSPLPLISKTFGDDISRCLHEITASDQVWTLSGHISGPADVFCTKDAQYLYINSRFVNRNPIHNMLNNLASSFRSPITRGYAEIDVQSRKRQKADIYPAFILNFYCPRSTYDLHFEPTKTIVEFKDWRTVLLFFEQSVTNYWKKHQLQSPKVKLNKGLLKDHNVQNEKEYAHFESTQQTNAVKDTNSDMSSTRATRNSHCFSFVMEPSIQNVCFSGRITNSCRPDDNVASIDYKLGYKQMHYPENGSYKWLDDGPSHLNDDISSVNPTCWKRQRTEGIFHEYAYSGNLVMLEDVPTEGYFAHEQETELIGPEVEIPESCFRALNKPNGMTPDFVQNKTNLKAQTSGWDGLYDKFEKLNGDCLLDNGFYHDGGSTSKGTCRVLRKSSTSKKLGTAAGCVEGLEADAINQMNFPDIHALWNSDLIDRSSFKDTLNHFSHPSLLADTPCSHPRTLHTLNRTSDKCFRSWNYENIDSNVRFSNDSSIIFEGTKNFDNFNNEIQSLNYFNDKCGSTDQLGFEEDLTTWKSKFDMRLSVNISPETAGDNGCHLNVPSLNIANDNLFTQDLLNQHNSGLNQRLRTSKCSRFRSHSAPPFYRGKLKFSRLNVPLSKPSTDSDKDICVNNPEDNAPGPVDIPCISSTQPIPETDSSEFPDLNFSSLIPECVDKNCFEEARVLLQLDKKFIPVISGETILLVDQHAADERIRLEELRSKVLSEGHGVSYLDSEEELSLPETGFQLFQKYAEQIQKWGWIISGGSNSSESFKKNMNILKRQVRLVTLVAVPCIFGVKLTGKDLMEFIWQLDETDGSSDMPPAVLRILNFKACRGAIMFGDPLLPSECCLIIEELKATSLCFQCAHGRPTTVPILNIASLHDELARLQMLSGRKAETWHGLGHHEPSLERAHMRLERLRKLRRGL

SEQ ID NO: 5767 - protein, 223 aa, Zea mays
  VARIANT 64..223: note = Derived polymorphism lacks residues 64 to 223
  VARIANT 61: note = Ancestral polymorphism is S, Derived polymorphism is F
  VARIANT 26: note = Ancestral polymorphism is R, Derived polymorphism is C
MASWQQPPPPACSPLPVPAPRDYNSRHSDPLYSLEALVHCLPQVGMAAAGTQLGRLLVAASGSWPRCCSGALRRQWPPWMGDAPSQGLGRTSCARHWTGGRRTSATMAPASGSAPACSTWISPIRSSSTPSELPASSLLNQVSTTPAVSSLTACLSLCIYSYTLSASPALELTSRSAASSGSGGGSTTARGWTSTAGSSARTRSPPSSSSSSKPPTRPKRTTR

SEQ ID NO: 5768 - protein, 473 aa, Zea mays
  VARIANT 155: note = Ancestral polymorphism is S, Derived polymorphism is F
MAATAVSVDEKLDKLRAEVAKLSQISENEKAGFISLVSRYLSGEAEQIEWSKIQTPTDEVVVPYDTLTSPPEDLEETKKLLDKLVVLKLNGGLGTTMGCTGPKSVIEVRNGFTFLDLIVIQIESLNKKYGCNVPLLLMNSFNTHDDTQKIVEKYSNSNIEIHTFNQSQYPRIVTEDFLPLPSKGKSGKDGWYPPGHGDVFPSLNNSGKLDILLAQGKEYVFVANSDNLGAIVDIKILNHLINNQNEYCMEVTPKTLADVKGGTLISYEGRVQLLEIAQVPDEHVNEFKSIEKFKIFNTNNLWVNLKAVKRLVEAEALKMEIIPNPKEVDGVKVLQLETAAGAAIRFFDKAIGINVPRSRFLPVKATSDLLLVQSDLYTLVDGFVIRNPSRANPANPSIELGPEFKKVANFLARFKSIPSIVELDSLKVSGDVWFGSGITLKGKVTITAKSGVKLEVPDGAVFENKDVNGPEDL

SEQ ID NO: 5769 - protein, 264 aa, Zea mays
  VARIANT 241: note = Ancestral polymorphism is T, Derived polymorphism is I
  VARIANT 234: note = Ancestral polymorphism is S, Derived polymorphism is N
  VARIANT 220: note = Ancestral polymorphism is I, Derived polymorphism is V
  VARIANT 92: note = Ancestral polymorphism is A, Derived polymorphism is D
  VARIANT 45: note = Ancestral polymorphism is Y, Derived polymorphism is H
  VARIANT 21: note = Ancestral polymorphism is P, Derived polymorphism is L
MLLPFLRSHPLLHHAARLSSPRTRLILRRDLLPLARSRPIRMAAHSGSGSGASSPAPAPPAAVVQKSKIKFCPACGSPTKLAIPDGDEKMRAVCSSCGGVHYENPKMVVGCLVEHDNKVLLCRRKIEPAYGLWTLPAGYLEVGESAAEGASRETLEEACADVEIISPFAQLDIPLIGQSYIIFRARLKTPNFSPGAESLECALFALDDIPFDSLAFSSIVVTLRMYTEDVRSGNIKYHYCIINKRLGASPSDLRSFDIDNHIAV

SEQ ID NO: 5770 - protein, 196 aa, Zea mays
  VARIANT 25: note = Ancestral polymorphism is V, Derived polymorphism is I
  VARIANT 79: note = Ancestral polymorphism is A, Derived polymorphism is V
MPAIPTAPAPCPVRFLLARRHSLHISYPSPCSNHQRLPPRLLRLPARPRAAPMSAEARAPASPVAPPAHPTYDLRAVIALALAEDAGDRGDVSCLATIPSDVEAEATFIAKADGVIAGISLADMIFNQVDPSLKVEWFESDGNFVHKGLQFGRVYGCARSIIVAERVVLNFMQRMSGIATLTKVISALIYMIKLLL

SEQ ID NO: 5771 - protein, 175 aa, Zea mays
  VARIANT 78..175: note = Derived polymorphism lacks residues 78 to 175
MDDAESASRAGRRRAAAAAGMRLFSPEYYALCAGGGMLAAGATHLAITPLDVLKVNMQVNPMKYNSIFSGLNVLVKEEGPSSLWRGWGGKFFGYGVQGGCRFGLYEYFKKRYSDVLVDSNKSTIYFLSSASAQIIADVGLCPFESVKVRVQTQPMFAKGLVDGFPRVYATEGLSG

SEQ ID NO: 5772 - protein, 167 aa, Zea mays
  VARIANT 89: note = Ancestral polymorphism is E, Derived polymorphism is K
  VARIANT 5: note = Ancestral polymorphism is G, Derived polymorphism is R
MHSFGHRANAVATFAVTILAAMCFAASFSDNFNTLTPTASVKILNINWFQKEANGNDEVSMTLNISADLSSLFTWNTKQVFVFVAAEYETRQNALNQVSLWDGIIPAKEHAKFLIHTTNKYRFIDQGSNLKGKEFNLTMHWHIMPKTGKMFADKIVMTGYQLPEQYR

SEQ ID NO: 5773 - protein, 168 aa, Zea mays
  VARIANT 23: note = Ancestral polymorphism is A, Derived polymorphism is V
MPSGLNSPLLLAPKGQLMKQNTAVLLLSIVLLATSCEARGLPVHGKVVRSSASQSHRLPAGKVGIAEDYEFVSSSLDHRFIDVAATSLTADGWLSTRQMEARHMTAQQADAKVKEGVKMAAASAAAGAVRATLPTPAVTAVSQRLPRREDTGFHLDYAGPRTHTPSHN

SEQ ID NO: 5774 - protein, 133 aa, Zea mays
  VARIANT 57: note = Ancestral polymorphism is K, Derived polymorphism is N
MASKGVLFLALNLLFFTVANACGSCPTPTPPVEPPPPPPATPPPSSSSGKCPLNALKFGVCVNALGLVKGEAGKVPAEPCCNLIKGLADFEAAVCLCTAIKGNVLGVVFDVPIKFNALVNYCGKCVPKGYMCA

SEQ ID NO: 5775 - protein, 1959 aa, Zea mays
  VARIANT 227..1959: note = Derived polymorphism lacks residues 227 to 1959
  VARIANT 235..1959: note = Derived polymorphism lacks residues 235 to 1959
MDGASWPARWPPPVPPLPSQVVFDTQTVRELVSCFSGLRMVCAHDFAVEMLPYGIISTFHCLSVRTSPLNMALLPCVYMQMDGVTLRHLLRPFAAQEAAAAGRVAAAPEQLFASHSTLQSGPPPRVGPSNELLTQVPGNYCTFDLAPDLTRANASNAAGTIDFTRAGPSSSAATLPKYPRHGLPASSSNEQSSFGALFPNRSANGMGIFTCQSSANEGIANVGVQFQDSSVHGLQKLPFKSMTHQHPTLPGDRIRVTCMNVGGEFFVGEAGLFGVICLCHRLRMSVAKFCEHAGGIPEKAGEIVCLENGMSIAQWFKFCIGVGGSIANTRWDWPEWAHMKSSPEEHILKSLASRNSGTGKMGLLSRYGKITGHMNKPAYSNDLSVEGGGHTNVEKLVNRTDETYYRKSVDVHETFTKNSALLQNSAVVNLGPAKNHPVHAFDLNPLTTPSGSPHFEASMGRHYNGNHLAHSHGIHLEKNFDASFCNPMPRFTGVMNHDSRACRPNFSNKTFQDTLSNASNTELKLGQSSYHQSMTTLSPLGQSTMIEFQKPQTHRPPINQNPSPKQATKISKSLSEHNEPSISTGNKKQPLEVVNGMKRSEGDELTDDTSKNSFISLFLSHLERNNTPEPIDDILNSNEHYLPKALDVACGSDHPESATRQIETRVPNDKHSKLASAIVHTKRRSEGISLSVASSGYNPQDASHANSQEHLIHGDSLSHLLPSQPNTGISKISARVSCHANCMSCIHVGNKSHQVAHGEIGVPCFYDKMARGHGTFERVDDCTHRSLRAFTKISCDNGKSCCSSRELLPSFCQNDQPTLGKSICGCCCKIQEDASKLGFIPGHMCRTHFSSDVGPVLANKPTIEGLDEFCACSCSTFTQRSSLCSREYVLQSSCDSCPINGLHCRSCMGHAADSLTKHSLFDPLNTKERGSCCNGRCCYSVVPKCLSSCDFTKHCDVIIDQIGHAAPKDNHQLQMPTRCCTLGENEKLICQCLSNKIAVRNLPQTSHCKDVSEKVMNQPSIAITERLENVSEPSVADDSSSKAVAEKKDAYRDSAVSKGQPNFGFSSGSSSIIVTKFQKSPEFNNVSSTAKHSKHKNLCDEGSRIEKSSASSYVPTSTGCEEPLNSSAKSELGPSRVKRKCNQISEGRRLEETDNEEHCSELLKKTRTLRCSVKGSESDDCTRASSQSSQKGVYQPQNEVNSFSCRVLRTKRKHPIMHLNKHVKQLHRQTKFFEGDEQPDAKGNFLGGLDSYDRKRQVEDMSTLDKTRHHQEGSRAFVRKLPKYVSLNCIVNEPNTNSEGACSGSGGIDSSLIATGITNDNRKSPKIVPLNLVLKKAKRCNAVKLRKTESTHLYEEKSSDCSVNSSDYSIEKYSVDDENCSPQAEYELQDSKRSRYSSNDLRSHVALHKRTSGVIGEDDSLGLTDVEINCLSISSSSNGTKNRRTSVSLARIKKFGSKSVCYSGSDKDNAVLAHEVNARRLRYSGRLSSNSPCCVCGISDLEPCNRLIECSKCYIKVHQACYGVLKVPRGQWFCRPCKNNTMDTVCVLCGYGGGAMTRALKTKNILKSLLQGLMNLERSEYYVDSLGNASSECTSLQNPVDSAHGDNIMNAKNITSNSWTSGKYYSSLLGPQPMQWVHMVCGLWTPGTKCPNDTTMSAFDVSGASPAKRNTACSICDRTGGSFVKCRAVNCLVFFHAWCAHQRGLLQSEPEGEHNENIGFYGRCVSHAIVFSSHVNPKKEYFRNNNWTCARTEGFKGRKGEGFSDSSHKKYEEYSGEFGVSQEQINAWLRINGSKPCGRGQKEYIHYKQLKGWKHLVVYKSGIHGLGLYTSVFIPRGSMVVEYVGEIVGQRVADRREIEYQSGKRQQYKSACYFFKIDREHIIDATRKGGIARFVNHSCQPNCVAKIISVRNEKKVMFFAERHINPGEEITYDYHFNREDEGQRILCFCRSRYCRRYLN

SEQ ID NO: 5776 - protein, 639 aa, Zea mays
  VARIANT 103..639: note = Derived polymorphism lacks residues 103 to 639
  VARIANT 237..639: note = Derived polymorphism lacks residues 237 to 639
MRTPAMLRWAAALAVLLAVAAPAAGFYLPGVAPTDFAKGGPLPVKVNKLTSIKTQLPYTYYSLPFCKPDAIVDSAENLGEVLRGDRIENSPYVFKMREPKMCQIVCKAKITEKEAKELKEKIEEEYRVNMILDNLPLVVPVNRQDKNSIAYQGGYHVGLKGVYSGTKNEKYFIHNHLSFTVKYHRDDNSELSRIVGFEVNPLSVKHQIDDKWNGVDTRLSTCDPHASKFVINSDSPQEVEADKEIIFTYDVHFEESEIKWASRWDTYLLMTDDQIHWFSIVNSLMIVLFLSGMVAMIMLRTLYRDISRYNQLETQEEAQEETGWKLVHGDVFRPPTHSDLLCVCVGTGVQFFGMLLVTMIFAVLGFLSPSNRGGLMTAMLLVWVLMGLLAGYSSSRLYKMLKGSEWKKITLQTAFLFPGVAFVIFFILNALIWGEKSSGAVPFTTMFALVLLWFGISVPLVFVGSYLGFKKPAMEPPVKTSKIPRQIPEQAWYMNPLFTILIGGVLPFGAVFIELFFILTSIWLHQFYYIFGFLFLVFVILVITCAEIAVVLCYFQLCSEDYMWWWRSYLTSGSSALYLFLYAAFYFFTKLQITKLVSGILYFGYMFLASYAFFVLTGTIGFCACFWFTRLIYSSVKID

SEQ ID NO: 5777 - protein, 334 aa, Zea mays
  VARIANT 26: note = Ancestral polymorphism is S, Derived polymorphism is R
  VARIANT 167..334: note = Derived polymorphism lacks residues 167 to 334
MDGLPDADAAPLAAAPPQKRDEWSESGIARLLEAYEAKWLLRNRAKLKWSDWVDIAREVSVHCADDAAAAGKPPGGVGSSAKTPNQCKNKVESMKKRYRAETAAVARAGPAAAGPSWRFFARMDGLLKGPPVGPDQVQQQQALTNSRIDLRAPAKPEAEAEADFAAQLRDAVPGAFTDLMNMDANGAVPDKAEKADNSMQKESGPADSDANVSSPRSKVANEDVEEVEDKVWDRPKKRKSTDFDIAKSIELLASSFLKVEQARMEMYRETERMRVEAEIKKGEMELKRTEIMAKTHLQIARLFARKLKQSSGKNGGSSSVTAEVDTLTKKGENG

SEQ ID NO: 5778 - protein, 390 aa, Zea mays
  VARIANT 375: note = Ancestral polymorphism is G, Derived polymorphism is C
MSREKPPAPAVVSTGCSGFMSCLSRHRRGPQQRAVPRGAAVLPRRSDAGGCDAGAEAAEGCWKRVQLLEEEEEEGKRLSGHEERPAPGAPERVARGRAKQDRAEGGGEVTDRVGNGAKATAEGGGSVMSMGTAKTTAATTCASAGHGVQEVVRLEDGSYMREVRRVVGRPWERLAVQVSRPVVPADAASASEVLGKMAAMNAEDLRKFLVQLMPLEDITGQKNPGEPVRRAARPSSGDDLVEALVLDTMGMLESLLLEGLKIQMASPATDPAAGDGRRDRAVAVGKDCMVHVVLMQARDPKERYGAIGDPMIGLIEASLEKKDATAVRLRILGLHVAGISFVVRRPSDDGSRCMLWSAYLRRCKDSHDGDGGGDGCRCICVRNPNRFFRR

SEQ ID NO: 5779 - protein, 194 aa, Zea mays
  VARIANT 177: note = Ancestral polymorphism is R, Derived polymorphism is C
  VARIANT 162: note = Ancestral polymorphism is G, Derived polymorphism is R
MANKATAPTSWRWRLLLLLLVTVAALCWIPPAIAAVAAAAAASTSNGARRSLLGFVEAQGNASYHCTLSGPCVPCQYSEKNDEKYSCSETGYRLPLKCVQAQNATKEGNMSKQRKILDDASTSGGTKSASGGPKHYITYRSCVPLVGEENLSVLGFEIMMAGMLLVSGPFVYYRKRRTNLMQGAARIPTSDPRF

SEQ ID NO: 5780 - protein, 253 aa, Zea mays
  VARIANT 203..253: note = Derived polymorphism lacks residues 203 to 253
MAMAMPMAVARVTSLACAPRQAQHRRRHSLAPPCASGAVEVRVCTNRTCARQGGREVLAALAGLAPPAVDVASCGCLGRCGAGPNVAASVPGSAAVFGHVGTAARGAQLLEHLLGPAEFDAALGLTALATREKAEAALEKGNADEAEALLTEVIGFNACGGLHLVYMSRSKARLEIGDIPGALGDAEEAIRIAPRFPQAHLLRGDALFAMGEYSVAEDAYADALDLDPSIRRSKSFRARVERLREKLVSANNP

SEQ ID NO: 5781 - protein, 278 aa, Zea mays
  VARIANT 51: note = Ancestral polymorphism is R, Derived polymorphism is C
  VARIANT 127..278: note = Derived polymorphism lacks residues 127 to 278
MPPPRTSKPRRFFPFPNLDWRYCLLPVGTVGWGSFQLGYSGNADLEPGRCRRTDGKKWWCSRDAVADQKYCERHMNRGRHRSRKHVEGQPGHAAKAMSAVAVAAAAAALAGAEATAAAGLAVNQHRQPGKSYATVFGQVYSKADKPKYNLLVMNLCRLCFFFLNPPHTVQFLAVEKKSHPSIHLHFKFGRIYDVSSRGRALARSTEDLARATGSVAASPSGSTSSTSSSPESRATSPFPALDSDPCRTFLHCYLQKGKECRAGSNVVGIYLRLTTMTI

SEQ ID NO: 5782 - protein, 333 aa, Zea mays
  VARIANT 2..333: note = Derived polymorphism lacks residues 2 to 333
MRKEFIKLRKASVQSQKFWRARLAKKIFEYMRRDVASIRIQKHVRAHSARKAYLQEKHNEQFLESQTRWRQHRAYAAYKQQQKASLILQCLWRARIARKELRKLRMEARETGALKEAKDKLEKRVEELTWRLDVEKRLRADLEEAKSHEIEKLQSALQKMQENLKEAHATIVNEKEAAKLAIEQAPPKIVEVPVIDNAKLEELTTQNKELEEELSTFKQKAEDLENKLIEFQKQSDELSQETQEQASKVIQLQELVERLESKIATFESEIELLHNNSALAIQAVVTPEMNQTTIIEEFDKGHQLEEVKTVNEQVVVPPVKNLSKQKSQQIQED

SEQ ID NO: 5783 - protein, 321 aa, Zea mays
  VARIANT 283: note = Ancestral polymorphism is V, Derived polymorphism is L
MERAASVISSLLGGGGGSGAQAATVKSVLVYPIKSCRGISVPQAPITATGFRWDRQWMLVNSKGRACTQRVEPKLALVEVQMPPEAFAEDWHPTPDDHMVIRAPGMEPLKVPLSVECATISDVSVWEWTGAAYDEGAEAAEWFSTFLGCPTRLVRFNEDSETRLTDPDYARGYKTMFSDGFPYLIVSQGSLDALNEILKEPIPINRFRPNILVEGCHPYAEDMWKSVKINKLTFQGVKLCGRCKVPTINQDTGIPSPTEPTETLQTYRSGEVLLRSHKNKRQVIVACIFSVEHITPYADICRYAGEIDSSWLKSLKLRKGL

SEQ ID NO: 5784 - protein, 266 aa, Zea mays
  VARIANT 42: note = Ancestral polymorphism is P, Derived polymorphism is L
  VARIANT 49: note = Ancestral polymorphism is R, Derived polymorphism is Q
  VARIANT 89: note = Ancestral polymorphism is Q, Derived polymorphism is H
  VARIANT 210: note = Ancestral polymorphism is R, Derived polymorphism is W
  VARIANT 247: note = Ancestral polymorphism is K, Derived polymorphism is R
MAMEKAASSLLGGGGGEPAATVKSIFIYPIKSCRGLAVSQALIISTGFRWDRQWVVVNGKGRAYTQRVEPKLALVQVELPPEAFAEDWQPTPYDHLVIRAPGMDTLKIPLAAEHTTIDDVSVWEWSGSAYDEGAEVSEWFSTYFGKPSRLVRFKEASETRPTDPYYGQGQGYKIMFTDRFPFLIASQVPSINQEDGIPGTEPNETLQTFRSDQVLRPSHKNKRQVYFGVNLVCKESLSGKDEGKIIKVGDPVYVVQAFDSSNEALV

SEQ ID NO: 5785 - protein, 519 aa, Zea mays
  VARIANT 330: note = Ancestral polymorphism is G, Derived polymorphism is R
  VARIANT 334: note = Ancestral polymorphism is Y, Derived polymorphism is H
  VARIANT 407: note = Ancestral polymorphism is D, Derived polymorphism is Y
MPPPPTAVSSCWRGTRRHRAKNLHPHPAAVSVKQPGSGVRFQQFSSLASAAAPALRVLRYQPASTLYESPSSTPPRQLQAMAMEKAASFLSSLLGGGGGEPAATVKSIFIYPIKSCRGLAVSQAPITSTGFRWDRQWVVVNAKGRAYTQRVEPKLALVQVELPPEAFAENWQPTPDDHLVLVSRSKRARYSSLNPPQAGIGALPDPRMPGDPPQFSVPLTTSGAAAATSTSPTVPVSQDSMAFQPVAGPGFREWRTLKDTMFIHSSQNRAVIRAPGMDTLKIPLITEHTTIDDVSVWEWSGSAYDEGAEASEWFSTYFGKPSRLVRFKEGSDIYISLGIASETRPTDPDYAQGYKIMFTDCFPFLIASQGSLDALNEILKEPVPMNRFRPNCLLLVSFLLIKLVLFDSILVDGCHPYSEDLWKTIKINNLTFLGVKLCNRCKVPTINQEDGVPGTEPTETLQTFRSDQVLRPSHKNKRQVYFGQNLVCKESLSGEGKVIKVGDPVYVVQAFASSNEAPA

SEQ ID NO: 5786 - protein, 422 aa, Zea mays
  VARIANT 368..422: note = Ancestral polymorphism lacks residues 368 to 422
  VARIANT 367: note = Ancestral polymorphism is S, Derived polymorphism is P
  VARIANT 366: note = Ancestral polymorphism is R, Derived polymorphism is W
  VARIANT 359: note = Ancestral polymorphism is G, Derived polymorphism is V
  VARIANT 353..422: note = Ancestral polymorphism lacks residues 353 to 422
MGKKKKRVDKVFCYYCDREFDDEKILVQHQKAKHFKCHVCHKKLSTASGMAIHVLQVHKESVTKVPNAKPDRESTEIEIFGMQGIPAHVLAAHYGEEEDPSTKVPKVEVPQVRPVIMPNSLGMAFPPRPAYGVAPPIYNPALNPLMARPPIWPAAPAQAWYPQQAAYPQQSAVSVPPIVAGLPPQQPLFPIQNVPTPMTSAAANVLQTSFPMAPPGVPSPVAPHVSQPLFPVNTSAVNGAVNSPFLASVAPGTIPASSPAAVGVAGIGYGTNNQGTRDPAVGSSPAVSNNKASGAQPATNEVYLVWDDEAMSMEERRLSLPKYQVHDETSQVSCVSYDTIIVVSQTKGFKGMQFLNVLVEYESLIWSYNIKTRWLRFCQYGSIYCSLSLVENVTRVLLQMNSVDAAIDRRISESRLAGRMAL

SEQ ID NO: 5787 - protein, 155 aa, Zea mays
  VARIANT 117: note = Ancestral polymorphism is L, Derived polymorphism is P
  VARIANT 108: note = Ancestral polymorphism is D, Derived polymorphism is V
  VARIANT 84: note = Ancestral polymorphism is A, Derived polymorphism is V
  VARIANT 71: note = Ancestral polymorphism is R, Derived polymorphism is C
  VARIANT 69: note = Ancestral polymorphism is G, Derived polymorphism is D
  VARIANT 55: note = Ancestral polymorphism is A, Derived polymorphism is T
  VARIANT 46: note = Ancestral polymorphism is D, Derived polymorphism is Y
  VARIANT 45: note = Ancestral polymorphism is G, Derived polymorphism is D
  VARIANT 13: note = Ancestral polymorphism is G, Derived polymorphism is R
MELPVSWAVAQPGPGGWFEWVGYRGVAAMVRDAGLDLRVSLRTDGDALPGWVADAAAADPDVLFTDRSGHRRVGCLSFAIDELAVLVGKSPLQAYEAFFRSFADEFDDLFGSTITELFEKTGPTDQQGFSLVLVFAVLVFMSSVFIGHLMNDINV

SEQ ID NO: 5788 - protein, 469 aa, Zea mays
  VARIANT 21: note = Ancestral polymorphism is A, Derived polymorphism is V
  VARIANT 108: note = Ancestral polymorphism is K, Derived polymorphism is T
  VARIANT 266..469: note = Derived polymorphism lacks residues 266 to 469
  VARIANT 282..469: note = Derived polymorphism lacks residues 282 to 469
MGWSAGLWWLLAAVWVVVAAAATAEGEVAVGAAPRRHAYASMMYMGTPRDYEFYVATRVMMLSLRRLSPNADRVVIASLDVPPLWVQALKNDGVKVVSVKNLKNPYEKQENFNRRFKLTLNKLYAWSLVSYERVVMLDSDNIFLQNTDELFQCGQFCAVFINPCIFHTGLFVLQPSMDVFKNMLHELAVGRENPDGADQGFLASYFPDLLDQPMFHPPANGTKLWGTYRLPLGYQMDASYYYLKLRWSIPCGPNSVITFPSAPWFKPWYWWSWPVLPLGLSWHEQRRENLGYSSEIPLVLIQAVLYIGVIAVTRLARPSLSKMCYNRRMEKNTMFLLSLLRIVAAWSILAAYTIPFFIIPRTVHPLLGWPLYLLGSFSLSSIVINIFFLHPITVLTTWFGFIGALVVMAFPWYLNGVVRALAVFAYAFCCAPLIWASLVKTMSSLQVLIERDAFRLGEPNQNAEFTKLY

SEQ ID NO: 5789 - protein, 448 aa, Zea mays
  VARIANT 309..448: note = Ancestral polymorphism lacks residues 309 to 448
MARILVLALLTIASLLLPPVVASQQAAAKCEYRKHSGHRYRHPVGVRKIVVDAGGAGDFVSIQRAVDSVPEGNTVRVIVQINAGTYIEKVVVPASKPYVTFQGAGRDVTVVEWHDRASDRGPDGQPLRTYNTASVTILANYFNAKNISFKVSSRLPSRPPSTWPRDDGAAGAGKVTKPLRESQVSGLLLLNAAVSVRGRLLTDAPFPFPMSRLDTQNTAPAPMPGTQGGQAVAFRISGDKAFFFGCGFYGAQDTLCDDAGRHYFRDCYIEGSIDFVFGNARSLYKVRSTAAAAAYVRSRALATDRRRPSNNCGNARAQDCELHSTAQRFGSVAAHGRRDPCERTGFAFVNCRVTGTGRLYVGRAMGQYSRIVYAYTYFDSVIAPGGWDDWDHTSNKSMTAFFGMYRNWGPGVDAVHGVSWARELDYFAARPFLGKSFVNGYHWLTPDV

SEQ ID NO: 5790 - protein, 337 aa, Zea mays
  VARIANT 73..337: note = Derived polymorphism lacks residues 73 to 337
MEAVRHTPPTTTAQHRPGHGAPRGALLGPHLLAEIGLDEEGLGGGRGGERREGDEQRAGGEEDRRGDEEQEKQQAKTSTTSSLPSSSERSSSSACNNLTKGGAESDEEIRRVPEMGGASASASSGAGADERPKGEDGKQGQVAAPNPVSIGALKSLFLCQVIDVSGKEFKFTWASERGELCDIYEERRSGEDGNGLLLECGSAWRKVNVQRMLDESTKNLVKMRSEEAERLSKSRKSIMLDPANPSVKSQARSMAAAAVEGLFIAEFMSFSAFHRRVHVAQDLDKAYLSVFVWFRLHYSSLTLPCQSSGVEYAVITNFYPFYPRRVAKTRYKTMIID

SEQ ID NO: 5791 - protein, 273 aa, Zea mays
  VARIANT 105: note = Ancestral polymorphism is A, Derived polymorphism is V
MAAEGEAKNPSGGGEGGNPQHQQAVQAAPAEPPTAQGEAVQEAGAQATGQEPEGEKANRDGEGSAGEKDDGACRDLVLVEDPEVLAVEDPEEAAATAALQEEMKALVASVPDGAGAAFTAMQLQELEQQSRVYQYMAARVPVPTHLVFPVWKSVTGASSEGAQKYPTLLGLATLCLDFGKNPEPEPGRCRRTDGKKWRCWRNTIPNEKYCERHMHRGRKRPVQVVEEAEPDSASGSKSAPSKATEGAKKVDDKSPGSKKLAVAAAAAAAVQST

SEQ ID NO: 5792 - protein, 218 aa, Zea mays
  VARIANT 64: note = Ancestral polymorphism is R, Derived polymorphism is W
  VARIANT 138: note = Ancestral polymorphism is K, Derived polymorphism is M
MHHRFAGLVPTARPALPPIHGGVVGRSYPPVHRSLALRLAPFASASVRRACRPLAVSAQSTSLRPEKFFEVEMKVRDYEIDQYGVVNNAIYASYCQHGRHELLESVGISADAVARSGESLALSELNLKYFAPLRSGDKFVVKVRLAGIKGVRMIFDHIITKLPNHELILEAKATAVCLNKDYYPTRIPRELLSKMQLFLPVDSRGSNEDVNNRNNSCN

SEQ ID NO: 5793 - protein, 1053 aa, Zea mays
  VARIANT 624..1053: note = Derived polymorphism lacks residues 624 to 1053
  VARIANT 635..1053: note = Derived polymorphism lacks residues 635 to 1053
MASHQRGGGRVGGGGWGQANPNVIQGQAGRGYGGGRGGQYYGDDSRGRGGQYYGDDSGGRGGGRGGGRGFDGRDGGGYQEGRGGGRGGGGYQEGRGGGRGGGRYQEGRGGGRGGGGYYYEGRGGDRGGGGYYGGHGGGYQEGRGGGRGGRGYQGQGGSDYGRERGHGGLQTPRPALRQAGPPLADRYAADAAALRDKFKTMDIHRDEPMFPARPGFGAVGTPCVVKANHFFVGLVEKGLHHYDVAISPETTLRGIYRQVMSKLVSENRQTELGGRLPAYDGQKSLFTAGELPFKTKEFVVTLSGRMERRYKVVIKHATAVSLDQLLMLMAGYPTDIPAQALQVLDIVLRDIVLNERNTMEYVAVGRSFFSPLIDSMGPKNLGLGVEGWKGFYQTIRPTQKGLSVIIDISSSAFIRPLPLIDFVMEILNKDNRTFRSITSMDLVKLKKALKGMRIEVTHRGDIRRKYRIASLTNSPPSSQFFESSAGVQKSVADYFREAYHLEMHYDFLPCLQVGSDQRPNYLPMEVCKIVAGQQYRKKLEGQQVSKLMDSTCQRPSLREDNICQIVEQNDYNKTERASEFGMEVDYRPTSVQARVLPAPTLKYRGTGSDSLCCPKDGQWNMIKKQVVDGARVGNWACVNFCQELRADGVGKFCSDLVKWSRTTGVDMDNLRLPIYTARPEQAETDLRRLYQDARNKLRGQKFDLLLAILPEKNGSLYGNFKRICETEIGIMSQCCLDKNVRSAGPAYFANVAIKINAKFGGRNLEFANPKESLPGVTIEPTIIFGADVTHPAALDDTAPSIASVVASQDWPKVANYNGIVRAQGHRKELINGLEDIVKELLLAFEERSKRRPKQLIFYRDGVSEGQFKQVLEQEIPEIEKAWKALYNEKPKITFLVVQKRHHTRLFPNNPNDRQWADKSGNILPGTVVDKDICHPTEFDFFLCSHAGIKGTSRPAHYHVLRDDNNFTADALQSLTYNLCFLYSSCTRSVSIAPPAYYAHKLAFRARFYVNQDSDAATSVGSYGSSAPSAAAAAAGPKPLPEIKGELRRLMFYC

SEQ ID NO: 5794 - protein, 777 aa, Zea mays
  VARIANT 347..777: note = Derived polymorphism lacks residues 347 to 777
  VARIANT 359..777: note = Derived polymorphism lacks residues 359 to 777
MDPEDTTPPAPSQGDAETTPPPVLEVAAGEDSLASGGEAAERAHEEEELAREVMELGLQNEYLRSQIAGVRPAGDADEVPGLVRGWKEQVERMSREVQEQRLTREATEKALEHVNVAYAEADGKVQELTAKLAQAEQKMEKELKERDDKYLELETKLQRLLKRAKQRIQDIQKEKVDLEARFNEVNQKAEQAASLQLAAQQELERARQQASEGLRSMDAERQQLRTVNSKLRANLDETRLALEVRNSSLEKLQQSVLEKEQGQIYKTVNIIVFSYLVYAIWTQVTDVMFVKLLDKVQGSLQSAENKGMAIISELTAKHQKQIESLQAQLAEVSAERTKASETIQSLQVVLTEKDSEIAEIEAASTGEAARLRAALEEMKGELVHLKDEHEKERQSWESTCESLRSKLEASENACLRSEKESAEVKSQLELELSTRSQLLQTKDSDLMAAKHEISRLESEFSAYKVRAHALLQKKDAELTAAKSSDFIKEHEEAIREAEKEVAAALAERDKAIDDLQKAESRHGDEIEARDMALADAEKKLKDVMKKLDSVTSNFISEKGSWEKNLMNVEESWRLKCESLKVQSNDHVDDELKKNLGELTLKYEKLKEEHQSFRDIADRMIEDKEREITKLLKENRDLHQSLDARPTVSNNDHQSQGPVKDTMSVELAEQQILLLARQQAQREEELAQSQRHILALQQEIEELERENRLHDQQVGHLRLEFSIVNTEAMLKTELRNMERSQKREGIDMTYLKNVILKLLETGNWNFLFYLVAAGGHMM

SEQ ID NO: 5795 - protein, 272 aa, Zea mays
  VARIANT 161: note = Ancestral polymorphism is R, Derived polymorphism is W
MDVLLCCCLLLLLASAASAGSERCVRQGKAAYSSSLSPAPHGSSSGACGYGAMAAEINGGFLAAGGPRQHRGGLGCGRCFQMRCRDARLCSAGGVRVVLTDFHRSNRTDFLLAGPAFAGLAKPGMAQQLNRRDALSVEYKRIPCEYKEKNLSIRVEEAGDRSRGKLVVKLLYQGGQTDVLAVEVAPVGSSSEWRFMTRAYGPVWSTDRAPAGPLQFRAVVTGGYDGKWVWAEQEVLPADWRPGQVYDTGVRIVDVARDASRGCTAAAMDDWK

SEQ ID NO: 5796 - protein, 298 aa, Zea mays
  VARIANT 58: note = Ancestral polymorphism is V, Derived polymorphism is L
  VARIANT 84: note = Ancestral polymorphism is A, Derived polymorphism is V
  VARIANT 167: note = Ancestral polymorphism is A, Derived polymorphism is V
MFLADKYSSLLPFHHHHSKPSRRQQQKGEAHRFGTALAARLRGLLPLPASPLAALVRVADLLALTLAEAGPALACSGEGAAVAAHLDAGVALLDACNAIAARLDGLRRRRLLASLALHLLLSSTSPSGRTRARAALADRDPPAPPPLPWLPFEQPRGQLTAAARVLAAVDAVSSLAAAAAATVLAGGPATFPWVSGSGGDLPWAEPFNALSGQLAALGAGEVRAVDEAVRRLASALDSGTDNEGAVRAAAQEVGRRTEELAPRLDRLSDAVGGVFRAALGLRNAELGCLMVGPAGKPV

SEQ ID NO: 5797 - protein, 368 aa, Zea mays
  VARIANT 52: note = Ancestral polymorphism is R, Derived polymorphism is K
  VARIANT 14: note = Ancestral polymorphism is P, Derived polymorphism is L
MALQLAVLLLLLPLLAGASADDKFIRQVTTQGTRAGAGPGLLPEAQFAAFVRRHGRRYSGPKEYARRLRVFAANLARAAAHQALDPTARHGVTPFSDLTREEFEARLTGLRAGGDVQRLMSGVPAAPPASKEEVARLPASFDWRDKGAVTGVKTQGACGSCWAFSTTGAVEGANFLATGELVDLSEQQLVDCDHTCSAVAQNECNNGCAGGLMTNAYSYLMESGGLMEQSAYPYTGAAGPCRFDPTQVAVRVANFTAVPAGDEAQIRAALVRRGPLAVGLNAAFMQTYVGGVSCPLICPRAWVNHGVLLVGYGARGFAALRLGYRPYWIIKNSWGKQWGEQGYYRLCRGSNVCGVDSMVSAVAVAPAL

SEQ ID NO: 5798 - protein, 407 aa, Zea mays
  VARIANT 174..407: note = Derived polymorphism lacks residues 174 to 407
  VARIANT 169: note = Ancestral polymorphism is Y, Derived polymorphism is D
MGAASRLVTYVPLGFGLRSCNIKATELRPRFTQHSSSQVEPPAPQPPGGQDSRDRESMAAAPMVVPRVKLGSQGLEVSAQGLGCMGMSAYYGPPKPEPDMIALIHHAVAAGVTLLDTSDVYGPHTNELLLGRALRAAGGVREKVQLATKFGIRADADDGAWEIRGDPAYVRAACEGSLQRLGVGCIDLYYQHRIDNRVPIEVTVGELKKLVAEGKIKYIGLSEASASTIRRAHAVHPISAVQLEWSLWSRDVEADIIPTCRELGIGIVAYSPLGRGFLSSGPTMVDKLSDQDFRKELPRFQPENLEKNAVIFERVNAMAARKGCTPSQLALAWVHHQGADVCPIPGTTKVENFNSNVAALSVELTPQDMAELESYASAGVQGDRYHDFLNTWKDSETPPLSSWKADE

SEQ ID NO: 5799 - protein, 339 aa, Zea mays
  VARIANT 280: note = Ancestral polymorphism is P, Derived polymorphism is L
  VARIANT 279: note = Ancestral polymorphism is H, Derived polymorphism is Y
  VARIANT 256: note = Ancestral polymorphism is N, Derived polymorphism is S
  VARIANT 100..339: note = Derived polymorphism lacks residues 100 to 339
  VARIANT 24..339: note = Derived polymorphism lacks residues 24 to 339
MSNPGAPDTVTESAELVLPLLPPQDLAAAASACRALRAAVTAVTARRAGDAARGLEPLPIPFRNYVDSKPYAYFLYTPFSLTRLAPGASAPSAQPWGAAWTRPPRPTWPRPNLDGLPSAVYGCACAAAECGGTQCACADVEADAAGSGLEAGMGSLTECGDVCACAPSCGNRRTQRGVAVRLCVVRHLHKGWGLHAAEALSCGQFVCEYAGEFLTTEEARRRHKVYDELASGGKLCPALIVIREHLPSGKACLRVNIDATRVGNVARFINHSCDGGNLHPVLVRSSGLLLPRLCFFAARDIVEGEELTFSYGDARVRPKGLPCFCGSSGCSGVLPSEET

SEQ ID NO: 5800 - protein, 240 aa, Zea mays
  VARIANT 157: note = Ancestral polymorphism is A, Derived polymorphism is S
  VARIANT 174: note = Ancestral polymorphism is R, Derived polymorphism is K
MQQQMAGLVHHQAIGMVSFSSGANARHHVAVHAGRARLGRVTAAARPKYCPLRGAAAVAAPLASGRELLDQHTRPSNTTSSQQLTTTVRKDKFFEIEMEVRDDELDEYGVVNNAIYASYLHSDYLTEPVRYVSGRDVVLEKLGISVDYWTSTGNAMALSELNLKYFAPLRSGDRFVVKVKPVQIKGVRMIVEHMIEALPDRKLVMEGRATVVCLNKDFRPTRVFPELAARAKEVFSCKVA

SEQ ID NO: 5801 - protein, 335 aa, Zea mays
  VARIANT 31: note = Ancestral polymorphism is R, Derived polymorphism is S
MSFAAALHLRPTSATTHPRLHQSTRKSYFLRLQPSRRRLPVPRLSLTPTTASNSNSSPPPPSPSPAPAAPGSLLANWSPPRAIWRGLSALLLAGQVFHRVLTGRVHRRNLLAQLRRVGPGSAGVALLTAAFVGMAFTIQFVREFTRLGLHRSVGGVLALALARELSPVVTAVVAAGRVGSAFAAELGTMQVSEQTDTLRVLGAHPVDYLVVPRVLACVLALPVLTLISFALGLASSAFLADSVFGVSVSIILESARRALRPWDLISSLLKSQVFGAIIAVVSCAWGVTTHGGAKGVGESTTSAVVVSLVGIFIADFALSCLFFQGAGDSLKYAMG

SEQ ID NO: 5802 - protein, 1012 aa, Zea mays
  VARIANT 577..1012: note = Derived polymorphism lacks residues 577 to 1012
  VARIANT 419: note = Ancestral polymorphism is D, Derived polymorphism is G
  VARIANT 143..1012: note = Derived polymorphism lacks residues 143 to 1012
MSNLKLGVEVTSAHDLLPKEQDTANPFVEVDFDGQKFRTAVKDRDLNPVWNEQFYFNISDPSRLPELHLEAYVYHADRASNSKSCLGKVRISGTSFVSQPDAMPLHYPLEKRTILSRARGELGLRVFLTDDPSVRVSAAPAQQEFDMLSTPTTAQEQQAAANSISNPFQETRANPVRQFQHLPREQQRPAQPQPYYAEGSYGDQQQQQRSFSAVANKAAAPQPQVQVSRMYAPGPQQPVDFQLKETSPTLGGGRVIGGRVYPGQKAGAYDLVEKMQYLFVRVVKARDLPNMDITGSLDPYVEVHLGNYKMKTKHFEKNQRPEWDEVFAFPKEVMQSTMLQVVVKDKDVLRDDYVGRVSIDLNEVPLRVPPDSPLAPEWYRLMGKDGVRDRGELMLAVWYGTQADECFPSAIHAGSTPVDSHLHSYIRGKVYPAPRMWYVRVNVIEGQDIYPMENRIPDVLVKVRLGHQLLRTRQVRSPTRNFMWNEELMFVAAEPFEDDLLISVVDRVAQDKDEVIGEAIIPLARLPRRADHKPVLPAWFDLRRPGIIDVNQLKEDKFYAKVSLRVCLEGGYHVLDESTQYCSDLRPTMKQLWKPPIGMLEVGILSANGLNPTKTRNSRGSCDAYCVAKYGSKWVRTRTIVDSLSPRFNEQYTWEVFDHGTVLTIGLFDNCHISGDDNKDGSSGHMDKPIGKVRIRLSTLDTARVYTHSYPLLFLSPSGVKKMGELHLAIRFTVTSLINVLFTYSRPLLPKMHYAQPLSIVQQEMLRHQAVLLVAQRLGRMEPPVRREVVEFMSDARSHLWSMRRSKANFFRLMQVFSGFIAAGKWFADVCQWKNPVTTVLVHVLFIMLVLYPDLILPTIFLYMFLIGLWNYRFRPRFPPHMNTRISYADVALPDELDEEFDTFPTSKSPDLIRMRYDRLRHVAGRIQTVVGDIATQGERLQSLLSWRDPRATAMFLIFCLITAIILYVTPFQVVALCLGFFGMRHPRFRHKVPSAPANFFRRLPAKTDSLL

SEQ ID NO: 5803 - protein, 239 aa, Zea mays
  VARIANT 49: note = Ancestral polymorphism is I, Derived polymorphism is T
MAQPHFYQHIRYAVLHWVYVLSLNHIDSHIPHSWRGVHLPADVAVKMGINRCRSCMDGAWEAFICLSTVPDCKHQLPSVPHAVLAHQTVPLRCQWAVRRDPERDLIQINAHSADIVVPKDILVLHNDLKHRRLHDFLGERENLVPLRPLVLLKVLCLHLVVSKVHLHVRVKASSDVHVGQVACLDHAHEEVLHLLDKVVRPSLLARVHPAANDTAAAKRWACFLELEVYRLLWTWSIHP

SEQ ID NO: 5804 - protein, 144 aa, Zea mays
  VARIANT 24: note = Ancestral polymorphism is A, Derived polymorphism is T
MQANSSSGLAVSDECKVKFRDLKARRSFRFIVFRIDDKDMEIKVDRLGEPNQGYGDFTDSLPADECRYAIYDLDFTTVENCQKSKIFFFSCNERRSKVYLTEKRLGPLILHAPGARCCTPAPRTGSGGSWTASSARSRPPTPAR

SEQ ID NO: 5805 - protein, 661 aa, Zea mays
  VARIANT 307: note = Ancestral polymorphism is H, Derived polymorphism is L
MTDWVYMPWVTPSANPVRFVVRSPPPSCCQSRLGNRIVRESSMKGRLLLLLWAWAAATWVSVSAVTRLGRGVAGEQPLSRIAVERVVLAVNDAAYVKASPLVLGHKGENSEWADVEFFHPNPSDDDWIGVFSPANFSDAICEAENTGTPVLCTAPIKYQFANFENDGYNKTGKGYLKLQLINQREDFSFALFSGGLSKPKLISVSNKVAFANPKAPVYPRLAQGKSWNEMTVTWTSGYDITEAVPFVEWGEKGGRRLLAPAGTLTFDRNSMCGSPARTVGWRHPGYIHTSFLKDLWPDSPYTYRLGHRLMNGTRVWSKSYSFKASPYPGQDSLQRVVVFGDMGKAEADGSNEFSDFQPGSLNTTYQIIRDLEDIDMVVHIGDICYADGYLSQWDQFTAQIEPIASRVPYMIGLGNHERDWPGTGSFYGNLDSGGECGVPAQTVFYTPAENRAKFWYATDYGMFRFCIANTEEDWRPGTEQYKFIEQCLSSVDRQKQPWLIFLAHRVLGYSSCTYYESEGTFEEPMGREALQELWQKYKVDIAFYGHVHSYERTCPVYQSQCVVDGSDHYSGPFQATTHVVVGGAGASILDSEFTTSKIQWSHFTDFDHGFVKLTALNHSSLLFEYKKSRDGNVYDHFTISRDYRDILACSIDNCPRSTLAS

SEQ ID NO: 5806 - protein, 184 aa, Zea mays
  VARIANT 17: note = Ancestral polymorphism is P, Derived polymorphism is S
  VARIANT 19: note = Ancestral polymorphism is G, Derived polymorphism is E
  VARIANT 39: note = Ancestral polymorphism is G, Derived polymorphism is V
  VARIANT 106: note = Ancestral polymorphism is L, Derived polymorphism is R
MRLRSGRRLVSPPVAAPRGAARSVGPPRRHTADSGDGVGEDRLSSLPLDLQLEVLARLRCARGAARTSVLSRAWRGLWTQLRELAFDGSVGPDSLAGALCRLAGERTQVRPKLRRLCIHLPGNLKLGDARISSLLHAAYKLAPLELEFVVVHADAIAPEEAGPRRSQRLRKPNPKYFGDKWAQA

SEQ ID NO: 5807 - protein, 549 aa, Zea mays
  VARIANT 501..549: note = Derived polymorphism lacks residues 501 to 549
  VARIANT 442..549: note = Derived polymorphism lacks residues 442 to 549
MAAAAAARILRLAPRRIQVPKTSPLAALSFPLPRTAPIAAASGRRQRFCAVAQAPAPAAAATGAAGEAVGEFRKRLRVADVKGGEDEGAAWVGKELAVRGWVRTCRAQRTITFVEVNDGSCLSNMQCVLTPETEGYDQIDSVTTGASVLVEGVVASSQGGKQKVELKVSKITVIGKSDPTSFPIQKKRASREFLRTVAHLRPRTNTFGAVARVRNTLAYATHKFFQDNGFVWVSSPIITASDCEGAGEQFYVTTLLSNSADGGSLLKDIPATKDGRVDWSQDFFCKPAFLTVSGQLNGETYASALSDIYTFGPTFRAENSNTSRHLAEFWMIEPELAFADLNDDMACATAYLQYVVKYILENCKEDMDFFNTWIEKGIIDRLNDVVEKNFVHLSYTDAVELLLGSKKEFEFPVKWGLDLQSEHERYITEVAFGGRPVIIRDYPKEIKAFYMRENDDGKTVAAMDLLVPRVGELIGGSQREERLDYLEARLDEQNLNKESYWWYLDLRRYGSVPHAGFGLGFERLVQFATGMDNIRDTIPFPRVPGSAEF

SEQ ID NO: 5808 - protein, 150 aa, Zea mays
  VARIANT 143: note = Ancestral polymorphism is T, Derived polymorphism is M
  VARIANT 142: note = Ancestral polymorphism is G, Derived polymorphism is R
  VARIANT 135: note = Ancestral polymorphism is G, Derived polymorphism is C
  VARIANT 129..150: note = Derived polymorphism lacks residues 129 to 150
  VARIANT 115: note = Ancestral polymorphism is T, Derived polymorphism is M
  VARIANT 112: note = Ancestral polymorphism is G, Derived polymorphism is S
  VARIANT 102..150: note = Derived polymorphism lacks residues 102 to 150
  VARIANT 101: note = Ancestral polymorphism is S, Derived polymorphism is F
  VARIANT 98: note = Ancestral polymorphism is V, Derived polymorphism is I
  VARIANT 84: note = Ancestral polymorphism is A, Derived polymorphism is V
  VARIANT 83: note = Ancestral polymorphism is R, Derived polymorphism is C
MDDKLWCSRRLDAVKSGCIALSIVKQGTSWSSPTLATPGLFWAPHPTTSPSRCPAHRPPKAQPATQQALAQPSLGRGAERLHRAVHRQARDLMVVANIGDSWVVLGIASDDGVITTIQLIVHLKPNLTRKSLLAGHEFLCVGMAGVADVV

SEQ ID NO: 5809 - protein, 230 aa, Zea mays
  VARIANT 45: note = Ancestral polymorphism is G, Derived polymorphism is W
  VARIANT 54: note = Ancestral polymorphism is E, Derived polymorphism is K
  VARIANT 69: note = Ancestral polymorphism is P, Derived polymorphism is L
  VARIANT 121: note = Ancestral polymorphism is M, Derived polymorphism is I
  VARIANT 125: note = Ancestral polymorphism is V, Derived polymorphism is D
  VARIANT 127: note = Ancestral polymorphism is M, Derived polymorphism is I
  VARIANT 128: note = Ancestral polymorphism is P, Derived polymorphism is S
  VARIANT 130..230: note = Derived polymorphism lacks residues 130 to 230
  VARIANT 148: note = Ancestral polymorphism is T, Derived polymorphism is N
  VARIANT 149: note = Ancestral polymorphism is F, Derived polymorphism is C
  VARIANT 154: note = Ancestral polymorphism is P, Derived polymorphism is L
  VARIANT 156..230: note = Derived polymorphism lacks residues 156 to 230
  VARIANT 159..230: note = Derived polymorphism lacks residues 159 to 230
  VARIANT 162: note = Ancestral polymorphism is M, Derived polymorphism is I
  VARIANT 165: note = Ancestral polymorphism is K, Derived polymorphism is M
  VARIANT 167: note = Ancestral polymorphism is V, Derived polymorphism is G
  VARIANT 172: note = Ancestral polymorphism is L, Derived polymorphism is P
  VARIANT 185..230: note = Derived polymorphism lacks residues 185 to 230
  VARIANT 192: note = Ancestral polymorphism is A, Derived polymorphism is T
  VARIANT 196..230: note = Derived polymorphism lacks residues 196 to 230
MEIQVLDSLGTSSERNDLTDSDDMTYFRKKLTAILLSSDMNKRKGCLLYKYEKEVDTGSPSDVQILDSPTNPKKRKLLCAPDDIEVLMEDDDGPITQADLEGDSRMSKGEKIKDIKHYMDMRFWVLMPWKFNECYALFVIDHGKKHVTFIDFTPTQDWCKHMPYKSVNTSYLVLQTMVMWGNGRRMEFVRDARILRRNFVIDLLSYEDNSCRYTIPANIQQRFINISTKE

SEQ ID NO: 5810 - protein, 292 aa, Zea mays
  VARIANT 141..292: note = Derived polymorphism lacks residues 141 to 292
  VARIANT 153: note = Ancestral polymorphism is D, Derived polymorphism is V
  VARIANT 157: note = Ancestral polymorphism is H, Derived polymorphism is R
  VARIANT 158: note = Ancestral polymorphism is P, Derived polymorphism is L
  VARIANT 172: note = Ancestral polymorphism is S, Derived polymorphism is L
  VARIANT 182: note = Ancestral polymorphism is L, Derived polymorphism is P
  VARIANT 200..292: note = Derived polymorphism lacks residues 200 to 292
  VARIANT 208: note = Ancestral polymorphism is C, Derived polymorphism is Y
  VARIANT 215: note = Ancestral polymorphism is G, Derived polymorphism is R
  VARIANT 222..292: note = Derived polymorphism lacks residues 222 to 292
  VARIANT 232..292: note = Derived polymorphism lacks residues 232 to 292
  VARIANT 264..292: note = Derived polymorphism lacks residues 264 to 292
MDKVCSRTDGILGAKDQRTVTSKERPRLLLQGAILDEMMDNGFTLTTEPNILKEMITPPNIVNKMLNVVTGKSSTLGSKLPDAAASFVPWRRTTVKDASNEVYVNIVEELDACVNREGVLVKCEAYGEVQVNCSLPGVPELTMSFANTAIINDVTFHPCVRFRPWESNQILSFVPPDGQFKLMSYRVQKLKKTPIYVKPQLTSDSGNCRVSVMVGIRNDPGKPIDSITVQFQLPPLIISADLTQTMARLTSLPTRPICGQLGRYQKTKHRHSLEIYDWRKGSHNCMHCRHFR

SEQ ID NO: 5811 - protein, 381 aa, Zea mays
  VARIANT 31: note = Ancestral polymorphism is G, Derived polymorphism is S
  VARIANT 32: note = Ancestral polymorphism is A, Derived polymorphism is V
  VARIANT 56..381: note = Derived polymorphism lacks residues 56 to 381
  VARIANT 78: note = Ancestral polymorphism is S, Derived polymorphism is F
  VARIANT 79: note = Ancestral polymorphism is R, Derived polymorphism is W
  VARIANT 87..381: note = Derived polymorphism lacks residues 87 to 381
  VARIANT 219..381: note = Derived polymorphism lacks residues 219 to 381
  VARIANT 238..381: note = Derived polymorphism lacks residues 238 to 381
  VARIANT 330..381: note = Derived polymorphism lacks residues 330 to 381
  VARIANT 331..381: note = Derived polymorphism lacks residues 331 to 381
MPTTTTRRDYRLQPRCFSSPRSRPMAKRLAGADKEVLVEVVRFTHKSGLRGCDGGWKDFLAQNDRKFGASVSDPRKRSRDVLFAFLQTFPKDFQKIIGITSVSILPVKEPGRFYVDSYMGISRGFGRRIMYERLCSRAEQDNLLKVNKPTLPLAFGEFSMPTAVLLVVAFLVMSISIGIRSKSAPLMCALLVCFLLGSAYSIDVPLLRWKRHAFLAAFCIIFVRAVVVQLAFFAHMQQHVLKRPLAPTRSVVFATCFMCCFAAVIALFKDIPDVDGDRDFGIQSMTVHRLCINILMTAYAAAILVGASSTNLYQKIVIVSGHGLLASTLWQRAQQFDIENKDCITQFYMFIWKVFILRRVFSYTICVVKNHAKNNTPAIDM

SEQ ID NO: 5812 - protein, 204 aa, Zea mays
  VARIANT 13: note = Ancestral polymorphism is R, Derived polymorphism is K
  VARIANT 22: note = Ancestral polymorphism is V, Derived polymorphism is L
MGAYKYVSELWRRKQSDVMRFVQRVRCWEYRQQPAIVRLTRPTRPDKARRLGYKAKQGYVVYRVRVRRGGRKRPVPKGIVYGKPKHQGITQLKFQRNKRSVAEERAGRKLGGLRVLNSYWVNEDSTYKYFEIILVDVAHTTIRNDPRINWLCNPVHKHRELRGLTSAGKKFRGLRGKGHTHHKNRPSRRATWKRNQTLSLRRYR

SEQ ID NO: 5813 - protein, 207 aa, Zea mays
  VARIANT 44: note = Ancestral polymorphism is G, Derived polymorphism is S
  VARIANT 52: note = Ancestral polymorphism is S, Derived polymorphism is N
  VARIANT 66: note = Ancestral polymorphism is S, Derived polymorphism is R
  VARIANT 76: note = Ancestral polymorphism is S, Derived polymorphism is C
  VARIANT 103: note = Ancestral polymorphism is P, Derived polymorphism is S
  VARIANT 168: note = Ancestral polymorphism is S, Derived polymorphism is N
MQWLISGEYCHMRRTMQWLISNHRTSLMQINCNGEHMKIIEDNGPGAAFYASAKAMTNGNHTFYVSKLIQRLARFSKYDTMYHLHRDDDPEIDKDVIKWPKKPVLLDTDLCEVDDCWHDTPLDGFSLNLYALVAHSSYCSVCLQILLVMVDSLAKLSMDVGDKDLVYSLLLVFSGMLMDEKGKECILDNIQITISVLSELVSYPHMM

SEQ ID NO: 5814 - protein, 259 aa, Zea mays
  VARIANT 5: note = Ancestral polymorphism is S, Derived polymorphism is W
MSGRSWTIMAPLLASMLLVGLAVGSEEEEDGGGKKKPHVNHGKFKAEPWTDGHATYYGGRDGLTDTTDGGACGYKGELGKDYGTLTAAVGPSLYTNGTGCGACYELKGPKGTVVVTATNEAPPPVSGQKGEHFDLTIPAFLKIAEEKAGIVPITYRKVACERKGGIRYTITGNQHYSEVKVTNVGGAGDVVALWVKGNKRVKWTPMKRSWGQLWTTEVDLTGESLTFRVMTADHRKATSWHVTPRDWQFGKTYQATKNF

SEQ ID NO: 5815 - protein, 258 aa, Zea mays
  VARIANT 145: note = Ancestral polymorphism is T, Derived polymorphism is I
  VARIANT 157: note = Ancestral polymorphism is G, Derived polymorphism is W
  VARIANT 196: note = Ancestral polymorphism is T, Derived polymorphism is M
MDDSDLDSAALWAAIDSAAAKASSRVRCAASDDDHRGEVLQPARPFKNPRLVSASHATPPPPAPLPLPSPSPRLHASPYATPDAAAARNRLQVVESPPPHELWGLPMASPIAAAYDGGLLPSLSVANFKNYQDVALSILERSDYTTISGNPYIKKSGWRKISCFFNVSFEIKDHSIEFDENRNVNRAEFLVRASMTIFLELDVQDEKWRSLDPKGGVHEVFTFRSATHHQILKWSPQILVIVKVVCVAVSSVQEYTGT

SEQ ID NO: 5816 - protein, 190 aa, Zea mays
  VARIANT 145: note = Ancestral polymorphism is P, Derived polymorphism is L
MIYVITRTSISNAYPIFAQQGYENPREATGRIVCANCHLANKPVDIEVPQAVLPDTVFEAVLRIPYDMQLKQVLANGKKGGLNVGAVLILPEGFELAPPDRISPELKEKIGNLSFQSYRPNKKNILVIGPVPGIGKIHTKGGNLPIIDWQRFYVLGELQIHSSAAGNSQSQPKEACAMNCRGTSTFHAKV

SEQ ID NO: 5817 - protein, 628 aa, Zea mays
  VARIANT 149..628: note = Derived polymorphism lacks residues 149 to 628
MSRWRAAAYSISAAAASRNSAAEAGALSRALAKAPSPPSLPLQTLTRNFAKSAAAATATSPGPGASSPPAGPRPEIRLKSMFLSKPCSLALPPDSPHRAVDPQYKGIKRFLLTLLLFYSKQSKSIRGANVVYDRITSQVDAPTIYDVFQLEKTFKTTFSLLVLHMWLVLRRLKEEGKDGVKFGQYIYEMYNHDVELRVSKAGVNLLLTKWMKELEKIFYGNIVKYDAAISPEARQDDLVNVIWREGLMSPQTETKASVGFKAGVKDYKLTYYTPEYETKDTDILAAFRVTPQLGVPPEEAGAAVAAESSTGTWTTVWTDGLTSLDRYKGRCYHIEPVPGDPDQYICYVAYPLDLFEEGSVTNMFTSIVGNVFGFKALRALRLEDLRIPPAYSKTFQGTCEEMIKRAVFARELGVPIVMHDYLTGGFTANTTLSHYCRDNGLLLHIHRAMHAVIDRQKNHGMHFRVLAKALRMSGGDHIHSGTVVGKLEGEREITLGFVDLLRDDFIEKDRSRGIFFTQDWVSMPGVIPVASGGIHVWHMPALTEIFGDDSVLQFGGGTLGHPWGNAPGAAANRVALEACVQARNEGRDLAREGNEIIKAACKWSAELAAACEIWKEIKFDGFKAMDTI

SEQ ID NO: 5818 - protein, 111 aa, Zea mays
  VARIANT 27: note = Ancestral polymorphism is K, Derived polymorphism is E
  VARIANT 34: note = Ancestral polymorphism is E, Derived polymorphism is K
  VARIANT 44: note = Ancestral polymorphism is P, Derived polymorphism is Q
  VARIANT 48: note = Ancestral polymorphism is D, Derived polymorphism is Y
  VARIANT 63: note = Ancestral polymorphism is D, Derived polymorphism is Y
  VARIANT 86: note = Ancestral polymorphism is R, Derived polymorphism is Q
  VARIANT 106..111: note = Derived polymorphism lacks residues 106 to 111
MSGYGSCSGDRCDLDLRGEFDENLLRKVFELYYENGLLDLSYAPDVGDYLVCEDTSFVPCNKDQAPIPEGMMGTEVEKRLNGQSYRWEQREGQQMSSSNRSPDTSQFHKFG

SEQ ID NO: 5819 - protein, 156 aa, Zea mays
  VARIANT 1: note = Ancestral polymorphism is M, Derived polymorphism is I
  VARIANT 5: note = Ancestral polymorphism is A, Derived polymorphism is V
  VARIANT 7..156: note = Derived polymorphism lacks residues 7 to 156
  VARIANT 19: note = Ancestral polymorphism is C, Derived polymorphism is Y
  VARIANT 46..156: note = Derived polymorphism lacks residues 46 to 156
  VARIANT 102: note = Ancestral polymorphism is P, Derived polymorphism is L
MKCNACWRDLEGQAVSTTCGHLLCADDARKILNNDGTCPICDQVLSKSHMKPMDINPGDDWRNKRIYLPGNPQVPGFIPTEKPTTFDSCAPLIATHPLEMNPFAMVNREPYPLDIRGELDDTTAFKNFKKWGGIEFPLPFGRVLSPTESFIHELDE

SEQ ID NO: 5820 - protein, 55 aa, Zea mays
  VARIANT 3: note = Ancestral polymorphism is L, Derived polymorphism is M
  VARIANT 16: note = Ancestral polymorphism is W, Derived polymorphism is S
  VARIANT 23: note = Ancestral polymorphism is N, Derived polymorphism is S
  VARIANT 30: note = Ancestral polymorphism is S, Derived polymorphism is Y
  VARIANT 36: note = Ancestral polymorphism is L, Derived polymorphism is M
  VARIANT 42: note = Ancestral polymorphism is I, Derived polymorphism is T
  VARIANT 47..55: note = Derived polymorphism lacks residues 47 to 55
MLLSCAQELKHGVALSQEFYHANICDRVVSEGGHYLIALGEIYRVAQILYLSFSV

SEQ ID NO: 5821 - protein, 733 aa, Zea mays
  VARIANT 226..733: note = Derived polymorphism lacks residues 226 to 733
MPSSRRTTGRGGAGAGAGGAGAGDAGGGDGDRVPRFMGNNRDHNPRELRSWARRTGFHPSAFFSGESNSSFASSAAPQPPPPPPPASSRRPPRPPPERDPDPDAEDDLDPAPGRGRGRRPRRRIDLRGELQIPPGFGREEAVPGSAEPDARRGGARGDATRRNGGVERGQAPANAGRNGNGALADADARKKAEDAEAKRKAEEAEARRKKEDEERDAELAAYYQEQWANEDEGAAGAAAAAAETAPLYEASGLRCGVTENPGWAPLIFYGIQHYLSIAGSLVFVPLILVPTMGGSDKFKHIMRELQGAILVGSVFQIILGYTGLMSLFLRLINPVVVAPTIAAVGLAFFSYGFPQAGSCVEISMPLILLVLLCTLYLRKISLFGNHIFLVYAVPLSVAIVWAYSFFLTAGGAYNFKGCSSNIPSSNILLDSCRRHLETMRRCRTDVSSAWRTAAWVRIPYPFQWGPPTFHSKTGIIMIIVSLVASVDSLSSYHAASLLVNLSPPTRGVVSRAIGLEGISSFIAGVWGTGTGSITLTENIHTLETTKMASRRALQLGAAVLVVCSFFGKIGALLASIPLALAASVLCFTWALIVALGLSTLRYTQAASSRNLIIVGFTLFISLSIPAYFQQYEPSSNLILPSYLLPYAAASSGPVRTASSGLNYAVNALLSINVVVALLVALILDNTVPGSRQERGVYVWTDPKSLEVDPATLEPYRLPEKISCWFRWAKCVGM

SEQ ID NO: 5822 - protein, 271 aa, Zea mays
  VARIANT 39: note = Ancestral polymorphism is G, Derived polymorphism is C
MAFAKVGAATQLENRGALSKRLRNDVSVREGDWNCPQCGNVNFSFRNVCNRGACGAPRPSPSPSPRMMPAPPAPGYDRLPLFYGGGGGAPSPISLGSGSYGGPYPHLGMRYGYGPPVGAPGSYGLFSSYGQPGPMSGMGYGPGPELGRYSYGFRGSPMPVSSPWSGGAIAENNDNIASRKRRGGPDGLSEGDWTCPKCDNINFSFRNTCNMKKCGAPRPTPGANTSSSRKDNKEAPEGSWTCPECNNLNYPFRSVCNRKGCSYNKSAPTNN

SEQ ID NO: 5823 - protein, 237 aa, Zea mays
  VARIANT 154: note = Ancestral polymorphism is R, Derived polymorphism is C
  VARIANT 30: note = Ancestral polymorphism is P, Derived polymorphism is A
  VARIANT 14: note = Ancestral polymorphism is A, Derived polymorphism is T
MATSELPSESDAFAFPCGDDGTTSPALSPPVVISVLASILERHIALNERAMAAASGLDQSAPGDKDDDDDSDPAAAAARKRARAFDGGTVLDMSLHAFLERFSRYAHVSPQVYVVAYAYLDRLRRGAGVRVVRANAQRLLTTAILVASKFVEDRNYRNSYFAAVGGLAAAELSALELDFLFLMQFRLNVCAGVFRSYCRHLEREVSHGGWYRVDRRLGRPLVCAGEARAQQRQAAAV

SEQ ID NO: 5824 - protein, 232 aa, Zea mays
  VARIANT 200: note = Ancestral polymorphism is M, Derived polymorphism is V
  VARIANT 147: note = Ancestral polymorphism is L, Derived polymorphism is H
  VARIANT 140: note = Ancestral polymorphism is G, Derived polymorphism is D
  VARIANT 139: note = Ancestral polymorphism is S, Derived polymorphism is F
  VARIANT 137: note = Ancestral polymorphism is A, Derived polymorphism is V
  VARIANT 129..232: note = Derived polymorphism lacks residues 129 to 232
  VARIANT 122: note = Ancestral polymorphism is A, Derived polymorphism is V
  VARIANT 98: note = Ancestral polymorphism is R, Derived polymorphism is C
  VARIANT 94: note = Ancestral polymorphism is P, Derived polymorphism is T
  VARIANT 43..232: note = Derived polymorphism lacks residues 43 to 232
  VARIANT 33: note = Ancestral polymorphism is G, Derived polymorphism is S
  VARIANT 30..232: note = Derived polymorphism lacks residues 30 to 232
MAALSAPLRAIAAGSRVAASDPVKVSVRRRREGKMYTARKKIQKEKGLEPSEFEDSVAQNGNQELKSDLKDLYINNAIQMDVTGSRKAVVIHVPYRLRKAFRKIHVRLVRELEKKFSGKIAAMRCPLPRPPDHSDGAGSGRRWGILLASQVGITSDLFFVFFPAGFLLCEKKQVTQLNKWSLSRVSEFGYARVHATRGDMLVQFVSSSTMEVLDQFRIVKPDPARRLWNKPV

SEQ ID NO: 5825 - protein, 368 aa, Zea mays
  VARIANT 154..368: note = Derived polymorphism lacks residues 154 to 368
  VARIANT 331..368: note = Derived polymorphism lacks residues 331 to 368
MVRDSTCEASWEETFRWQRPHRPEELGVRDVAVDPFSLRQFSRVDIDRPLPIPSVSVDDRRVSPARFNGASVPAGSAPSSPRAPTAGGLKAPAAPTWWDDGARPIAHSAPSSGAGELPRSKLSAAEDETEVPDSGFDVALSSTAERKASEPQRWGSDVPLIAAADAEECSAMDGRGKQTKHAGKAPFTCCMFVPGLTRRVKPPTSSTATAAARSSSSGKFSNTAGTAVQLQPINPGTCSARPSTMSLAVSLERFDCGALSTPSSPRGLGLDDGDGGAASASSYFDLPLELILGCDAEDEADLPVCAAFLFDSAGIRKSVLKRRLQAGAGWEPRRPSLGKVSMDAAGRISNPQLRVSLKSRSPEATWSP

SEQ ID NO: 5826 - protein, 408 aa, Zea mays
  VARIANT 173..408: note = Derived polymorphism lacks residues 173 to 408
MPLLARSTTAGPRRRAFVLALLLLPPLFLILLHRTSSPSLRPLPAPRKPSSRSQSCDYSAGEWVRDPLAGSSLRYDNTCKEIFKGWNCIANGKPNARDLLSWRWRPVGPGCELPRLDPRRFLEHLRDTSIGFVGDSLNRNMFASLVCMLRGVSGEVRKWRPAEADRGFTFLRYNLTVAYHRTNLLVHYGRWSANPNGGTLESLGYKHGYRVDVDIPDQTWVEACSFHDVLIFNTGHWWWAPSKFDPIRSPMLFFEKGRPIVPPLLPPAGLDLALQNMLMFANKAMRPNTVKFFRTQSPRHFEGGDWNEGGSCQRNQPLSSEEVEEIFSLDNNSTNVEARLVNQHLVKALEQQSSFRVLDITRMSEFRADAHPSTTGGKKHDDCMHWCLPGPTDTWNDLLASSLEVVES

SEQ ID NO: 5827 - protein, 200 aa, Zea mays
  VARIANT 154: note = Ancestral polymorphism is P, Derived polymorphism is L
  VARIANT 127: note = Ancestral polymorphism is P, Derived polymorphism is L
  VARIANT 112: note = Ancestral polymorphism is V, Derived polymorphism is I
  VARIANT 108: note = Ancestral polymorphism is S, Derived polymorphism is L
  VARIANT 102: note = Ancestral polymorphism is C, Derived polymorphism is Y
  VARIANT 94..200: note = Derived polymorphism lacks residues 94 to 200
  VARIANT 89: note = Ancestral polymorphism is E, Derived polymorphism is D
  VARIANT 77..200: note = Derived polymorphism lacks residues 77 to 200
  VARIANT 74: note = Ancestral polymorphism is W, Derived polymorphism is R
  VARIANT 55: note = Ancestral polymorphism is R, Derived polymorphism is W
  VARIANT 30: note = Ancestral polymorphism is G, Derived polymorphism is R
  VARIANT 29: note = Ancestral polymorphism is R, Derived polymorphism is C
  VARIANT 23: note = Ancestral polymorphism is D, Derived polymorphism is N
MAATLLLASATVLLALAAAWLWDYVVGVRGPPYSFLSGCNHEMRKMKAEADDGLRLDVHDHNYLPRVMPHFLARKQQYDRFSFQRHAGEPFLYWMGPRPRVCLFDYELVRQVLFNKSSHFFKDAAHPTILAMLGKGLVLVEGTDWVRHRRVVNPAFAMDKLKEKELANAAGKLAECQKTIASLERQIKSLTDLIKHMIYI

SEQ ID NO: 5828 - protein, 85 aa, Zea mays
  VARIANT 71: note = Ancestral polymorphism is M, Derived polymorphism is T
  VARIANT 44: note = Ancestral polymorphism is H, Derived polymorphism is P
  VARIANT 41: note = Ancestral polymorphism is V, Derived polymorphism is A
  VARIANT 40: note = Ancestral polymorphism is S, Derived polymorphism is P
  VARIANT 17: note = Ancestral polymorphism is T, Derived polymorphism is M
  VARIANT 16: note = Ancestral polymorphism is S, Derived polymorphism is L
  VARIANT 12: note = Ancestral polymorphism is N, Derived polymorphism is S
  VARIANT 8: note = Ancestral polymorphism is P, Derived polymorphism is L
  VARIANT 4: note = Ancestral polymorphism is G, Derived polymorphism is S
  VARIANT 3: note = Ancestral polymorphism is D, Derived polymorphism is G
MIDSLMIPILNNSGMSTSECILLREDVEHNVYVAILNVVSVSHHTKMELSYLLSLADITSTGVVLPHDAQTKGSFRNHTCTCQII

SEQ ID NO: 5829 - protein, 156 aa, Zea mays
  VARIANT 130: note = Ancestral polymorphism is C, Derived polymorphism is Y
  VARIANT 126: note = Ancestral polymorphism is R, Derived polymorphism is C
  VARIANT 109: note = Ancestral polymorphism is A, Derived polymorphism is T
  VARIANT 103: note = Ancestral polymorphism is R, Derived polymorphism is C
  VARIANT 95: note = Ancestral polymorphism is M, Derived polymorphism is T
  VARIANT 61: note = Ancestral polymorphism is R, Derived polymorphism is K
  VARIANT 52: note = Ancestral polymorphism is A, Derived polymorphism is V
  VARIANT 40: note = Ancestral polymorphism is A, Derived polymorphism is E
  VARIANT 38: note = Ancestral polymorphism is V, Derived polymorphism is I
MAAAAAAPASVAPSSPKAAGDNRKTVVSVDASELEKHVLAVDDSSVDRAVIARILRGSRYKVTAVESATRALELLALGLLPDVSMIITDYWMPGMTGYELLKRVKESAALRGIPVVIMSSENVSTRITRCLEEGAEGFLLKPVRPADVSRLCSRIR

SEQ ID NO: 5830 - protein, 457 aa, Zea mays
  VARIANT 284: note = Ancestral polymorphism is A, Derived polymorphism is V
  VARIANT 240..457: note = Derived polymorphism lacks residues 240 to 457
  VARIANT 178: note = Ancestral polymorphism is P, Derived polymorphism is S
  VARIANT 61..457: note = Derived polymorphism lacks residues 61 to 457
MTEGQSETASAPEGVSGLRRNSDDVGWEYGVLVDLNNKDKRLNKELWKERLHEVHKYIARWAFNHAISFNACDNDEFKQMCEAIGQFGPGIEPPTMLDLRGRLLEEEYARTKSLLQEREAEKMKNGCSSMTDAWSDKKRSIMNWTKQSKTWVRMMWCKLTVNASNNMGAKKLLHVKRPYIFWTSCATHTINLMLQGIGNMPQFKKVIDQAKTFTIFVYGHTRTLECMRHFTEGKEIVRPGVTRFASNYLTLDSIQEKKDQLRKMVVHSRWDSLKDVKSKKGKNAIATILNPSFWKDVKLTLAVFAPLFKVLRLVDGDVKPLMGFVYGKLLKAKRQVKEALGNVENRFKDVVAVIEKKMAGRLDSPLHLTAYLLNPHYNYADPSIFDAPKITEGFISCVETFYYHDDEMQEQAANIKLQKFQNREDPFSKKLARTFENFDCNPGNSCLLIERFFISAL

SEQ ID NO: 5831 - protein, 428 aa, Zea mays
  VARIANT 293..428: note = Derived polymorphism lacks residues 293 to 428
  VARIANT 229..428: note = Derived polymorphism lacks residues 229 to 428
  VARIANT 43: note = Ancestral polymorphism is G, Derived polymorphism is D
MRGSVILALLAAAASSFFGAQAIFPDPNLTADWVGPGVCNYTDVYCVPLPFGPDRRSALVVAEVDLNHGDIAGFLPPELALLPDLALLHLNSNRFCDVLPRALRRLRLLHELDLSNNCFGTVLPRLFDRPLDAIFLNHNRLRFQLPDNFGNSPTSVVVLTHNAFGGCLPASVATMSGTLKEILLINNGLSSCFPPEIGLLRELTVLDVSFNQLAGLLPPELALMRKLEQLDVAHNLLTGAVPPGICDLPRLKNFMLAYNFFTCEPPSCARIVARDGDRSNCLPNRSSQRTPQQCAAFYARPLVNCAAFQCKPFVPPMPPPRRLPSPPPPSPPPPSLPPPSPPPPLPSPPPPQLLPSPPLSHSPPPPSPPPPAPVYHPPCPIMPPPLPCTPTHLWPSPPPYYPGPLPPTNPNIACDCQGIAWYCRWWLP

SEQ ID NO: 5832 - protein, 313 aa, Zea mays
  VARIANT 147: note = Ancestral polymorphism is E, Derived polymorphism is V
  VARIANT 164..313: note = Derived polymorphism lacks residues 164 to 313
  VARIANT 172..313: note = Derived polymorphism lacks residues 172 to 313
MAKRGHILKQEGVKFGSFDILTDNDVREGMKKFSNWPTVPQLYCKGELLGGCGIVIAMHDSGELKDVFEEHNIPLKPQGSKNEEAGQPESATEKGGAVVEPIGLTDAQKARLESLINSSPVMVFIKGTPEEPRCGFSGKLVHILKQENIPVSSFDILSDDEVRQGLKVLSNWPSYPQLYIKGELVGGSDIVMEMHKSGELKKVLSEKGVIPKESLEDRLKSLVSSAPVMLFMKGTPDAPRCGFSSKVVNALKKEGVSFGSFDILSDEEVRQGLKTYSNWPTFPQLYYKSELIGGCDIVLEMEKSGELKSTLSE

SEQ ID NO: 5833 - protein, 116 aa, Zea mays
  VARIANT 40: note = Ancestral polymorphism is V, Derived polymorphism is I
  VARIANT 28..116: note = Derived polymorphism lacks residues 28 to 116
  VARIANT 9: note = Ancestral polymorphism is S, Derived polymorphism is F
MILDYIGSSLGYEDGKFESAKFLRPASSFYHAAEDCQFIVDSENHAVRKADLGRRTLQTVYPVFNKSNDIWSWITDKLGMRKEATPTIQDFHADSMPLPWHLIQILEDTLLVVDRR

SEQ ID NO: 5834 - protein, 149 aa, Zea mays
  VARIANT 125: note = Ancestral polymorphism is C, Derived polymorphism is R
  VARIANT 71: note = Ancestral polymorphism is R, Derived polymorphism is L
  VARIANT 66..149: note = Derived polymorphism lacks residues 66 to 149
  VARIANT 40..149: note = Derived polymorphism lacks residues 40 to 149
  VARIANT 30..149: note = Derived polymorphism lacks residues 30 to 149
  VARIANT 20..149: note = Derived polymorphism lacks residues 20 to 149
  VARIANT 9: note = Ancestral polymorphism is K, Derived polymorphism is E
  VARIANT 4: note = Ancestral polymorphism is P, Derived polymorphism is S
MERPTLMRESHTSMVDLLIWTEGAPHESQQPTASAVGGAQDAPARCFCLRAVVRWSTHTKQRLEEEDGRWRCVVLGWRRGGRCHHRSQQHLSIAPPPGTPQHHDAIHVCSFNSEILKLVCSPVACVKLDSHASIGANYDKSLFLFLNSF

SEQ ID NO: 5835 - protein, 427 aa, Zea mays
  VARIANT 102: note = Ancestral polymorphism is P, Derived polymorphism is R
MAAADSSPLHIVIFPWLAFGHLIPGLEFAERLAEHGQRVSFVSTQGILRRLRPVAPALASLIDLVALPFPRIDGLPDGAEATSDLPPGTAELHVQAMDRLAPAFSAFLGAACADGSDRKVDWVLLDNFHASMADVASEHKVPCILNMPYSAATTEDFGIPDPSVLPMFRPFVETFKRCKVIAARSSFELEPESLPLMTKILGKPVIPVGLLPPAPAGGNTQRDDSAALSWLDEQPSKSVVYVAFGSEYPMTVKQLHEIARGLELAGTRFLWALKRPSVAHPDEDLLPPGFEERTRGRGSVVTGWVPQTSILGHGAVAAFMMHCGWGSTIEALQYGHPLVMMPVLVDHLSTARVMEQRKVGVKVRKEKSDEAFLGDNIATAIRAVMCEEESKRIFVANAKRMQEIVADDECHKRYIDEFVQSLRTYKN

SEQ ID NO: 5836 - protein, 166 aa, Zea mays
  VARIANT 91: note = Ancestral polymorphism is C, Derived polymorphism is W
MECLLGLLKVRVVRGVHLAICDPLTHSSDPYVVLRHGKQKVKSSIKYRTINPEWNEELTLSITNMMNPVKIGLFDHDTFTKDDSMGNAEFCILNFVEIAKQDLSDVPDGTVIKTIRPEKGSCLATESHITWKDGKVSQDMVLKLRDTETGELVLHLTWVNIPGVAM

SEQ ID NO: 5837 - protein, 377 aa, Zea mays
  VARIANT 124: note = Ancestral polymorphism is V, Derived polymorphism is M
  VARIANT 112: note = Ancestral polymorphism is P, Derived polymorphism is S
MIHSRKTLKITLWAKRATSFTIQNVYDPVSKKPILALFVGCLPKFYKGKYLLQLQIFITIYTSHITQRKDIRDYNSKQYQLHLPTQPEHALQTFQPPTIEHKTLEQLLTMNPYDYPDTGYECTVTVTEIDTSNTWWYPSCTKCGRKTTPHNTTYYCDLCKWDGYKFKFLISITMPLNDRYKLKFRASDATAIAQMFCFDNIARYIVGKSCEVILRSTNASTPIPPDLAQIVSLKFTFRVIPDDSSFDNQDQVPIALRIISITAAHGRQHALPLKPTNIIEGTSTPQNKLQLQLIENSPSNPFQNLSTSTPPPKQAARKLIYPPLSNPLTYQHTPKSDGEEEITEQTMDTSQIKGKKYALIRISSKKVQERKLTYPKQ

SEQ ID NO: 5838 - protein, 480 aa, Zea mays
  VARIANT 187: note = Ancestral polymorphism is T, Derived polymorphism is M
  VARIANT 215: note = Ancestral polymorphism is V, Derived polymorphism is D
  VARIANT 233: note = Ancestral polymorphism is R, Derived polymorphism is W
MAATPTIVLVPVWGIGHFVPMLEVGKRLLARSALPLTVTVLVMPLPAEAKRASEITEHIRQQEASGLAIRFHHLPAVEPPTDHSGIEEYISRYVQLYSPHVKAAVAGLTCPVAGVVVDIFCTALFDAAHQLGVPAYVYLITSAAMCALLLRSPTLDEEVAVEVEFEQMEGGVDVPGLPPVPASCLPTGLENRKIPTYRWFLYNGRRYMEAAGIIVNTIAEAEPRVLAAIADGRCTRGVPAPPVYSIGPVIPSTPPAEQQAQECVRWLDSQPPSSVVFLCFGSGGCFTAPQAHEIAHGLDRSGHRFLWVLRGTPEPGTKLPSDGNLAELLPADFLARTKDRGLVWPTKAPQKEILAHAAVGGFVTHCGWNSVLESLWHGVPMVPWPLGAEQHYNAFTLVADMGVAVALNVERKRKNFVEATELERAVKALMCDGETARKVRDKVMEIKAACRKAMEEGGSSNMSLQRLCDALVEGAVHPGK

SEQ ID NO: 5839 - protein, 167 aa, Zea mays
  VARIANT 123: note = Ancestral polymorphism is K, Derived polymorphism is I
  VARIANT 118: note = Ancestral polymorphism is E, Derived polymorphism is G
  VARIANT 114: note = Ancestral polymorphism is D, Derived polymorphism is G
MLSLPLWVFLISRVARHFLHSWMLLRNAMKHCYLNISISKNIVPDEIKGGKGGGVLHHSFHVSVFLDSMFHSDYCTSGSWAVPQLELAPHKPLAKFLCIKGIVFFCFWQGFALGILAGAGVIKSHHFWRDVEHIQEAIQNVLVILEMVVFFVVPSTGLFGSTPIHMD

SEQ ID NO: 5840 - protein, 79 aa, Zea mays
  VARIANT 16: note = Ancestral polymorphism is G, Derived polymorphism is S
  VARIANT 18: note = Ancestral polymorphism is A, Derived polymorphism is V
  VARIANT 35: note = Ancestral polymorphism is L, Derived polymorphism is F
  VARIANT 37: note = Ancestral polymorphism is V, Derived polymorphism is I
  VARIANT 46..79: note = Ancestral polymorphism lacks residues 46 to 79
  VARIANT 50: note = Ancestral polymorphism is T, Derived polymorphism is I
  VARIANT 68: note = Ancestral polymorphism is V, Derived polymorphism is A
MGMKREQERKKGCTTGTVYDTFCSPFSCLKKNDMLDVTLWLFMMKKMKKTVDIDNSQQPLSEGPGELVPKVTMEVCSWD

SEQ ID NO: 5841 - protein, 149 aa, Zea mays
  VARIANT 33..149: note = Derived polymorphism lacks residues 33 to 149
  VARIANT 36: note = Ancestral polymorphism is A, Derived polymorphism is T
  VARIANT 43: note = Ancestral polymorphism is T, Derived polymorphism is M
  VARIANT 46: note = Ancestral polymorphism is I, Derived polymorphism is F
  VARIANT 49: note = Ancestral polymorphism is G, Derived polymorphism is D
  VARIANT 51: note = Ancestral polymorphism is A, Derived polymorphism is T
  VARIANT 55: note = Ancestral polymorphism is S, Derived polymorphism is F
MKGDYHRYLAEFKTGAKRKDAADSTLAAYQAAQDIAVKELPPTHPFRLGLALNFFVFYYEILNSPDRACSLVKHVPLLLAFDEAISELDGLGEESYKDSTLIMQLLRDNLTLWTSDMQEDGGDEMRDQYKIIYYIQFVLIYSTFKVEMK

SEQ ID NO: 5842 - protein, 361 aa, Zea mays
  VARIANT 9..361: note = Derived polymorphism lacks residues 9 to 361
  VARIANT 84: note = Ancestral polymorphism is G, Derived polymorphism is C
  VARIANT 122: note = Ancestral polymorphism is L, Derived polymorphism is V
  VARIANT 151: note = Ancestral polymorphism is G, Derived polymorphism is S
  VARIANT 175..361: note = Derived polymorphism lacks residues 175 to 361
MKRAVSALWARRAVRQAYLYTPTAATATSSSPEFGASTSEAWDGRFRLHKPRGQHLLTNPRVLDAIARHAAISPGDAVLEVGPGTGNLTARLLASQAARVTAVEIDPRMVEAVTARAAALGLAHKFKVIAGDAVEVEFPEFDVCVANIPYGISSPLIAKLLFGPYRFRTATLLLQKEFARRLVAAPGDGEYNRLAANVRLVADVRLLMDVSKRDFVPMPRVDSSLVEIRPRGTVPGVDVSEWLAFTRVCFGQKNKTLAAIFKQKRMVVELLRRSLRTERCAGGVSLGPLEVDDSGEDDCGGNDDGSNRVVGFSEEEVAAFKEKVAGALDTAELAGKRPSKVSNDELKRLLRLFNDRGVRFQ

SEQ ID NO: 5843 - protein, 126 aa, Zea mays
  VARIANT 91..126: note = Derived polymorphism lacks residues 91 to 126
  VARIANT 84: note = Ancestral polymorphism is P, Derived polymorphism is H
  VARIANT 79: note = Ancestral polymorphism is I, Derived polymorphism is N
  VARIANT 73: note = Ancestral polymorphism is I, Derived polymorphism is N
  VARIANT 39: note = Ancestral polymorphism is A, Derived polymorphism is V
  VARIANT 36: note = Ancestral polymorphism is G, Derived polymorphism is D
  VARIANT 22..126: note = Ancestral polymorphism lacks residues 22 to 126
  VARIANT 12: note = Ancestral polymorphism is R, Derived polymorphism is C
  VARIANT 7: note = Ancestral polymorphism is R, Derived polymorphism is H
  VARIANT 2..126: note = Derived polymorphism lacks residues 2 to 126
  VARIANT 1: note = Ancestral polymorphism is M, Derived polymorphism is I
MQPELLRHFQDRDVVVTDHAVRKVKLDELAVALTDGVQACISDLAASLETEVGGGKGSVMGLNQGRNSHIREILATVQINVNQPTVRALHQWKEAIVDDCTKATQIDVLQLRADHAHHSKASVGEA

SEQ ID NO: 5844 - protein, 289 aa, Zea mays
  VARIANT 152..289: note = Derived polymorphism lacks residues 152 to 289
  VARIANT 118: note = Ancestral polymorphism is F, Derived polymorphism is V
  VARIANT 42: note = Ancestral polymorphism is G, Derived polymorphism is W
MAILPQILHSPHPRLTAAAASPSRAFCRAPRHLHASASRTRGQGRGRLATAAGASGPGPSSPEPYPSESDDGLVELPLFPLPLVLFPDATHALHIFELRYRIMMHTVLQTDLRFGIVFAGNSGSAAEVGCVGEVVKHERLADDRFFLICKGQQRFRVARVVRTKPYLVAAVHWLEDRPPAEPPAHGEDAEALATDVEALMRDVIRIANRLNGKPEKEVGDLRRGLFPTPFSFYVGNTFEGAPREQQALLELEDTAARLRRERDTLRNTLNYLTAASAVKDAFPSSPSSG

SEQ ID NO: 5845 - protein, 969 aa, Zea mays
  VARIANT 388..969: note = Derived polymorphism lacks residues 388 to 969
MILPSNLYSNYFTHVSAASSLMQFPLLFLLLIIAHSWCTLCRASLLEVKEAARTMTSRFWGQGDSESEEEEEEVESEQGSDNDDDGGHGGAGRGAQNRYLKNQEDDSDESDTGHREIRSLRDKHNEEMRSIVDQMRNAMKINDWVSLQESFEKLNKNLEKVVRVNESTKVPKMYIKALVLLEDFKAEAPANKEAKEKMSSSNSKALNKMSQKLTKNNKQYKEQIQKCREHPESFEDEAADDKDMDDDDVDESDAEIEDPDKIAMSESEEDHDEEDGDKEGWEQKRSKKDKMMDKQFLKDPSEITWDIVDKKLREIIASRGKKGTGRIERVEQLTFLTRVAKTPAQKLETLFHVISAQFDVNPSLLGHMPVNVWKKCVNNMLLVLDILQQYPNIVVDTSFEPDEKETQKGADYNGTIHIVGDLVAFLERLDSEFLKTLQCTDPYTKDYVQRLREEPLFLVVAQNVQDYLERVGNLKAAAKVALRRVELVYYKPQEVYDAMRKLAEQPEDCVDDDDAEAGDEHQAVDDNRGPSPFVAIPEVVHRKPTFPESGRTLMDGLMSLIYKYGDERTKARAMLCDIYHHAISDEFSVARDLLLMSHLQDGVQLMDISSQILFNRVMAQLGLCAFRAGLINEAHGCLTELYFTGRVKELLAQGVQQSRYHEKTPEQERLERRRQMPYHMHINLELLEATHLICAMLIEVPNMAASTYDKRRPMSKTFRRLLEVSERQTFVGPPENVRDHVMAATRALKKGDHQKAFSVINSLEIWKLLRNREHVLEMLKLKIKEEALRTYLSSYSSSYKSLSLNQLTTMFDLSEQHAHSIVSKMMMHEELQASWHQPTKCTVFHSLDQTRLQELLFQVAEKISVLVETNERAYELRTGGTLEGLPPRRRGEAQDSSKWQESFVASQGRQGGGNRFGYSGRGAASGQSGGLQRGRGNHVSRGGYGGNTRFQDASAHMVNLNRVGRVVSV

SEQ ID NO: 5846 - protein, 350 aa, Zea mays
  VARIANT 93..350: note = Derived polymorphism lacks residues 93 to 350
MAAGLGARPSATFVAGRFRPLAAPLRPVRSGKFVVPKRCFIVSSRLAWVEDELMEIQKSQEQSSVKSKKRPPLRRGKVSPQLPVPGHIPRPSYVGAKGLPELCKGQLHDAQGITGMRAACKLAARVLDFAGTLVKPSITTNEIDAAVHNMIIEAGAYPSPLGYHGFPKSICTSVNECVCHGVPDSTQLQNGDIINIDVNVFLNGYHGGTSRTFACGQVDDSIKHFLNAAEECLEKGISICRDGVNYRKIGKKISKLAYFYGYYVVERFVGHGIGTMYHSEPLILHHANENSGRMVEGQTFTIEPILTMEKTECVTWEDGWTTVTADGSWAAQFEHTILVTRDGAEILTKV

SEQ ID NO: 5847 - protein, 775 aa, Zea mays
  VARIANT 76..775: note = Derived polymorphism lacks residues 76 to 775
MEGLTLIDVSVEDDLLFDIASPPHAGEVFHPHFWRIFLVEEWWDWCLFGFVDLTGDDSSLGSLVGAVATSSGAFPSAAGRAPDPDSVMEEQALPERTDSPEQRKAKKGVNLRKSLAWDSAFFTSEGVLDTEELAIVNSTFRKTQGSRLPGIVEEMSRSGESATSTLESESWVMESVETELFDNVRASIQRSLGKPDKVPGRPVAGSNHPKATANVPRVAVAARKGVDRMPQPKIRAPVSTSQGAGVRQRAQVTTKEPVAARVNLLGAAEAKISSKPPRALPRVAMMRSSTTTAVTSGVSDKRSSTGGAANRQAAGKTASTSAGLRSGGGTKSSSISKSGPFTSAATSHGVSMDTKPEAKTKSATLSNKNRTAQRVPVHPPSKSGISKTIPSRSSGNTIPAKGHADRASPSISPSSSMDSMSSVISGASTASTVGRMSHTSESLNGLSPSLRKSNDCPPTPKLRPPVVTEGHSSGTAAPGVNLKATSEMTNQRKGFKPSGLRRPTPKIGYFDAEKYIDQNIGAQLQPQPSKVQCLPDTTQFQSMNVDAAPATYVQQDSKLTATPHEESCASESKVVKLLPLKVEVEPFKVAEPCTHQTDPVVVRPEAVQQQSMEIQCLLYATPNSQQTFGQQVLEPIVAPHEVSACKSNTVKTPLETVQMEVEAPLEAVQLEAEAFKVDKPEACRHLVSPIVVKLEDKFCDQNARALVAEREDCTLMTEAVVALATDYSKENIPVLHENIQANVDASSLVEVLTQKLSSISLGEDNSNVALRSCSE

SEQ ID NO: 5848 - protein, 209 aa, Zea mays
  VARIANT 172: note = Ancestral polymorphism is K, Derived polymorphism is N
MPWRGGRCCGEAEALQKRSCLRNTTVAPGLLSKSLAIEAIINKGDTPSPPNPTPTRDFAQLPPIGLPRRFRQPLDPIGSIDRTSSSGCRWPGPLSKWSTTSVEKRQSESARIRDKYPDRIPVIVEKAGKTDVPEIDKKKYLVPADLTVGQFVYVVRKRIKLSPEKAIFVFVKNTLPPTASLMSAIYEENKDEDGFLYMTYSGENTFGSA

SEQ ID NO: 5849 - protein, 233 aa, Zea mays
  VARIANT 206..233: note = Derived polymorphism lacks residues 206 to 233
  VARIANT 197: note = Ancestral polymorphism is R, Derived polymorphism is C
  VARIANT 185: note = Ancestral polymorphism is A, Derived polymorphism is V
  VARIANT 180: note = Ancestral polymorphism is V, Derived polymorphism is M
  VARIANT 157: note = Ancestral polymorphism is V, Derived polymorphism is M
  VARIANT 83..233: note = Derived polymorphism lacks residues 83 to 233
  VARIANT 47: note = Ancestral polymorphism is F, Derived polymorphism is I
  VARIANT 24..233: note = Derived polymorphism lacks residues 24 to 233
  VARIANT 15: note = Ancestral polymorphism is S, Derived polymorphism is F
  VARIANT 1: note = Ancestral polymorphism is V, Derived polymorphism is M
MVRCSLQELRSRIDSIRNTRKIKEAMKLVAAAKVRPAQEAVVSSRPFSEALVEKGNAYFQHRPYIPLEQDLEVNGVPTVKDSQAICDLVYSLFISEEVDKVELLYSKFVSLVRSDPIIQTLLPMSPKGEICDVNGVCVDATEDELFRLTTKEGKLTVEHEKVKIETQPFSPVVHFEQDPVQILDALLPLYLNSQLLRALQESLASELAAQMSAMSSATDNAIELRKNLSIAYN

SEQ ID NO: 5850 - protein, 998 aa, Zea mays
  VARIANT 854: note = Ancestral polymorphism is R, Derived polymorphism is G
MHRAAASPLRHSLRRLSSCSAATPLVWAARFFVPCSESRLPAFTSSRFLRSAAAAPCRCCSGAAITERPASAWRGVATMADGSSRFGHVLTSLPKPGGGEYGKYYSLPALNDRRIERLPYSIRYLLESAIRNCDGFQITEKDVENIIDWENTAPKLVEIPFKPARVLLQDFTGVPAIVDLASMRDAMARLGDDPGKIDPLIPVDLVIDHSVQADVVRSENALQANMQREFDRNKERFAFLRWGSVAFNNMLIVPPGSGIVHQVNLEYLGRVVFNTDGILYLDSVLGTDSHTTMIDGMGVAGWGVGGIEAEATMLGQPMSMVLPSVVGFKLSGKLRDGVTATDLVLTVTHILRKHGVVGKFVEFYGEGMSELAVANRATIANMSPEYGATMGFFPVDHVTLGYLKLTGRSDEKVEMVEAYLRANNMFVDYNEVSIVVTISDTKGNICPKRPHDHVALKDMKSDWHSCLGNKVGFKGFGVPKEQHDKFVKFTFHGQPAEIRHGSIVIAAITSCTNTSNPSVMLGAGLVAKKACELGLEVNPWIKTSLAPGSGAVTKYLLKSGLQKYLDHLGFNLIGYGCTTCIGNSGELDEDVAKAVTDNDIIAAAVLSGNRNFEGRIHALVRANYLASPPLVVAYALAGTVYIDFETEPIGKGKDGTDVYFKDIWPSNEEIAEVEQSSVLPDMFRSTYEAITQGNPMWNQLSVPKADRFPWDPSSTYIHDPPFFKDITPTPPGPCSIENAYCLLKFGDSITTDHISPAGSIPRDSPAGKYLLERGVQPKDFNSYGSRRGNDEVMARGTFANIRIVNRLLNGEVGPKTIHVPTNEKLFVFDAAMVSSSPSYVSTNILFSIILRQKRHSIRLRYKADGHHTIVLAGEEYGSGSSRDWAAKGPMLLGVKAVIAKSFERIHRSNLVGMGVLPLCFKPGEDADSLGLTGHERYTIRLPTNVSEIQPGQDVQVLSDTGKSFTCKLRIDTMVELAYFDHGGILHYVLRNLVRQQQQ

SEQ ID NO: 5851 - protein, 745 aa, Zea mays
  VARIANT 209: note = Ancestral polymorphism is F, Derived polymorphism is S
  VARIANT 255: note = Ancestral polymorphism is P, Derived polymorphism is L
MLLRRTAAAAAAAAKRSTSLTPERALRHVGAAGRGHATTSSSTPRRRGHRRAPTAESDPLTSTAAPRPFSDYHPPRPDSPDDDALARRLAAAVLASPHPTSLPPLPFLPLLRPVHLLLGLPLLASHPHLTGLLLPLLLLFPSRPQQHPHPHLLRCFAVAAHLAVLRGGGGAARAILSRAVRFPSPHRHFVEHYISTYKTFSSDPASFDFLLLCLPSAPLLRRLRQYGISPSPEACNAVLSRLPLDEAIELFQELPHKNVCSYNILLKALCDAGRVKDARQLFDEMASAPDVVTYGILIHGHCALGELENAVKLLDEMVAGGVEPNATVYTSVVALLCDKGWISDALRVVEDMVQRKVILDEALYTTVLSGFCNKGDLVSARRWFDEMQRKGLATDGVTYTTMINGLCRAVELEEAEKLLQEMWARRLDVDEVTYTVLIDGYCKRGKMAEAFQMHNAMVQRGVTPNVVTYTALTDGLCKQGDVQAANELLHEMSNKGLELNACTYNSLINGLCKAGYLEQAMRTMADMDTACLKPDVYTYTTLIDALCKSGDLDRAHSLLQEMLDKGIKPTIVTYNVLMNGFCMSGRVEGGKKLLDWMLEKNIHPNAATYNSLMKQYCIENNMKSTTEIYKGMRSRDVGPNENTYNILIKGHCKARNMKEALYFHDEMIQKGFRLTATSYSALIRLLNKKKKFVEARELFHDMRKEGLTAESDVYDFYIDLNFNEDNLESTLALCDELVEASIVKS

SEQ ID NO: 5852 - protein, 339 aa, Zea mays
  VARIANT 28: note = Ancestral polymorphism is I, Derived polymorphism is M
MPTTICSLSKQHKWKIAVSVMLFSVLLIACDSPFRAFFSKYLSSIVPSSGSSHDTALTQDKAAKQIEHGMYNMNTSSINAASSWSIMKEEFTFQAHDRPFNNCHASTIVEVEKEIFLVSYFGGSIEGAPDVKIWTQRYSDGYWHPPVVADEENATAMWNPVLFQLPSHELLLFYKIGEHPQNWSGAMKRSLNGGMSWLEREQLPPGILGPIKNKPFLLDDGRLLCGTSVESWNSWGAWLEVTEDAGRTWSKYGPIFIQGEKLGVIQPVPYQTTNGSIRIDGIKMKDGRVALAYNTVSRGTLKVAVSTDDGLSWQEVVTLENAEGWEFSYPAVIQTQGRP

SEQ ID NO: 5853 - protein, 260 aa, Zea mays
  VARIANT 14..260: note = Derived polymorphism lacks residues 14 to 260
MFADLGHFNQLSIQIAFTCMVYRALILAYMGQVAYLCKHHIMESDYRIGFYVSVPGKLFSSVLIIRDANHSAISESVLILNAYNAPFQRKLGGPLWQLLFLQQLWEAKPSSLEHKTLEKCIRLDDSDLPSLRLMVCWSCRILPAQWRAVEDRSGGGAVGQKRSSPDKMHRSTMDAVYHHHHQESPLTGNVAATATAGKKLGVERFKLPPIYISLSRKEKDDNFLAMKGTKLPQWPKKRAKNVETLQVLNTWLEIDLILYF

SEQ ID NO: 5854 - protein, 114 aa, Zea mays
  VARIANT 45: note = Ancestral polymorphism is S, Derived polymorphism is N
  VARIANT 40: note = Ancestral polymorphism is C, Derived polymorphism is Y
  VARIANT 5: note = Ancestral polymorphism is D, Derived polymorphism is Y
  VARIANT 3: note = Ancestral polymorphism is G, Derived polymorphism is D
MYGEDARTIAELSIDDYLYPDADLYNVSGLPPLALPPLTCDLSRSKWVFDNVSVPAYREKDCTFLTKQVSCLPNGRPTTCDSTGDGSPTSAPSPRHGRGVADAVVVAGGRARGG

SEQ ID NO: 5855 - protein, 306 aa, Zea mays
  VARIANT 244: note = Ancestral polymorphism is D, Derived polymorphism is Y
MASLQQRKQRKDESGGAHAVADEAVRGTGKGKSEAAPGRRKVTYGFHLVEGRMPHGMEDRHVAEFRKLDDGNEVGLFAVFDGHSGADVATYLREHLFDNILMDQSGSDFWTDPTEAIRRAYHRTDRKLLKKTAGDDSGEGMKKGRRRGGSTAVTAILINGEDLVVANVGDSRAVLCDAGGRARQLSVDHEPLRERRAIEARGGFVTEIHGDVPRVDAQLAMARAFGDRSLKEHISSDPDVAIEDVGDGAELLVLASDGLWKVMSNQEAVDEARGIEDARKAAVRLVDEAVRRGSKDDISCIVVRLH

SEQ ID NO: 5856 - protein, 177 aa, Zea mays
  VARIANT 7: note = Ancestral polymorphism is W, Derived polymorphism is R
  VARIANT 10: note = Ancestral polymorphism is I, Derived polymorphism is V
  VARIANT 45..177: note = Derived polymorphism lacks residues 45 to 177
  VARIANT 55: note = Ancestral polymorphism is K, Derived polymorphism is N
MRLQYAWNAIPFILLFCAISTNKIFSNNKPFSFTIASARLGNSFLDFVANLNDSKVKVGQILEEDTQNIVNMTMNVSSGWSIVKEELILPARGAPFNSCHASTIVQIEEDNFLVAYFGGSREGAPDVKIWMVTGILQWWLMNKMGCPCGILFCFSFPPVSCFSSTRLVKKFRSGAVP

SEQ ID NO: 5857 - protein, 192 aa, Zea mays
  VARIANT 48: note = Ancestral polymorphism is Y, Derived polymorphism is N
MAKARRSPFAAAERFLGFPRGGPSPGAVAPAPAAFDDLPDLAEADVWYSAAAAAATNDPGSPRATASRQVEAAEGRRGPRQGGLSRAFGDGPGRQAAASAPVEVPAWPARFAFPDADPSLLFEMEMGGDDHDEGREGDDGRQGQGAGWVPPHVYLARRQARASVVEGAGRTLKGRDMSRVRDAVWSRTGFDG

SEQ ID NO: 5858 - protein, 326 aa, Zea mays
  VARIANT 242: note = Ancestral polymorphism is R, Derived polymorphism is L
  VARIANT 124: note = Ancestral polymorphism is P, Derived polymorphism is S
MEDNICEPSEMMSKRNSARGRAHGPHGVRPLVNDAREVEASLGKEPPRDRSGVAARGRGGGDGLGGGDVRSTSSAGGECGKAPECVVCILELRDGDSARLLPCCGHRFHADCVGAWLRLHATCPLCRASVVATRSTFANPDTLGHVSAMTRYTYRVRRPSMFRFTIPSSRFTCADAGSTTCRIDALVRVSSLISVSTLCSWRPSSASLKMESAGGHAGPDHHHLPGAGFAEAVRHVHPRHLRRVARVLAETLVLDLGDLGADLAEDLRAPALGVGEVAALGGEVGQALPGLARGVRGAGARFICLFVSCNSRRHSSFLEARPHPDI

SEQ ID NO: 5859 - protein, 95 aa, Zea mays
  VARIANT 28: note = Ancestral polymorphism is R, Derived polymorphism is C
  VARIANT 31: note = Ancestral polymorphism is N, Derived polymorphism is I
  VARIANT 34: note = Ancestral polymorphism is A, Derived polymorphism is V
  VARIANT 43: note = Ancestral polymorphism is G, Derived polymorphism is S
  VARIANT 50: note = Ancestral polymorphism is R, Derived polymorphism is H
  VARIANT 53: note = Ancestral polymorphism is Q, Derived polymorphism is R
MEEELKRTATPSSLMSSLLRPSLTSHPRTSNAPASRLIGDNIGTGLVTSRKDQATGFSGLEGMRGCVVGDTGGYGSLVSVASLRQWWPCCCYQWS

SEQ ID NO: 5860 - protein, 567 aa, Zea mays
  VARIANT 182..567: note = Derived polymorphism lacks residues 182 to 567
  VARIANT 421..567: note = Derived polymorphism lacks residues 421 to 567
  VARIANT 489..567: note = Derived polymorphism lacks residues 489 to 567
  VARIANT 534..567: note = Derived polymorphism lacks residues 534 to 567
MMGRTGDGRRRDVDGRLEALLSGAGGEEPWLRRVALATALELRLLAPLAAPAVVVYMLIIVMSSTTQIVCGQLGNVQLAAASLGNNGIQVFAYGIMLGMGSAVETLCGQAYGAEKYEMLGVYLQRSTVLLTATGVPLAAVYALSEPLLLLLGQSPEIAGAAAEFAYGLVPQIFAYAANFPIQKFLQAQSIVAPSAYILAASFALHVPLSWLAVYGLGLGLLGASLTLSLTWWVLVLGQFAYIVWSPRCRATWTGFTWAAFADLPGFAGLSAASAVMLALEVWYFQVLILLAGMLPDPQIALDSLTVCTSIQSWVFMISVGFNAAASVRVGNELGAGNPRSAAFSAWVVTALSAFVSGIAGLVTFLLRDKLSYIFTGGEAVSRAVADLCPLLVGTIVLCGIQPVLSEFRPDTHPNSSGTTVLHKLIRWRTDLFGLLIFEPSHYTATGSFTFSDAFVLFFFPLVLNFLLTGRRRVMKGVAVGCGWQAMVAYINVECYYFIGVPLGVLLGFKFGFGIKGLWGGMIGGTLIQTLALIWITLRTDWNKEVEEARKRLDKWDDTRQPLVASKE

SEQ ID NO: 5861 - protein, 97 aa, Zea mays
  VARIANT 22: note = Ancestral polymorphism is E, Derived polymorphism is D
MLLLRASTAPFAYAKVDKVDAEEARHLRAQYLIHKVLEEKSPRPPAALARTSRPRVGVRLKKLRLAVRGLRARACRALLRHLRNLRRLVGHGAQGSP

SEQ ID NO: 5862 - protein, 543 aa, Zea mays
  VARIANT 370: note = Ancestral polymorphism is I, Derived polymorphism is N
  VARIANT 469..543: note = Derived polymorphism lacks residues 469 to 543
MQPLHQPPMNGQHGPPPPQGSGVPTASQQQAPPPSYYQQQQQQQQGPPPQYYQQGPPQPWAQQQQYAPPPPQYPPQMQQYAPPPQQYAPPPQQQYAAPPQQQYAAPPPQYAPPPPQYAPPPQQYAQPPQYAQPPQYGTTPGSGEVRTLWIGDLQYWMDENYLHYNAFAPVAQQIASVKIIRNKQTGHSEGYGFIEFYSQAAAEHTLMNFNGQMMPNIEMAFKLNWASASTGDKRGDNGSDHAIFVGDLAPDVTDSMLEDVFRANYPSVRGAKVVVDRITGRPKGYGFVHFGDLNEQARAMTEMNGMMLSTRKMRIGAAASKKNTDAQQTYATNGAYQSSQGNCSENDPNNTTVFVGGLDSNVDEEYLRQIFTPYGEISYVKIPVGKHCGFVQFTSRSCAEEAIQMLNGSQIGGQKARLSWGRSTQNRQASQHDANSQYNGNNYYRYQQPGNEGYSYGAPNAQDPSIQNYYGYPGYGNYEQQSTQEQQQQQPPPAQEQPPPAPQAVTIIVVTIAWALLECYQIRGTTVRAVPCRMRRPEDMEGI

SEQ ID NO: 5863 - protein, 748 aa, Zea mays
  VARIANT 555..748: note = Derived polymorphism lacks residues 555 to 748
MRRPQRRVAAKQTRLREVDEIRLLNEWIDAGKPLPRTKLLPPSKSAGPVPTAGEHPEYGACTLFDELPLSQKTKDGLRKAGFTEMSEIQRAALPHALCGRDILGAAKTGSGKTLAFVIPLIEKLYRERWGPEDGVGCIILSPTNDLAGQIFEVIKKVGQFHNFSGGVIVGKRKGIEIEKERVNSLNILVCTPGRLVQHFNETANFDCSQLQVFKLILFYDYQILDHGFRNQVDAIISQIPKVRQTLLFSATQTKSVKDLARVSLRDPEYISVHEEARTATPDTLEQYAMIVPLEQKLNMLWSFIKRHLNSKTIVFLSSVKQVKFVYEIFKKLRPGIPLKCMHGRMKHVVQQAIVADFNEATSVLFSTDITSRGLDIKNVDWVVQVDCPENIDNYIHRVGRTARYNKKGKSLIFLCPEEEAMLEKLKATESKIPIHIRKPKAEQLEQISQSIASVLVKFPNLQELGKRAFVTYLKAVYLQKDKKVFNLSRFSAEQFAAYAASLGLPVTPKIRFISHKKNVSKKDMEDIDMKQMKSSLEHEVTITPKINIDLTLCDGDDDILYPKKPTADANMDDRLDDVLHPKESATDTNVTGLERPFKKKKLKINVNRPSGTRVKYDDEGNAIPPLASVAEEVSLEPVVHKDKISQRYAEMLREMQKHDKEDKLEHKKTLREKKLQKKMKLKRKRQEDTGAGSEEDSGSESDRGQDTANKGKKRYFNSDDEDNDAAKDGDVLAQQEALALKLLSNMHS

SEQ ID NO: 5864 - protein, 756 aa, Zea mays
  VARIANT 216..756: note = Derived polymorphism lacks residues 216 to 756
MDSGGGEGGSTGGRFPILQANRDPESNWEVDVAKSLEQYLLKICSGEVSGEDESHSVNFAEAALLLQGSVQVYSRKVEYLYSLVLHAIEFLSHKKGINANILLKEGLSVQCNHGFHGTKASPRSRGGAFHGTKASPRSRGGAFHGTKASPRSRGGAFHGSKALPRSMGGATDQQENVTAQSNQSDPSTIPSEDYIFMGLDDVLMETRTSLDNNVDRDDLQRKIVRPPANLLVFEGDVLDSEASELDSYLLSTCDFYGDFLLLDPCDAPSVFDFLQGKHSGKENSVARQGSPAPSKSQANVFTSPNARSAGTGCKAASGKVLGGLDSTQKNPDQPSTQETSPDDKHWSDPVEPNFTDDVEKPHPDDIGDPVGDYSDDEDPWKPLNPHEPGSLKIRPYRRVKGSLRGVIGTLRKKTLTSIFPVAKMVGVIIPEHAKSFEAQQSQQEEHYGSQSPPRFEKYLASFEFGEENSNVFGDLKDDNGSDIGINFDYNDPDMPNDIDVDPDVPTYPDEIIAATPKGTHGTQDDRDTRESLDDLCRSHLVRFLMNALLASIAEVEKQSEMDARVSTWKERIEIALEEQDKNPPFDIGSYGEQILDALSSRTDSTGTASFSEIVCGRPKYEVARTFSALLQLVNSRSVYLDKGQATNELVCYTAENPFHVRLISPNRRPEMEAHFARKRVKSPLRNAGKGGESSLARHECPKKPLHKNGKIQVKTAIRLTPDGKRRRRSVTHLMQPINLESADECQWQTDSWASRA

SEQ ID NO: 5865 - protein, 405 aa, Zea mays
  VARIANT 298: note = Ancestral polymorphism is G, Derived polymorphism is D
  VARIANT 292..405: note = Derived polymorphism lacks residues 292 to 405
  VARIANT 203: note = Ancestral polymorphism is A, Derived polymorphism is V
  VARIANT 35: note = Ancestral polymorphism is P, Derived polymorphism is L
  VARIANT 11..405: note = Derived polymorphism lacks residues 11 to 405
MSEDPAGSRRWRCDLGGDERWLSGAAGDDQFDRLPDALLLVIFNRIGNVKALGRCSLVSRRFHELVPLVDSVLVRVDCVIPDEPPSSSSSSSTPSSPTASVRARGVFSQIARIVLGGIVKPIQALGQILSPANSASGFPAWSREARRLEAVHLEQVGAALAERGHGLLHGPVEGAGAELVEVLPAGVADGLDDHERGAVDPGAVRELQQRRVAQLHVAGGHLGSVGGGGGRGGERTVPELPELVAPHAERALPAGVRQRHPLQGGVLLDDLAKEVVPGGRGDEGADGPDDAQLEAAVGVQGLRDAAAVVVARGGSGGGGVRRSRGRGAVHPGAAEDDAALQRAAEHGLPPEHDAVVGAHVGDRELHPEAADAAEVPQHLGGRVVLLRVLLRRRGLGVAANGFMLI

SEQ ID NO: 5866 - protein, 218 aa, Zea mays
  VARIANT 69: note = Ancestral polymorphism is T, Derived polymorphism is I
  VARIANT 164: note = Ancestral polymorphism is G, Derived polymorphism is D
  VARIANT 202: note = Ancestral polymorphism is V, Derived polymorphism is M
MELPVSDVGTDDGVVLRWKAVFGSTLQSCVILGGTRVDRAAAAGPPHAPSSAPPAGDDDGGSIPESLYTNGGLKLRVVWTISSLIAAATRHYLLREIVKEHPTLERVALTDAGGQGTLSMGRDQLREFRDSPLAAAPAAAANRTQVPACNMKLRYAPLLELSDGTRIHGATLVVIKPIGDAGGKDLDELGAGAFDGPMKEAVAALGKRRAYLLEMNGF

SEQ ID NO: 5867 - protein, 73 aa, Zea mays
  VARIANT 9: note = Ancestral polymorphism is P, Derived polymorphism is L
MEDFYVTILYGLLLVAGGVAGYMKRGSAASLVAGGGFGAALLLAGALSAWAFAHGRGGAAAIFATVLQIVHSY

SEQ ID NO: 5868 - protein, 929 aa, Zea mays
  VARIANT 300..929: note = Ancestral polymorphism lacks residues 300 to 929
MATAVSKSAVKSHPRLPTTAQPPPPNPGSNAASAGGGAAPPPPPSPAAGATPSKNAAMAELKSRVLAALAKLSDRDTHHIAVEELDRIIRAPPSTDAVPMLLNALAPDSPGLASPARRECLRLLATLCTSHPDAAASHLHKVLAHLARRLKDPASDTSVRDTCRDVAGQLAAVYLRPLSASGVCEAGNATVTLFVKPLFEVMGEQSKSVQGGAAACLAKAVEGAGPGPGAIGMFGKLGPRICKLLGGQGVQAKAGLLGIMGSLAQVWKIQVRFWSARSRSRICMNAILYSVIPFYNDIMRTITMVIGLHNLSICSYLTFQVGAISSQNMQQTLQSIRDCLENSDWATRKAAADTLSVFATHSVHLIGDGTAPTIAALEACRFDKVRPVRDSMIDAVQLWKKLTGEDANADGRNKDLADGEGKLDSRRSIQRGGKSESFDDSSPDSPSNNVKGSSIAEKAAFLLKKRPTLTDRELNPEFFQKLETRKTDDLAVEVVVPHKTLQSHLRGEDETEEDDDPVGPADSNGSAEDEANLTQMRASFNFQNIRDKWAGQRGNRNKITKARTTDVEDRGEPSTKDSTAAAMNISGEGPFINNKTNWLAIQRQLSHLERQQTSLMNMLQDFMGGSHDSMVTLENRVRGLERVVEEMAREISLSSGRRGGGPALGFDSSPGRSSKHNGFHEYSNSKYGRSGDGRMGFAERYFSADAMASGTKNQSWRPDSEPWDSYAYSGSRSGMNVRRGLDSVSSDNRMARNERSNDQVGPRRGWDKGQGPFRFGEGPSARSAWRASKDEATLEAIRVAGEDNGNSRAAARVAIPELDGEALNDDNQGDERGPLWEAWTRAMDAVHLEDMDSAYAELLSTGDAELLVKLMEQTGPVVDQLSNEVANEVLHAVGQFLMEESLYDVALNWLQQVIHYILLQECNDVIIDE

SEQ ID NO: 5869 - protein, 923 aa, Zea mays
  VARIANT 675..923: note = Derived polymorphism lacks residues 675 to 923
MGSAHFAALLLCACLFVSGTVAADQNGNLTRPAEVRIGALFTFGSVIGMAVRPAIELAVADVNADPSLLWGTKLSVLMQDTNCSGFVGTIEALQLLAKDVVAVLGPQSSAVAHVISHAVNELHVPLISFAATDPTLSSLEYPYFVRATQSDYYQMGAIAAIISQYEWKQVIAIYVDDDYGRGGITALGDALAKRKCKISYKAKLPPGAAKTTIEDILMQVNDMESRVYVIHVNPDSGLNVFSAAKSLGMMSSGYVWIATDWLSAVIDSSVHGIPDVMELTQGVLVLRQHIADSDIQHAFLSKWNNLTRNGSSYFMHAYDSVWLVAHAVERFLREGNAMSFSADPKLQAKKGSSLQLDSLRIFNSGDKLLEKVWSANFSGVSGPVQFTLDRDLVHPAYDILNIGGTGLRTIGYWSNSSGLSAVAPENLSSSARDSSANNVQLRGVIWPGQTSEKPRGWVFSHHGMPMRIGVPLRTSYKEFVMQDDGPDGVKGFAVDVFKAAISLLPYPVSCKFVLFGDGLKNPSYSELVQKVSENYFDAAVGDIAIVTNRTRLVDFTQPYIESGLIIVAPARVIESNAWAFLKPFTFQMWCVLVVIFLFVGAVVWILEHRSNTEFRGPPSQQIMTVCWFSFSTMFFAHRENTVSALGRFVLLIWLFAVLIINSSYTANLTSLLTVQELTSGIQGLDSLISSSSAIGYQVGSFSRNYLVDELSIAESRLVALNSPSDYARALELGSGNGGVAAIIDELPYVEIFLSKYCKFKTVGQVFTKSGWGFAFPRDSPLAEDLSTAILALSENGKLQKMHDEWLSGTECSADNGAGPSNSLSLSSFWGLFLICGLACFLALVIFFLRIFCQYSRYSNQVEAQFAEPRVLNRPARLTTIKSLISFVDKKEEEVKNALKKRPNGTGQQHPSTPNAEEQPTLPP

SEQ ID NO: 5870 - protein, 300 aa, Zea mays
  VARIANT 58: note = Ancestral polymorphism is S, Derived polymorphism is F
  VARIANT 213: note = Ancestral polymorphism is A, Derived polymorphism is S
MTTTTTAAAAVAQLCAGPRRRKQAAGARLDLRWARLLRLAVVTRVLRLARDQLLACSSCGGGTAARRRYRRLGPPTSASAGPVLSPVDRDDDCAADAEAAAPRDAADDEDNVVSLKVSLLGDCQIGKTSFMVKYVGDDGEEQNGLQMTGLNLMDKTMPVRGARIAYSIWDVAGDHQSVDHVPIACKDAVAILYMFDLTSRCTLNNIVDWYGRARKWNKTAIPILIGTKFDDFAQLPLEMQWAIVNQARAYARAMKATLFFSSATHNINVNKIFKFITAKLFNLPWTVERNLTIGEPIIDF

SEQ ID NO: 5871 - protein, 105 aa, Zea mays
  VARIANT 10: note = Ancestral polymorphism is T, Derived polymorphism is M
  VARIANT 12: note = Ancestral polymorphism is C, Derived polymorphism is Y
  VARIANT 14: note = Ancestral polymorphism is N, Derived polymorphism is D
  VARIANT 22: note = Ancestral polymorphism is L, Derived polymorphism is F
  VARIANT 24: note = Ancestral polymorphism is K, Derived polymorphism is M
MVNVPKTKKTYCKNKECKKHTLHKVTQYKKGKDSLSAQGKRRYDRKQSGYGGQTKPVFHKKAKTTKKIVLKLQCQSCKHYSQHAIKRCKHFEIGGDKKGKGTSLF

SEQ ID NO: 5872 - protein, 129 aa, Zea mays
  VARIANT 90..129: note = Derived polymorphism lacks residues 90 to 129
MQDYQQLVLEILQVVFTTSFSTSSTAGLETLKVLSTTAICLEILQVLSTTNFINIINNCFENLASSIYDSMSLCDSHGIFFFLAFPFSGQFLPVQLLCCLHRCTVLCLQPLHLLFLLLPLEPSVRIGPD

SEQ ID NO: 5873 - protein, 194 aa, Zea mays
  VARIANT 9: note = Ancestral polymorphism is R, Derived polymorphism is S
MGTAKAKRRPVLICCGVLVAAIAVLAVVFVALYFTVFRPRSPKVVATAVVADLLPKGDGGGGQDLNLTVHVDVTVNNPNYAAFRYGDVVTLVRYHGSDVGMSVVPAGEIGARETLTVAAAVEVDTLKVAATPYFYVEFPTGKLPFETATAVAGEAVVLGAFKISASSQVACQVTVHLLPPNATSECTSTVHIGR

SEQ ID NO: 5874 - protein, 220 aa, Zea mays
  VARIANT 185: note = Ancestral polymorphism is G, Derived polymorphism is R
MSDDNNNKGSSKARRRAHRLACCVALGVLVILGALALAFYLRYRPRPPRVVATPVDVGIEEFRLLPHPALKLSVGVHVVVSNPSNAPFRYGAALSAVTYHGAPVGETLVPAGEVGGGATARVEPATVVDGVKVAESPHFASDAVAGVLPFVAVARVVGKALVLRAFEVPVSVEVVCLVRIYVFHGESSSRCVATVRTGSGAGSGSGAGFPEGAGRAQEHD

SEQ ID NO: 5875 - protein, 455 aa, Zea mays
  VARIANT 259..455: note = Derived polymorphism lacks residues 259 to 455
MIKWGLSSGTPADSYYEVRSDCTDGVPKSKFKIKAGKTLSARKWQAAFSPDGCLDIASVLSRIQRGGVHPTVRGEVWEFLLGCFDPRSTFDEREEIRQIRRIQYARWKEDCRQMDSHVGSGKVITAPLITEDGRPIKDPLVLLEATSDTNTSGDAPTTSINGNEVDESAERITDKQIIEWKLTLHQIGLDVLRTDRTMVFYENKENLSKLWDILAVYAWIDKDVGYCQGMSDLCSPMIVLLNDEADAFWCFEKLMRRLRGNFRCTDQSVGVANQLQHLASIIQVLDPKLHDHLETLGGGDYLFAFRMFMVLFRREVSFGDSLYLWEMMWALEYDPDIFFAACEEQGAVNKNKVSKSKLKGLRHFGKWDNKDKDKDKEDAKNGAEDGEDGPVPISVFMVASVLKEKREKLLQEARGLDDLIRILNDVNGNLDAKKACAGALKLHKKYLKKVQEKKP

SEQ ID NO: 5876 - protein, 346 aa, Zea mays
  VARIANT 234: note = Ancestral polymorphism is P, Derived polymorphism is T
MAADSSMGFHQGITASLYNHHMLSFQSNSDVGISGDATGAMVMAPGSVGGGSSNAGLFLSANTGVMGNAPGVAPSRTSSGDALLGTGTPKYKYVTGPPSDWSDREVAILKEGLVRYINSSFCFLNCFCLYSTVLFLFCSAAHMELETIRFLSDSNSSIGIGRYAREPSIMRYIKIAAMLPNRTIRDVALRCWWSTVKSLLSDGKERRKKPDGFYTGKKMRDMKPIQDKMVASVPIANFHMTPTTNVTPFSISMQHPNQQSQVPKEDAFAIALRNDTTVENTDLFLRTSNNIKTILSRMSETHGIMGQMPPLPLSINEDHINSLIQLNRLVASYGTTSISHHTKQEP

SEQ ID NO: 5877 - protein, 186 aa, Zea mays
  VARIANT 160: note = Ancestral polymorphism is L, Derived polymorphism is H
MGAAAAAKHALQVVAAGGDAGQSSFSANSPPTTGAGFVALDVGELSSLAGDAGPPGTPIAPPRTPRVVRSLSRKGDRKPADADANATAGGGRERPQLFVHVAAGDLGDAPGSARLVVHTPLAGTPGSKSRRFGRRAAPWLDPRRVVFLFATLSSVGTLILLYFTLSMSRADSSSGGGGGSGGSDAR

SEQ ID NO: 5878 - protein, 154 aa, Zea mays
  VARIANT 1: note = Ancestral polymorphism is M, Derived polymorphism is L
MQVLNSPWDVCYDPAEEAVYIAMAGQHQIWKHNLHDGVTKVISGDGYERNLNGSSATSTSFAQPSGISLAFEMHELLVADSESSSIRVVNLKTGGSRLLAGGDPVFPEYLFRILLSLQFGDYDGTGSDVLLQHPLGVVYANDNQVYIADSYNRK

SEQ ID NO: 5879 - protein, 445 aa, Zea mays
  VARIANT 119: note = Ancestral polymorphism is L, Derived polymorphism is R
  VARIANT 120: note = Ancestral polymorphism is S, Derived polymorphism is L
  VARIANT 184: note = Ancestral polymorphism is F, Derived polymorphism is S
  VARIANT 194..445: note = Derived polymorphism lacks residues 194 to 445
MWNFSKLAFWTNGNSDSAIITNSDNYLLFTYKFTQEILKATYENCKVLLRSDLIKSSSEERSLLKNLGSWLGKFTIGRNQALRAIRRLIQNLLSWRCTIHFNVNNQMTNTVTSMNRYILSLSDDKQLVLGLISLIEQGTDVLRVKALLFVALLCKNSRRWLPHFFCNAKLISVVDRLGKEKEGFIHHCTEAFVQLVASLVPGILDTVSSDIQQVMVGKRHGPVTALAGRAHPKSTIHMFPVILHLLGSASFKHRVVTGHVLLQLANLIKILEAPFQVLFKNLTVDIKDVKPTSLLKDRLREVEGNPDFSNKDVTASQTPVVAEVPSGTIPSLTHMEQQPEINITSRAMSLPNILNQYAAPVRLPTNSTVEDDKVALMMPEQVPSLTQLMATIPREEIRFKINPKLGSLGPQLQYSKIMDLALDKANREIIHRQGSSSLTSATWSW

SEQ ID NO: 5880 - protein, 361 aa, Zea mays
  VARIANT 21: note = Ancestral polymorphism is S, Derived polymorphism is F
  VARIANT 186..361: note = Derived polymorphism lacks residues 186 to 361
  VARIANT 209..361: note = Derived polymorphism lacks residues 209 to 361
  VARIANT 260..361: note = Derived polymorphism lacks residues 260 to 361
MILAALLLLLSFPKQLAGSQSVCSSANIVYMQSSTYMSNLNALAGALFAKVTSSNSHSAHGTAGTGSDMIYGAVLCRGDMIPGAACAKRLKEVLDAAMDNPANSSCSSQKDITLFDDGYLVQLRFSDQDFISNFRDSQECVVRANLNPPLLGDVSEQFHSLVSKLMTKLTDAAVKNMGRYETGQGWLTEKSQTVYGLVQCQEDMLKGTCQDCLSSAMAKREQMVDQMGGAILGVGCSLWYQTEVQFFAGTPALSLNMPTQRARYELQLLSMAIQNVINLWRIEEGNSGFSLYDFSQIKEATGNFSSENKLGQGGFGPVYKENAEDRPAMDLVVNMLNNESVILPKPKQPAYFFTRSRCILV

SEQ ID NO: 5881 - protein, 211 aa, Zea mays
  VARIANT 12: note = Ancestral polymorphism is L, Derived polymorphism is F
  VARIANT 43: note = Ancestral polymorphism is D, Derived polymorphism is V
MKNPWLLFLAPFLLAVSSSLPHTAAVPLRFPAAGRSPVQCIGDGVYAANSTYQANLRRVAALLLAEVSASPGQFYYTTHAVGYWPNRLLASSLCRRRDVNGTHVGYPCADCIAGAFLEMERACPYRREAFYIDRNCSVELAEIRIFGTGGIFQRNILIQAMASGLVLQAIGFAWLFFLLFQEWRSRKRGNLMHSTPLLSGDENVGNMSTKA

SEQ ID NO: 5882 - protein, 659 aa, Zea mays
  VARIANT 3: note = Ancestral polymorphism is H, Derived polymorphism is D
MAHNLLPVAVVLAVALLMAPAAGYPWLSCGTSSSFAANGTYQDHFNFAAATLPKNASTSPDLFASIVVGTVPEQLSAMALCRGDVNSTTCFSCLTEAFGDLPSACSDDKAATIYYDPCMVHYSDVHTLPGDDDTGPSIDTYPIGDNQYVTADPGQFIRLLAALVNATADYAAYNSTRRFATGQADTGFDPEFPELYALAQCTPDQTPAQCHKCLAGLISQSLGGFQNRDGARMLAVSCTYRYETKPFYNGPAMVRLASPSSGAPAPAPAVNSRVRAADGGRRKYHVPWVAIAVVLPALAAMNLVACLCFRRRRRRLLIAQAKHQNPMYSTEAEDTEMVDSMMMDVSALRAATGDFDESNKLGEGGFGAVYKGVLPDGEEIAVKRLSSSSSQGVQELKNELALVAKLKHRNLVRLIGVCLGQQERLLVYEFLPNRSLDLILFDTENEERGRRRLDWAQRYKIINGVARGLQYLHEDSQLKVVHRDLKASNVLLDENMNPKISDFGLARIFGRGQTQAVTRRVVGTYGYMAPEYMMRGNYSVRSDAFSFGVMVLEVVTGRKNSDDGCNLLATVWTHWEAGTVAQLVEPSTMGGSFPEGDVLRCVHIGLLCVQADPAARPVMSSVVMMLGSDTVTLQAPSKPGFFVRNNSANAAASTVSLDG

SEQ ID NO: 5883 - protein, 595 aa, Zea mays
  VARIANT 162..595: note = Derived polymorphism lacks residues 162 to 595
MLTASPSSQVKPQQWGTCGVSVASTPALLPPPAAGRLVAVDTRRRTRTVASAALGPVATEPAERSPVPQPPPLSSDEETVLRLGNYVPVFVMLPLEVVTTENDLEDAGKLREQLRRLRGAGVDGVMVDVWWGAVEGAGPALYEWRAYRDLFRVVQGEGLKLQAIMSFHACGGNVGDDAVSIPLPRWVREVGEADPDVFYTSSSGARNQECLSIGVDDEPLFHGRTAIQLYADFMKSFRENMADFLDSGLIVDIEVGLGPAGELRYPSYPETQGWVFPGIGQFQCYDKYLEADFKAAAAEAGHPDWELPDDAGEINDTPEDTGFFAAERGTYLTEQGRFFLTWYSRKLIQHGDRVLDEANKAFLGCKVKLAAKVSGIHWWYRHPSHAAELTSGYYNLGGRDGYAPIARMLARHDGAVLNFTCAEMRNSEQAEEALSAPEQLVQQVLSAGWREGVEVACENALSRYDRRGYNQMLLNARPNGVGLSGAGAGAARRRVAAVTFLRLSDELLASNNFRIFRTFVRKMHADLDYCPDADRYGRPLKPLERSAPEMPMERLLEATAPAPAFPFDPETDMSVGGGLAEAVDWVLDKIAWLFG

SEQ ID NO: 5884 - protein, 228 aa, Zea mays
  VARIANT 18: note = Ancestral polymorphism is G, Derived polymorphism is C
MSFRAREMYKKVVRRLGGEGKLPAELMKSVKDILPDSNVVMGRAKRGIFAGRHIRFGNKVSEDGGNKSRRSWKPNVQEKRLFSYVHDQHIRVKVTTHALRCIDKAGGIDEYLLKTPYNKMDTEMGIVWKANIEKMYSDLAEIEVGFFPPEVEAKIKKGLDEVRAAKRDFRREGRRALAKQSQLEASSVGDDQTSEVIDTKQVFAAKIKGGGKSLDAPGQIMEGLLLAH

SEQ ID NO: 5885 - protein, 334 aa, Zea mays
  VARIANT 253: note = Ancestral polymorphism is A, Derived polymorphism is S
  VARIANT 251: note = Ancestral polymorphism is L, Derived polymorphism is R
  VARIANT 232: note = Ancestral polymorphism is V, Derived polymorphism is D
  VARIANT 45..334: note = Derived polymorphism lacks residues 45 to 334
  VARIANT 44..334: note = Derived polymorphism lacks residues 44 to 334
  VARIANT 39..334: note = Derived polymorphism lacks residues 39 to 334
  VARIANT 23..334: note = Derived polymorphism lacks residues 23 to 334
  VARIANT 9..334: note = Derived polymorphism lacks residues 9 to 334
MKKEKHYVRSLSCLGKKIDSDQQAMTPLTKAKKREPDSWKNGCQQSEGCGIQDSICDDGHTETAKTNKKMEESLEPSGENNNCEQVEISSKDGKKVPMKLEVSSGVQTTSSIVEQEVHSGFVGVERVRAAYDQGHQSSRLPNETVFVQGVQKHEEVSKVKDNNVLRVLSWIFNHLKKRTYRLTFESTEELIDTRSMAFDINILERQTCKSLTTSGPRRFPLLGPTEAALRLVLDLSSTIITLLPHQNPLILHAFTDLFCSYVRVNLLFSSKMKANGCPFYLFYLMYAMCPHKWFKAIAMELISVLEQIHRRMVEIMVNQASTCDLKELVSKFIP

SEQ ID NO: 5886 - protein, 135 aa, Zea mays
  VARIANT 78: note = Ancestral polymorphism is T, Derived polymorphism is S
  VARIANT 89: note = Ancestral polymorphism is V, Derived polymorphism is I
MAGRGKAIGSGAAKKATSRSSKAGLQFPVGRIARFLKAGKYAERVGAGAPVYLAAVLEYLAAEVLELAGNAARDNKKTRIVPRHIQLAVRNDEELSRLLGTVTIASGGVMPNIHNLLLPKKAGGGSAKAAAGDED

SEQ ID NO: 5887 - protein, 922 aa, Zea mays
  VARIANT 745..922: note = Derived polymorphism lacks residues 745 to 922
MRHCWSAWLLALCLVSVQLLAPLVCERLLVAAQNLSPPALTPPLVKEVDDVVEHVWISCGLDRGSLEDVRKHFNYNHVFDILRTLSGKDTKDSSPETEDASKALSPEIKNTLLNCLSKHPLVVAAHESAKNLPIDYIKMLFALLRRDVAQGSTGAATTSAPPAAVKSNPSPSLGEPSSTKPDKNPDPPLETTPEEKMVPQTEKTVAKKEDNSNMSITAVIGLSVSAIALLALLCLCNFVCRAKQASSSEVGVDKPPLNQNLSNLSGMKYTHPPFSMLIYILYFVASLKFSKGNSIDVNKLGALPLKSEAGQNGNAKLSSSEISKTEVTPAVYNCLAEPMAASTGYVPGSRPTTPPSMPPPAPAHPKAPPSSTPQAPASLKAPPSSTPQAPAPLKAPHSSTPETPAPPSKPSSVLHSEPSSPSALKAAPPPKDAPQPKAAPPPPPKSTGPPPPAMSGSSNTRPPPLMKKSGNKMDDGANSHEAKTKLKPFFWDKVTANANQSMVWDHLKSGSFQFNEGKMESLFGYNSVEKIGGDGKKDLLSKDIPQFVRILEPKKAQNLAISLRALSVSPEEVCSAVKEGNELPSDLIDTLLKWIPSNEEELRLRLYTGELSQLGPAEQFLKSIIDIPYIFQRLDALLFMSSLPEETSNVKHAFATLEVACQELKNSRLFLKLLEAVLKTGNRMNVGTFRGGAQAFKLDTLLKLSDVKGTDGKTTLLHFVVEEIIRSEGIRATRAAKDTDGNNMRTEDDYKQLGLKVVSNLSDELQNVRKAAILDADQLTMSVATLGHKLVKTKEFLNTGMRSLDEHSGFHRKLKHFAEQCQTDVSLLQEEEKKIRSLVRGTVDYFHGSTGKDEGLRLFVVVRDFLAMLDKVCKEVKEASKVAPKKTKTAQPSQASFNDPRRKLFPAIQDLRADSSSSDEDD

SEQ ID NO: 5888 - protein, 617 aa, Zea mays
  VARIANT 34: note = Ancestral polymorphism is P, Derived polymorphism is L
MKIYVALKKGLSILSVSRSFAVVGVDLAVMGVGPAVAIPATVKSTILEVGNIDLFELNEVFASQFVYYCKNNLANTPWPASPLKSEFSSSSYTPLSSQLECDNLSALSNTPDNQSSTETISAQSISPLEVDSSYKQAAILRENTQVRPDPLYTTSRHNMQHALREIETVLMAPDADDAATSTKHEFEEHKPAQLMRQRSRTWSHESRQPSPGVVRTQLASGYPTASYEFRPEKRLRELREDPQSMVKQLLTKCAEALSEERIEEFLNLVQQARGVVSITGEPIQRLGAYLLEGLVARHANSGTNIYRALKCREPESNELLSYMKILYNICPYLKFGYMAANGAIAEALRNEDRIHIIDFQIAQGTQWITLIQALAARPGGPPHVRITGIDDPVSEYARGEGLDLVGKMLKSMSEEFRIPLEFTPLPGIYATQVTKEMLDIRSGEALAVNFTLQLHHTPDESVDVNNPRDGLLRMVKGLSPKVTTLVEQESHTNTTPFLMRFTETLDYYSAMFESIDTNLPRDNKERINVEQHCLAKDIVNIIACEGKDRVERHELLGKWRSRLTMAGFRPYPLSSYVNSVIRKLLACYSDKYTLEEKDGAMLLGWKNRKLISASAWH

SEQ ID NO: 5889 - protein, 471 aa, Zea mays
  VARIANT 324: note = Ancestral polymorphism is M, Derived polymorphism is T
  VARIANT 325: note = Ancestral polymorphism is K, Derived polymorphism is N
MAAAADAPAPEAASTAAPSLVRMTEKALEEMPHWPWHAVVDAVKQCQRRLLPLADSTGAFDAAVAALVSQMAVPPPAGDATPTGSSPESTAFRFSCDTKSSGLSLRGGSCVSRTWWFEDLVALAPATVERVASALVARGTDHGVVARFLFYYLKCRIAGASADDKKAMLEASVAVMASLDRSAVSFKGLFGILRVAAPLRLADACQDRLVAMIGRKLDHATLDNLLVPAPPGTASLYDVSLVLRFLAAFLRGGASDEPAKLKKVGGLTDLYLAEVAPDPSLRPAKFLDLATALPAPARDCHDALYRAIDVYFQVHGRLTDEEKMNICRGLSYEKLSPECCKHMLRNGEFPTTAAVQALASQHTVLKSVVLREPGQLKSVSPSPTASTGKRRDGYDDDNGGGENDGQVILYARRLDLSVENQNLRSLLDGMHWRVVELEKVCSRMKTRMSKMKQARRGGGGRTARSLPRMCS

SEQ ID NO: 5890 - protein, 119 aa, Zea mays
  VARIANT 106: note = Ancestral polymorphism is G, Derived polymorphism is D
  VARIANT 102: note = Ancestral polymorphism is Y, Derived polymorphism is C
  VARIANT 99: note = Ancestral polymorphism is R, Derived polymorphism is C
  VARIANT 95: note = Ancestral polymorphism is D, Derived polymorphism is H
  VARIANT 48: note = Ancestral polymorphism is H, Derived polymorphism is Y
  VARIANT 28: note = Ancestral polymorphism is A, Derived polymorphism is T
MPKQIHEIKDFLLTARRKDARSVRIKRAKDAVKFKVRCSRYLYTLCVHDADKANKLKQSLPPGPCSIVPTPYMLHPSTTALFYLIYWTFRIPVPHWAVRNCCVVIGYWLLKVVDRVAVV

SEQ ID NO: 5891 - protein, 107 aa, Zea mays
  VARIANT 41: note = Ancestral polymorphism is Q, Derived polymorphism is L
MALSFKMAASLVAVVLLLLATPIVRGSALDDMVPVQMPAKQLAVAISGAAATIMAGSPSCLQCRCCSRSSPGTCVTTTCCSSFKCDSGGRCNLVQEKCGCSGCGNSN

SEQ ID NO: 5892 - protein, 254 aa, Zea mays
  VARIANT 12: note = Ancestral polymorphism is L, Derived polymorphism is V
  VARIANT 48: note = Ancestral polymorphism is R, Derived polymorphism is C
  VARIANT 55: note = Ancestral polymorphism is R, Derived polymorphism is C
  VARIANT 57: note = Ancestral polymorphism is A, Derived polymorphism is V
  VARIANT 77..254: note = Derived polymorphism lacks residues 77 to 254
  VARIANT 84: note = Ancestral polymorphism is A, Derived polymorphism is V
  VARIANT 95: note = Ancestral polymorphism is R, Derived polymorphism is C
MPLLGLLVAISVNVVATTSPKHGGEFGLGRGVRARTGAVHHELRPRLRHVGVGRRSAMLEPGVRGHRPPVASPKQAQWAAPMSALQERIMEEWRRKEKKGYCSGSATTSGLLVEMQAVELAARELNSVLEEIAEEEEEEDDDEWRRQGIVDEERRAVETDAVWPLLDLMADPESGMVDKAAYVLHSLVSSGEGRAATVEEGGIPVLVEMVEVGTSRQKIATLSLLQIGIDHDGADDGDRGVEERMSVGSMEGGR

SEQ ID NO: 5893 - protein, 214 aa, Zea mays
  VARIANT 20: note = Ancestral polymorphism is L, Derived polymorphism is F
  VARIANT 108: note = Ancestral polymorphism is K, Derived polymorphism is N
  VARIANT 136..214: note = Derived polymorphism lacks residues 136 to 214
MAKLPRLRCPFAVLALVCILPLFAPRPALSSRAAPKDGVSFAGAGNTIHQLLKDHGLPGGLLPRGVESYTLDESSGLLQARLSAPCYAKYDNGDLAYFDNVVRGNLSKGALRGVEGLSQEELFVWLPVKGILVQDQEPGVILFDIGFAHKSLSRSLFEDPPDCKPSAASGMSAAAAVAAARWKGRQVRRLDFESAVNLSPADEEMQLQALDSES

SEQ ID NO: 5894 - protein, 254 aa, Zea mays
  VARIANT 155: note = Ancestral polymorphism is K, Derived polymorphism is N
  VARIANT 17: note = Ancestral polymorphism is S, Derived polymorphism is N
MAIPRARLTRLLLHFGSRGSRFLAQPFSTSSSAHGLFPSLWPTPSTAGAWRRAFHDGRPRGPLWRSKKLIGKEALFAIQGLKRFKGDEEKLADFVRRYVARLLKADKLAVLGELERQEEVDLAVKMFRIIQKEDWYKPDIYMYKDLIIALAKCKNMEEAMVIWGNMRDENLFPDSQTYAEVIRGFLRYGSPSDAMNIYEDMKKSPDPPEELPFRVLLKGLLPHPLLRNRVKQDFEEMFPERHIYDPPEEIFGMH

SEQ ID NO: 5895 - protein, 272 aa, Zea mays
  VARIANT 124: note = Ancestral polymorphism is G, Derived polymorphism is R
  VARIANT 139: note = Ancestral polymorphism is K, Derived polymorphism is N
  VARIANT 142: note = Ancestral polymorphism is G, Derived polymorphism is D
  VARIANT 144: note = Ancestral polymorphism is D, Derived polymorphism is G
  VARIANT 152: note = Ancestral polymorphism is T, Derived polymorphism is I
  VARIANT 154: note = Ancestral polymorphism is T, Derived polymorphism is I
  VARIANT 155: note = Ancestral polymorphism is E, Derived polymorphism is V
  VARIANT 161..272: note = Derived polymorphism lacks residues 161 to 272
  VARIANT 169: note = Ancestral polymorphism is N, Derived polymorphism is K
  VARIANT 171..272: note = Derived polymorphism lacks residues 171 to 272
MRRLEFAFWFKVSTPPRRSGGRRSRIGRSKTHKRWLRRELGITNDVTSLLQSGASSRCAGCQGSGFKVQIRQLGHGMIQQMQHPCNECKGSGETISDKDRCPQCKGVKVVPEKKVLEVPDTATGDIIFVLQQKEHPKFKRKGDDLFYEHTLTLTESLCGFQFVLTHLDNRQLLIKSNPGEVVNPGEVVKPDSFKAINDEGMPMYQRPFMKGKLYIHFSVEFPDSLSLEQCKALEAVLPPKPVSQYTDMELDECEETMPYDVNIEEEMQRRQQ

SEQ ID NO: 5896 - protein, 219 aa, Zea mays
  VARIANT 40: note = Ancestral polymorphism is G, Derived polymorphism is E
MPRRRRTRSSEELKAEDFVDSVLNFGGEEDGEEEKQEAGGDGQPAAEFKSKNLEAERKRRGKLNRNILALRAVVPNITKMSKESTLSDAIDLIKRLQNQVLELQRQLADPPGEAWEKQGSASCSESFTATENMPYQGQIELVPLGPCKYHLRIFCKKAGVFTKVLEALCSYNAQVTSLNTITFYGYAESVFTIEVKGEQDVVMVELRSLLSNIVEVPSN

SEQ ID NO: 5897 - protein, 452 aa, Zea mays
  VARIANT 40: note = Ancestral polymorphism is H, Derived polymorphism is R
  VARIANT 97: note = Ancestral polymorphism is D, Derived polymorphism is Y
  VARIANT 317: note = Ancestral polymorphism is N, Derived polymorphism is K
MDRAELTTEQVLKRDIPWEHYMSTKLISGTCLQLLRRYDHKPESQRAPLLEEDGPAYVRVFLNILWSISKEETVEYVLALIDEMLATNPKRAALFYDQSLSGEDIYEPFLRLLWKGNWFVQEKSCKILTAIISARPKLRNGTLPNGDASNSKSKLTSTHDVLRGLVNWLCSQLRNPTHPSCSIPTSIHCLSTSLREPYVRTLFVQADGIKLLIPLISPAATQQSIQLLYETCLCIWLLSFYDAAVDYLSTTRVMPRLVEVVKGSTKEKVVRVAVLSFCNLLAKGAFAAQMIDLGLPQIVQNLKAQAWTDEDLLDALNQLEVGLKENLKKLSSFDKYKQQVLLGHLDWSPMHKDPSFWRENINNFEENDFQILRVLMTIIDTSSDTTALAVACYDLSQFLQYHPSGRIVVADLKAKDRVMKLMNHENTEVQKNALLCVQRLFLGAKYASFLRA

SEQ ID NO: 5898 - protein, 115 aa, Zea mays
  VARIANT 3..115: note = Derived polymorphism lacks residues 3 to 115
  VARIANT 88: note = Ancestral polymorphism is G, Derived polymorphism is S
  VARIANT 95: note = Ancestral polymorphism is K, Derived polymorphism is T
MRCLDKGSHTASSGNKPNALNVNPRGLNKRTTSEGLKEAFSKFGQVIEARVITDRISGYSRGFGFVKYATVQEAGEAIKGMDGKFLDSWVIFAETPHNHHNKEHQLMIEVAIHGR

SEQ ID NO: 5899 - protein, 438 aa, Zea mays
  VARIANT 262: note = Ancestral polymorphism is Y, Derived polymorphism is C
  VARIANT 240: note = Ancestral polymorphism is P, Derived polymorphism is S
  VARIANT 213: note = Ancestral polymorphism is D, Derived polymorphism is A
  VARIANT 182: note = Ancestral polymorphism is P, Derived polymorphism is S
MAGWCEQAVALLQRPAVAEMAVDVLLCAVPIWAAVMIGLVVGWSWRPRWTGLLFLGLRSRLRILWVPPGLGARRLWFACTALSACSVATKLISSAFRRCRGKHQDRASPDDDAAATRDGGCRADGRTNFEGEHDTVTEKDLEHLLQLLDNKESGDTAWQNLMERRTSNMTYNAWRREPEEGPIMYCSRTIFEDATPELVRDFFWDGDFRLKWDPMLAYCKSLDEFPQNGATIVHWIKKFPFFCSDREYIFGGRIWESGKTYYCVTKGVPYPSLPKKEKPRRVELYFSSWRIRAVQSPKHVGQQSACEVTLVHYEDMGIPKDVARVAVRHGMWGAVKKLQSGFRAYQQMRHTETTLSHSVIMARMTTKISITASNDPLDHDLSVADKISDENDSSNAVQHGFDWKWLVVGGAVAAVCVLNTGLVGKAVLLGAARRQAKK

SEQ ID NO: 5900 - protein, 226 aa, Zea mays
  VARIANT 111: note = Ancestral polymorphism is S, Derived polymorphism is I
  VARIANT 105: note = Ancestral polymorphism is V, Derived polymorphism is A
  VARIANT 88: note = Ancestral polymorphism is H, Derived polymorphism is D
  VARIANT 63: note = Ancestral polymorphism is S, Derived polymorphism is F
MHAPAPPSSVDLPLSAPPPPVKAPSPRPPPPASLQPESPGVFFSATAPLGTSHRRIAIAVDLSDESAFAVRWAVANYLRSGDAVILLHVRPTSVLYGADWGAVDVSLPIPSAYSEDGFGGGDADSEAAAARRMEDDYDAFTASKADDIARPLKEAGIPYKIHIVRDHDMKERLCLEVERLSLSAVIMGSKGFGSTRRTSKGRLGSVSDYCVHHCICPVVVVRFPDE

SEQ ID NO: 5901 - protein, 243 aa, Zea mays
  VARIANT 109: note = Ancestral polymorphism is R, Derived polymorphism is G
  VARIANT 106..243: note = Derived polymorphism lacks residues 106 to 243
MAALSSCVASGGLALQATLVVSPPRRRGTPVVISVSSHGRRPSLIGSTMNPSGMAPIKRTTRIRAVHPCPANSLGGSLTIIPIPDLLSSWLWMFGAAIAAAVPLYRRFRALEDNVEKTAEAAIEVIDSVAEATEKVADEVAQAFPGSETLKQAASKIKTIADEIEEDADKAEALIEKVSFFFFTFTKSIRFLVTTAAAGTSTSLRASMMAWYNHVLRLRSSLGVVVWLHMACEHTVTFIWPTC

SEQ ID NO: 5902 - protein, 121 aa, Zea mays
  VARIANT 104: note = Ancestral polymorphism is K, Derived polymorphism is M
MTTTVTPEAKMAAQQQAPASRSSSRPRRRVPIPAGPRYLRRPLDPAGAGDRCSALSIRAERSSALNKRTKTMPMRGVDFKCISSGAHIRSHNLSLQHKLVKAIKDAGNIKGVISGHWKDYG

SEQ ID NO: 5903 - protein, 180 aa, Zea mays
  VARIANT 11: note = Ancestral polymorphism is A, Derived polymorphism is V
  VARIANT 24: note = Ancestral polymorphism is S, Derived polymorphism is I
MSSSHSATVTALAVAVGLQEGFASSLFATVAVFASVVMSNLLYYYGMCNVVKDILLQHYFGKRKDLTENLKQLQCRTLIFVGENSQFHAEVVHMTAKLDRRYSALVEVQACGSVVTEEQPHTMLIPMEYFLMGYGLYRPSQINFSPRSPLNPFCISPELLSPESKGVKLKPTKTRANLKA

SEQ ID NO: 5904 - protein, 414 aa, Zea mays
  VARIANT 17: note = Ancestral polymorphism is R, Derived polymorphism is W
  VARIANT 30: note = Ancestral polymorphism is P, Derived polymorphism is L
  VARIANT 64: note = Ancestral polymorphism is R, Derived polymorphism is C
  VARIANT 70: note = Ancestral polymorphism is L, Derived polymorphism is I
  VARIANT 71: note = Ancestral polymorphism is T, Derived polymorphism is A
  VARIANT 90..414: note = Derived polymorphism lacks residues 90 to 414
  VARIANT 133: note = Ancestral polymorphism is A, Derived polymorphism is T
MLLPAVAASRLVLVPFRLSAARRISSLKVPWKRDPALDAAIARDRRFLQASRLVREVLLSPGRRLLFRYLTKRRERIKLPVHVPTFLKRYPTLLAVSAPPEPVASPSPHLLAFLDFASRLYELHAPLLASRLAKLLMISSTRALPVTKIAAAKRYFGLPDDFLASLVPRYPGLFRLVGDPGPDASGNAFLELVAWDDELAKSVIEAKADKEADVVGIRPRPNFTVKLPKGFYLKKEMREWVRDWLELPYISPYADASGLHPASPEAEKRSIGVLHEVLSLTVERRMAVPIIGKFCDEYRLPNAFANAFTRHPGIFYVSLKGGIKTAVLREAYDENGELIDRDPMLELKERFVAIMEEGHKQYLEDLKRKREALQKDREDAGRQDAKAEIEDRVEEEWHSEASEGDDDTDDAYRQ

SEQ ID NO: 5905 - protein, 345 aa, Zea mays
  VARIANT 86..345: note = Derived polymorphism lacks residues 86 to 345
  VARIANT 4: note = Ancestral polymorphism is H, Derived polymorphism is Y
MWAHLAVALFVALAVAPPARGSDVPSFPLSQAQSPSNSSSPSNAASRPCHLDLSAELFGGVAAACGAGGGPGSLDRGRCCPVLAAWLFAAHARTALSVPPAPPPSALAGDEGMGPDGGDDGPMVPYDNQRCVDALGAALERRGVALPRPNATCDTVLCFCGIRLHQIGSLRCPAAFAVKAGAAARNATPTAAVKALEKSCRNASYAGCSRCVQSLQKLKGNVSREVSGAGGDRARRMLGRDCQLMGLTWLLAKNKTAYIPTVSAVLRAMLYTARPTESGSGGAAPRCSPDQENMPLAVDSLQFERTASAGGSAAAASATPRGATAAALLGLALSLAVGRWWDAFL

SEQ ID NO: 5906 - protein, 624 aa, Zea mays
  VARIANT 430: note = Ancestral polymorphism is A, Derived polymorphism is T
  VARIANT 368: note = Ancestral polymorphism is M, Derived polymorphism is T
  VARIANT 337: note = Ancestral polymorphism is L, Derived polymorphism is V
MQRLVGVGERLLAIGTNRRAATYSHSSHRSGYYTAVRDNGLSTRRKIPAILSRMFSHYKVISRKNRAEDHKCRTRMSRGYHTLSVSVTNSSATQQAHLAWKQLGHMYTYRGPRFPLLGRAACAVSLSFTRFHIIPGVMALAVGKMALAPPVLADSRPFIPRMDGIITKAQDTRQFLSSLVCSIWEGITLLVRAVHLAFLFFPATALAPFADKFSIAFRRRWLSLMRRTLEKAGPAFIKWGQWAATRPDLFPSDLCVELAKLHSAAPAHGFAYSKAAIEKAFGRQLSEIFESFEENPVASGSIAQIHRATLKHQHPGKHVAVKVRHPNVGESIKRDFLLINLVAKASDMVPGLSWLRLDESVRQFAVFMMSQVDLSREAAHLSRFIYNFRRWRHVSFPKPLYPFVHPSVLVETFENGESVSRFMEEIEGNARMKKDLAHIGTYAFLKMLLEDNFIHADMHPGNILVRLNENKLARRRFFRAKPHIVFLDVGMTAELTRSDRDNLQQFFKAVATRDGRTAAKCTLQLSKNQSCPNPVAFTEELDKTFTFWGTPEGDVFHPVECMHELLDTVRRHKVNIDGNICTVMVTILVLEGWQRKLDPGFDIMQTLKTLLLEKDIKQPIDFFS

SEQ ID NO: 5907 - protein, 255 aa, Zea mays
  VARIANT 144: note = Ancestral polymorphism is P, Derived polymorphism is H
  VARIANT 132: note = Ancestral polymorphism is L, Derived polymorphism is R
  VARIANT 91: note = Ancestral polymorphism is A, Derived polymorphism is T
  VARIANT 83: note = Ancestral polymorphism is S, Derived polymorphism is G
  VARIANT 30: note = Ancestral polymorphism is K, Derived polymorphism is N
MGRAPCCERSGLKKGPWTPEEDEKLVAYIKKHGQGNWRTLPKNAGLARCGKSCRLRWTNYLRPDIKRGRFSFEEEEAIIQLHSILGNKWSAIAARLPGRTDNEIKNYWNTHIRKRLLRMGIDPVTHAPRLDLSALLKPAAAYYPTQADLDTLRALEPPLASYPDLLRLASALLSGRPAAPAIGEHRQQQLLPGNNHNSVGSGVSTPTSSSPVPRLDHSTTCVATTFGGGGASTDDVAALFDMQLSELLDVSDYML

SEQ ID NO: 5908 - protein, 291 aa, Zea mays
  VARIANT 191: note = Ancestral polymorphism is L, Derived polymorphism is H
MASSVAAAASTFLGTRLADPAPQNGRIVARFGFGGGKPKAAVPKKVAKTSISSDRPLWFPGAVAPDYLDGSLVGDYGFDPFGLGKPVEYLQFELDSLDQNLAKNEAGGIIGTRFESSDVKSTPLQPYSEVFGLQRFRECELIHGRWAMLATLGALTVEWLTGVTWQDAGKVELVDGSSYLGQPLPFTISTLIWIEVLVIGYIEFQRNAELDPEKRLYPGGSYFDPLALAADPEKKERLQLAEIKHARLAMVAFLGFAVQAAATGKGPLNNWATHLSDPLHTTIFDTFGGSS

SEQ ID NO: 5909 - protein, 284 aa, Zea mays
  VARIANT 151: note = Ancestral polymorphism is E, Derived polymorphism is G
MASISSLPFAPLRGAAEWRPSSTAPAVSGAVVLSARSRRGSGSVVRCVATASDVPPTVGETKLNFLKSYKRPIPSIYSTVLQELLVQQHLMRYKRTYQYDAVFALGFVTVYDQLMEGYPSIEDRDSIFKAYITALNEDPNQYRADALKMEGWARSQNGSSLVDFSSRDGEIESILKDISERAKGKGNFSYSRFFAVGLFRLLELANATEPTVLDKLCAALNINKRSVDRDLDVYRNILSKLVQAKELLKEYVDREKKKREERSETPKPNEAVTKFDGNLYSIRH

SEQ ID NO: 5910 - protein, 166 aa, Zea mays
  VARIANT 97: note = Ancestral polymorphism is R, Derived polymorphism is W
MRCGGRRRRGRGTVAVRSGELALGDPVTPPLFDIGTPFPRPLSDSIVGAPRSCPLLHRRFREAMPPSSCPAFWPPSHPLVASSTRSRLASADGWVGRRGHGVRSPRARAGAAISSLTVPPTPACAPPRRILPLYTDIDTNKACGLGLGDRIGSVPRHLPLVSRWRE

SEQ ID NO: 5911 - protein, 647 aa, Zea mays
  VARIANT 597..647: note = Derived polymorphism lacks residues 597 to 647
  VARIANT 575..647: note = Derived polymorphism lacks residues 575 to 647
  VARIANT 526..647: note = Derived polymorphism lacks residues 526 to 647
  VARIANT 513: note = Ancestral polymorphism is R, Derived polymorphism is W
  VARIANT 506: note = Ancestral polymorphism is T, Derived polymorphism is I
  VARIANT 453: note = Ancestral polymorphism is A, Derived polymorphism is T
  VARIANT 439: note = Ancestral polymorphism is S, Derived polymorphism is C
  VARIANT 414: note = Ancestral polymorphism is I, Derived polymorphism is V
  VARIANT 301: note = Ancestral polymorphism is D, Derived polymorphism is G
  VARIANT 72: note = Ancestral polymorphism is V, Derived polymorphism is D
MGEAAGEEESSAAPAEVSRQAELDEQRCLAEALQAINSLVSASLSATLFPLKWQLIRDRLNRLHAGLADITVSAGDENRCDALANLLRDVAAAAREAMELVPRSQGRHYGGGKLRLRSDLDVLGAALDAHVARLDEVYASGALTRARALVVPRPGAGASRDDVRFYVRDLFARLRVGGGEMRREAAAALSEALRDDERCARVVASDVADGVGALVALLECPDARVQEEALEAVSAIARSDAHRGDLVVGGVIAPVVRVLDAGGAGSEAARESAARVLCRLTENSDNAWAVAAHGGVTALLGLCAAGHGASGGGELVCAACRVLRSLAGVDEIRKYMVADAGAVPVLVTLSQRATHDAARIQAMELLAAIGSGDTSARDAVVQEGAVECLVRALDPSSSSSSSSSKVREVALRAIDALCLSPPNSTGRLLAAGFLDRVLSLLRNGDNTLLQHCALKAAHRLCQVSEDVKKAMGDAGFMPELVGVLGASSKPPEAREMAGESLCALVTVPRNRKRFVQEDRDVARVLQLLGPDEEKEKPAPARRFLLSTVAHLTDSSSGRRKIMSSEHESREACGGRCPRRQTDREEAWREQAEEHFPWHLEPVMFCCIVTLGGKTSSQARSTAVVVSLANTYSTIVPCIFCYCEGIKE

SEQ ID NO: 5912 - protein, 170 aa, Zea mays
  VARIANT 101: note = Ancestral polymorphism is N, Derived polymorphism is K
MAIGQGDEKKGSLARSLSCSNCGSGAIIFGRKRVAVSPTPGSRSPHSPTRTLRKQRSVRFHMEDDGVNLFNQLSLDVLVMIFCKVNHSDLRNLLLTSKSVKEATILAREQHFKFSTPPAKSGFRDEETGGGDDDDEGPGAPKQHRVARSRLGDTNLSSIAVNLSASFEQM

SEQ ID NO: 5913 - protein, 123 aa, Zea mays
  VARIANT 74: note = Ancestral polymorphism is A, Derived polymorphism is T
  VARIANT 88: note = Ancestral polymorphism is A, Derived polymorphism is T
  VARIANT 90: note = Ancestral polymorphism is E, Derived polymorphism is V
  VARIANT 94: note = Ancestral polymorphism is G, Derived polymorphism is W
  VARIANT 96..123: note = Derived polymorphism lacks residues 96 to 123
  VARIANT 97: note = Ancestral polymorphism is A, Derived polymorphism is V
  VARIANT 114: note = Ancestral polymorphism is V, Derived polymorphism is E
MASTIMAATTSRVVAAAPPPMAAPSTTSPPRPPAAGSPWYGNELWYGPDRDQTPSYLTGEFPGDYGWDTAGLSADPEAFAVRVARNRALEVIHGRWAMLGALGCVTPEVLQSWVRVDFREPVW

SEQ ID NO: 5914 - protein, 1241 aa, Zea mays
  VARIANT 581..1241: note = Derived polymorphism lacks residues 581 to 1241
MLSAAAVMAPAAATQKSSLEVLLETLKKRDEQPKDAPPTLPARPMCRGRLPTTRRPSLPAGFKLENGMVTVPATEAAAVDKKADAKEITGLEVKEEKAVKGCIFGTKRKFPSTQVLEESPYVDELHEERKRTTVCKEPPSISPATINMNGKPACTDIMDYVLQKKLRVWCSSSNAKWELGQIQSISGDDAEILLANGKVLTVSPEQLLPANPDILDGVDDLIQMSYLNEPSVLYNLQLRYSRDLIYTKAGPVLIAVNPLKEVALYGKSAIMQYKQKTNDDPHVYAVADLAFNEMLRDGINQSIIISGESGAGKTETAKIAMQYLSDLGGASGTESEVLQTNVILEALGNAKTSRNHNSSRFGKLIEIHFSETGKMCGAKIQTFLLEKSRVVQRAQGERSYHIFYQLCSGAPPLLKKKLSLKSASDYNYLKQSNCLKINGVDDSKKFTVLVDALDTIQISKEDQMKLFSMLAAVLWLGNISFSVIDNENHVEVVSNEGLATAAKLLGCTANQLVSAVSTRKIRAGNDSIIKKLTLTQAIDARDALAKSIYANLFDWTVEQINHTLGTGRQFTWRSISILDIYGFECFNKNGFEQFCINYANERLQQHFNRHLFKLQQEEYLEDGIDWTPMEFVDNTNCLSLFEKKPLGLLSLLDEESTFPRATDFSFANKLRQQLSGNSCFKGEKEGTFKICHYAGEVTYDTAGFLEKNRDPLHSESIQLLSSCKCELPKHFASVMVADSQNKSSLSWHSVMDTQKQSVVTKFKAQLFKLMQQLESTTPHFIRCIQPNSKQLPRLFEHDLILHQLKCCGVLEVVRISRTCYPTRITHQQFAERYGLLLLRSIASQDPLSVSVAVLQQLNIPPEMYQVGYTKLFFRTGQVAALENTKIQMLHGTLRIQKHFRGMHSRQGYQRLKKVAMNLQSFIRGERARIHFDNLVKRWRAAVLIQKYTRRRLAANMFNDQLNHIILLQSVMRGCLARRKYKCLQNEKELKASHNIVQGETRKNNAESRICHGMNGHYPHEPVITELQGRITKAEAVLRDKEEENVMLKQQLEQYESKWSEYEAKMKSMEEAWKRQLSSLQLSLVAAKKSLAAADVATRTAQTDFTPTHAQYDSEDTLSTGTHTPEVTESRHRNHNHNPEAKVSAGNSDRRVNAVNHLAKEFEDRRQVFEDDAGFLVAVRSGQVGSNTNPDEELRKLKDRFETWKKDYKSRLKDTKVNLNKVGTGTHDDKSRKRWWGKKSSK

SEQ ID NO: 5915 - protein, 110 aa, Zea mays
  VARIANT 62: note = Ancestral polymorphism is K, Derived polymorphism is N
MAKNRNKKNRAKSGGLAAMDTSEGGPATSTAADVPQPMDTSEGKQPSSATAALGSINKKIKKGVHMKRSQNARKMKAIARAVSKNEKSEEKIQKAKGKKTRIQSAKSLYD

SEQ ID NO: 5916 - protein, 511 aa, Zea mays
  VARIANT 46: note = Ancestral polymorphism is R, Derived polymorphism is W
  VARIANT 106: note = Ancestral polymorphism is D, Derived polymorphism is V
  VARIANT 240: note = Ancestral polymorphism is A, Derived polymorphism is T
MADHQPQVEVLTESVRVNGTKAEATLVGGELAWRPAAGGNGEGQERRLELESEVLGFQMDGRQLKFATFAASGGGNGKGGGGDGNRRRGEVVVEMENEATAVRWGDVISDRLASLGRPKKLFIIVNPYGGKRSGPSIFQNEVLPLIEASGVLYTMQETKHRLHAQEIAHSLDLRKYDGIICVSGDGVMVEVVNGLLQREDWETAIKVPLGIIPAGTGNGMARSLLHAAGEPFCISNAVFAIIRGHKRALDVTSVVQGKARFFSVLMLTWGLVADVDIESEKYRWMGSARLDFYLLLRILNLRRYNGRILFVPAPGYEEVGDPVDQTTGYETNGFSTGFQDDGRTGSNGETCGYVGPSSIKEAGLRWRSLDGPFVSVWLGNVPFASEDAMAAPKAEASLSPFSFADGYLDAAIIKDCPRWDVLGLVFQMKDGSYVNSPCVEYFKVKAIRIEPGLRVGSSTEGGIIDSDGEVIARGDESDSRAGDDEPGHLMAYGPPIQLTVDQGLATIFSPR

SEQ ID NO: 5917 - protein, 447 aa, Zea mays
  VARIANT 32..447: note = Derived polymorphism lacks residues 32 to 447
  VARIANT 46: note = Ancestral polymorphism is A, Derived polymorphism is S
  VARIANT 53: note = Ancestral polymorphism is S, Derived polymorphism is F
MGKEKVHINIVVIGHVDSGKSTTTGHLIYKLGGIDKRVIERFEKEAAEMNKRSFKYAWVLDKLKAERERGITIDIALWKFETNKYYCTVIDAPGHRDFIKNMITGTSQADCAVLIIDSTTGGFEAGISKDGQTREHALLAFTLGVRQMICCCNKMDATTPKYSKARYDEIVKEVGSYLKKVGYNPDKIPFVPISGFEGDNMIERSTNLDWYKGPTLLEALDQINEPKRPSDKPLRLPLQDVYKIGGIGTVPVGRVETGLLKPGMVVTFGPTGLTTEVKSVEMHHETMQEALPGDNVGFNVKNVAVKDLKRGYVASNSKDDPAKEAASFTAQVIIMNHPGQIGNGYAPVLDCHTSHIAVKFSELLTKIDRRSGKELESGPKFLKNGDAGFVKMIPTKPMVVETFSEYPPLGRFAVRDMRQTVAVGVIKSVEKKDPTGAKVTKAAAKKK

SEQ ID NO: 5918 - protein, 965 aa, Zea mays
  VARIANT 540..965: note = Derived polymorphism lacks residues 540 to 965
MSSPATQQAPPVQPPPPPAAAAPTAAPATVSATPISVQLPSIQPQPQPPGPASGPQLPMPAQLLNLGTQPPLYRGPICWNSYCKDPDPNSFGRRGWKVRSGPPYSVYADLCGRCYSQFEQGIYCETFHSEEGGWRNCESCGRRVHCGCIVSIHKYQLRDAGGVDCAKCARSTRAAMAPPSPVWTNPIHSSQNVSDRKDIPVKSWRPPAGQISSQWRQTNLWSMSSIQSDLQQRLAFEFDRPSGSEKLLPGRTFIHAQERKSDDMHDRPITPAGMIHIMRERDPNGHGQPTNMDPAYSYTLYHRDGSHPNNLHDSSHHGGENDSSSSRKVAMPEASTSVDAGFKLDSHHPSNLKDDPPSLSVALASNFPSQNGPKDHIRIAPTQQQAQMASSPLQKQFYSHTVTGYNEFQAQMRNGRPRMDSKARSQLLPRYWPRITDQELQHLSSEYPTYSTYVNDSNSVITPLFEKMLSASDAGRIGRLVLPKKCAEAYFPPISQPEGLPLKVQDAGGKEWIFQFRFWPNNNSRMYVLEGVTPCIQSMQLQAGDTVTFSRIDPEGKLIMGFRKATNNSFEQEQATKPVNGAPATSEVNGKVSAPDSSPNAAVSRQNMVKTETKSSSPVEQATVSKMDKDRLTQKEGPGIASSSPGSLKRKTTNLGQKNKRLRMDNEESMELKITWEEAQELLRPPPKVPSIVIVDGHEFEEYEEPPILGRKTYFVADKSGLNHQWVQCEDCSKWRKVPIDALLPSKWTCFDNKWDSERSSCEPAQEISLEELAELIPIKPGKKPRLKIESDAIDASDGLDTLANLAILGEGEALPSQPTTKHPRHRPGCSCIVCIQPPSGKGPKHKQTCTCNVCMTVRRRFRTLMLRREKKVTRDSSRKKETGQSSEKVTQQAVSGPPGANGSATSSPQKADGNADAPEDMAVDHKVTSSPVKNHIDLNIQPERDDEQSPKSGAAGLLSRDHPT

SEQ ID NO: 5919 - protein, 351 aa, Zea mays
  VARIANT 48: note = Ancestral polymorphism is T, Derived polymorphism is K
MAYARTVMAAAASALLMAVGVRFLGPAAAAFVEEELPRARAVAATWLTPPYLYLVINAIIISIAASSRFQSSGGAGGRPSAPSYAPAADPDADAIGGEGAGEEMEQQQDGIQPAVASLQVPAAVPVVAAKAAEVAAVVEEPVVVEIHTVAVAPEGEVDEDYSVSRSTWTPRRRGAEPEVAAEVPPFADLTNSRKKPLVSARFSRKATKPSPEGSRALRVARPRKEETLESTWKAITEGRGPTLARHLKKSDTWDTRPGRRPSGGGSSGEVDPAAAAPAGTMRKAETFNDGGAGRSRPAPAALVRREPSLGQDELNRRVEAFIHKFNMEMRLQRQESLKHYNDMIGRGRGSR

SEQ ID NO: 5920 - protein, 250 aa, Zea mays
  VARIANT 218: note = Ancestral polymorphism is S, Derived polymorphism is F
  VARIANT 170: note = Ancestral polymorphism is E, Derived polymorphism is K
  VARIANT 150: note = Ancestral polymorphism is L, Derived polymorphism is H
  VARIANT 143: note = Ancestral polymorphism is E, Derived polymorphism is K
  VARIANT 69: note = Ancestral polymorphism is P, Derived polymorphism is S
  VARIANT 62: note = Ancestral polymorphism is R, Derived polymorphism is S
  VARIANT 28: note = Ancestral polymorphism is D, Derived polymorphism is Y
  VARIANT 23: note = Ancestral polymorphism is N, Derived polymorphism is D
MPGLAAAEQDAVSLVRRVARALNRRFTDIVALLFSHKGAGSLGAVAGFAIAVVFAWKFLRPRRRAPKRPPPTPAAAPAATVPDAAEPIGDSGKVVTREIVVKRLKGCRKVTCQLLGVVFEETIPEELQKHATVRPSVVELLLEISRYCDLYLMETVIDDKSEENALMALETSGLFRTGGLMKEKVLFCSSEVGRTSFVRQLESDFHIDTSLDIVSQLSRFIRCQLFISTVEGEQLAGNVFNSPSLEQFFS

SEQ ID NO: 5921 - protein, 165 aa, Zea mays
  VARIANT 54: note = Ancestral polymorphism is Q, Derived polymorphism is R
  VARIANT 106: note = Ancestral polymorphism is A, Derived polymorphism is V
MMAMAQREADAPSEGAAAVSGVMAVKLKDLVPAATNTVNTTFIVLDKAAPSTRRQGGAREETCLALVADETAAAHFLLWGAECGAFEPGDIVRLTDGIFSYHRGNALVLRAGRRGRAEKVGEFAMLFVETPNMSELQWGPDPSDGRRMVQEAVVSPYSQIFKPLR

SEQ ID NO: 5922 - protein, 305 aa, Zea mays
  VARIANT 113..305: note = Derived polymorphism lacks residues 113 to 305
MAGRYDGNPFEEEDVNPFSQQTRGKAGGQSNFGGGAFYMPNPQNVPPTSNSRLSPLPPEPADFSATVDIPLDSSKDLKKREKELQAREAELNKREKELKRREEAAARAGIVIEEKNWPPFMPLIHHDIINEIPSHLQRMQYVAFASFLGLVCCLFWNVIAVTTAWIKGEGVKIWLLAIIYFISGVPGAYVLWYRPLYNAMRTDSALKFGLFFLLYLFHILFCVFAAVAPPAVFEGKSLAGILPAIDLISVNALVGIFYFVGFGLFCLESLLSIWVIQQVYMYFRGSGKAAEMKRDATRGAMRAAF

SEQ ID NO: 5923 - protein, 390 aa, Zea mays
  VARIANT 15: note = Ancestral polymorphism is P, Derived polymorphism is L
  VARIANT 111..390: note = Derived polymorphism lacks residues 111 to 390
MLPSSLLQRLASWCPWLLRDEPKQPVKVLVTGAAGQIGYAIVAMIARGLMLGPDQPVVLHMLDLPKSTDALSGVRMELIDAALPLLRGVVATSDEAEAFRGVSFAVLIGGWPRKEGMQRKDLIANNVPIYQSQAFALQQHAAPNCKVLVVANPANTNALVLKELAPAVPAKNITCLTRLDHNRALGQISEKLGVHVGDVRNAIVWGNHSSTQFPDASHAIARTQHGEKPVRELIADEKWFKEEFVTVVQQRGEAVIKARKQSSSLSAASAACNHMRDWILGTPKGTWVSMGVCSDGSYGVPKGIFYSFPVTCEKGEWSIVQGEFLSLYQIGSNSSTTVLDMICLLFEVLRLMTSHDPRWSFRRMNSMKRGPWRISSSPALKAISRSLVYT

SEQ ID NO: 5924 - protein, 910 aa, Zea mays
  VARIANT 262..910: note = Derived polymorphism lacks residues 262 to 910
  VARIANT 449..910: note = Derived polymorphism lacks residues 449 to 910
  VARIANT 543..910: note = Derived polymorphism lacks residues 543 to 910
MVVVAVGGGGGGGGWGTWEELVLGGAVLRHGSAAWATVADELRTRSPCTFSPEECEAKFAEIQLRYSACNAWYEELRKQRVAELKRELEKSENSIGSLQSVIQSLSNSKHVDGSSECRTSHTESCPHSENTADTNSSGKETSRDRSSAASFTEEASNSQKSQKVQQCDTDSIQVINPSPDESYPQAQVEKVGPKDGLLWGSRKQRVMRARRTLLKAGDSSGDGEPTSTACIQGEGLSKGCMKNFKTQNLESVVVKKGVKTPKVESDVMNKDLKTLNVGSGIMKKGLKAPKTESDMMKKGVRTSKAESDGMKKGMKIPKVEPDVMDWKTPKAGSDVTKKGLRSPKAECCQPVIESVKLKLAEILNTISTQDDCKMLQHQLDTQRKRARYKKMIRRHMDFRMLHSKIKSGAISGTKELLRDILIFINNVITFYPKTTLEHMAAVELRDFACKTVKQSASLFLKSHRETRTAGAPVIKKNARALHFSRTSLHSGDARASKVSSRDAAAKEGDGKRPCSDELANQKTTKRNEPAKKRGVGRPPKSGQRIAGAQENSPIKGRKSSAGAQSEAKSHPFDTVTVSDRDAVKLPQKAEVRIGYLPHGIVESNSDMKLKPLWLTTSAQSKKSKQKDHFLIAIAAGINQKKSVDAIMKKFLPENFTAVLFHYDGNVNGWNDLPWSKSVIHIAASNQTKWWFAKRFLHPAVVSMYQYIFLWDEDLEVDNFNPRSVRYLNIVRSEGLEISQPGLDSKLSEIHHRITVRKNTGTFHRWVEGMAPVFSKYAWQCVWHLIQNDLIHGWGIDYKFGYCAQGDRTKNIGVVDSEFIVHRGVQTLGGSTITKDGIRGKNAQSLRQKAAQVQKSRGRDPGLDMRTKIRRKSRSELRDFQKRWARAAREDRTWVDPFAHSRRKRRNRNPQ

SEQ ID NO: 5925 - protein, 1716 aa, Zea mays
  VARIANT 336..1716: note = Derived polymorphism lacks residues 336 to 1716
  VARIANT 355..1716: note = Derived polymorphism lacks residues 355 to 1716
MAGAAGGFVTRAFEAMLKECAANRGKFAALQQSIQSYLDSIKGATAEGAVITEALGSAGRVLDGPQAELVLQPLRLAVETKHVKLVEPALDCLHKLIAYDHLEGDPGLEGGKNSPIFTDILNMVCGCVDNTSSDSTVLQVLKVLLNAVASNKFRVHGEPLLGVIRVCYNIALNSKSPVNQATSKAMLTQMISIVFRRMESEQVSVSPGSSVVKDMPSSITNDSENGEISTDGQDEEKVTLGDALSMNRPSEAPPTSVEELQNLAGGADIKGLEAVLDKAVELEDGKKVSRGIDLDTVNIIQRDALLLFRTLCKMSMKEESDEVATKTRLLSLELLQGLLEGVSNVFIKNFHFIDSVKAYLSYALLRASVSSSPVVFQYACGMFSVLLLRFRESLKGEIGVFFPLIVLRSLDSSDSPLSQKASVLRMLEKVCKDPQMLADVFVNYDCDLEGPNLFERTVSALSRIAQGSQIADTNSIVSSQTVSVKSSSLQCLVIILKSLADWEQLRRDSSKQGSIVESHEEDASRRLTTDEMKNQEDGRNQFERAKAHKSTMEAAISEFNRKPSKGIEYLLSNKLVENKASSVAQFLKSNPSLDKVMIGEYLGQHEEFPLAVMHSYVDSMKFIGLKFDAAIRAFLKGFRLPGEAQKIDRIMEKFAERYCADNPELFKNADTAYVLAYAVIMLNTDAHNPMVWPKMSKSDFVRMNTASDAEECVPNELLEEIYDSIVKEEIKMKDDSHDTSKSTKRPETEERGRLVNILNLALPRLKSASDTKAESEKIIKQTQALFKNQGQKKGVFHVAQQVELVRPMLEAVGWPLLATFSVTMEEGDSKPRVVSCMEGFRAGIHLTRVLGMDTMRYAFLTSLVRFTFLHAPKEMRSKNVEALRTLLGLADTDMDALQDTWNAVLECVSRLEYITSNPSISATVMLGSNQISRDSVVQSLKELAGKPAEQIFVNSVKLPSDSIVEFFTALCGVSAEELKQTPARVFSLQKLVEISYYNMARIRLVWARIWSVLAQHFIAAGSHNEEKVAMYAIDSLRQLGMKYLERAELNNFTFQSDILKPFVILMRNTHNSKIRGLIVDCIVQLIKSKVGSIKSGWRCVFMIFTAAADDEDESIVESAFENVEQVILEHFDQVVGDCFMDCVNCLIGFANNKCTPRISLKAIALLRICEDRLAEGFIPGGAIKPIDVVPEANFDVTEHYWFPMLAGLSDLTLDSRPEVRHCALEVLFDLLNERGHKFSSPFWESIFHRVLFPIFDHVRHAGRDGLSSSGDDWLRDTSIHSLQLICNLFNTFYKEVSFMLPPLLSLLLECAKKTDQTVVSISLGALVHLIEVGGHQFSDGDWETLLKSIRDASYTTQPLELLNSLGFHKSNNQQLLSREESNAHGNSYHGSRGEPSIVNNGEHSHAEAGPQTSLENSEGKVYTIYVFIGLPSPSGRTQPAVSPRGQSFGQRIMGNMMDNLLVRSLTSKSKGRVDDIAPPSPVKAPDDDETDKAEGEESPMMETVRSKCITQLLLLGAIDSIQKRYWSRLKATQQIAIMDILLSLLEFASSYNSPSNFRTRMHHIPLERPPLNLLRQELVGTTIYLDILHKSTVEQDKIDSIEETNGLNVESGDQEKIKYLAEGKLVSFCGQILKEASVLQPSTGEAASADIHRVLDLRAPVIVKVLKGMCIMDAQIFRRHLKEFYPLITKLICCDQMDVRGALGDLFSKQLTPLMP

SEQ ID NO: 5926 - protein, 312 aa, Zea mays
  VARIANT 30..312: note = Derived polymorphism lacks residues 30 to 312
  VARIANT 101: note = Ancestral polymorphism is L, Derived polymorphism is F
  VARIANT 104: note = Ancestral polymorphism is A, Derived polymorphism is T
  VARIANT 106: note = Ancestral polymorphism is R, Derived polymorphism is W
  VARIANT 111: note = Ancestral polymorphism is M, Derived polymorphism is T
  VARIANT 136: note = Ancestral polymorphism is R, Derived polymorphism is C
  VARIANT 192: note = Ancestral polymorphism is T, Derived polymorphism is I
  VARIANT 211: note = Ancestral polymorphism is T, Derived polymorphism is M
  VARIANT 251: note = Ancestral polymorphism is S, Derived polymorphism is I
  VARIANT 300: note = Ancestral polymorphism is V, Derived polymorphism is D
MFRANAHNRLLVENRFAFKDAVARVAGARQNDLVEEILEQHKALPQGRREGFVVRIIGLYEKAGMPGHALRTFQEMGMYGCPRTAKSLNATMKMFCDMGDLRAAYRVMQGMERAGVRPDVITYTTLMAAFYKCGRREVGDGLWNLMRLRGCVPTLATYNVRIQFLVNRGRGWQANEMARKMYVAGIKPDEITYNLIIKGFFMMGEHEMAKTVFGAMHGRGCKPNNKVYQTMVHYICERRDFDLAFRLCKDIMEKNWFPSVDTINQLLKGLMAISKDRNGKEIMKLVTGRKPSYSDGEMKVFKDILSHRKTGR

SEQ ID NO: 5927 - protein, 334 aa, Zea mays
  VARIANT 187..334: note = Derived polymorphism lacks residues 187 to 334
  VARIANT 130: note = Ancestral polymorphism is A, Derived polymorphism is T
  VARIANT 87: note = Ancestral polymorphism is A, Derived polymorphism is T
  VARIANT 64: note = Ancestral polymorphism is L, Derived polymorphism is I
  VARIANT 63: note = Ancestral polymorphism is A, Derived polymorphism is V
  VARIANT 15..334: note = Derived polymorphism lacks residues 15 to 334
MPADGEALAPAVHFWGEHPATEAEFYSAHGTEGESSYFTTPDAGARRLFTRAWRPRAPERPRALVFMVHGYGNDISWTFQSTAVFLARSGFACFAADLPGHGRSHGLRAFVPDLDAAVADLLAFFRAVRAREEHAGLPCFLFGESMGGAICLLIHLRTRPEEWAGAVLVAPMCRISDRIRPPWPLPEILTFVARFAPTAAIVPTADLIEKSVKVPAKRIVAARNPVRYNGRPRLGTVVELLRATDELAKRLGEVSIPFLVVHGSTDEVTDPEVSRALYAAAASKDKTIKIYDGMLHSLLFGEPDENIERVRGDILAWLNERCTAQATHRNIPVE

SEQ ID NO: 5928 - protein, 432 aa, Zea mays
  VARIANT 148: note = Ancestral polymorphism is D, Derived polymorphism is Y
  VARIANT 46: note = Ancestral polymorphism is D, Derived polymorphism is Y
MGNCVASGGATTVTAAGEDGRRRGRRWKAPREEQLGSVPGRIFSNDGRSRTAAVFTQQGRKGVNQDAMLVWDGFGGEEDVVLCGVFDGHGPHGHLVARRVRDALPLKLMAAVRESKPGLDMAAAAWRKAFARAYKAMDKDLRSHATLDCFCSGSTAVTVLKLGSDLYMANIGDSRAVLGSRDGGGMVAVQLTVDLKPDVPSEAERIKKCRGRVFALQDEPEVPRVWLPFDDAPGLAMARAFGDFCLKDYGVISVPEFFHWSLTEKDQFVILASDGVWDVLSNQEAVDIVSSSPSRSKAAISLVEAAAREWKAKYPTSKTDDCAVVCLYLDGKMDQERDSTASMDNISLDYEGSAADPNEAQELQEPALTRNFTVRTVAGSAHEKALSGAADAAVGGGAACAHDQSWSGLDGVTRVNSLVQLPRFSEEKAAVG

SEQ ID NO: 5929 - protein, 196 aa, Zea mays
  VARIANT 151: note = Ancestral polymorphism is S, Derived polymorphism is L
MASCLSCSCRRFTTPDCTLLPSASAFATSPTSPSVWSCPRLPSPQSVDKAEASGRRQVEGAPIASASRAGSPHRTPTPDTIPFRRRIDFSSSEPAAGADGDPFQPDLDRPTPTPAYLRLIKKVRWLTSSAFWEDKQDCPSAECSEEVGGISRFISVSASRNPLREKGSGQGPPGWVTSYGQNRQCGVGYRGSASTT

SEQ ID NO: 5930 - protein, 123 aa, Zea mays
  VARIANT 117: note = Ancestral polymorphism is S, Derived polymorphism is I
  VARIANT 82: note = Ancestral polymorphism is Y, Derived polymorphism is N
MPSAPSHSLFPCPHAPPSPADRPALLHRNISRGPGESTKNPSADHSTAACSIWTLPTDSVRLSATEPGFRFDPTDEELVVHYLKKKAAIIAFTSSIRGSYLCACLEATFGEQEWYSSPRDHKY

SEQ ID NO: 5931 - protein, 235 aa, Zea mays
  VARIANT 1: note = Ancestral polymorphism is M, Derived polymorphism is I
MASSALPQQRSSAAISDDDDRAIASRLTASLEVATGNAELAARWAGRVDDERPASSSLKKEYDVFINHRGVDTKHTVARLLYDRLDHLSAGRVRSFLDNKSMRPGDRLQESIDEGIRQCKVAVAIFSQRYFDSDYCLRELASIVEARKVLIPIFYGIKPSELVLPQEVADLYTSQDVKRFSLAFQEAKSTVGLTYDPATGDLADLVLKAANAVMERIQEMEQRVPRRQQMIISRL

SEQ ID NO: 5932 - protein, 108 aa, Zea mays
  VARIANT 53: note = Ancestral polymorphism is R, Derived polymorphism is C
MTGGSGGRRDHESDRDASTALPVPGPCASTQRALAECRRRAARGPLQPEVLCRHLNRALAECVVTACCPDEIDAVRTLCGSAGTALKRKQCQRARIDLALCLEAHQEP

SEQ ID NO: 5933 - protein, 254 aa, Zea mays
  VARIANT 203..254: note = Derived polymorphism lacks residues 203 to 254
MVLCQGVSVGNAQLLAFPGRSSSLKSTQFLVKTNHFPARALRVGTDSIHHAMPTSSPRENSVRGIPSLSRQHNQHPRSVSCQASSLASFSYPELTSKPRWWWRTLACVPYLLPLHNMWSYADVIYQLHTYLQGFSLLYTFIDTMTLCPGWLFLVIFMTVYFFVVRRKWSPHFLRFHVILAILLDTGSQAVATMCTWMPSIVYQGKPMQYLWMSIAFIQIFTVLECLRCALCGMYPNVPFISHTAFIHSDLNLFR

SEQ ID NO: 5934 - protein, 539 aa, Zea mays
  VARIANT 73: note = Ancestral polymorphism is G, Derived polymorphism is S
  VARIANT 71: note = Ancestral polymorphism is G, Derived polymorphism is W
  VARIANT 5..539: note = Derived polymorphism lacks residues 5 to 539
MGNCCVTPNGAADAGGGKKPKEPKQKKGKKPNPFSIEYNRSTPASAPRLVVLREPTGRDIAERYELGAELGRGEFGVTYLCTDRASGEALACKSISKKKLRTPVDVEDVRREVEIMRHLPKHPNIVTLRDTYEDDNAVHLVMELCEGGELFDRIVARGHYTERAAALVTRTIVEVVQMCHKHGVMHRDLKPENFLFANKKESAALKAIDFGLSVFFTPGERFTEIVGSPYYMAPEVLKRNYGPEVDVWSAGVILYILLCGVPPFWAESEQGVAQAIIRSVIDFKRDPWPRVSDNAKDLVRGMLNPDPKRRLTAQQVLDHPWLQNIKKAPNVNLGETVKARLQQFSVMNKFKKHALRVIAEHLSVEEAADIKDMFEKMDLNKDQMLNFDELKLGLHKFGHQIPDADVQILMEAADADGNGSLDYGEFVTLSVHLRKIGNDEHLHKAFAYFDRNQSGYIEIDELRESLADDLGQNHEEVINAIIRDVDTDKDGKISYDEFAAMMKAGTDWRKASRQYSRERFTSLSLKLQKDGSLQMESTQ

SEQ ID NO: 5935 - protein, 338 aa, Zea mays
  VARIANT 42..338: note = Derived polymorphism lacks residues 42 to 338
  VARIANT 53: note = Ancestral polymorphism is L, Derived polymorphism is I
  VARIANT 133..338: note = Derived polymorphism lacks residues 133 to 338
  VARIANT 255..338: note = Derived polymorphism lacks residues 255 to 338
  VARIANT 275..338: note = Derived polymorphism lacks residues 275 to 338
  VARIANT 279: note = Ancestral polymorphism is R, Derived polymorphism is S
MLLGRGVTLRVLLFSSLWRLRARAYAAISCMRSAALPVAASWLRLRNTHVLLLMVVLFALFLRKLSGARLSLDLLREEPRRRAPAAAAGGGLPPLHAMLSSRSCNPSAKCYSAERTVNAPELVDDYYLNLLDWGSNNVMSIALGNTGCLRDASSGSTSELVTIDEDSGPITSPRTLRGVHEARTYERHIWDQGSSWPGGVRTQVVWSRAAAGQWRQRQPSAHLGMMPVFSTCCIEMITRWDNSMPSEGSSEIDVWPEFQNLTGDVISRTAFGSNYQEGRRIFELQGELAERLIQSVQTIFIPGYWKLQTEKAPTALGPNSQAIKANTVQLTGHNIFLQ

SEQ ID NO: 5936 - protein, 166 aa, Zea mays
  VARIANT 43..166: note = Derived polymorphism lacks residues 43 to 166
  VARIANT 32: note = Ancestral polymorphism is G, Derived polymorphism is R
MQVAVRPLAPSAVGGGGAFSAGLVRSVREWRGRTHRRVISFSSAGQGGEEAARRETPEETRKRLEELDALLEGLVEPKMRPPTPPPPPDPYLDRATMITGRGSSADELPEFSPTYVAFSTLGLVILTIFTNVMFNLYIKPSVDGVDPPPERIQRTALVNPADRPSE

SEQ ID NO: 5937 - protein, 1153 aa, Zea mays
  VARIANT 969..1153: note = Derived polymorphism lacks residues 969 to 1153
MAASGSGGNEPSGRPWTATSTWTPGPAGGAVADAVSFETSDDDAEASPAGVVLCHPSADSDRDMTPCPCEVTVSFRGKYEIHRVYVRSTARIYELYHSPDAKGTSKDYLCTVRCGLAVKETQCCGEESMSQWTGSALNSDKREHEAKSVSSASDEDSWVDVKIPESPAGNKTPESQERSVIRTCRENTLPHYEATAEMTDVNPCVSLTVRLLSLQSKTSVHIEEIYIFADPVEPTDDVSVRGPVNMGGSSLLAMLVPGLMQMSKSRNLKIDDSYFSDGSRNQESSKCESFTQEAGPCSTNDSKHTSAGIENGMNSTVGVSASDDKSSQGEFHFKDPDSLPLPVQTLESTQAPSVKNQHELNTGYLANPIMSENLTPSNHIERKLDTLLSKVENMELFCSRFEDSMIKPLGSIEARLQRLEEQFSSFAVDIQSLRDYSAFRSAPDGMPNTKSSQEEAHNDANDRSTSTSDRKPGLVVRAPDFVSDDSCGCNVITNGSRVNCHGPNVVPRILVKAPDFISQPELTDENLHDGHALSSEKECKTSPGLVVKVPELPDDDDDDGVEDKKQAEVCGDGDDHTRSDDTLRKSTAGNTKSKKSVSINGALASALEALLTSTIGTSYSKPTICATSNLSAENINGFFSCSPCPEKTGEMSTKDGSAVQILGTSGDPNLVGAFISSQEIDTAPHNSLSKEMLDSKVEINEQNCDINTENVAFVAITEPLDVPSQADTVEESINDGSWVNRQNYGSNLNAMPYAMNVEPLDPPKPPTVSEPVDSGVQVNEDRPSISLVEFLAARNASSCKNGTSEVCLGNVAAEKLSFERTSAGAGKNSKNISQLLVKKALEVDADKIFFLFSVPIGPKFEGSSSPTPRTSGHNINNTEEAVSDKECGVKDTKNGFRPSLGMDSIFSQYHATDSKKNLSENSSSDRILDESFSKQNGEQSRSSLSSMVSFSGASATEPVVPGSGTSENYVEDLTGVRDRPVATLNSGEELQKVCDLLYEFKDEMLRASVAKCTNKSSPSLEALLAESSDSEAQISDLEGTDSGAGIGSGRLFSTLSSSDDDDASAADEPLVDVADLTTPPERYTSVPSDEPLVDIADLTNPSGIDASSVNEPPADVVDLLHTSNEPLVSLDGLPNHPEMCFGGSSGEHTDSLI

SEQ ID NO: 5938 - protein, 389 aa, Zea mays
  VARIANT 233: note = Ancestral polymorphism is G, Derived polymorphism is C
  VARIANT 289: note = Ancestral polymorphism is R, Derived polymorphism is C
  VARIANT 330: note = Ancestral polymorphism is Y, Derived polymorphism is H
MSMLLIQKQPLPLSVRPRTTLRQCRLPTTRFSAAAADSASRAAPFAVEDYLVAACHLTPAQALKASKVLSHLKSPSRPDAVLAFLSGLGLSDADIAAAVAYDPKLLCSEVERTLAPRLAELRDLGLSPSQIARLALVDPARFRRPTVVSKLQYYVPLFGSFENLLQALRNNAYLLSSDLERVVKPNVAFLVECGLDACDIAKLSIPVPRLITTNPERVRAMVERAEAVGVPRGTGMFRHALLAVAFLSEEKIKAKAEFLKTTFRWSDAEVGVAVSKLPLVLKHSKDRLRRMSEFLITKVGLEPEYIAHRPALLTYSLERRLMPRHYVVNYLKENGLLEQDRSYYTAVQMSESAFMDKFICPYKEAAPSLALDYAAACRGEVPTTFLANV

SEQ ID NO: 5939 - protein, 349 aa, Zea mays
  VARIANT 151..349: note = Derived polymorphism lacks residues 151 to 349
  VARIANT 115: note = Ancestral polymorphism is A, Derived polymorphism is V
  VARIANT 106: note = Ancestral polymorphism is P, Derived polymorphism is L
  VARIANT 73: note = Ancestral polymorphism is R, Derived polymorphism is I
  VARIANT 55: note = Ancestral polymorphism is W, Derived polymorphism is R
MASDWDWDSDSDCEVRMINHPCERRAGAATQAEKGKAMGVTCYDVREIGGELVRWNATRFGTVFIFLQSFLDRKDKFKLWMASADWENFAALNPEALYTSKMARKPKFQHAVTMAIKKLSSSSSKASAAIDQYSFFRKQARLFGGEEAKDSALNGRASAESFEQMKNSKDRNIDPCSIMIDVAMYDEGNPIMEWLCSSRSESVPTLDENDEPESPNRPSGFVLEELGGLNEEEMVLLNSRIGSGRKNGRKRNVVEEDIGDDFLSDSSEGGGSPTYNESGDSDSNDGGGDDEDGEPSGPCFAARTQPKLATDQYNGPGQDEQAAPLRPRSKRQKKLSIKGLYMLQKVKYI

SEQ ID NO: 5940 - protein, 222 aa, Zea mays
  VARIANT 186: note = Ancestral polymorphism is S, Derived polymorphism is I
MKRLLFAAVCALLVLFNAGRVECRRHGDSGDSARQYKLFVFGDDYADTGNYPLADLSKTTRAWYYPYGSNDKDHGMSASGRFSNGLVLPDFIARILGREESPPAESKRDQDGVDPFGMNFAVGGAGVVDAAVLNLDLNTMFRRLTSGSGSSQSSKRFNKHRLEPCCEVFDRTDYCGRMDDGAAAYSLCSAPDKYFYWDEINPTHAGWKAVVNELEESIKNFL

SEQ ID NO: 5941 - protein, 58 aa, Zea mays
  VARIANT 15: note = Ancestral polymorphism is L, Derived polymorphism is P
  VARIANT 13..58: note = Derived polymorphism lacks residues 13 to 58
MLKVTRILFASIQKLDMLKPYEPWADGMWPARKPDAPEVPEAPRVTDRRTRMVRRGGS

SEQ ID NO: 5942 - protein, 132 aa, Zea mays
  VARIANT 90: note = Ancestral polymorphism is S, Derived polymorphism is Y
  VARIANT 84..132: note = Derived polymorphism lacks residues 84 to 132
  VARIANT 74: note = Ancestral polymorphism is A, Derived polymorphism is T
  VARIANT 72: note = Ancestral polymorphism is A, Derived polymorphism is V
  VARIANT 70: note = Ancestral polymorphism is V, Derived polymorphism is I
  VARIANT 67: note = Ancestral polymorphism is R, Derived polymorphism is C
  VARIANT 65: note = Ancestral polymorphism is G, Derived polymorphism is D
  VARIANT 63: note = Ancestral polymorphism is V, Derived polymorphism is I
  VARIANT 61: note = Ancestral polymorphism is R, Derived polymorphism is C
  VARIANT 60: note = Ancestral polymorphism is R, Derived polymorphism is H
  VARIANT 58..132: note = Derived polymorphism lacks residues 58 to 132
  VARIANT 48: note = Ancestral polymorphism is P, Derived polymorphism is S
  VARIANT 29: note = Ancestral polymorphism is R, Derived polymorphism is W
MKTLISSTPAASSAPAPCSPPPAATTALRPLPLASLHRPAPPLVDRPSPTDEELVSYYLRRRVLGHRLRVDAIAEIDLYRLEPWDLPSLSRIHSRDAQWYFFARLDRKVAGAGAGGRGGPGNMTNRATPRGY

SEQ ID NO: 5943 - protein, 166 aa, Zea mays
  VARIANT 150: note = Ancestral polymorphism is S, Derived polymorphism is I
  VARIANT 149: note = Ancestral polymorphism is N, Derived polymorphism is H
  VARIANT 131..166: note = Derived polymorphism lacks residues 131 to 166
  VARIANT 123: note = Ancestral polymorphism is V, Derived polymorphism is G
  VARIANT 83: note = Ancestral polymorphism is N, Derived polymorphism is Y
  VARIANT 79..166: note = Derived polymorphism lacks residues 79 to 166
  VARIANT 76: note = Ancestral polymorphism is P, Derived polymorphism is S
  VARIANT 37..166: note = Derived polymorphism lacks residues 37 to 166
  VARIANT 35: note = Ancestral polymorphism is S, Derived polymorphism is C
  VARIANT 25: note = Ancestral polymorphism is G, Derived polymorphism is R
  VARIANT 22..166: note = Derived polymorphism lacks residues 22 to 166
  VARIANT 11: note = Ancestral polymorphism is Q, Derived polymorphism is R
  VARIANT 10: note = Ancestral polymorphism is D, Derived polymorphism is Y
  VARIANT 3: note = Ancestral polymorphism is R, Derived polymorphism is H
MKRDYLAAMDQYIKLAIGNAPWPIGVTMVGIYGRSAREKIYTNSVAHIMNDETASKYLQSIKWLMTLCQRRYPALSSKSMEFNSLANGFISIPAKSREPFIDYLLSSSSDVYCIDQPQWNRSGSTATDKIWKPCCIYHLILANLETACNSRSISLQRYEVLMDSDI

SEQ ID NO: 5944 - protein, 708 aa, Zea mays
  VARIANT 36: note = Ancestral polymorphism is S, Derived polymorphism is L
  VARIANT 113: note = Ancestral polymorphism is R, Derived polymorphism is H
MLVRSQHSPFKQMAQMSHHMLPVLVAAVLSITAAASAASSHSHPHPLDPLTPDEITAVRAAVLASPRVPARPLTFHYVGLDEPDKPDVLAYAYGGSGSSSRPLLPRRALVIARAGGQSHELRVSVASNGTSAAVLSHAVHSGAGFPVLTLEEQFAAVALPQAYPPFVESVRRRGVDMDDVLCAVFPVGWFGGRAGTTAKRVAKMLCFVAGPTANFYARPIEGITMVVDLDAMAIVGYRDRVTYPVPKAEGTDYRAGKTGPPLAPGVAVQPEGRGFHIDGHVVRWANWEFHVGFDMRAGTVISLASVHDHDADAGTRRRVLYRGFVSEIFVPYMDPVEEWYYRTFLDAGEYGLGLWAFPLQPGADCPANAAYLDGSYAGQDGKPVGGENRICVFERYAGDVAWRHTEAGFPDRLITEVRPDVTLVVRMVVSPGNYDYILDWEFKTSGSIKFVVSLTGLLEVKGTSYTHADEITVDAHGSLVSENTIAVYHDHYVTYHLDLDIDGTNNSFVKNIITAKRNTGDPATGGAGTPRRSYWTVRREVAETEADGQADVNAAPADLLLVNPGKKTRMGNEVGYRLIPSGATAASVLADDDYPQRRASYTKKQVWVTPYSKSEKWASGLFADQSTGADSLTAWSRRNRGIRDQDIVLWYTLGLHHIPYQEDFPVMPTLSGGFELRPSNFFERNPILKIGRPPIRSSASGNCSCDAR

SEQ ID NO: 5945 - protein, 220 aa, Zea mays
  VARIANT 56: note = Ancestral polymorphism is V, Derived polymorphism is A
MDDAQEPPSPPSPSQSSSSSSSSSSVAPNPKKRARKDGSRHPTYRGVRMRSWGKWVSEIREPRKKSRIWLGTFATAEMAARAHDVAALAIKGARDAHLNFPGLAHLLPRPATAAPKDVQAAAALAAAADFPLPPSPGGANAKSPESSSSGSASASASDDASAASPAAPQDAEPNPDDALFDLPDLLLDLRCCGPSSWAVDDDVAGGGAFRIIEEPLLWEY

SEQ ID NO: 5946 - protein, 332 aa, Zea mays
  VARIANT 249: note = Ancestral polymorphism is P, Derived polymorphism is S
  VARIANT 241: note = Ancestral polymorphism is W, Derived polymorphism is R
  VARIANT 216: note = Ancestral polymorphism is R, Derived polymorphism is C
  VARIANT 197: note = Ancestral polymorphism is S, Derived polymorphism is I
  VARIANT 140: note = Ancestral polymorphism is A, Derived polymorphism is T
  VARIANT 117: note = Ancestral polymorphism is K, Derived polymorphism is N
MFLCYPDEWRTGLKALRADSISILKKAFPELVQEVILSPQTLSYVQVSHAYQRFNLWTRLQGHPISRISTYMHFVIASQDKKKCIEIPAACELLNLVLSFLNNAACKLRLNDYKEAKELCTEVLESDNTNVKALYRRAQAHMHLVDLDLAEADIKKALEIDPDNRDVKMGYKRLKEKVKEYKRRDAKLYGNMISKLSKLEDTEDNGQMSQTVNKKCGLLWPLSEMVRRFFTADGSKGFTLWPALRLLIPDEWRTGLKALRADSISKLKKAFPELVQEVSRPSNFQDFYIYAFRYCLTGLQFHPQVDKLNNYLMYQNDYKAITMDQWMGFIRL

SEQ ID NO: 5947 - protein, 703 aa, Zea mays
  VARIANT 84: note = Ancestral polymorphism is R, Derived polymorphism is S
MIGAKANAAGPCPEYAEVDPTGRYGRFSDVLGKGASKIVYRAFDEYQGMEVAWNQVKLHDFLQSPEDLERLYCEIHLLKTLKHRNIMKFYTSWVDVSRRNINFITEMFTSGTLRQYRQRHRRVNIWAVKHWCRQILSGLLYLHSHNPPIIHRDLKCDNIFVNGNQGEVKIGDLGLAAILRKSHAVHCVGTPEFMAPEVYEEEYNELVDIYSFGMCVLEMVTFEYPYSECTHPVQIYKKVISGTKPESLYKVKDPMVRHFVEKCLATASQRLSARELLEDPFLQSDDVVASLDGGNYHVPANYIPQPSYLGHTYSNGSMMSNGFSESIDEDALSEDCEDDDMKGQDGIDLFNENEGELLGNVDITIKGRKSEDGGIFLRLRISDDDGRVRNIYFPFDVEADTALSVATEMVAELDITDHEVTRIADMIDGEVSALVPDWRPGPGIEEAPDTSYCHDCGSIVSSCGSLYAYMSSGRRGCQCAEVHGRFEEITFEADGEQCDLQESAGSSDDGGGPTEHYVKGKESTHVNGLLQMGRRDLSNQLCFSSFQEQSCSSNHYENETNHHTNGFDMKHEVKIAKYKARKMAQLKRAIHPSLDFDNANGVNRMKPSLNKLQSFHIGKNHSFRVPTGDRSPGKVSTDYHSNLNSQLSHSRHPDPGAQRAWHCEVNAAGSSDCMFTARRYYAGAQLPPNLPRTKSVPLHAVDV

SEQ ID NO: 5948 - protein, 208 aa, Zea mays
  VARIANT 126: note = Ancestral polymorphism is S, Derived polymorphism is L
MSSTVPKSSNIFWHDCLVGKTDRQKLLNQKGCVVWITGLSGSGKSTLACTLGRELHTRGKLAYVLDGDNLRHGLNKDLGFKAEDRAENIRRVGEVAKLFSDAGLVCIASLISPYRRDRESCRALLSDGSFIEVFLNMSLELCEARDPKGLYKLARAGKIKGFTGIDDPYEAPLNCEIEIKEIDGVCPSPSDMAGQVVTYLEEKGFLHE

SEQ ID NO: 5949 - protein, 371 aa, Zea mays
  VARIANT 37..371: note = Derived polymorphism lacks residues 37 to 371
  VARIANT 180..371: note = Derived polymorphism lacks residues 180 to 371
MAPEPEPKPTRCGGRDPAFNDANPIPHAPRRPRSRLQRRERQRSPSPPRLQRPCLPLSPPPPHASTASLQRRRHRPSRSSEIQIRRGSEWQRAATAAAPHTCPIQPPWSSSPSIHHAEREVEVRALADQAAHIEAEARAVACKKVFRSYQALGGHRASNVRGGRGGCCAPPVAPPAPPPQPQPPLSPLPEHRDGGEDDDMNAKQQPRECPHCGRVFLGQALGEHIMQSHVCASSPLAGTATASTTSAATPASPTNSPSMIDLNVAPQSEEVEHSAVSDPRFNPDLRSSEAKLFIKMALFRLVVWHVMMASNHQCYRWPPQARGLLQLLDRDRSEAFLAMESFVGSSISFIGGHVIRVDLVLLRPCLQARYY

SEQ ID NO: 5950 - protein, 450 aa, Zea mays
  VARIANT 83..450: note = Derived polymorphism lacks residues 83 to 450
  VARIANT 112..450: note = Derived polymorphism lacks residues 112 to 450
  VARIANT 155: note = Ancestral polymorphism is E, Derived polymorphism is K
MREIISIHIGQAGIQVGNACWELYCLEHGIEHDGTMPSDSSVGVAHDAFNTFFSETGSGKHVPRAIFVDLEPTVIDEVRTGSYRQLFHPEQLISGKEDAANNFARGHYTVGKEIVDLCLDRVRKLADNCTGLQGFLVFNAVGGGTGSGLGSLLLERLSVDYGKKSKLGFTIYPSPQVSTAVVEPYNSVLSTHSLLEHTDVAVLLDNEAIYDICRRSLDIERPTYTNLNRLISQIISSLTTSLRFDGAINVDVTEFQTNLVPYPRIHFMLSSYAPVISAEKAYHEQLSVPEITNAVFEPSSMMAKCDPRHGKYMACCLMYRGDVVPKDVNAAVATIKTKRTVQFVDWCPTGFKCGINYQPPSVVPGGDLAKVQRAVCMISNNTAVAEVFSRIDHKFDLMYAKRAFVHWYVGEGMEEGEFSEAREDLAALEKDYEEVGAEGADDEGDEGDDY

SEQ ID NO: 5951 - protein, 593 aa, Zea mays
  VARIANT 535: note = Ancestral polymorphism is S, Derived polymorphism is L
  VARIANT 478..593: note = Derived polymorphism lacks residues 478 to 593
  VARIANT 420: note = Ancestral polymorphism is L, Derived polymorphism is P
  VARIANT 312: note = Ancestral polymorphism is C, Derived polymorphism is Y
MDGRHHLLGRRKQTAVAGDVDVRPGPAERAAGVALEPGVEAADAEDVEEPGVEAADAEDVEEPHPNVTALHDVYEDACGVHPVLELCSCGELFDRIKHLASDLHVPSIPPIPTAALSVPKAAELELYGITDDLREFVKSMTISTVGRHDLSSKELDNLRIHFARICTNGENATLAKFEQVLKAMKLEALSPLAPRVFDLFDNNRDDTVDVRDVLCGLSSLRNFHGDEALQLCSQMYNVDRFGEMFSQVTTEEPRLWELNVETDVYTMDFLNEHWKNYERSAKASETTIHGASDETNIGIIRVVFGDERIMVCQIVAWARLCKCLGQDFLPYMSVVMPPLLQSAQLKPDVTITSAESDGDIESDDDSIETITFGDKRIGIRTSVLEEKATACNMLCCYADELKEGFFPWIDQVAPTLVPLPKFYFHEEVRRAAVAAMPEILRSAKLAVEKGQAQGRDESYVKQLSDYIILALVEALHKEPEAEMCSSMLDSLNECMQVVPAWLNCLPIKDDKIEAKAVHEQLCSMVESQYLPKVVLIFAEVLCNGTELATDETKNRMVNVLRRFLQTSPPDFLASTFSNLQPQQQLLLQSVLSA

SEQ ID NO: 5952 - protein, 121 aa, Zea mays
  VARIANT 97: note = Ancestral polymorphism is A, Derived polymorphism is V
  VARIANT 95: note = Ancestral polymorphism is A, Derived polymorphism is V
  VARIANT 88: note = Ancestral polymorphism is P, Derived polymorphism is L
  VARIANT 64: note = Ancestral polymorphism is V, Derived polymorphism is A
  VARIANT 56..121: note = Derived polymorphism lacks residues 56 to 121
  VARIANT 51: note = Ancestral polymorphism is F, Derived polymorphism is S
  VARIANT 37: note = Ancestral polymorphism is G, Derived polymorphism is R
  VARIANT 36: note = Ancestral polymorphism is S, Derived polymorphism is L
  VARIANT 34: note = Ancestral polymorphism is D, Derived polymorphism is G
  VARIANT 31: note = Ancestral polymorphism is Y, Derived polymorphism is C
  VARIANT 13: note = Ancestral polymorphism is D, Derived polymorphism is G
MKTDNSGPSCVLDLYICRFALMVVDSATVLYRTDFSGRGELSARQMHMAKFLRSLQKLADEFGVVVITNQVVAQVDGSAMFAGPQFKPIGGNIMAHASTTRCIAPPPVDHKLVIIYIQALN

SEQ ID NO: 5953 - protein, 492 aa, Zea mays
  VARIANT 174: note = Ancestral polymorphism is S, Derived polymorphism is L
  VARIANT 260: note = Ancestral polymorphism is P, Derived polymorphism is S
MWSKKLHGVFTLLMLMVFNVSGAFVGITIGNDMSNIPPATDIVSILKAKKIQHVRLLDSDHQMLTALANTGIEVMVGVPNDQLLRVGQSRSTAADWINKNVNAYIPATNITYIAVGNEVLTTIPNAALVLIPALQFLQSALLAANLDTQVKISSPHSMDVISKAFPPSAATFNSTWSSIMSQYLQFLKNTESSFMLNAQPYYGYVGGQGVFPLEYALFRSLNPNSQISDPNTNLFYTNMFDAIIDATYNSIQAINFTGIPVLVTASGWPWRGGPSEKAATVDNALAYNTNLIHHVLNNSGTPSQPNNQSSTYIFELFNEDNRSGPVSEQNWGIMFPNATTIYSLSFEDVATTIPESPALRGVFCVANPSAPHSALKHSLDWACGPGSANCSAIQPGKPCYASDDIVAVASYAFNDYYHRTQSSGGTCNFNGTAMITSTDPSHGSCVFAGSTGANGGTASGPVSPDSFASKSKTCWLTHLVATLLLPILFVVM

SEQ ID NO: 5954 - protein, 199 aa, Zea mays
  VARIANT 129..199: note = Derived polymorphism lacks residues 129 to 199
  VARIANT 57: note = Ancestral polymorphism is V, Derived polymorphism is G
  VARIANT 24..199: note = Derived polymorphism lacks residues 24 to 199
  VARIANT 18..199: note = Derived polymorphism lacks residues 18 to 199
  VARIANT 16: note = Ancestral polymorphism is T, Derived polymorphism is M
  VARIANT 14..199: note = Derived polymorphism lacks residues 14 to 199
  VARIANT 2: note = Ancestral polymorphism is S, Derived polymorphism is R
MSALREAGRSASMQVTRQVQQPLQRVEGAARKAAPPPPRWCSGLGMLGRDGKRGRFVEVLGEERCGEDGIGTRGRDVVDDGLRRAILRAAVGRPDKEDVRGEEGEEGGGDPDGDGAGEQHGEEVAERDEEEADVAHEPGALDLDGASSGPGRRGLLGYSHGWTGGAMRGERVRGRERDSRAYWTVEIVGRQNKGETCYL

SEQ ID NO: 5955 - protein, 293 aa, Zea mays
  VARIANT 35..293: note = Derived polymorphism lacks residues 35 to 293
  VARIANT 36..293: note = Derived polymorphism lacks residues 36 to 293
  VARIANT 71: note = Ancestral polymorphism is N, Derived polymorphism is K
  VARIANT 97..293: note = Derived polymorphism lacks residues 97 to 293
  VARIANT 110..293: note = Derived polymorphism lacks residues 110 to 293
  VARIANT 113: note = Ancestral polymorphism is C, Derived polymorphism is Y
  VARIANT 125..293: note = Derived polymorphism lacks residues 125 to 293
  VARIANT 152: note = Ancestral polymorphism is G, Derived polymorphism is E
  VARIANT 225: note = Ancestral polymorphism is E, Derived polymorphism is K
  VARIANT 259: note = Ancestral polymorphism is N, Derived polymorphism is Y
  VARIANT 261..293: note = Derived polymorphism lacks residues 261 to 293
MGGGGGMHDPFDLFQSFFGGGSPFGGGSSRGRTQRWGDDVVHPLKVSLEDLYNGTSKKLSLSHNVLSSKCNGKGSKSGASSRCAGCQCSGFKVQIRQLGPGMIQQMQHPCNECKGSRETISDKDRCPQCKGDKVVPEKKVFEVVVEKGMQNGHKITFLGEADEAFVLTHLDNRQLLIKSNPGEVVKPNSFKAINDEGMPMYQRPFMKGKLYIHFSVEFSDLLSSEQCKALEVVLPPKPVSQYTDMELDECEDTMPYDVNIEEEMRRRQQQHQEAYDEDDDVPGGGQRVQCAQQ

SEQ ID NO: 5956 - protein, 460 aa, Zea mays
  VARIANT 194: note = Ancestral polymorphism is A, Derived polymorphism is G
MTGKRRSAERAQEGAAGRGRGRRALGLIRDRRARVDTFGRRKETLKAKAFELSVLCGVDVALVVAAADGDGDAAADVWESTEGAVLARYRALDPEVRARARHTHRAYLEGGLGKEEAKLARVHQAGPTALDPWPWDKALDGTATAEEAQRLLEAIDAAIRASEDRMRALGLPVDGEDVVGPGAALEMIATLDSAGVDGYPLHPPGGGDTYDNQAIWSNEGFNAYNFQQCPAGSSSAGMEGYHLQVAPEMYTGSGHNNGRIATDAHMYQPPDAGTMQHGYGFHQCAGIDCFGMPAGHQMQELPGWGTAQANMAMWRTEEPRHAMVPVHYPSAQTGLSYMETLAALGAQGGGGLSFAMGTSCNFVNAPPVLPLAMGTAGCGGRDFINARPVAFSHAICGTSDNCTDTTPAGPLAMSYGADLTIAGGYATQWQAGRSGHQSGIELLRYLGRLEENTQLHLWGN

SEQ ID NO: 5957 - protein, 778 aa, Zea mays
  VARIANT 412..778: note = Derived polymorphism lacks residues 412 to 778
MATTITRLLHHLALLLLVVQFADAVFVPKTKNYAVLKPQSWGTTYIVHANFLAKPPHFGSLKEWYRSMVTTHASSTRAASSSSILYTYDTVMHGFAVQLTGDEARLMSSAPGVIGVYEDRVLYPQTTRSPGFMGLEPGNGAWKQTDFGDGVIIGFIDGGIWPESASFNDSGLGPVRSGWRGKCVDAHGFDANLCNNKLVGAKAFSAAADAVAGRKSRGVPSPRDKDGHGTHVASTAAGAEVRNASLYAFSQGTARGMAPKARIAMYKACSENGCMHADIVAAVDAAVKDGVDIISISLGRSFPIAFHDDVLAVALFGAERKGVFVVVAGGNAGPQAARVVNSAPWMTTVGAATVDRLFPAHLTLGNGVVLAGQSLYTMHAKGTPMIPLVSTDGINSWTPDTVMGKIVVCMFGASDADGILLQNAGGAGIVDVDSYEWSRDGSALYSFTLPGLTLSYTAGEKLRAYMVSVPYPVASLSFGCETVISRKNRAPVVAGFSSRGPNPAAPELLKPDVVAPGVNILAAWSGDAPLAGVFVPDGRRANYNIISGTSMACPHVAGIAALIKKKHPSWTPAMVRSALMTTAGTVDNRGGHILDNGHTDTLGRTDNVRVATPLVAGAGHVHPDLALDPGLVYDAGERDYVDFLCALNYTAEQMRRFVPDFVKCTGTLAGGPAGLNYPSFVVAFDSRTDVVRTLTRTVTKVSEEAEVYTATVVAPEHVKVTVTPTTLEFKEHMETRSYSVEFRNEAGWHREAGWDFGQIIWANGKHKVRSPVAFQWKN

SEQ ID NO: 5958 - protein, 168 aa, Zea mays
  VARIANT 118: note = Ancestral polymorphism is T, Derived polymorphism is A
MSRPRLVSSSLPRDVSTPPILTGCRHQPAADPRRRVTTHDPVRTPSAMAHPMYGSGPLRSRNAANSDEIQLRIDPVHGDLDEEIDGLQSRVRMLKGVAQEINSEAKSQNDFLHELQMTLAKAQAGVKNNMRRLNKSIIQQGSNHVLHVVLFALFCFFIVYLLSKFSRR

SEQ ID NO: 5959 - protein, 127 aa, Zea mays
  VARIANT 17: note = Ancestral polymorphism is V, Derived polymorphism is D
  VARIANT 38: note = Ancestral polymorphism is P, Derived polymorphism is H
  VARIANT 76: note = Ancestral polymorphism is S, Derived polymorphism is F
MEDVRRDEEVLQRANVVVRGDEHKKHDSYEAPIKSKEPLIFNVGFRQFTVRPLFSSDNINCNKHKMERFLHHGWFSVASVYASISFLPLPLIVLKNRDGEQSTIAAVGSLKSVDPNRIILKKIVLTR

SEQ ID NO: 5960 - protein, 497 aa, Zea mays
  VARIANT 124: note = Ancestral polymorphism is R, Derived polymorphism is W
MLLADRRGWVNERVLHLGDRFNAGLTNLTLSQSLSLMVNMRDNDSSSDAQLDEPLGRVSILSYGSGHMLNDITSSCWFTYLLVFLTDLGLSPGDAAIVMLSGQLADGFTTIFVGELIYEVMNMRFLFQMDRFGHFKLWHAGGSILVAISFSSVFGSCVPCKLMGINTSTLETVGYSTFAAIFNVGWAVTQVAHMSMVNCITSNPTSRVSLVSCRNAFTMVANLSLYGVALVIFTLLQSVNVLVQVSISLGSCFVVIFLIGTKEPGSIRHCLDKSPSRISWDYWFKRVLYYQVALVYTLTRLVTNVSQAFLAFYVINDLEMNQSSKALVPAIIYICSLIVSVILQETRWSSWRLKLYFSAGAVLWILSGLGIVLLPSRMHNLMYAISIVIGAANALMTVTSISMEGVLVGEDLNGCAFVYGSLSFVDKVSCGIALYVLESYQGSTKIRSNLGTTSGYSVTRLGLGLVPAACSLLSAIAAYTMELPDTQKGPLVEPLLA

SEQ ID NO: 5961 - protein, 344 aa, Zea mays
  VARIANT 72..344: note = Derived polymorphism lacks residues 72 to 344
  VARIANT 53: note = Ancestral polymorphism is S, Derived polymorphism is I
  VARIANT 51: note = Ancestral polymorphism is D, Derived polymorphism is Y
  VARIANT 48: note = Ancestral polymorphism is G, Derived polymorphism is S
  VARIANT 32..344: note = Derived polymorphism lacks residues 32 to 344
  VARIANT 24: note = Ancestral polymorphism is G, Derived polymorphism is C
MARPPGGARRRGGGSGRRDAAGGCEAVRKGHWTAEEDGVLLEHVRVHGPRDWSFIRSKGLLPRTGKSCRLRWVNKLRPDLKTGCKFSAEEERVVLELQAQFGNKWARIATYLPGRTDNDVKNFWSTRQKRLARLLGTPIRRRQSSRSRSAKAPVASSLKSRPATVVKPSQVPCLDQVPLEGSSTGVHPCSAGAATPFMDAHSISAALAPYDWAGSGLASSDGALPLASDIHACSSSNAAALPPLLPFDQPPCTELGFPGLPAGWNMAPGFDNVGTMDHLAYQELLPVTQPAPMMLPFFGTEYLHGGAKAELPDAGPDYFFDDLPPDMFDSLDQPPRPLSPPATS

SEQ ID NO: 5962 - protein, 306 aa, Zea mays
  VARIANT 36: note = Ancestral polymorphism is A, Derived polymorphism is E
  VARIANT 267: note = Ancestral polymorphism is S, Derived polymorphism is L
MIKNTVATLMVRLHHLPLPRAAPAPTYRCGRHLALAPPLPRLRASAAVMSTAAEQTIADQKRTLRAEVRRALKALSADQRASEDLAIQTTILDSSWFKASKRLCAYISCQQLREVDTSKILAECLPSNPGQEELAKDLYVPRVEDKNRNMRMLKITTMDDLVKNSMNILEPSPVDATGNNREDVLSSLSPVDLFLLPGRFSFIYFINAPPHGLNWIILVIHAGQAFDRTGRRLGRGGGYYDTFLLKYQELAKEKGWNQPLLVALSYSVQIMDEGIIPVNSTDVPIDALVSSSGVIPISAAALQRMQ

SEQ ID NO: 5963 - protein, 663 aa, Zea mays
  VARIANT 12..663: note = Derived polymorphism lacks residues 12 to 663
  VARIANT 138..663: note = Derived polymorphism lacks residues 138 to 663
  VARIANT 163..663: note = Derived polymorphism lacks residues 163 to 663
  VARIANT 312..663: note = Derived polymorphism lacks residues 312 to 663
  VARIANT 440..663: note = Derived polymorphism lacks residues 440 to 663
MDPSDSNSAAGGKTQNVSVPPVEGVAGGGTSYGWVDGGLRGTNIGAGVIDPTKVHSDDLLHVWSMPSTANVSQQEAPRPLEKVNLLAARNERESFQIALRPKVSWATSGIAGSVQIQCTDLCSSSGDRLVVGQSITLRRVVPILGVPDALVPIDPLSPQISIQPGETAAVWVSVNVPCGQPPGLYEGEIFITAVKTELEILSNLVTLALISGLYFFADLISGSSSRTESLPKSEKCRLYRELRSCLDLTGPRDYSSPEEMVQRLTSASTVLRRVLDNPALQDCQENNGFGDMMDEDVINNISVRLKLSLTVWDFTLPVTPSLPAVFGISETVIEDRFCLEHGTEGWYSALDHHFRWLLQYRISPFFCRWGDSMRILAYTCPWPADHPKANEYYSDPRLAAYAVPYAPILSCTDAAKNSLRREVEILKSKPHWSKAYFYLWDEHCSFPAQFENKVLGPSGSELAPSTFEAFAKVPNVLRPHTQIFCTSEWVLGTREDLVKDIVAELRPDLGEEWWTYVCMGPSDPQPNWHLGMRGTQHRAVMWRVWKEGGTGFLYWGSNCYEKAMIPSAEICFRRGLPPGDGVLFYPGEVFSSSHEPVASTRLERILSGMQDIEYLKLYSSRYGREEGLALIEKTGMYLGPDRYTLDHGPVDVMRGEVYRTCRS

SEQ ID NO: 5964 - protein, 474 aa, Zea mays
  VARIANT 291..474: note = Derived polymorphism lacks residues 291 to 474
  VARIANT 59: note = Ancestral polymorphism is A, Derived polymorphism is S
  VARIANT 22: note = Ancestral polymorphism is L, Derived polymorphism is V
MGSPLPHVAVVAFPFTSHAPKVLMVARALATAAPSATFSFISTTDSLARLPTGAGAAPSNLRFVEAPSGGGDGPGIPSWRRMELFLDAAEDGGLRQALETARAAAGGAAVTCVVGDAFMSMAADAGVPWVAVWTGGPCALLAHVIGDTIRKDIGDHAASRADEPLASYPGLGMYRVRDLPFGDAGAGGDMYRVMTTLLGRVAERVPRAATAVALNAFPGLFPEDVSAALADALPNCLPMGPYHLLPGAAAAAAALADDGDRHGCLAWLARRDAGTVAYVSFGTVAALPPDELRELASGLEDSGAPFLWSLREDAWALLPPEFLERAKAAADSRLIVPWAPQAAVLRHPAVGAFVTHSGWGSVVEGMAGGVPMACRPFFGDQLMNARAVARLWCFGTAFDEDKPMTRGGVAAAVASLLTGEEGARMRATARDLQARVVKAFGPDGGSVNNFHKFVDTCLTVGRDMHLNARGNHPM

SEQ ID NO: 5965 - protein, 431 aa, Zea mays
  VARIANT 272..431: note = Derived polymorphism lacks residues 272 to 431
MDAATGNCSSSPLRIVICPWLAFGHMLPCLELAERLASRGHRVSFVSTPRNLARLPPRRHDVHLVPLPLPRVEGLPDGVESTNDVPPDKRDLHWKAFDGLAVPFAEFLAAACADEATRPDWVLADTFSHWAAAVALEHKVPSAMLLPSAAMIASCWHRPPSHAEQPRSAVFEEPAERPAGVLPYEWDKRAHFFGPQRASGMSTAQRCFLTLQRCRLLAMRSCPEWEPENFTVAAALLGKPLVPLGLLPPSPNGGRRREEDGGSTARCWLDAQPPSSVVYVALGSEVPLTVALVHELALGLELAGARFLWALRKPSGVADDADVLPPGFRERTCGRGLVAMGWVPQMSILAHGAVGGFLTHCGRNSLVEGLLFGHPLVMLPVVGDQGPNARAMERTKVGLQVARNGKDGSFDRHGVAAAVREVMLVEEARKV

SEQ ID NO: 5966 - protein, 179 aa, Zea mays
  VARIANT 155..179: note = Derived polymorphism lacks residues 155 to 179
  VARIANT 120: note = Ancestral polymorphism is R, Derived polymorphism is Q
  VARIANT 111: note = Ancestral polymorphism is I, Derived polymorphism is T
  VARIANT 108: note = Ancestral polymorphism is G, Derived polymorphism is R
  VARIANT 106: note = Ancestral polymorphism is E, Derived polymorphism is D
  VARIANT 104: note = Ancestral polymorphism is K, Derived polymorphism is N
  VARIANT 52..179: note = Derived polymorphism lacks residues 52 to 179
MCPPPTRRNAPCVVSFLAVLSSLPPYLPPRPSLHALHFIPDADADDSGRSPRRTRARSHFLTTPSPARLPVTVSPLRSRSSSSCRMYRAKRAASLRAKRQRLGKYELGCTIGEGTFAKVRIAKNMDTGDHVAIKILDKAKVHKNKLAEQIRREIYTMKLIQHPNVVRLYEVKASTFPPN

SEQ ID NO: 5967 - protein, 222 aa, Zea mays
  VARIANT 58: note = Ancestral polymorphism is R, Derived polymorphism is L
MEQYDGLFPSAYADSSSSLLMPNGSKAQGERPRARRRRRRAAWCGGGELDGGGDPKKRRLSDEQAEMLELSFREERKLETGRKVHLAAELGLDPKQVAVWFQNRRARHKSKLLEEEFAKLKQAHDATILHKCHLENELMRVKDRLVLAEEELARFRSVGSHAISGDGGDAMMGRAVCSGSPSSSFSTGTCQQPGDDDLLYFPDYAYADNSVVDEWFRMYGLM

SEQ ID NO: 5968 - protein, 516 aa, Zea mays
  VARIANT 336: note = Ancestral polymorphism is L, Derived polymorphism is P
MASADLAEAIEPSRKKKSNVKYASICAILASMASVILGYDIGVMSGAAMYIKKDLKITDVQLEILIGILSLYSLIGSFAGARTSDRIGRRLTVVFAAVIFFAGALLMGFAVNYSMLMVGRFVAGVGVGYGGMIAPVYTAEISPAASRGFLTSFPEVFINVGILLGYLSNFAFARLPLRLGWRVMLGIGAAPAGLLALMVLWMPESPRWLVMKGRLADARAVLEKTSASPEEAAERLADIKVAAGIPKGLDGDVVAVPKERSGGEMQVWRELILSPTPAIRRILLSAVGLHFFQQASGSDSVVLYSPTVFKSAGITDDNKLLGVTCAVGVAKTLFILVATFLLDRAGRRPLLLTSTGGMIVSLVGLGTGLTVVGHHPDAKIPSAVALCIASTLAYVAFFSIGLGPVTGVYNSEIFPLQVRALGFAVGVACNRVTSAVISMTFLSLSKGITIGGSFFLYSGIAAVGWVFFFTCLPETRGRTLEEMGKLFGMPDTDMAEAHNAAAKEKAVEMPAVLGND

SEQ ID NO: 5969 - protein, 282 aa, Zea mays
  VARIANT 231: note = Ancestral polymorphism is G, Derived polymorphism is R
  VARIANT 213: note = Ancestral polymorphism is N, Derived polymorphism is T
  VARIANT 188..282: note = Derived polymorphism lacks residues 188 to 282
  VARIANT 179..282: note = Derived polymorphism lacks residues 179 to 282
  VARIANT 176: note = Ancestral polymorphism is Y, Derived polymorphism is C
  VARIANT 120: note = Ancestral polymorphism is P, Derived polymorphism is S
  VARIANT 78..282: note = Derived polymorphism lacks residues 78 to 282
  VARIANT 70: note = Ancestral polymorphism is P, Derived polymorphism is L
MAGGKPLLELNRVLRPGGYFIWSATPVYRQEQRDQDDWNAMVTLIKSICWRTVVKSQDVNGIGVVIYQKPVSNSCYAERKTNEPPLCSERDGSHFPWYAPLDSCLFTTAITTSDEGYNWPVPWPERLDVSVPDDSASNKEKFEADTKYWKQLIFQKYISVTSHLIGQAFAIYLATYFQQRFDWSSHDWCRSFSTYPRTYDLLHMSNLIGNLTNRCDLIDVVVEIDRILRPGRWFVLKDTLEMIKKIRPILKSRHYETVIVKHQFLVATKSFWRPGKPASTSG

SEQ ID NO: 5970 - protein, 45 aa, Zea mays
  VARIANT 3: note = Ancestral polymorphism is R, Derived polymorphism is C
  VARIANT 7: note = Ancestral polymorphism is R, Derived polymorphism is C
  VARIANT 18: note = Ancestral polymorphism is V, Derived polymorphism is I
  VARIANT 32: note = Ancestral polymorphism is G, Derived polymorphism is A
MGRPDLRNAGLQGIARAVMDAHVEKPQRVRTGPSDASSLSDEQIE

SEQ ID NO: 5971 - protein, 390 aa, Zea mays
  VARIANT 167..390: note = Derived polymorphism lacks residues 167 to 390
  VARIANT 40..390: note = Derived polymorphism lacks residues 40 to 390
MIGNGGHGTVYKGILADQRVVAIKKSKLVESTEIEQFINEVAILSQINHRNVVKLHGCCLESEVPLLVYEFISNGTLYDLLHHRDREQDGRRRTLLQQLPWEARLRIGAEVAGALTYLHSAASVSILHRDVKSMNVLLSDSYTAKVSDFGASRSIPIDQTHLVTAVQGTFGYLDPEYFHTGQLNEKSDVYSFGVILLELLGECPCPPTCHNRVSQHGVKIPLEIFKTGKTGWGVRSLSSISSGSFICEYTGELLEDEEAEKRENDEYLFDIGHNYHDKELWEGLKSVVGLGSATSSSETMEGFTIDASECGNVGRFINHSCSPNLYAQNVLWDHDDMRMPHVMFFAVENIPPLQELTYHYNYKIGEVYINGEEKVKHCYCGASDCCGRLY

SEQ ID NO: 5972 - protein, 237 aa, Zea mays
  VARIANT 47: note = Ancestral polymorphism is S, Derived polymorphism is F
  VARIANT 124: note = Ancestral polymorphism is R, Derived polymorphism is C
  VARIANT 175: note = Ancestral polymorphism is G, Derived polymorphism is W
  VARIANT 176: note = Ancestral polymorphism is S, Derived polymorphism is C
MGSTVSKSGNNSSKNLDAVEGDGKKGKHGKGSDDSYYATSKAHPVSSEVRRIQIDIEQAQALIRKLDSKKGIENNVLSSSDHEKSYMNKSHGSVGPIVIIQGSSTVKGLEGAELLDTLVTYLWRIHGVDYYAQMVLNGRINLIHSSKTEFKAPGGTPIMQQPAPRGNGRQRPPIGSRLRDERGNHRFDRNVDSPTRDGSGENPDDPIYDLFGDPAMHGGFPPDIPAPPVLMPVPGVG

SEQ ID NO: 5973 - protein, 105 aa, Zea mays
  VARIANT 52: note = Ancestral polymorphism is L, Derived polymorphism is P
  VARIANT 57..105: note = Derived polymorphism lacks residues 57 to 105
  VARIANT 60: note = Ancestral polymorphism is E, Derived polymorphism is G
  VARIANT 71: note = Ancestral polymorphism is S, Derived polymorphism is N
MLQSKSLDRDSCLWWVISFLYKDLSHIFYCPLTECFALLVDDPEHEFKFQRPRKDEQGREDLLPRKVEQESKWQRCGHCFYYLCASPMSRDNRCCKTCNRTWGMP

SEQ ID NO: 5974 - protein, 554 aa, Zea mays
  VARIANT 207: note = Ancestral polymorphism is I, Derived polymorphism is N
MADTPTSRMVHPFGDAPRQTPKQFLYSGNPQHLCHPYQSAPDTHVVLQRRYTVRSQSHSPNNAGSEDHETHKQYTLESSAASGCSRHGSPSSQSVHAGSGSPVSHDDSHSGSTNGHGSPVSASCVTGEDPTDLKQKLKDLEAVMLGTSETDPEIVNSLEISAANQLSLEPEEWEHMVSMPRGNLKELLIACARAVERNNSYAIDLMITELRKMVSVSGEPLERLGAYMVEGLVARLAASGSSIYKALKCKEPRSSDLLSYMHFLYEACPYFKFGYMSANGAIAEAIKGEDRIHIIDFHIAQGAQWVSLLQALAARPGGPPFVRVTGIDDSVSAYARGGGLELVGRRLTHIAGLYKVPFQFDAVAISGSEVEEEHLGVVPGEAVAVNFTLELHHIPDETVSTANHRDRILRLVKGLSPKVLTLVEQESNTNTAPFAQRFAETLDYYTAIFESIDLALPRDDRERINIEQHCLAREIVNLVACEGEERVERHEVFGKWKARLMMAGFSPSPLSALVNATIKTLLQSYSPDYKLAERDGVLYLGWKNRPLIVSSAWH

SEQ ID NO: 5975 - protein, 157 aa, Zea mays
  VARIANT 96..157: note = Derived polymorphism lacks residues 96 to 157
  VARIANT 40..157: note = Derived polymorphism lacks residues 40 to 157
  VARIANT 3: note = Ancestral polymorphism is R, Derived polymorphism is Q
MARALLLLRVAIARYPPLPTSPALLQLQPLPLLRCHAPSQYKSQLRFLSSLSSSSVPTSSDAPSDGEGGRDGEEDGAKSGDRVDYLGMSDEELMEQCDMGTFKASAPGASDAADSYSPSPTRTGHVIGQWWFMAKAHFHDQGDVHNIAIECSGGVRT

SEQ ID NO: 5976 - protein, 395 aa, Zea mays
  VARIANT 175..395: note = Derived polymorphism lacks residues 175 to 395
MGSMRRSSVRLLIGFLLIRLNWCSAVGDKGAEKVGVAFPVVVSTWPFREAVRAAWKVVSTGEGWGSAVDAVVAGCSACEDLRCDGTVGPGGSPDENGETTLDALVMNGVTSALLSRAAVQATMEIGAVAAMRYVKDGIKAAKLVMEHSEHTLLVGEKATAFAISMGLPGPTNLSSPESIEKWEKWKQNHCQPNFWKNVDPVGKCGPYHPINLASVEVEGSVKNEVVGSQGGLCQGYFESDNLLEPIKSNLKVVNRHNHDTISMAVIDKMGHIAVGTSTNGATFKIPGRVGDGPIPGSSSYGDDEVGACGATGDGDIMMRFLPCYQVVESMRQGMDPRDAATDAISRIARKYPDFIGAVFAVNKEGVHAGACHGWTFQYSVRNSSMQDVEVITVYP

SEQ ID NO: 5977 - protein, 336 aa, Zea mays
  VARIANT 194: note = Ancestral polymorphism is L, Derived polymorphism is V
  VARIANT 200: note = Ancestral polymorphism is A, Derived polymorphism is S
MKGLFKTKPRTPVDIVRQTRECLVHLDLHSGSRSGDAKRDEKMTELSKNIRDMKSILYGNGESEPVTEACVQLTQEFFRENTLRLLIIHLPKLNLETRKDATQVVANLQRQQVSSKIVASEYLESNKDLLDILILGYENMDIALHYGAMLRECIRHQSIARYVLESEHMKKFFDYIQLPNFDIASDASATFKELLTRHKATVAEFLSNNYDWFFEEFNSRLLSSTNYITKRQAIKLLGDMLLDRSNVAVMMRYVSSKDNLMILMNLLRDSSKNIQIEAFHVFKLFAANKNKPPEVVNILVTNRNKLLRFFAGFKIDKEDEQFEADKEHVIKEISAL

SEQ ID NO: 5978 - protein, 175 aa, Zea mays
  VARIANT 13: note = Ancestral polymorphism is A, Derived polymorphism is T
  VARIANT 21: note = Ancestral polymorphism is G, Derived polymorphism is D
  VARIANT 31: note = Ancestral polymorphism is S, Derived polymorphism is Y
  VARIANT 34: note = Ancestral polymorphism is R, Derived polymorphism is C
  VARIANT 36: note = Ancestral polymorphism is W, Derived polymorphism is C
  VARIANT 38: note = Ancestral polymorphism is V, Derived polymorphism is A
  VARIANT 45: note = Ancestral polymorphism is L, Derived polymorphism is I
  VARIANT 47: note = Ancestral polymorphism is G, Derived polymorphism is E
  VARIANT 50: note = Ancestral polymorphism is L, Derived polymorphism is I
  VARIANT 53..175: note = Derived polymorphism lacks residues 53 to 175
  VARIANT 58: note = Ancestral polymorphism is D, Derived polymorphism is N
  VARIANT 70: note = Ancestral polymorphism is A, Derived polymorphism is V
  VARIANT 73: note = Ancestral polymorphism is P, Derived polymorphism is H
  VARIANT 75: note = Ancestral polymorphism is V, Derived polymorphism is M
  VARIANT 79: note = Ancestral polymorphism is I, Derived polymorphism is N
  VARIANT 121: note = Ancestral polymorphism is S, Derived polymorphism is Y
  VARIANT 129: note = Ancestral polymorphism is I, Derived polymorphism is M
  VARIANT 139: note = Ancestral polymorphism is G, Derived polymorphism is D
  VARIANT 142..175: note = Derived polymorphism lacks residues 142 to 175
METNTAEFNLEEALNTVLMQGIPLGKEKRISIERDWPVEVSHMYIYGDNIRLQQVLADYLACALQFTQPAEGHIVLQVIPKKENIGSGMQIAHLEFKIVHPALGVPEALIQEMFQHNPGVSREGLGLYISQKLVKTMSGALQYLREANISSFIILIEFPVAQLSSKWSKPSPSKF

SEQ ID NO: 5979 - protein, 312 aa, Zea mays
  VARIANT 6: note = Ancestral polymorphism is P, Derived polymorphism is A
  VARIANT 14: note = Ancestral polymorphism is N, Derived polymorphism is K
MAMVQPADATVKANEILARFRPIAPKPTLAAEGVVAANRVLCHLQGRPCRARKRGRPGPAVVAPSPESGLQPPAKRKRATTPYPPLRCTGPRASAAVPGSAGLPLASASLPPAGAGAAEDLAKVAAEGRHVPVERDLLRKLLEPKVISPRAVRPVCSAIHVGCIHRADATCAAAVSKTAVRVEAELEVDALPAVVSDASNRVRLVNDAYKEMVGQPECPWLDAVAATSRRISGEVALVVANQSSLPESYGVFTCTAKIEWEDDGKVASIDVPCDVSRLQCESREYLFVWRFRTADADADASVGCSSEEISES

SEQ ID NO: 5980 - protein, 157 aa, Zea mays
  VARIANT 39: note = Ancestral polymorphism is G, Derived polymorphism is R
MASPLRRSFPSLGRALLTPAPARMLSAEASDALVEIKPGEIGMVSGIPEEHLRRKVVIYSPARTASQQGSGKVGRWKINFLSTQKWENPLMGWTSTGDPYANVGEAGLTFNSAESAKAFAEKHGWNYVVRKRHTPLLKPKAYAENFKWKGPPKAEQA

SEQ ID NO: 5981 - protein, 131 aa, Zea mays
  VARIANT 66: note = Ancestral polymorphism is Q, Derived polymorphism is K
  VARIANT 99: note = Ancestral polymorphism is V, Derived polymorphism is F
  VARIANT 126..131: note = Ancestral polymorphism lacks residues 126 to 131
MFNTILCLLGIVLIGEIGGMAEEDVATFIQESIFFQLNGELDVDPDDFSLEKYLSAKTLVSSRSFKIDTYHGSEMVPLADLSKILRNSFWFMGLAEPKVVVTIQYRTTDMLPRGKHCMSVVGILVWYEADG

SEQ ID NO: 5982 - protein, 265 aa, Zea mays
  VARIANT 132: note = Ancestral polymorphism is L, Derived polymorphism is P
  VARIANT 29: note = Ancestral polymorphism is R, Derived polymorphism is K
MAQQASSPACPTTATTTTTWTELTNTSWRDDDYRRMVMAYLIEAVYLLELERQERRDAAAVAQQWWEPFQFRLAHELVDDRDGSVFGAVFERDHQASPTPTPSGAPSAVVAFRGALLRAPTIRRDVEDRLRLLARDSLRGSARLARAAQALSATVDRFGSENVCVCGHSLGAGFARQVVRMLVASSPRQQQQQQQQAAAASLEYHLFNAPYLSLPMGVRGVLRTADCLLKALRSGVAKWRGKALRNVAYANCILGYTRLESTRKL

SEQ ID NO: 5983 - protein, 586 aa, Zea mays
  VARIANT 197: note = Ancestral polymorphism is Q, Derived polymorphism is K
  VARIANT 203: note = Ancestral polymorphism is L, Derived polymorphism is F
  VARIANT 299: note = Ancestral polymorphism is D, Derived polymorphism is V
  VARIANT 403: note = Ancestral polymorphism is V, Derived polymorphism is L
  VARIANT 474: note = Ancestral polymorphism is M, Derived polymorphism is K
  VARIANT 523: note = Ancestral polymorphism is R, Derived polymorphism is S
MDTLFRSVSLQASEQQQQQQSASYNSRSTTSSGSRSSSHQTDASYNYYYHSNSGVGGVGQYYYGQQNQQYYQEPYQQEECGNAHRLYMDEDFSSSSSSRQHFHSHGAAVQPATSSAVTATAPTPPLSTSSTAAGAAHALFEAADLSFPPDLNLDFSSPASSSGGCVASSAAVGGRWASQLLLECARAVAARDSQRVQQLMWMLNELASPYGDVEQKLASYFLQGLFARLTASGPQTLRTLAAASDRNTSFDSTRRTALRFQELSPWSSFGHVAANGAILESFLEAAAASSEPQRFHILDLSNTFCTQWPTLLEALATRSTDDTPHLSITTVVSAAPSAPTVAVQRRQRVMREIGQRIEKFARLMGVPFSFRAVHHAGDLAELDLDALDLRDGGATTALAINCLNSLRGVVPGGVRRRDAFGASLRRLDPRVVTVVEEEADLVAFDPDASEESGDTEAAFLKVFGEGLRFFSAYMDSLEESFPKTSNERLALERGAGRAIVDLVSCPPSKSMERRETAVSWARRMRSAGFSPVAFSEDVADDVRSLLRRYREGWSMRDTGLDDSAAGAGIFLAWKEQPLVWASAWRP

SEQ ID NO: 5984 - protein, 423 aa, Zea mays
  VARIANT 289..423: note = Derived polymorphism lacks residues 289 to 423
  VARIANT 253: note = Ancestral polymorphism is P, Derived polymorphism is L
  VARIANT 235..423: note = Derived polymorphism lacks residues 235 to 423
  VARIANT 61..423: note = Derived polymorphism lacks residues 61 to 423
  VARIANT 34: note = Ancestral polymorphism is A, Derived polymorphism is E
MAGRRESPLMRGGGAGPPLSRGSRIAAAVVVGVALGCLCAFLYPAGLFPRAPDSASHWPRQAEPVACDTSREVAKLKSRLVLLERKNAAFKMQMKELSMKLQLAGQGKNEALYKAGPFGTVKALRTNPTVTPDLSINPRLASLLEQVAVKKELIVALANSNVKEMLEVWFTNIKRAGIPNYLVVALDDNIESFCKSKDVPVYRRDPDDGIDNIGKTGGNHAVSGLKFRILREFLQLGYSVLLSDIDIIFFRNPFDHLYRDSDVESMSDGHNNMTAYGFNDVFDEPSMGWARYAHTMRIWVYNSGFFFIRPTIPSIELLDRVAYRLSHEPKSWDQAVFNEELFFPSHPGYEGLHASKRTMDMYLFMNSKVLFKTVRKDANLRTLKPVIVHLNYHPDKSDRMKAVIEFYVDGKQNALERFPDGSE

SEQ ID NO: 5985 - protein, 220 aa, Zea mays
  VARIANT 3: note = Ancestral polymorphism is G, Derived polymorphism is E
  VARIANT 11: note = Ancestral polymorphism is V, Derived polymorphism is M
  VARIANT 25..220: note = Derived polymorphism lacks residues 25 to 220
MEGLIPFVIDVIRRSHERSGYRPVSSDSGSSRGGPGGSSGRHLTDYSELPDDAAAASAGADRPSGHARGAAPLQSHHAMLLSHHHQSAAPAPTQSAAPLLEPSVSGVLRGGGIVGEDASMTLGNILQRDAAMRQSAHICASMQATSLRIETLERKLAGLRTRLRRSEQQQAEAVAATGGTSIDRAPGKSTSFRIPRSGLWDGDELAPIGPRQARRSQGHQ

SEQ ID NO: 5986 - protein, 437 aa, Zea mays
  VARIANT 193: note = Ancestral polymorphism is R, Derived polymorphism is L
  VARIANT 172: note = Ancestral polymorphism is T, Derived polymorphism is I
  VARIANT 158: note = Ancestral polymorphism is G, Derived polymorphism is V
  VARIANT 155: note = Ancestral polymorphism is T, Derived polymorphism is I
MSDSHETDRNIEIWKIKKLIKALESARGNGTSMISLIMPPRDQVARVAKMLGDEYGTASNIKSRVNRQSVLAAITSAQQRLKLYNKVPPNGLVLYTGTIVTEDGKEKKVTIDFEPFKPINVSLYLCDNKFHTEALNELLESDDKFGFIVMDGNGTLFGTLSGNTREVLHKFTVDLPKKHGRGGQSALRFARLRMEKRHNYVRKTAELATQFFINPATSQPNVAGLILAGSADFKTELSQSDMFDQRLQAKILNVVDVSYGGENGFNQAIELSAEILANVKFIQEKKLIGKYFEEISQDTGKYVFGVDDTLKALEMGAVETLIVWENLDINRYVIKNSTTGEIIIKHLNKEQEADQSNFRDPSTNTDLEVQEKMSLLEWFANEYKKFGCSLEFVTNKSQEGSQFCRGFGGIGGMLRYQLDIRSFDELSDDDDVYEDSD

SEQ ID NO: 5987 - protein, 360 aa, Zea mays
  VARIANT 340: note = Ancestral polymorphism is M, Derived polymorphism is K
MESDASTSPRRRSTSCYSDSGDSSCSEPFSECGSDDLSFTPAAGIHRLLLSCASEASEDAISSLVAELERPSPSLDSLRRAAMELRLLAKHNPDNRVRIAAAGGVRPLVRLLAHADPLLQEHGVTALLNLSLCDENKAAIIEAGAIRPLVRALKSAASPAARENAACALLRLSQLDGASAAAIGRAGALPLLVSLLETGGARGKKDAATALYALCSGARENRQRAVEAGAVRPLLDLMADPESGMVDKAAYVLHSLLGSGDGRAAAVEEGGIPVLVEMVEVGTSRQKEIATLCLLQICEDNAVYRTMVAREGAIPPLVALSQSSSARTKLKTKAESLVEMLRQPRSPSLRARPAAVVAAE

SEQ ID NO: 5988 - protein, 167 aa, Zea mays
  VARIANT 151..167: note = Derived polymorphism lacks residues 151 to 167
MDDELYGVAGCNSHVTASLRCPSQSGATAVWSSSKKSYDICTSADGPVTVPAHDTYHLVGAGLSDAGGLHYPLAACSGANASTAVVASELSLTLCSNSNSIASSNNTLNATEQCSSRASRSALTELQWARSRMALHFAAVVARSRYTAVLQNLLNDVAATCWTVSLM

SEQ ID NO: 5989 - protein, 153 aa, Zea mays
  VARIANT 17: note = Ancestral polymorphism is P, Derived polymorphism is L
  VARIANT 21: note = Ancestral polymorphism is R, Derived polymorphism is P
  VARIANT 105..153: note = Derived polymorphism lacks residues 105 to 153
MLLRLKIVVGVHSVVLPVPVRGGFGHGACYAAVEPCWRRSRRPALAAAGGLVTRRPRSATVVMALKEEPEGSRRGFVGSGPSWDPGLEIQVPSDPFLLCCFLSFQVVDAKVIHLDYNNSCIFLSLKDVKVMVETTLGKEELKEAVLMCTNRVS

SEQ ID NO: 5990 - protein, 437 aa, Zea mays
  VARIANT 142..437: note = Derived polymorphism lacks residues 142 to 437
  VARIANT 215: note = Ancestral polymorphism is T, Derived polymorphism is N
MGKSKKSKARGGRDDLLDSSDADSVSSSSTALSDLSISYATEHVNSQEFVLDKYIDALYEKRSGGGSTREAALGKLVDAFESFMLHGLVEDKYATLMSQLNNSVKRGSTKEVFLASHSIGLLAITLGVGSSSHEIMEESHPQLCRVLQAWSDASKMISALDCLAVITFVGASDLAETELSLKAMWDVIHPKSGSNVGTVRKPRPPVLAAAVSAWTFLLTTIGSWRINTNIWKEPIAFLSTLLEADDRAVRMAAGEALVLCFELNLLDVSSREDDGVNTGGTAGSKNKLFLDMQALKAKISGLATNLSAEAGGQGADKKKLTDQRDLFQRILDFVKYGDCPEESIKIAGKRDVLRVSSWSELIQLNFLKGFLGKGFLKHVQENGLLQDIFDIKVDKTETLSSTNKKIFRSEEEKGRALKLNKERRLAQVRKNAVMLDD

SEQ ID NO: 5991 - protein, 286 aa, Zea mays
  VARIANT 251: note = Ancestral polymorphism is L, Derived polymorphism is H
  VARIANT 82: note = Ancestral polymorphism is F, Derived polymorphism is S
  VARIANT 31: note = Ancestral polymorphism is A, Derived polymorphism is E
MEIDMMAQFLGAADDHCFTYEYEHVDESMEAIAALFLPTLDTDSANFSSSCFNYAVPPQCWPQPDHSSSVTSLLDPAENFEFPVRDPLPPSGFDPHCAVAYLTEDSSPLHGKRSSVIEEEAANAAPAAKKRKAGASATTKGSKKSRKASKKDNIGDADDDGGYACVDTQSSSSCTSEDGNFEGNTNSSSKKTCARASRGAATEPQSLYARKRRERINERLRILQNLVPNGTKVDISTMLEEAAQYVKFLQLQIKLLSCDDTWMYAPIAYNGINIGNVDLNIYSLQK

SEQ ID NO: 5992 - protein, 195 aa, Zea mays
  VARIANT 13..195: note = Derived polymorphism lacks residues 13 to 195
  VARIANT 21: note = Ancestral polymorphism is M, Derived polymorphism is I
  VARIANT 55: note = Ancestral polymorphism is C, Derived polymorphism is Y
  VARIANT 56: note = Ancestral polymorphism is S, Derived polymorphism is T
MALTKPDNQAEWEYLTSCLIMLSRGLRDGDAANATRAVGAAPTSAKMADGYKYKCTLCDKVFASYQALGGHKTRHRKPPAAAAPSDGASSSSTAHEKLHQCSLCSRTFSSGQALGGHMTSHRKPPPPVVVLDFDLNMPAEAEPESRPRRRMPSGHAQTTMLLVTDPPVVPTAAGSWLRHFDLNLPAEAEGAMPET

SEQ ID NO: 5993 - protein, 239 aa, Zea mays
  VARIANT 1: note = Ancestral polymorphism is M, Derived polymorphism is K
  VARIANT 3: note = Ancestral polymorphism is V, Derived polymorphism is A
  VARIANT 10..239: note = Derived polymorphism lacks residues 10 to 239
  VARIANT 11: note = Ancestral polymorphism is P, Derived polymorphism is L
  VARIANT 126: note = Ancestral polymorphism is C, Derived polymorphism is F
  VARIANT 128: note = Ancestral polymorphism is V, Derived polymorphism is G
  VARIANT 137..239: note = Derived polymorphism lacks residues 137 to 239
  VARIANT 141: note = Ancestral polymorphism is G, Derived polymorphism is E
MIAVLRNFDWPSVRRRMPSSRHARAMLRVVWSGLRLPRYRPPQQPRESLHIPTCRVLISRVSNNQRLSMALIKPPAATDDDQAEREYMASCLIMLSRGLRDDNAADATRATGAAPTSANMANEYKCSVCQKVFTSYQALGGHKTRHRKPPAAAAPSDEASTGGTAHEKLHQCSLCPRTFSSGQALGGHMTRHRKPPPPVVVLDFDLNMLPAEAEAEATEPVAAPPDVKRACTDDDAAGD

SEQ ID NO: 5994 - protein, 306 aa, Zea mays
  VARIANT 40: note = Ancestral polymorphism is E, Derived polymorphism is Q
  VARIANT 53: note = Ancestral polymorphism is P, Derived polymorphism is S
  VARIANT 180: note = Ancestral polymorphism is F, Derived polymorphism is S
MEAVRASAAWVASRSSHVTVDLQEIEKVVDQIQGDVPKVEWDYEGIHYFDNGPLTVQYLFVLDALNFCFWPDKDLSYDHLASGLKSALEKDKNALDSDRLQNYTGPQLRQLLNWPRPLPIEEERVRLLHEVGQELKRSFGGQAANLVKSAGNSAATLIELITRHFPGFRDHSLYKGHQVFLYKRAQIFVADLWGAFKGQNYGEFHDINSITIFADYIVPAVLRELGVLKYGSNLSCSIDSNSEIVPGSEEEVEIRACSIYAVEKMRDLISKKFGKQLLSIDIDLWLWSCGVQNMALSHHRTLSIYY

SEQ ID NO: 5995 - protein, 27 aa, Zea mays
  VARIANT 10: note = Ancestral polymorphism is D, Derived polymorphism is Y
  VARIANT 17: note = Ancestral polymorphism is C, Derived polymorphism is F
  VARIANT 18: note = Ancestral polymorphism is H, Derived polymorphism is R
MIGVECLEEDFDGKIRCRGNLDVIACS

SEQ ID NO: 5996 - protein, 456 aa, Zea mays
  VARIANT 88: note = Ancestral polymorphism is W, Derived polymorphism is C
  VARIANT 232: note = Ancestral polymorphism is A, Derived polymorphism is T
  VARIANT 233: note = Ancestral polymorphism is K, Derived polymorphism is R
  VARIANT 366: note = Ancestral polymorphism is W, Derived polymorphism is R
MMQFTHTAPPPPPLHPNGHAAGVLGLGLFLDVGAPTAARPCPGSFPTPASKISLGNDLNSTSCMEQLLVHCANAIEANDATLTQQILWVLNNIAPPDGDSNQRLTAAFLCALVARASRTGACKAVTAAVAAESAALHVHRFTAVELAGFVDLTPWHRFGYTAANAAILEAAEGFPVVHVVELGTTHCMQIPTLIDMLATRAEGPPILRLTVADVAPSAPPPALDMSYEELGAKLVNFARSRNVSMDFRVVPTAPADAFTSLVNQLRVQQLVLDGSEALVVNCHMLLHTVPDETAGSVGLTQPVSLRTMLLKSFRTLDPNLVVVVEEDADFTAGDVVGRLRAAFNFLWIPYDAVDTFLPKGSEQRRWYEAEIGWKVENVLAQEGVERVERQEDRGRWGQRMRSAGFRALAFGEEAAGEVKAMLNEHAAGWGMKREDDDLVLTWKGHNVVFASAWAPS

SEQ ID NO: 5997 - protein, 274 aa, Zea mays
  VARIANT 80: note = Ancestral polymorphism is S, Derived polymorphism is C
MANEAAEPRTDADGPTPDSGDDFEFCILSSGGIVPAGKGAGAGADMCVADELFWQGKLLPLRPSSAADGATLPRSESAASTVGRVSRSGSRSASSSCSSSSSGCVSRSQSSKSEQGAPRRRSLSSSVFYAHPSPSPQLRWARPRRSTGSAQPGAAWGLFRLGVAGAPDVYPPPPPRPGGGDARGGGGSSRSARFEQVATAVDRKVGLGQLALFGDSLGCKCSPDVVEPAAARTAEAAKRSRKKGGAKSGQGVARRSRILDWLWLQELSIVKDKK

SEQ ID NO: 5998 - protein, 526 aa, Zea mays
  VARIANT 408: note = Ancestral polymorphism is I, Derived polymorphism is T
MEKERKQGFFAALKEEVVRGLSPARTRGKSPAPRSASPARMLIPRRRKAPAAPPPPPPPPEKVLQQYLGEQLVARSGSLLRPGGEALAPLIEGPDAERLAAGDPDEEDSGHREGFGHWVRGHLTRAPSMAAAGGPDGSFRRSDLRLLLGVMGAPLAPIPSKPAEPLPLLSIKGTTIMLRSARASGTLGLADRTDMMQESSSAQYILHQYTAASGGYKLLQSVRNAYAMGKVRMVASEFETATRVVKNRGPSGRGAAAVEQGGFVLWQMARDMWYVELAVGGSKVHAGSNGRLVWRHTPWLGAHAAKGPVRPLRRVLQGLDPLTTAGLFAEARCVGEKKVNGEECFILKLAADPRTLKLRSEGPAEIIRHVLFGYFSQRTGLMVHIEDSHLTRIQPHAGGDAVYWETTTSSALEDYRAVEGVMVAHSGRSAVTLFRFGEAAMSHTKTRMEEAWSIEEVAFNVPGLSADCFIPPADIQSGPVGEACELPSSQSRAKAVAVHPSRVAAVDRATAAAACRGRKTTWRVEV

SEQ ID NO: 5999 - protein, 96 aa, Zea mays
  VARIANT 7: note = Ancestral polymorphism is A, Derived polymorphism is V
  VARIANT 24: note = Ancestral polymorphism is T, Derived polymorphism is A
MKAIPVALLLLVLVAAASSFKHLAEAADGGAVPDGVCDGKCRSRCSLKKAGRCMGLCMMCCGKCQGCVPSGPYASKDECPCYRDMKSPKNQRPKCP

SEQ ID NO: 6000 - protein, 693 aa, Zea mays
  VARIANT 154..693: note = Derived polymorphism lacks residues 154 to 693
MAGRGRPRPGSHQALVVAAVILLLAAASGAGAGSPDRPAPGPPLFLPLTRSYPNASRLAASLRRGLGDGVHPNARMRLHDDLLTNGYYTTRLYIGTPPQEFALIVDSGSTVTYVPCSSCEQCGNHQDFKNAYQKKLVAKAFSNDLHATLQMHLWLGIHLNVIIVLPPSLLRPHLAQLHHWLLELFGAVCAKRGKTKQLHPWSPLKHAETKEIFSCLEINSFADPRFQPDLSSSYSPVKCNVDCTCDSDKKQCTYERQYAEMSSSSGVLGEDIVSFGRESELKPQHAIFGCENSETGDLFSQHADGIMGLGRGQLSIMDQLVEKGVISDSFSLCYGGMDIGGGAMVLGGMLAPPDMIFSNSDPLRSPYYNIELKEIHVAGKALRVESRIFNSKHGTVLDSGTTYAYLPEQAFVAFKEAVTSKVHSLKKIRGPDPSYKDICFAGAGRNVSKLHEVFPDVDMVFGNGQKLSLTPENYLFRHSKVDGAYCLGVFQNGKDPTTLLGGIIVRNTLVTYDRHNEKIGFWKTNCSELWERLHIGDTPSPAPSSDTSSEHDMSPAPAPSNLPEFDVGLITVDMSINVTYPNLKPHLHELAELIAKELEIDSRQGIIYRLTQHHVQLPENLGSYQLLEWNVQPLPRRSWFQEHVVSMLLGILLVILVTLSAFLVVLVWRKKFSGQAAYRPVDSVVPEQELQPL

SEQ ID NO: 6001 - protein, 614 aa, Zea mays
  VARIANT 56: note = Ancestral polymorphism is G, Derived polymorphism is W
MAVMAEVVSTTGAALRSPATQQPAAAGAAKGTDAEKLQFIEDMTSNVDAVQERVLGEILARNADTEYLSSRCGLAGATDRATFRAKVPMATYEDLQPYIRRIADGDRSPILSGHPVSEFLTSSGTSGGERKLMPTIEDELNRRQLLYSLQMPVMNLYVPGMDKGKALHFLFVKSETKTPGGLAARPVLTSYYKSNHFRNRPFDAYNNYTSPTAAILCADAFQSMYAQMVCGLCQRQDVLRVGAVFASGLLRAIRFLQLNWEQLAEDIEAGSLTPRVTDPSVREAVAGILRPDPAVAELVRSECSGGDWAGIVTRIWPNTKYLDVIVTGAMAQYIPTLKHYSGGLPMACTMYASSECYFGLNLRPMCDPSEVSYTLMPNMCYFEFLPMGGAVDASQLVDLGRVERGREYELVITTYAGLNRYRVGDVLQVTGFHNSAPQFRFVRRKNVLLSIESDKTDEAELQRAVERASALLRPHGAAVVEYTSQAYTKSIPGHYVVYWELLQAKGGAAVDGETLEGCCLEMEEALNAVYRQSRVADGSIGPLEIRVVRPGTFEELMDYAISRGASINQYKVPRCVTFPPIIELLDSRVVSSHLSPALPHWTAGQRSGSGSGSD

SEQ ID NO: 6002 - protein, 1066 aa, Zea mays
  VARIANT 179..1066: note = Derived polymorphism lacks residues 179 to 1066
MAMILDAFVPMLGRMVAGAVKERLDTLLGVPGEMERLESTLEDLVNVLGDAEMKRITDTAVDAWVRELKDVMYDADDVLDRWQMEAQARSSSDAPKRSFPGAGCCAPLLTCFRDPALAHAMAAQIKELNRRLESVCRRSSMFRFVSASSSVPLRQQLPPASSGNGKTSSVIVHADLIGEKIEEDGNRLVEALIADDLRENVLAVGITGAGGIGKTTLAKRVFADQRVRDEFDLRVWVCVSQDVNEADLLWSVLVGAGGGHQLQQQHDATPDRSSLEPALQRAVSGKKVLLVLDDVWSDVAWKEVLQNAFRAGARGGSRVLVTTRKETVARQMKAVHIHRVEKLQPEDGWRLLKNQVVLGRNPTDIENFKDIGMEIVTRCDCLPLAIKTVGGLLCTKERTFRDWEEVSRSAAWSVAGLPEEVHNAIYLSYADLPPHLKQCFLHCSLFPKDEVIKRVDVVQMWIAEGFVQEDGSSALLEDVGNMYYRELVMRNLLEPDGQYYDQSGCTMHDLLRSFANYLAKDEALLLTQGQSLCDMKTKAKLRRLSVATENVLQSTFRNQKQLRALMILRSTTVQLEEFLHDLPKLRLLHLGGVNLTTLPPSLCDLKHLRYLELSGTMIDAIPDSIGDLRYLQYIGLLNCINLFSLPGSIVRLHRLRALHIKGASVNDIPRGIGRLQNLVELTGFLTQNDAAAGWNSLEELGHLPQLSLLYLSNLEKAHTGSVAKKADLQGKRHLRYLSLECTPRAAGGNQIKDNNTQQEKRQIEDVFDELCPPVCLENLSLIGFFGHKLPKWMSSGEMDLKYLRSIKLEDCTYCEQLPALGHLLSLDFLLIKHAPSIMRIGHEFFCSSNATQIDPRMLFPRLEKLGFDRLDGWEEWIWDKELEQAMPNIFSLKVTKCKLKYFPTGLVHQTRTLRELIISEACNLTSVANFLLLSDLHLHANPNLEMIANLPKLRRLSVIQCPKLNALVGLTELQSITLQDYAAELFPQYLEETSAAKLEVFCNEELFKLITLQEGSEWCKIKNIQNVKAYAPKGGDRKGWYALYTKEPFSLTTNNKGCEIFEVAKS

SEQ ID NO: 6003 - protein, 670 aa, Zea mays
  VARIANT 42..670: note = Derived polymorphism lacks residues 42 to 670
MRRHGWQLPYHPLQVVAVSVFLALAFAFYVFFAPFVGRNVFQYVVIGLYTPLVLCVFFLYIWCAAANPADPGVFKSKKYLSLYGSGKHRHLKECRKGSSDVRLQLEGTGEKQEHEVAASSEMSMTQYKDNIPSCMSSTFSAFLLLFYPLSFVLSCCQSHEWSSEQQATEEGMFFCSLCEVQVLKYSKHCRVCDKCVDGFDHHCRWLNNCIGRRNYGRFFILMSTALILIVLIKMLQSLHGLCNLGQLILQSATGVLVLVLCFVERKEFCLQIVSKLGSSFSVVPFVIVVASCTILAMVASLPIAQLLFFHILLIKKASSDTFPFCLILLLTESCKKSYVKLKHHNDNLMQGISTYDYIIALREQEQDDLSGQQSPQMSRVSSYTGLSSTSSFGPLRRGSWCTPPRLFLEDQFDVIPSEAASSHNSAMKRKEDEGKRKKGSGAVQISPWALARLNAEEVSRVAAEARKKSKVLLPIRKDDYSRDHETDSSYGGMSNGRIDLGTDSKRRTNRRGRQPSDLSLKPVAKISTDVIDSTSRDMAPEALSNLAPLQLEALSAFHPSRAASCVNAGGSSPDSSLDSPDLHLYRVSAVSSSGAEDLQLTALTAPGSTPQQGIQLSRSTSDGYEASGGEDSDRIPSRIVHRSSNWASIILNSDQSASSSGILVPKNRLS

SEQ ID NO: 6004 - protein, 1621 aa, Zea mays
  VARIANT 1557..1621: note = Derived polymorphism lacks residues 1557 to 1621
  VARIANT 1487..1621: note = Derived polymorphism lacks residues 1487 to 1621
  VARIANT 91..1621: note = Derived polymorphism lacks residues 91 to 1621
  VARIANT 50..1621: note = Derived polymorphism lacks residues 50 to 1621
MALFRKFFLKKTPDRLLEISENVYVFDCCFSTDSMGEDEYRDYLSGIVAQLQEFFPDTSLMASNFWSGDKRSRISDILSEYDMTVMDYPQQYEGCPLLQLEMIHHFLKSCENWLSVEGQHNMLLMHCERGGWPVLAFMLAGLLLYRKIYTGEQRTLEMVYKQARRDFIQQFFPLNPQPSHLRYLHYITRQGGGSEWPPISRPLILDSIVLHVVPRFDTDGGCRPYLIVHGQDSSPGNKSAKVLYEMPKTKKHLQRYGQAEVPIKLSVSCHVHGDVVLEFIHIGDNIENKETMFRVMFNTAFVQSNILELNRDDIDVAWNVNNQFPRDFRAEVHFSDPVSFKPAATIEEVADDGDETDVASVDTGEEFYEAEEYWHDARKDPATHSIDGGISLNDIAEFDGGATTEERSSLEKHRSDEGVKIAVSQNFGSMNEKVAIAPTSSFENQEGLQQPREVLPNAKLSKNNDQENSDVHDIQVVATSVDSEGHKFGSTGQEDTKGVIAQTLVTTVDLSGSDGIHCQTDEQTKMSEYPDLDYTAFGSPRSLSRTDGDAHMRTKKNEGLQNGDIKIITENTISVDNELVIYEEKTIVVNGNAIQVVKNVVNEESIAAKIGKPITESRTSLDNDNGKIQTAKPSDIANGKLDGCRLESCLETVPTKKTTVHDRIVVLPATGVATEIKAKQEVLVDKQDFGIVLPQSRTVARARSPRLGSDDRGQIPDKAVLSVLKEMVVGNAKMEDQPKLAKPKIMRRWISPKKESDATSVRRPSHPPSRYYSSPAALGIRSISTDGKISVVNDAPLLSLKQPYGSNLTREATSAQSAPSPPQKSLLLGAQSASRSQVSPPPPPPPPPATNYSSSSTPMHMGLASTGLSNLPQGASPPRSPVAQKHAFAPPAPPPPPPPPPRSGVGGNTPPPPPPRLNNSAIAPPPPPSTITRSSAPPPPPPPQSMSRSAPPPPPPPPPSLCSNVPLPPLSCTLSAPPPPPPPPLPSMARSAAPSPPPPPPSRGAPPPLPLGRGAPPPPPPPPPPGRGAPPPPPPPGRGASLPPPPPPSRGAPPPPPPPVSRAGPPPPPPPPGARCGPPPPPPPPGASAPPPPPPPGARPGAPPPPPPLGARPGAPPPPPPPGGGGRGPLPPRAPGVPTPPRAPGVPLPPGSNPSLGRGRGAVRPMGSAIGAAASRKSTLKPLHWVKVTRALQGSLWEELQRNTDSQSVSEFDVSELESLFPAAVPKSDDSSKSERRKSLGSKPEKVHLIELRRANNTEIMLTKVKMPLSDLVSAALTLDQSTLDVDQVENLIKFCPTKEEMELLKNYTGDKQILGKCEQFFLELMKVPRMESKLRVFSFKIQFGSQVADLRRNLDIIDSSCNEIRTSLKLKEIMKKILLLGNTLNQGTARGNNKLALLFAVQFWAAVGFRLDSLLKLTDTRATNNKMTLMHYLCKVLAARSPQLLNFYADLVSLDAASKIQLKMLAEEMQAVSKGLEKVQLEYDASERDGPVSKIFREKLKEFTDNAGSDVQSLSSLFSEVGKKADALIKYFGEDPVRCPFEQVISTLLTFVTTFRKAHEENLKQAELEKKKAEKEAEAEKAKNAQLTGKNHSKSSNPSRQAKQAIERTRSVSRRGRDAG

SEQ ID NO: 6005 - protein, 721 aa, Zea mays
  VARIANT 620..721: note = Derived polymorphism lacks residues 620 to 721
MGCVASKNTVSVTPAADSSGGLRDRSHPRAQESAAPVPLPVPVPSLRSSSSAARRSEKVKDDAEEPGKAVVAVAASSRSFRLRSLRKSLEGEQVAAGWPPWLSAVAGEAIQGWIPLKADSFEKLEKVGQGTYSSVFRARDLETGKIVALKKVRFDNFEPESVRFMAREIQILRRLDHPNVMKLEGLITSRLSCSLYLVFEYMEHDLAGLCSSPDIKFTEAQLKCYMNQLLSGLEHCHSRHVVHRDIKGANLLVNNEGVLKIADFGLANFFDPSKNHPLTSRVVTLWYRPPELLLGSTHYDAAVDLWSVGCVFPEMYRGKPILQGRTEVEQLHKIFKLCGSPADDYWKKSKLPHATIFKPHHPYTSTLRDVFKELPENALSLLETLLSVEPYKRGTASGALSSEFFRTKPYACEPSSLPNYAPNKEMDAKLRENALRRKASSRGHGTEASKKSSRLSRAAREPSAVPKQIISRTEESKTNVNATKDGTTQDRAKLNGDARLFVDIQPVSAAQVKESARHVKNESREQIPFSGPLSVSSSSGFAWARRPHEDRSFARSRTRSSSRGQFPADAVQGCNTQAKENAGLRELHSRDIPVSVSHVGSRVRDRGPHDAAKRAVLKKWSQLERPDSFDSCDTYHSHNFSNAMFLGGTLSSKNGFKGGHNQEEKVEYSGPLLSQSHKVDELLQKNERHIRQAVRTSWFRREEERWTSEEKLDHFFPWEGL

SEQ ID NO: 6006 - protein, 248 aa, Zea mays
  VARIANT 83: note = Ancestral polymorphism is I, Derived polymorphism is V
MVLVVKQHRCTHSASCVCIKGHLSEDALFLVFRHMNWNPRLIAILSCVCKWFDEVAKQVLWKEFCHARAPKMMLDLHSGGSHIVDGNWKALGKLLIYCNGCTKGGLFNNIHVPGHFVFRTRFSRTAGRSFLPLPCKSDVLYVSDPCEHLDQGEEGDIGFFRGIFMSFATSRVKKMLIEKRARFHPRELCPYCKAKLWNMFQENMIPRSASARLGAYDDSVEYFVCLNGHVIGLGTLLPLSDSEEAADE

SEQ ID NO: 6007 - protein, 1646 aa, Zea mays
  VARIANT 379..1646: note = Derived polymorphism lacks residues 379 to 1646
  VARIANT 343..1646: note = Derived polymorphism lacks residues 343 to 1646
  VARIANT 332..1646: note = Derived polymorphism lacks residues 332 to 1646
  VARIANT 317..1646: note = Derived polymorphism lacks residues 317 to 1646
MDNDNGDVDDLGSGWFEVKKKHRSSSKYTLQRSSGGSSHKIPNLLSRSGANSDSSRWHDKLQHPSPSINANVGVDGSGSGETTNVHGEGCNDVSTSPSGLNSGLNASASEDRVERLEELAVAEKTSESPENDLADHADPSLPHEPSTCSGSPAKCADLSQHVKCSPKTESVGVLSITPVKFGDFDEVPGLSLPSDSYRDNNTSRGHRHTEDVAHLKNVQKDASELKPETDTCTTIDEASPIMVQGTETPNHDSGLIASVDSVTLSCSKNDHEVPVTSSSVPVASMEGRTLLHDEAPASADFGSETAESKERFRQRLWCFLFENLNRAVDELYLLCELECDMEQINESILVLEEAISDFQELKSRAEHFDNTKKSPGVPKEGMPMAVKADHRRPHALSWEVRRMTSSPHRQEILSSSLEAFQRIQLELACKQAGIAAERFTSSSSEKVLGSSSKLTTASATVRNISLKVESQVKLPDTSVKKIAGEKLSRDAFKSGKSYPQSMPSYSARSRRGSLEPISEIEKHTFKKDRELLENKFDRLKSTDVVKKTTAHLEKEKQITAPWKSMDAWKEKRNWEDILKSPVRSSRVSHSPGVGRKVTDRARVLHDKLMSPEKKKRSALDMKKEAEEKHARALRIRSQLESERVQRLQRTSEKLHRVNEWQAVRSSKLREVMNARHQRGESRHEAYLAQVAKRAGDESTKVNEVRFITSLNEENKKFLLRQKLHDSEMRRAEKLQVIKTKQKEDTAREEAVLERRKFLEAEKMQRLAEIQRKKEEAIFRREEERKASSAAREARAAEQQRRKEIRAKAQQEEAELLAQKLAEKLRESEQRRKYYLEQIRERASMDLRDQPSPFQRRFPSKDCQNRSSSANSGEDSQTTGNSSAADSMVKSSNNAQIKRRIKKIRQRLMALKHEFIEPSIGESTGITHRSGLGAAKAKLSRWLQDLQRLRQARKEGAASIGLIVSDIAKYLEGKDLELHASRQVGLLDFIASALPASHTSKPGACQVTVYLLRLLRVLLSLPANRTYFLVQNLLPPIIPMLSASLENYIKVAASNSGSSNLLSNKTSAETTESSGEVLDGFLWTVAMIVGHVHINGEQLQMQGGLIELIVAYQIIHRLRDLFALYDRPQVEGSPLPSSILFGLNLLSVLTSKPGNFSTIDWESCKCRTLGGNIVQEYEYLSSQDSLGCQSMTLDQFGDAKSPTIYSELAEDSKSCKQHDLSIPVDRKLVDEASKDLLVMAAGLNNSAMQPSDLGITTEKHSGNPSQGDENNTVDSFLEGRKTNNVCALYSSSGKGNEMNLKQPAMLLLSALAETGLVTLPSLLTAVLLQANNNRSSSEQTLAILPSNFEEVATGVLKVLNNMARLDITLLQHMLVSVLHEKKDGCYSQTEINVVSGVLKLTYFLTLIIGHGNVIKLVTYRSDLKMEFFHLISFLLSHCMNKWRVPNDQVGLLLLESLLLLGYFSLFHAGNQAVLRWGKSPTILHKVCDLPFVFFSDPELMPILAAALIAVCYGCDQNLSVVQQEISTDMLRCLLKSCQTSGSNSPDSIAVDGSGNNSTESILDIRNSQGDIPTRSSRKIGRPVIGKGVSGGIRFNRNKVQKDGRGTRAIDDGPLKQRAQEAASNFMLHRKIPASFLDRAEEFFCSET

SEQ ID NO: 6008 - protein, 129 aa, Zea mays
  VARIANT 104: note = Ancestral polymorphism is R, Derived polymorphism is W
  VARIANT 101..129: note = Derived polymorphism lacks residues 101 to 129
  VARIANT 63: note = Ancestral polymorphism is H, Derived polymorphism is P
  VARIANT 58: note = Ancestral polymorphism is S, Derived polymorphism is F
  VARIANT 40: note = Ancestral polymorphism is V, Derived polymorphism is M
  VARIANT 1: note = Ancestral polymorphism is M, Derived polymorphism is I
MIVGKNKCISKGKKGGKKKTVDPFSKKDRYDIKAPPVFSVRNIGKTLVSRTQGTKIASEGLKHRVFEVSLVDLHSDEDKTYMKIRLCAEDVQGGNVITNFWILWKMTEIMSNQTSTCDLKELVSNFIPE

SEQ ID NO: 6009 - protein, 112 aa, Zea mays
  VARIANT 58..112: note = Derived polymorphism lacks residues 58 to 112
  VARIANT 59: note = Ancestral polymorphism is G, Derived polymorphism is C
  VARIANT 61..112: note = Derived polymorphism lacks residues 61 to 112
  VARIANT 62: note = Ancestral polymorphism is P, Derived polymorphism is L
  VARIANT 66: note = Ancestral polymorphism is K, Derived polymorphism is E
  VARIANT 67: note = Ancestral polymorphism is S, Derived polymorphism is L
  VARIANT 68: note = Ancestral polymorphism is S, Derived polymorphism is I
  VARIANT 88: note = Ancestral polymorphism is M, Derived polymorphism is T
  VARIANT 95..112: note = Derived polymorphism lacks residues 95 to 112
MQSAKLSVELGSLQTDITEVDKRHSARMRLSLDDTDVLPSSSALSGASVSALQGALLSGLLPASYKSSIYEERVMRNLVQLENAYYSMRSSLDTYETNVIKRPDISCRSGSS

SEQ ID NO: 6010 - protein, 618 aa, Zea mays
  VARIANT 296: note = Ancestral polymorphism is A, Derived polymorphism is T
  VARIANT 316: note = Ancestral polymorphism is F, Derived polymorphism is C
MAAVAAATSHLLRHHRNPHLLLLRAAISSSRALPQQPELSPDPTAGTPDLAGAAPLPPNPSTGSPFYTQNWRNPAAANPPSSLLPTVVAGSPFGAQHFMAAFYDAPDVTGLKETFAKYMAEQRWEDMKHLFDHWVRSLDAATGKPNHPDVDLFNHYLRANLMTRALPHEMLDLADHMLEFELQPNAASYNLVLKSMVASQETEGAEKLIERMLQTGTFPDDESYNLVVGLLIRQNLVDSSLKYLDLMLKSGYTLSLTVFTDYIRACMRSGRLDTLTSIIEKCKTTDKNKVLCPEWTWCIDIADAAFEANNSKLALFALEYLARWIARGENVKPPVQLSVNEGLVISALSAAGRTYNTDLLNAAWSLLRKSLRQKRAPTPETYLAKIYAHSSIGQLQRAFGTLREFENAYGNSEDIDLELFSPFTSLHPLVVACCKDGFSTLDSVYGQLENLIHADPPYKSLAALNCVVLGCANIWDINRAYETFVAIKEKFDLTPDIHSYNALLCAFGKLKQTGEACNVFQHVLTLGVKPNATTYSLLVDAHLANKDPKAALAIIDEMVDAGFTPSKDTLRKVRRRCSRESDFDSDEKVQSLAKQFNYRMGGENRREMLYSIEYNPVY

SEQ ID NO: 6011 - protein, 237 aa, Zea mays
  VARIANT 166: note = Ancestral polymorphism is T, Derived polymorphism is I
  VARIANT 167: note = Ancestral polymorphism is G, Derived polymorphism is D
  VARIANT 173: note = Ancestral polymorphism is G, Derived polymorphism is E
  VARIANT 189..237: note = Derived polymorphism lacks residues 189 to 237
MPMNPPPPPPPGSASSAPAGPSYFPLPFHLQQHQPQPQMPPPMAASSYQQYQQQLHQAHQLFQRDAQTITPEALQSVKAALATSDVLDPAAAANARPSDPSTSKKPIPRRAAGQSWEDPTLTDWPENDYRLFCGDLGNEVNDDVLSKAFSRFPSFNMARVVRDKRTGKTKGYGFVSFSNPTDLAAAIKEMNGKYVGNRPIKLRKSNWKERTDVEALQRQKNHVQRKPKIPKKSVLHK

SEQ ID NO: 6012 - protein, 403 aa, Zea mays
  VARIANT 161..403: note = Derived polymorphism lacks residues 161 to 403
MEEGINRILKNTIKGSIPSTTAREVIVTQSSSSMSSGKLFTWGDGDKHRLGHGDKEPKLKPTIACGHSLTVGLTTSRQVLSMGNIVYGQLGNPRSNVLTNKSEVFTWGKGANGRLGHGDVEDRKIPTVVESLRDRAIRHIACGSNFTSAICQHKWVSGAEQSQYASCRQPFGFTRKRHNCHNCGLVHCNVCTSHKVLRAALAPNPAKPYRVCDSCFMKLNSATYSSTINKKKEVVPRHSGESNHDAKLARAIVPSNLDMIRSLDSKAAKQGKKTDALSFLRTPQMSSLLQLRDITLSGVIDLNKSVPRAVRTSVRSLNSSRVVSPFSRKPSPPRSTTPVPTTHGLSIAKTAADSLAKTNEMLSQEVERLRAQVDNLRRRCELQELELHMKSIQCQNCMGTIQM

SEQ ID NO: 6013 - protein, 164 aa, Zea mays
  VARIANT 48: note = Ancestral polymorphism is K, Derived polymorphism is E
  VARIANT 2: note = Ancestral polymorphism is P, Derived polymorphism is L
MPSSSLAFLMALLLLSCSTTMSSAARYLEEETKPAPHPTTTTVPELPKPELPPHPTVPELPKPELPPHPTTVPELPKPELPPHPAVPELPKPELPHPAVPEVPKPELPHPEPEVPKPELPPNPTVPEVPEHVPVVPKHEFPPLPEPELPPKPESHYPAVPDAKP

SEQ ID NO: 6014 - protein, 199 aa, Zea mays
  VARIANT 13: note = Ancestral polymorphism is L, Derived polymorphism is H
MEALLVTVLLLLLSSTLAAAQWCVCRQDASQAALQKTIDYACGSGADCNSIHETGACYNPNTVPAHCSWAANSYYQNNKAKGATCDFAGTATLTTSDPSSSGCSYPTTSASAAGTVTPTTGGTMGGAGGPGTLTPAGTGAGTAGTTGMGTAGTTGTGFGGLGPAGMDTAAAAAGGLLLLPEAGLCAALVALLLSAIVLA

SEQ ID NO: 6015 - protein, 199 aa, Zea mays; identical to SEQ ID NO: 6014
  VARIANT 13: note = Ancestral polymorphism is L, Derived polymorphism is H

SEQ ID NO: 6016 - protein, 704 aa, Zea mays
  VARIANT 43: note = Ancestral polymorphism is A, Derived polymorphism is S
  VARIANT 568: note = Ancestral polymorphism is S, Derived polymorphism is L
MAEPAPAPPVTAPLVGLLYDERMCAHATPNGEEHPENPERLRSIWRKLNAAGVASRCVALKAKEAEDKYIASVHSKRHIKLMKEISSTIYDASRNKIARKFNSIYLNKGSSESAVLAAGSVIEVILHVAEKVAAGELSSAIALVRPPGHHAEHDEAMGFCLFNNVAVAANYLLNERPDLGIKKILIVDWDVHHGNGTQKMFYDDPRVLFFSVHRFDYGSFYPSEGDASHCFIGEEAGKGYNINVPWEHGKCGDADYIAAWDHVLLPVTKVFDPDIILVSAGFDAALGDPLGGCCITPNGYALLLTKLLGFAQGRIVMALEGGYNLRSIANSVCACAKVLLGDKFTFNTPEMQPFESTWRVIQAVRNELKTCWPVLSSKLPENVSLRIKPAPSELYASDSESDSEDVDELLGTVASVSVIEATGVAISEHLSKMKLDDDSLAVKTNSSCSAAEQHPVDSVKVHNNASVVLTKKISDLSLEWRSDLSKTDVWYASFGSNMWRPRFLCYIQGGKAEGMNIPCCGSRDTSSPKGTVWKTVPHRLLFGRSSTPCWGTGGVAFLNPEINYNEKSYVCMYKITLEQFNDILFQENRLVLEDGKDGNTVYPDSPLIGSSEIKFISTNRAVHLEPIKDSWYSNVLYLGNEDEVPILTMTCPASDIERYKSGELRLAPPSETYAATLIKGLVEGKQMDADGAASYINAAAARAL

SEQ ID NO: 6017 - protein, 437 aa, Zea mays
  VARIANT 362..437: note = Derived polymorphism lacks residues 362 to 437
  VARIANT 326: note = Ancestral polymorphism is G, Derived polymorphism is E
  VARIANT 310: note = Ancestral polymorphism is G, Derived polymorphism is E
  VARIANT 269: note = Ancestral polymorphism is P, Derived polymorphism is S
  VARIANT 263: note = Ancestral polymorphism is R, Derived polymorphism is H
  VARIANT 236..437: note = Derived polymorphism lacks residues 236 to 437
  VARIANT 219: note = Ancestral polymorphism is P, Derived polymorphism is T
  VARIANT 196: note = Ancestral polymorphism is P, Derived polymorphism is L
  VARIANT 191..437: note = Derived polymorphism lacks residues 191 to 437
  VARIANT 186: note = Ancestral polymorphism is P, Derived polymorphism is L
  VARIANT 156: note = Ancestral polymorphism is G, Derived polymorphism is D
  VARIANT 138: note = Ancestral polymorphism is A, Derived polymorphism is V
  VARIANT 135: note = Ancestral polymorphism is P, Derived polymorphism is S
  VARIANT 133: note = Ancestral polymorphism is P, Derived polymorphism is S
  VARIANT 112: note = Ancestral polymorphism is P, Derived polymorphism is S
MAAAATTNGALANVTTASVARANDASATAYGSPTSHHGANGPGNSVPVSSTLGATREAPRDPGHHPGQRGLRPEPSARVDGSRLVALPFPSFPPLPEGVESIDALLCPSLHPMFMQATGLLRGPFAEFMASLPSPSLVLVSDLFLGFTRRVAADAGIRRFVFNGMSCFASAICNALATSPPTSFDPGTMIQVLGMPEHVAVRAEEVPDGVTKRVDPDNPFMRLFMDEIGDSDVRSWGVLNNSLDTLDAAYVSALESFYEAGARAWLVGSLFMAVGDMPDSKKKEQDPEGCLSWLDERAVHPGSVVYDSFETQAHITDAQLDELVHGLVQSSHPFLWAVRSDTWSLPVDMGPNNRIVRGWVPQRSILAHKAVGGFVSHCGWNSVMESLVAGKPMLAWPMIAEQHLNARHVANILGADVRIALKAGADVIGSAEVEEKV

SEQ ID NO: 6018 - protein, 335 aa, Zea mays
  VARIANT 1: note = Ancestral polymorphism is M, Derived polymorphism is L
MDLLLPYKIGDLAESKSFLNGYRGAWFRCKAILGGSFTSVRYINKFGDMVYEEIEFYGRYIICVSMILDTWSVTWNILTMMGRVQTVPSPITINDYYLDWVAVFQENPASSSQNSKGSTEVMIRPSFPQWYYGHEPDQLPVSDVTAVVDEAWKIGDMVDWLKDGCYWSGTITKLLKKDMVKGVDCDSFMMLPFPMTLGSGLQLPAPPIGEGRCYIANHKDLRPTLEWSLEKGWTVPLAQVNDRQTKKVGIPLVFFDNINLIQTRAPQVMKMAMMRRGECSNRCPELETCLRKPPRSRGSYENAQKDATVTPVQGECGDQLNFQATRPLRAELVPD

SEQ ID NO: 6019 - protein, 191 aa, Zea mays
  VARIANT 86: note = Ancestral polymorphism is E, Derived polymorphism is D
  VARIANT 141: note = Ancestral polymorphism is S, Derived polymorphism is T
  VARIANT 155: note = Ancestral polymorphism is A, Derived polymorphism is V
MSSWDADDSAAASAAEAATTDVELLKRAWRNEKAAPEILRFDSPLVSRVREQTQLLVRPPSRRPPPPSCYFSGSDADSLPRCRQEETLDDFADSGVDDLVVSLYQMDLDRTLFLLRSYLRLRLQKIEKYTMHISRSEDLLSRLSQQERRFAKSCAEIMEKHLEQSVLSKLPYGYDSVSRQSLSSTEDDMGT

SEQ ID NO: 6020 - protein, 899 aa, Zea mays
  VARIANT 242..899: note = Derived polymorphism lacks residues 242 to 899
  VARIANT 194..899: note = Derived polymorphism lacks residues 194 to 899
MSGPPKRLHEESSHSTPAKRPLDDNSLYSSPSGKAIQSSSSDFHGFFEHDGRFAKIQRVEARDDKRPPLVHRMHGSSNFVDHTVLSDSRLEPKHNKDTRDNKADDRDTKADARDVYSDPSIEFQFNKIDSDVKIDNRADGNEIRADRRGHHDYKGDTKFDKDNHPIVASSLGWKDNKEHRGKRYFEQPSDNADWRFPRPGLQGTDETLKGLTSMEDRNSRDAHDSAFDNKAESKGEDKFRDKDRKKKDEKHRDFGSREGERNDRRTGIQLGGSGVERREMQREERDAEKWDRERKDSLRDKEGNDREKDSAKKDPSMVMEKDNTIVEKLLSDGPVKNAEHENTTTETKVLKDDAWKGHDRDPKDKKREKDLDAGDRHEQRSKYNDKESDDNGTEGDTEKDKDVFGSVQRRRMVRPRGGGSQASQRDPRFRSRTRDGEGAQASEDNRYCYGNHACISTSNVISIGRAILVLGWLVVLGKLSRKALCRNDEQPVAVCTKLFILWLCKFWVLFCYLSLLFISGKSEVSAILYKAGECMQELLKSWKDFEATQEATNVESLQNGPTLEIRIPAEFVTSTNRQVSVHTKQTISVSVPLVISMLHVETEALSATLLYIIIFELPSDLNSLVLMHTGYCSPTSSPPPSAIQELHATVQVLPPQESYTSTLRNNVRSRAWGAGIGCSFRIERCCIVKARKGGGTIDLEPRLSHTSAVEPTLAPVAVERTMTTRAAASNALRQQRFVREVTIQYNLCNEPWLKYSISIVADKGLKKSLYTSARLKKGEVIYLETHFNRYELCFSGEKPRGIGSSSNASDAEPEKHQSSSHHSQNGSVEHELRDVFRWSRCKKAMPESAMRSTGIPLPADQLEVLQDNLEWEDVQWSQTGVWVAGKEYPLARVHFLSGN

SEQ ID NO: 6021 - protein, 153 aa, Zea mays
  VARIANT 139: note = Ancestral polymorphism is T, Derived polymorphism is M
  VARIANT 101: note = Ancestral polymorphism is K, Derived polymorphism is T
  VARIANT 16: note = Ancestral polymorphism is M, Derived polymorphism is V
  VARIANT 6: note = Ancestral polymorphism is S, Derived polymorphism is G
MDPMFSSEWSVSEIKMAKSLIASRNTSSNLASDDDASNKKHSDIVDELQARFPWKGKHEVIGLYVDLTMEMINTPPEVGDDGLVLDDDNFGMPVEEQPQMKYTGRFWTREEHRNFLRGLNMYGRGNWMYISRDFVPTKTPMQIYSHAQKFFRR

SEQ ID NO: 6022 - protein, 691 aa, Zea mays
  VARIANT 392..691: note = Derived polymorphism lacks residues 392 to 691
MATAAPGPGSRSRLLPLALSSFLLLLLLLLIAPGAAAQPWQSCGNTDNYSANSTYQSNLASLAKALPANASRSATLFAEGSAGALPDAVYALALCRGDINATACGACVTTAFQDAQQLCAYNKDAAVFYDACYLRFSNKDFIASATNNGDAIVLMNSQNVSPPVRAFDAAVAVLLNATADYAAANSSRRFATGEEGFDATDPTIYGLTQCTPNMSPAECRTCLRSIISDMPQYLSGRRGGRIIGMRCNFRYDLYSFFSGGPSLRLPAPSAPAPAPSPAQVNVTPTVTPTGRSRNRTGIVIAIVLPIVAGVLAITMVCLCFLWRRRPARDQTSSYSVNQSEIESIDSLLLDISMLRAATDNFAESNRLGEGGFGTVYKGVLPDNQEIAVKRLSQSSGQGIQELKNELVLVAKLQHKNLVRLVGVCLQEYEKLLVYEYMPNKSIDTILFDSEKSKELDWGKRVKIIDGIARGLQYLHEDSQLKIIHRDLKASNVLLNSDYTPKISDFGLARLFGGDQSREVTNRVVGTYGYMSPEYAMRGHYSIKSDVFSFGVLILEILTGRSSSGSFNIEQSVDLLSLVWEHWTMGTIVEIMDPSLRGKAPAEQMLKNVHIGLLCVQDNPVDRPKMSTVNIMLSSGTMPLQSPLKPAFFIPKSGYYSTVHSESYPIASRSVDNGKPGAISPNEVSITELEPR

SEQ ID NO: 6023 - protein, 272 aa, Zea mays
  VARIANT 24: note = Ancestral polymorphism is G, Derived polymorphism is S
  VARIANT 38: note = Ancestral polymorphism is A, Derived polymorphism is V
  VARIANT 39: note = Ancestral polymorphism is R, Derived polymorphism is Q
  VARIANT 59: note = Ancestral polymorphism is P, Derived polymorphism is S
  VARIANT 69: note = Ancestral polymorphism is S, Derived polymorphism is L
  VARIANT 79: note = Ancestral polymorphism is A, Derived polymorphism is V
  VARIANT 90: note = Ancestral polymorphism is R, Derived polymorphism is H
  VARIANT 91: note = Ancestral polymorphism is A, Derived polymorphism is T
  VARIANT 94: note = Ancestral polymorphism is R, Derived polymorphism is W
  VARIANT 98: note = Ancestral polymorphism is P, Derived polymorphism is L
  VARIANT 103: note = Ancestral polymorphism is R, Derived polymorphism is W
  VARIANT 134: note = Ancestral polymorphism is R, Derived polymorphism is Q
  VARIANT 138: note = Ancestral polymorphism is S, Derived polymorphism is F
  VARIANT 141: note = Ancestral polymorphism is V, Derived polymorphism is A
  VARIANT 143: note = Ancestral polymorphism is N, Derived polymorphism is Y
  VARIANT 158: note = Ancestral polymorphism is R, Derived polymorphism is C
  VARIANT 162: note = Ancestral polymorphism is R, Derived polymorphism is H
  VARIANT 166: note = Ancestral polymorphism is A, Derived polymorphism is V
  VARIANT 233..272: note = Derived polymorphism lacks residues 233 to 272
MRAARRLRFYGTEPGWIMDCARASHISPTLQLAALLHARGLAVTVLHTGLNAPDASRHPELTFVLIHESSFPDEDVACAVVDGQCYSALRAAHRLGVPALPLRTDSAATFRSMLDGSDTDALCGFVGHVADAVRASASGVVINTFERMEASELAKIQRELSRPAFAVGPLHLLSPAPTEQSLHAPDRGCLAWLDDHPLRSVLYVSLGSVACVDRGAFVEMAWGLARSGVSFLWVGRPGLVGGVARAGPTQTGRAGGRSSSRACCGGPGPAGG

SEQ ID NO: 6024 - protein, 435 aa, Zea mays
  VARIANT 52: note = Ancestral polymorphism is G, Derived polymorphism is S
  VARIANT 63: note = Ancestral polymorphism is P, Derived polymorphism is S
  VARIANT 69: note = Ancestral polymorphism is R, Derived polymorphism is G
  VARIANT 80: note = Ancestral polymorphism is P, Derived polymorphism is L
  VARIANT 90: note = Ancestral polymorphism is G, Derived polymorphism is D
  VARIANT 235: note = Ancestral polymorphism is R, Derived polymorphism is W
  VARIANT 288: note = Ancestral polymorphism is V, Derived polymorphism is A
  VARIANT 383: note = Ancestral polymorphism is G, Derived polymorphism is W
MTLTTVAFTVRRGEPALVGPAAPTPRETKRLSDIDDQETLRGQMPFLFLYRGGVHVRADDDDPACVIRRALGEALVPFYPLAGRLREVEGRKLVVDCTGEGVLFVEADADVRLDELEATGLRPPFPCMDQLLFDVDGSSGVLHCPLLLIQVTRLLCGGFVLALRLNHTICDAIGLAQFMSAVAELARGLPAPTVAPAWSRELLEARNPPKPAFPHREFDVAPPPPPPPPGDMVTRTFTFSPADVAAIKRALPLALREAATTFEALTAALWRARTAALAPPHDAEARLVSIVSFRGLPELALPAGYYGNACVPVAALTTAGALLAGSLGDAVALVRGTKAAVTAEYVRSTLDLLVLRGRPCVALANLFLVSDNRRAEFHRLDLGWGVPAYGGPAVALFGLSFFVQAGNGDDVAVLMALPRPAMDHFASEVETLLKA

SEQ ID NO: 6025 - protein, 358 aa, Zea mays
  VARIANT 273: note = Ancestral polymorphism is T, Derived polymorphism is A
MRALLHLRLINPCSPRAPRLPATPARALVASFSGAWQAPSGRARARAAPPAVRAMASQQVFRAQQQQQQQFPAQQQESQPGKEHAMDPRPEAIVQDYKAANKLKDKVALVTGGDSGIGRAVCLCFAKEGATVAFTFVRGQEEKDAEETLRALRDIGSETGAREPMALPADLGYEANCREVVERVASAYGGRIDVVVNNAAEQYERESIGDVTEADLERVFRTNIFSYFLVSKHAVPRMEPGACIINTSSVNAYKGNKTLLDYTATKGAIVAFTRALSLQLADRGIRVNGVAPGPVWTPLIPASFGKEKVEQFGSQVPMKRAAQPAEIAPSFVFLASNQDSSYMSGQILHVNGGVIVNS

SEQ ID NO: 6026 - protein, 191 aa, Zea mays
  VARIANT 172: note = Ancestral polymorphism is D, Derived polymorphism is H
  VARIANT 166: note = Ancestral polymorphism is R, Derived polymorphism is Q
  VARIANT 157: note = Ancestral polymorphism is D, Derived polymorphism is Y
  VARIANT 133: note = Ancestral polymorphism is S, Derived polymorphism is I
  VARIANT 131: note = Ancestral polymorphism is I, Derived polymorphism is T
  VARIANT 127: note = Ancestral polymorphism is E, Derived polymorphism is G
  VARIANT 124: note = Ancestral polymorphism is E, Derived polymorphism is K
  VARIANT 123: note = Ancestral polymorphism is A, Derived polymorphism is T
  VARIANT 115: note = Ancestral polymorphism is T, Derived polymorphism is A
  VARIANT 113: note = Ancestral polymorphism is L, Derived polymorphism is S
  VARIANT 108: note = Ancestral polymorphism is E, Derived polymorphism is K
  VARIANT 90: note = Ancestral polymorphism is P, Derived polymorphism is S
  VARIANT 8..191: note = Derived polymorphism lacks residues 8 to 191
MRVSCGLWMVNYMEYWTGSSLSNNLTQNDITKFRFKLPAILWNSRLNTKKGHQETDHHADEDGGSSCDVEIIETPCELPISLNASSQVQPFISSCALPATLTSTNTQELMSALCTYIMEIDDAEYLEKHWIQSTKPYPISLSLQQLKNILDVNKPMDKDCFNIVVRMIACSDALFLLENKYHYMDLQFCVC

SEQ ID NO: 6027 - protein, 313 aa, Zea mays
  VARIANT 287: note = Ancestral polymorphism is A, Derived polymorphism is V
  VARIANT 263: note = Ancestral polymorphism is P, Derived polymorphism is A
  VARIANT 135: note = Ancestral polymorphism is V, Derived polymorphism is A
  VARIANT 95..313: note = Derived polymorphism lacks residues 95 to 313
MIQVSEIGLVLDIVDQRNLIDTFFCYLGGKASLFVSHSVSSDYLLRIGNGIEETCNDDNVRLPDEICIPYTGEDDDVDRLIEEIFPSLETNMHNRDYITSQAILSTKNENVDKINMRFIDRFSGQEMVYHSFDVAVDDPNNNYPPEFLNSLTPSELPPHMLKLKVNCPVILLRNLDPPNGLCHGTRLIIRDFHINTIDAEIVLGQHAGKRVFLPRIPLCPSDDEIFPFKFKRTQFPLRLSFAMTVNKAQGHTIPHVGVYLPNPVFSHGQLYVALSRATTRSNVKILAAGEMVLSKNSNETYTKNIVYKEVLTS

SEQ ID NO: 6028 - protein, 437 aa, Zea mays
  VARIANT 18: note = Ancestral polymorphism is T, Derived polymorphism is K
MAETAGAAPAQQPARVATTTTNSDVSTWAWLQQVLALLFPSSLAAKAALFALVVALLPLLPSGQAPRIWELPHLLLLGIIISYGVFGQKNADAEVATAAYATPVDVEASVEAYVSQMMQGSLVFDENDGNDGANKDGSVQQQAWSSRYLPDDPLVVVADTSAPGTNSGNGDTDTGGKGKPLLLPVRKLKPAAAAPTGDMMSDVSGIEDEGEEEEEEELLLAPKSGTGYGVVREHAFPSPSSVLDADLTLSPSSPPLLPPPPPPPPFLGRGRSGLLKAKARSFNEFGFGVLSSDRSPNGSLGSHSHSAAGSSRKFRPRYAVQATRSSTFGRYDPVVPIHDDEAGDETLGEMVATSDSSFSSDLDDDTIKEENSCEDDGVSEDDGVNSCNEELFELATRPGLEGETETEVEGEVDRKADEFIAKFREQIRMQKVEQARR

SEQ ID NO: 6029 - protein, 174 aa, Zea mays
  VARIANT 20: note = Ancestral polymorphism is V, Derived polymorphism is A
  VARIANT 21..174: note = Derived polymorphism lacks residues 21 to 174
  VARIANT 42: note = Ancestral polymorphism is F, Derived polymorphism is L
  VARIANT 61: note = Ancestral polymorphism is D, Derived polymorphism is G
  VARIANT 103..174: note = Derived polymorphism lacks residues 103 to 174
MNVSIDISGLPITLSECGIVGIWVQEELVLQFTNLKAIKLLFFVFRHVRIIFLLLFSLYVDVAAFYAVFLPFLAIILSFGFQWSPDRASVFGSSAEDGFLNVWDHEKVGKKKNSNVPAGLFFQHAGHRVVPLRGLCFCVLGRRFIDMAESLCQKRALEAFRLDPTKWGVNLLLH

SEQ ID NO: 6030 - protein, 101 aa, Zea mays
  VARIANT 2: note = Ancestral polymorphism is G, Derived polymorphism is D
  VARIANT 3: note = Ancestral polymorphism is T, Derived polymorphism is M
  VARIANT 10: note = Ancestral polymorphism is R, Derived polymorphism is G
  VARIANT 11..101: note = Derived polymorphism lacks residues 11 to 101
  VARIANT 27: note = Ancestral polymorphism is P, Derived polymorphism is R
  VARIANT 28: note = Ancestral polymorphism is K, Derived polymorphism is E
  VARIANT 72: note = Ancestral polymorphism is T, Derived polymorphism is M
MGMLLISKIGEEYPDRMMLTFFVFPSPEVSDTVVEPYNATMSVHRLVENADECMVLCNEALYDICFRTLKLTTPSFGDLNHLISATMSGVTCCRNKKQAGI

SEQ ID NO: 6031 - protein, 274 aa, Zea mays
  VARIANT 12: note = Ancestral polymorphism is E, Derived polymorphism is Q
MLSTIVLKVDLECETCYKKIRKVLRTIQDKMNIETISFDEKSNAVTISGPFDSDMVCNRLCCKAGRVIKEMDVKGNEKDAKAKGGGGGDKPKDAAKPAAEEEGGNSEMKAEKAEKKEGKGDKEDTKSDRAEKGNKDGKAEAETVEFDLDVDGVASAADAKPGKAMAMPPGMTKADLGPLLEKMMAPGATQSVVVPSIWPASAGFVSGYYGCNPGYEAPPSYYGAGAGAVYGGYYGVPVYDSQGWYYGGGARQQPYYPHQQQHCCEDPNAGCSVM

SEQ ID NO: 6032 - protein, 148 aa, Zea mays
  VARIANT 113: note = Ancestral polymorphism is S, Derived polymorphism is Y
  VARIANT 123: note = Ancestral polymorphism is R, Derived polymorphism is M
MLSTAACLAARHLLSLTSASKAISLSLASFPVEPLLCPTHTPTIPPNSIPGLAAFDALNMVHHSSVSRLLVIPRHKSLCKLSDVRLYMLRMLNNRLSDLLILCRLGRTQIVPYVKVVNVPKHRKQLDRGQEVKMSKFQNCKSLISSKA

SEQ ID NO: 6033 - protein, 205 aa, Zea mays
  VARIANT 139: note = Ancestral polymorphism is G, Derived polymorphism is S
MPDSDNDESGGPSNADFSSPREQDRFLPIANVSRIMKKALPANAKISKDGKETVQECVSEFISFITGEASDKCQREKRKTINGDDLLWAMTTLGFEDYVEPLKLYLHKFRELEGDKAAAGSQPPPPPSSTHNGAGVPVGYGMYGAGGGSGMIMMMGQPMYPPAASSGYSQQPPHHQMSMGGKGGAYGHCDGSSSSPSGLRRHDGL

SEQ ID NO: 6034 - protein, 156 aa, Zea mays
  VARIANT 47: note = Ancestral polymorphism is V, Derived polymorphism is I
  VARIANT 37: note = Ancestral polymorphism is G, Derived polymorphism is D
  VARIANT 33: note = Ancestral polymorphism is L, Derived polymorphism is Q
  VARIANT 28: note = Ancestral polymorphism is A, Derived polymorphism is T
  VARIANT 4: note = Ancestral polymorphism is P, Derived polymorphism is L
MAFPGTPARKIVPGGFTAARTAVASGGALSFDLDGADDFFWGLWQLVKAKAAEAAAYLAALFAALAEKADEIFPPETRSETLRQWMRVAVSVVIPALVVALVLCCCCCACRRARGGRRARFMAAPGRGGARMPRGAFENNPRLYFRDLRAGKPLLY

SEQ ID NO: 6035 - protein, 367 aa, Zea mays
  VARIANT 316..367: note = Derived polymorphism lacks residues 316 to 367
  VARIANT 296: note = Ancestral polymorphism is P, Derived polymorphism is L
  VARIANT 129: note = Ancestral polymorphism is L, Derived polymorphism is P
  VARIANT 78: note = Ancestral polymorphism is S, Derived polymorphism is Y
  VARIANT 30: note = Ancestral polymorphism is E, Derived polymorphism is G
MASAAHAPTPVLKDELDIVIPTIRNLDFLEMWRSFFHPYHLIIVQDGDPSKTIRVPEGFDYELYNRNDINRILGPKAYCISFKDSACRCFGYMVSKKKYIYTIDDDCFVAKDPSGNDINALEQHIKNLPSPSTPFFFNTLYDPYRVGTDFVRGYPFSLREDVPTAVSHGLWLNIPDYDAPTQLVKPLERNTRYVDAILTIPKGALFPMCGMNLAFDRELIGPAMYFGLMGDGQPIGRYDDMWAGWCTKASDYYQYMLIDCTLLGDFSLVLVHKASNPFVNLKKEYNGIFWQEELIPFFQSVSLPKDATTVQKCYLELAKQVRARLGKVDGYFNKLADSMVTWIEAWDELNPAKGGVRVPTANGPHKK

SEQ ID NO: 6036 - protein, 222 aa, Zea mays
  VARIANT 17: note = Ancestral polymorphism is D, Derived polymorphism is N
  VARIANT 50: note = Ancestral polymorphism is G, Derived polymorphism is R
  VARIANT 64: note = Ancestral polymorphism is G, Derived polymorphism is D
MGTPETSREPCPDRILDDVGGAFGMGAVGGSAYHFIKGIYNSPNGMRLSGGAQTVRMNAPRVGGSFAVWGGLFSTFDCAMVYARQKEDPWNSIVAGAATGGFLSMRQGMGAAGRSALMGGILLALIEGAGLMLNRVLANPPLPADDPNLTAAMGGNPFPGLPQAPPVVAPPEATTSSGVGGLFGGLFGRKEEEKKPSAGGGKSEILESFDTPSSPIPSFEYK

SEQ ID NO: 6037 - protein, 484 aa, Zea mays
  VARIANT 289: note = Ancestral polymorphism is A, Derived polymorphism is T
  VARIANT 106: note = Ancestral polymorphism is R, Derived polymorphism is H
  VARIANT 105: note = Ancestral polymorphism is R, Derived polymorphism is L
MWRRHHLLRLLPPPATAATAAAPSHFLRYLSTSSTPTPAASLASSLASALTALSTTPPPATTPDAYFSLHFSDVRPTNALLAEALALSPPATSRAAADLFRFLVRRRSLHPSDGALAPIVRHLARRRDFPAVRALIQEFPTALGPTTLDAYLQQLTRAGRPTDAVKVFDELPEQLRNREALTLLVSSLSSEGFPSHAERAAKKVASEIFPDDNICTLLVSGYANAGKLDHALRLIGETRRGGFHPGLDAYNAVLDCVCRLCRKKDPLRMPIEAEKFLVDMEANGIPRDAGTFRVLITNFCKIRKTGDAMNLFQRMGEWGCSPDADTYLVLIRSLYQAARTSEGDEMITWMRSAGFGDKLDRKAYYGFIKILCGIERVEHAVKVFRMMKGYGHAPGVKSYTLLIEKLARHNLGDRSNALFREAVARGVPVAQGEYNVDKRYVKTKKEKTVKKRLTLPEKMRLKSKRLYKLRMSFVKKPKRRMLRV

SEQ ID NO: 6038 - protein, 378 aa, Zea mays
  VARIANT 129: note = Ancestral polymorphism is V, Derived polymorphism is A
  VARIANT 164..378: note = Derived polymorphism lacks residues 164 to 378
MGGGEMAGWLKALAYSAGGVAVAGLAALVALQERLVYVPVLPGLARSYPITPARLGLIYEDVWLRAADGVRLHSWFIRHSPSYRGSDWLGAGKGYLEPGVGFWSPRVGMDACPSCLAPGLQSNSPAILVYSSEIGQDSPTILFFQENAGNIAHRLEFVRLMMQRLQCNVFMLSYRGYGESDGYPSQKGITYDAQAALDHLAQRNDIDTTRIVIFGRSLGGAVGAVLAKNNPDKVATLILENTFTSILDMAGIMLPFLRWFIGGSSSKGPKLLNCVVRSPWNTLDIVGEVKQPILFLSGLQDELVPPPHMKMLYDKASDHNRNCRFVDFPSGMHMDTWMSGGDRYWRTIQLFLDQYAPGVQNHDASFKSEITEDDEAAD

SEQ ID NO: 6039 - protein, 140 aa, Zea mays
  VARIANT 88: note = Ancestral polymorphism is S, Derived polymorphism is Y
  VARIANT 84: note = Ancestral polymorphism is Y, Derived polymorphism is D
  VARIANT 79: note = Ancestral polymorphism is F, Derived polymorphism is L
  VARIANT 78: note = Ancestral polymorphism is L, Derived polymorphism is M
  VARIANT 63..140: note = Derived polymorphism lacks residues 63 to 140
  VARIANT 62..140: note = Derived polymorphism lacks residues 62 to 140
  VARIANT 47: note = Ancestral polymorphism is P, Derived polymorphism is S
  VARIANT 36: note = Ancestral polymorphism is A, Derived polymorphism is T
  VARIANT 16: note = Ancestral polymorphism is R, Derived polymorphism is C
  VARIANT 11: note = Ancestral polymorphism is A, Derived polymorphism is V
MGRSVEHMVLAVWFVRVDNFSVGRCREDGGRGEAGAEELLGGASQEPHRRCHDAGLPRCQSRQGATCRSGQGGCPKILFLLPSDEGTSILELGAGIGCFTGELAKTVRNVFALDFIESAIKKNESIKVCSWILHSERLKR

SEQ ID NO: 6040 - protein, 121 aa, Zea mays
  VARIANT 99: note = Ancestral polymorphism is A, Derived polymorphism is V
  VARIANT 97: note = Ancestral polymorphism is G, Derived polymorphism is E
  VARIANT 87: note = Ancestral polymorphism is A, Derived polymorphism is S
  VARIANT 84: note = Ancestral polymorphism is I, Derived polymorphism is V
  VARIANT 83: note = Ancestral polymorphism is A, Derived polymorphism is D
  VARIANT 82: note = Ancestral polymorphism is C, Derived polymorphism is R
  VARIANT 74: note = Ancestral polymorphism is E, Derived polymorphism is D
  VARIANT 72: note = Ancestral polymorphism is Y, Derived polymorphism is N
  VARIANT 56: note = Ancestral polymorphism is S, Derived polymorphism is Y
  VARIANT 50: note = Ancestral polymorphism is R, Derived polymorphism is K
  VARIANT 49: note = Ancestral polymorphism is R, Derived polymorphism is G
  VARIANT 37: note = Ancestral polymorphism is S, Derived polymorphism is C
  VARIANT 36: note = Ancestral polymorphism is A, Derived polymorphism is G
  VARIANT 34: note = Ancestral polymorphism is I, Derived polymorphism is T
  VARIANT 28: note = Ancestral polymorphism is A, Derived polymorphism is D
  VARIANT 18: note = Ancestral polymorphism is R, Derived polymorphism is C
MLAEDGYSGVEVRVTPMCIEIIIRATRAQNILGIGACTTPIPLQSEKGRRIRELASVIQKRFNLSEGGVELYAEKLNNRGLCDIAQAESLRYKLLGELAVRRACYGVLLFVIESGTKGCEV

SEQ ID NO: 6041 - protein, 387 aa, Zea mays
  VARIANT 2: note = Ancestral polymorphism is R, Derived polymorphism is L
MLAGAPTGDAGPSSGAGSNPPTRPRRFPGAAQPEIMRAAEKDDSYAAHVTEACRDAFRHLFGTRVAVAYQNEIKLLGQSLYYLLTTGSGQQTLGEEYCDISQVATLHGLPPTPARRILFILYQTTVPYLAERISSRIVARSIVLNESQFDDHPESDNSSSDIAQSTTNSDIPSRSLSVSALSGFRGRVHALWQWVLQKWPSMLPYAQDFIQLAIRTNLMFFYFEGLYYHLPKRAAGIRYVFIGKPMNQRPRYQILGIFLLIQLCILGAERLRRSNISSIASSINQISSGGYPSTTGRGIPVLNEDGNIISDIRSGKAADIASHSETSNGKSKCTLCLSIRQNPTATTCGHVFCWNCIMEWCNEKPECPLCRTPITHSSLICIYHSDF

SEQ ID NO: 6042 - protein, 314 aa, Zea mays
  VARIANT 193: note = Ancestral polymorphism is R, Derived polymorphism is W
  VARIANT 178: note = Ancestral polymorphism is E, Derived polymorphism is G
  VARIANT 144: note = Ancestral polymorphism is R, Derived polymorphism is G
  VARIANT 55: note = Ancestral polymorphism is R, Derived polymorphism is C
MPTLGIARLLDASFRRRFAAAGLVEASVPLDGGATTVHCWRFPPSADDGGGEDARPVLVLLHGFGPPATWQWRRQVGPLSRRFRLIVPDLLFFGGSSTSSAPGVSEAQQAEAVAKVVAAVAPAPARVSVAGTSYGGFVAYHVARLLGPGAVERVVVASSDLLKADADDQALLRRAGAERVEDVMLPRSPDRLRRLVQLAYHRPRRFTPGFVLRDLIQYLYSDKVEEKKELIKGITLGNKDKFQLTPLPQQVLVLWGEHDQIFPVEKAFEVARELGANARLEVLEDTGHMPQEEDPKRFNEAILNFLLPAPESSL

SEQ ID NO: 6043 - protein, 230 aa, Zea mays
  VARIANT 227: note = Ancestral polymorphism is S, Derived polymorphism is I
  VARIANT 188: note = Ancestral polymorphism is A, Derived polymorphism is T
  VARIANT 64: note = Ancestral polymorphism is E, Derived polymorphism is K
  VARIANT 45: note = Ancestral polymorphism is D, Derived polymorphism is G
MEDDDTEGVGESTCPPAADRGGSSSAGGGGGDSHGYTDIEKEVFDRLMEKRIPEVVADPVAFREELHRHFERLPLSYAIDVNVDKAEDVLLHRSILNECTDPENRPIFHVGFLNHRLGSYLFLEETEIFVLPLKFEPCEGIEDLSLTGQKVVGDYVAGSSRGDVEILHVHEIIFSTIDKPKLLAQLSALLSEVGLNIREAHVFSTTDGFCLDVFVVDGWDTKVIYHSMIV

SEQ ID NO: 6044 - protein, 1024 aa, Zea mays
  VARIANT 191..1024: note = Derived polymorphism lacks residues 191 to 1024
  VARIANT 687: note = Ancestral polymorphism is L, Derived polymorphism is S
  VARIANT 761..1024: note = Derived polymorphism lacks residues 761 to 1024
  VARIANT 774..1024: note = Derived polymorphism lacks residues 774 to 1024
MDDLEHVILLASDSPAAAAASPSIRAEALAFCARARDESPPSSLLRLCLSGIASSPHAQVHFWCLQSLHDALLRRRLVLPDDLALLRSSLLSLAVSSHAGSPPFLRNKLAQLVALLIRLEYPHVYPSYFIDLLPPAPPQPGPTDMFARVLISLDDDLLSQEYPRNSGEAADAMRVKDSMRAQCVSQIASHWHAAAVTLRTADPAAAAVALDAARRCISWIDVGLVANDVFVPLFFDIAMSPGSASPLAAAAVGCLSGVASKRMDSRAKVGLLRSLLAAQQGLGSPDNGLKMAPLVIAYAAEALECHSRLGPSDADGAAALEMLEEVLPAVFAAAESGNDEDVDSGSVLEFLSGYVSTMKAPSEKQLGHLGRILEVVRVQMSFDPVYRGHLDVLDKIGKEEEDLMAEQRKDLIVLFRSICRVAPAAAQLFISGLIVTALSSAEASVEDVEVALTLFFRLGEAVGEEEIRTGAGLIGQLVPMLLTARFSCHTHRLVALVYLETVTRYMKFMQEHVQYVPHLLGVFLDNRGIHHQNAHVSRRAGYLFMRAVKSLKAKLVPYLDTILQSLQDVLSQFTSMNWPNKDTKFPSSEDGSQIFEAVGLLIGIEEVSPEKQAQFLTALLNPLCHQVESLVMDAKARGLEESSPMAISLQQIIVALNMVSKGFNERLVMVNRPAIGIMFKKTLDVVLQVLVSFPSVRPLRSKVISFLHRMIEILGLSVLPCIPIALRLLLLDNEVFQLYFNDKPLFSWFFCVSDSIIIFVQAKDMVEFLVLVNQIICKFKSSASAILEEIFPTIASRLSAILSQDAFSAGPASNTEEMRELQELQRTLYTFLHAMATHDLSAVLLTPSSREYLETIMQLLLFTSYKHRDILLRKACVQIFVNLVKDWCSNSEDKVPGFRVFMIEKFATNCCLYSVLDKSFDLRDANSLVLFGEIVLAQKIMYERFGGDFIVNFIAKGLSGVHCPPDLAEQYYQKLKGNDIKAFRLVVPSMYIELPFLRSEDVLLRHYLYQVWQPWLCPYSLYSI

SEQ ID NO: 6045 - protein, 207 aa, Zea mays
  VARIANT 191..207: note = Derived polymorphism lacks residues 191 to 207
  VARIANT 144: note = Ancestral polymorphism is P, Derived polymorphism is L
  VARIANT 142: note = Ancestral polymorphism is W, Derived polymorphism is R
  VARIANT 121: note = Ancestral polymorphism is T, Derived polymorphism is I
  VARIANT 101..207: note = Derived polymorphism lacks residues 101 to 207
  VARIANT 66: note = Ancestral polymorphism is R, Derived polymorphism is G
  VARIANT 55: note = Ancestral polymorphism is S, Derived polymorphism is F
  VARIANT 53: note = Ancestral polymorphism is H, Derived polymorphism is Q
  VARIANT 36: note = Ancestral polymorphism is T, Derived polymorphism is I
MEGRPNPRTRSCSFTSQEKNYSMVLQAVVDLDTKFTVIVTGWPGSMKESSILHNSGLFKLCEKGERLSGSKLKVSDGSEIEKYLIGDSGYPLLPWLLTPYQEKDLTESSAKFNIRHSSVRTVALRTLAKFKDTWKFLQGEMWRPDKHKLPRIIHVCYLLHNIIIDLQERAVDEAQAWPSDHDAKYRQQVCQLADENGFPLVLSLRYL

SEQ ID NO: 6046 - protein, 367 aa, Zea mays
  VARIANT 2: note = Ancestral polymorphism is A, Derived polymorphism is T
  VARIANT 22: note = Ancestral polymorphism is H, Derived polymorphism is D
  VARIANT 273..367: note = Derived polymorphism lacks residues 273 to 367
  VARIANT 275: note = Ancestral polymorphism is D, Derived polymorphism is H
  VARIANT 337: note = Ancestral polymorphism is N, Derived polymorphism is K
MAPGLLAAAAVLAAVAASLAAHVALNCPVQPVPSHRPPPTPPPNNLLQRLEKLGEGALDAPEDVYVDAAAGGALYTATRDGWLQRMMHPNNGSWERWRFVGGTGLLGVAPSADGTMLVCDADKGLLRVGDEGVTLLASEVEGSPIRFADAAIEASDGTVYFSDASTRFGFDRWFHDFLEFSSTGRLLRYDPRSGETSVVLDRLGFANGVALPRDEAFVVVCETMRFRCIKVWLKGDKAGEAETFVDLPGWPDNIRLGSDGHFWIAVLQLRSPWLDFITRWTFTKRVVASFPALSEWSKGAAKGAMVAQVSEDGTILRVLDDSQGKVINFVTSVTEFNGDIFLGSLATNFVGKLSLARVAQKQGAVSS

SEQ ID NO: 6047 - protein, 102 aa, Zea mays
  VARIANT 80: note = Ancestral polymorphism is D, Derived polymorphism is Y
  VARIANT 69: note = Ancestral polymorphism is C, Derived polymorphism is Y
  VARIANT 67: note = Ancestral polymorphism is M, Derived polymorphism is I
  VARIANT 64: note = Ancestral polymorphism is A, Derived polymorphism is T
  VARIANT 61: note = Ancestral polymorphism is G, Derived polymorphism is S
  VARIANT 51: note = Ancestral polymorphism is E, Derived polymorphism is A
  VARIANT 46: note = Ancestral polymorphism is A, Derived polymorphism is T
  VARIANT 45: note = Ancestral polymorphism is P, Derived polymorphism is S
  VARIANT 43: note = Ancestral polymorphism is C, Derived polymorphism is S
  VARIANT 38: note = Ancestral polymorphism is A, Derived polymorphism is S
  VARIANT 35: note = Ancestral polymorphism is D, Derived polymorphism is Y
  VARIANT 29: note = Ancestral polymorphism is A, Derived polymorphism is V
MKAKGEVVNEETCSCTFTIARGRKWWMKALMEITDPRAYLTHSLPAKRGAEVYEALMEITSPRAYLIHCLPAERGLEVTDGAIEAPKSIVFPQAENRMHAQK

SEQ ID NO: 6048 - protein, 669 aa, Zea mays
  VARIANT 199..669: note = Derived polymorphism lacks residues 199 to 669
  VARIANT 247: note = Ancestral polymorphism is E, Derived polymorphism is V
MEDFARAVEDGLKLSKRLVLPGGVPPPRPPAGMERTMSSASASGPDPRLLPTAPMAYAVVTDPAAIDTPDVPSYQPYVYGHLDPPALIPLQMKEVDLAVDCALDAAHVTLRARWWLHCITRSRDCDVRLVVPLGEQEQGSILGAEVTVGRRSYNTQVIEVEETLENHAKIESGGLLKPHLFFLTISQVEGGADICATFRWSQKLLYDSGCFSVDIPFHFPYFVNPLPKVFMKREKVQLTANTGFSKEVFLQGTSHPLKEKSRQGDKLFFLHEAIVENWSSKVFNFSYSVYSGDLSGGVFVQPSILCDYDDRDSFCIFLLPGSGNRKVFRKAVVFVVDTSGSMQGKPLENVKHAVSTALSELVQGDYFNIITFNDELHSFSSCLEQVNDKAIASATDWMNANLVAEGGTDIMHPLSEAMALLSSVHDTLPQIYLITDGSVDDEHNICQTTKTEVTNRGSKSPRISTFGLGSYCNHYFLRMLASVGKGHYNAALETASIENQIVKWFRRASSTIVENISIDAMTHLDEFEVDSEYIPDLSANSPLCVSGKYRGKFPDTVKAKGYLADMKEVLIELKVQQLKEVTLDKVLVTQHIDLMTAKAWLSAAKQLERKVIKLSIQNGVPSEYTDMVLLQTNLDNTGTQKVKQKLKGQKGRDEQQIPLHGLKLGFGNN

SEQ ID NO: 6049 - protein, 727 aa, Zea mays
  VARIANT 141: note = Ancestral polymorphism is L, Derived polymorphism is S
  VARIANT 167: note = Ancestral polymorphism is A, Derived polymorphism is V
MRRAAPLFLHQARVIRSYCPVTHLSSQACWLNSSDNEEPSQSFAYGDYRSRRLLPLITQALRASNWDAARNISFRECVRLYGSSQSVGLFALIMQAFLPRRIREVRCLIRSIVDYCGNAGSELFELAPMLVSNLGQSMTLLQVYAAVIRIFVESSMFEDALLTYIQAKNIGVDRRLCNFLLKCLVEGNQIMYARSLFDDMKSCGPSPNVCSYSILMSMYTHGERSCLEEAFELLCEMESNGVRPNATTYGTYLYGLCRSRQVTSAWDFLQTLSQSGGPCSNYCFNAVIHGFCCEGQVDKAIEVFHGMKKCGYVPDVHSYSILVDGLCKQGDLLKGYDMLEEMARNGICPNQVSYSSLLHGLCKTGQVALALKIFKNLQDHGFEHDQINYSIILHGCCQHLDLKAISDLWFDMIHHNIAPDVYNYTSLIYALCRHRNLQDALGVFELMLENGLSPNIVTCTILVDSFSKQGLVGEAFLFLDRMHQSLGIVPNLCMYRVMINGLCKTNKYSGVWNVFADMIKRGYVPDVVLYSIIIEGFVKALKLQEALRLYHKMLDEGVKPNIFTYSSLINGLCNDDRLPEAMGLIRDMIGEDLLLDNVLYTSIIACYCRRLNMKAAMEWLKEMERSGVLPDAFVYTCMIDGYSKLPAMDAARLMMEEMEKRKLKPTIVTYTALIIGYLKMGDEKEACMMYESMRHVGIAPDGKLCCILGIGNDRGDCDDSQKAKGVT

SEQ ID NO: 6050 - protein, 307 aa, Zea mays
  VARIANT 248: note = Ancestral polymorphism is H, Derived polymorphism is Y
  VARIANT 145: note = Ancestral polymorphism is N, Derived polymorphism is S
  VARIANT 144..307: note = Derived polymorphism lacks residues 144 to 307
  VARIANT 21: note = Ancestral polymorphism is T, Derived polymorphism is M
  VARIANT 10: note = Ancestral polymorphism is A, Derived polymorphism is V
MISSSSNAVAVLELQQSGFVTVVPTMAWSLARTTSVGRRARCLSTAHVPTTGKREQKGLFDTIFGALYREEQMLETNPILNKVGSKSKPPAVIAAPAPKKAAEESGSGGLSLGRGDANGDIKGFTARRLFTQDQALKLVICILWNSRQMHILPEYRVSIGEGRVVVHPDGLINWIRCVDQAGHQGMERKDHHTIHPEFPTKAFKAHKVYYLNEAKRDELLQFAQGAISGQKINADIARLDNEITQLQHQISSMDALHATSIVNQNKKAQTATEIQATMSMTKLSISYYYILNLMIQLNFPRLRLKSC

SEQ ID NO: 6051 - protein, 172 aa, Zea mays
  VARIANT 129: note = Ancestral polymorphism is A, Derived polymorphism is V
  VARIANT 142..172: note = Derived polymorphism lacks residues 142 to 172
  VARIANT 154..172: note = Derived polymorphism lacks residues 154 to 172
MYVKVSMDDVPYLKMVDIKMYSSYEDLSMALEKMFSCFITGEYCSVLCFCLMHFPLVNLFLTLGGNKKEQRDSGETYQKTDIDFLESEASAFRDDGSTASTAILVGDRLYVANVGDSCAVIPKAGKAMALSEDHKPNRIDEQKRIENACGIVIWAGKHVLFVLLYIGLICLH

SEQ ID NO: 6052 - protein, 266 aa, Zea mays
  VARIANT 112: note = Ancestral polymorphism is E, Derived polymorphism is G
  VARIANT 144: note = Ancestral polymorphism is P, Derived polymorphism is R
MAASARPGERATSFAVACSLLSRFVRQNGAAPAQLGLGIKGEVEQQRTPATINLLPGADGEETERRKETMELFPQSAGFGVKDAAAAPSSTVVAQLEPSCLRSHGQKAKRFEFGNIVIEQENKEKPKQLTIFYGGKVLVFDDFPADKAKDLMQLASKGGPVVQNVVLPQPSAPAAAVTDKAVPVPVISLPAAQADAKKPTRTNASDMPIMRKASLHRFLEKRKDRLNANAPYQTSPSDAAPVKKEPESQAWLGLGPNAVKSNLNLS

SEQ ID NO: 6053 - protein, 306 aa, Zea mays
  VARIANT 299: note = Ancestral polymorphism is I, Derived polymorphism is K
  VARIANT 249..306: note = Derived polymorphism lacks residues 249 to 306
  VARIANT 88..306: note = Derived polymorphism lacks residues 88 to 306
  VARIANT 83..306: note = Derived polymorphism lacks residues 83 to 306
  VARIANT 74..306: note = Derived polymorphism lacks residues 74 to 306
  VARIANT 23: note = Ancestral polymorphism is R, Derived polymorphism is H
MPPASIVPVIGDLRSNRLVCLRRDRGSYRAFVSVDEDGTGRRIRPPSRNALSAVFQQEDEGSRAAQAASSWAEQTGESKRMDQELEPQVQRLTSASTVLRRVLDNPALQDYQENNGFGDLKLSLTVNCPAACTASPSPTGSTGPQARCREADTDRRETVPPQFCNGTSLLKYPEGNELPSDLIDTLLKWIPSNDEELRLRLSSRSTATPHASVAVCMEAITESRMLYLFRSQNVLRPFSVIAAILEDERAPGRVQEEADTAGTCPSQWRCSGDGDQHWHGEAVKPTAAEPHPEEGWIRIKTITGWE

SEQ ID NO: 6054 - protein, 1376 aa, Zea mays
  VARIANT 134..1376: note = Derived polymorphism lacks residues 134 to 1376
  VARIANT 143..1376: note = Derived polymorphism lacks residues 143 to 1376
MEAHAPLDFALFQLSPRRQRCELVVCGNGRTEKIASGSVKPFVAHLRAVEEQASAQPPPPAIRLQLDRPAPWFSKGTLERFVRFVSTPEVLELTSTYDLEMSQLEGARKIYAQGGTGDATSGGTVWSFISAVSESNLCNIWPCLLAAENVTGSAAAVAADITKKELLRAIDVRLSTLKQDLAAACSRASSAGFNPNSVSELLLFANHFGASRLSEACTKFMSLCQRRHDISPQTAQPAVSSHWKVFDDGNVRGSSSSDMSIDEPQVDLGESNNKSTVGGSGSQVHRLSNSQGLEVAAEQQPKPTIPQAIDKQEAETDASPAPAAGGLSRRLSVKDRINMFESQKKEQTPSSGNSNSAGTGRVVPGRGEHRRVPSGASMEKLVRRWSSVSDMSIDLSNNESVNINDKKDNGTPVVTPTSTDLEANSKAKADVDSNGQKDLVTSHSWPYQKDNVPMDPTTTDLCPPSTLSNTLAPHSDGAGNDMVINSSIESESSFGKEAGVIQGLTRMSNHATSNVSTRNHLKSSAKPVEEGLLKNKDILTSTSLEEHVRMIDKEITAVPHEVLVASEQIPQNDIRGLHTKDIHTESEVTGRKDQPSRSFGKVSGGVNPKPKTSSNSRANVKGSSGRANVKGSSGRDEITFTETEFRDVSLQRNRLPRKAEDVGRKVTGGSDSDSSGRQGTNLSRQSSITIQELNFQARVMGPGKGNQDRHGELQMKANELEKLFAEHKLISSRRGKPTDVQVDSTRTVSEVKPITVLHETIHTKQVVKESITTNDFDASELLKMVSNQGFNISTPQKLGILSLEESRGKFYEHYMQKRDAKLKEDWKLQRGEKEAMLKAMHESLERSKAEMRAKFSQSGDVSDSTYVYHCSQKIPPSRSARRNNDQGVDSFLVEEELNSDYLSGDGSSRSADSRKHFPNKVASTQKASVGPIHKRSSRTASSGYGNRRNLPENPIAQPVPSFSDLRKENTKPSPGLSRAAARVQQKSFARSKSIIEESKSILKEDQSRRSQSMRKSQIPDELKDISSGNEDIYNWAPSRISKNQSEGAFAYSARRTGPPKPFLRKGNGTHPVIGIAGFQAAAAMMANALQNGDSGDFEDHQDDSPDDAKEEEEYESIEENFRESDFPADSDSENPRVSHEFGNSDDPGSENGDANFSSEAPAIGGTKFTAFTGNVHDPASDVPAPWSSRLPQLSPYMNDNTDGDTFADSPCGSPPWNSHSLDEITDADVSRMRKKWGSAQMPFAGVSASQQPRKDVSKGLKKLWKFGRKTRGGDGLVNDWVSASTASEYDEDMEDGRDLVVGSSDDFKKSRMGYLASYDDFVEDEVFAEQEQSLRSSIPNPPANFRPREDQLTGRAPRSFFSLSTFRSKGGDARLR

SEQ ID NO: 6055 - protein, 209 aa, Zea mays
  VARIANT 172..209: note = Derived polymorphism lacks residues 172 to 209
  VARIANT 159..209: note = Derived polymorphism lacks residues 159 to 209
  VARIANT 129..209: note = Derived polymorphism lacks residues 129 to 209
  VARIANT 74: note = Ancestral polymorphism is S, Derived polymorphism is Y
  VARIANT 54: note = Ancestral polymorphism is P, Derived polymorphism is L
  VARIANT 50: note = Ancestral polymorphism is A, Derived polymorphism is P
  VARIANT 40: note = Ancestral polymorphism is E, Derived polymorphism is K
  VARIANT 38: note = Ancestral polymorphism is G, Derived polymorphism is E
  VARIANT 33: note = Ancestral polymorphism is G, Derived polymorphism is S
  VARIANT 28..209: note = Derived polymorphism lacks residues 28 to 209
  VARIANT 23: note = Ancestral polymorphism is M, Derived polymorphism is I
  VARIANT 8: note = Ancestral polymorphism is G, Derived polymorphism is C
  VARIANT 7: note = Ancestral polymorphism is S, Derived polymorphism is F
  VARIANT 4..209: note = Derived polymorphism lacks residues 4 to 209
MEAQNGSCGGAPVVLNVYDLTPMNNYLYWFGLGIFHSGIEVHGMEYGFGAHQFPASGVFEVEPKSCPGFIYRRSVWMGTTDLSRAEFRSFIENLAGKYNGNTYHLISKNCNHFTDDVCKSLTKKSIPGWVNRLARVGSFFNCLLPESIQVSTVRHVPTQSAFSDDDMDSVSSSVLGDSDLGELDQHLLPSSTADVHSIDVPPNLAKDLL

SEQ ID NO: 6056 - protein, 538 aa, Zea mays
  VARIANT 46: note = Ancestral polymorphism is Q, Derived polymorphism is L
MAAVAGPLCTWLVAACLSAACDAEEYKQKHCCPGGSGAGGGVMLGLRRRLGARRRGLARSGMAMAVALQAERSVIEKKKPDIKQRRVVVTGMGVVTPLGHDPDVFYNNLLDGVSGISEIERFDCSNFPTRIAGEIKSFSTDGWVVPKLAKRMDKFMLYLITAGKKALENGGLTEELRNELDKTRCGVLIGSAMGGMKVFNDAIEALRVSYKKMNPFCVPFATTNMGSAILAMDLGWMGPNYSISTACATSNFCILNAANHIRRGEADVMLCGGSDAPLIPIGLGGFVACRALSQRNSDPTKASRPWDMGRDGFVMGEGAGVLVLEELEHAKERGATIYAEFLGGSFTCDAYHMTEPHPEGRGITLCIEKALADAGVAREEINYVNAHATSTQAGDLKEYEAIVRCFRQNPQLRVNSTKSMTGHLIGAAGGIEAVASIQAIRTGWVHPNLNLENPEDTVVSSLACVVCVASILVVFCPARSCKSRLDSFFFLFNIMMRNCHLPHRPNRFIYLDLHIEDKWTLQLPRCHRYYREVQTERI

SEQ ID NO: 6057 - protein, 371 aa, Zea mays
  VARIANT 188: note = Ancestral polymorphism is E, Derived polymorphism is V
MESGLLDTAAAAGLCPVAAGRRRVGSTGTARCFLSCSCASRDCRVSASYSHSISRMLSGVRSAARKRLFRSDPAELLGVANWSETGGGGAGGHQHWWTALENNFVLEATDDEYGGVVVDADRLPADRAAFARSLAASLSYWKSVGKKGVWLKLPVDLAEFVPLAVKEGFKYHHAEEAYLMMTYWIPDEPNMLPANASHQVGVGGFVINDQMEVLVVQEKYRGSSLDGVWKLPTGFILASEEIYTGASREVKEETGVDTEFVDVVAFRHAHNVAFHKSDLFFICMLRPVSSEIKIDETEIQAAKWMALEEFVKQPFIQEDHMFQKIMDICIQRLRKCYCGLTPHHVVSKFDDRTSTLYYNVAEPEDVNCSAA

SEQ ID NO: 6058 - protein, 424 aa, Zea mays
  VARIANT 267: note = Ancestral polymorphism is L, Derived polymorphism is S
MIMLDAATNLECCPTASNKRMEDNLPVNVREYQELAKKALPKMHYDYINGGAEDEYTLRENIAAYGRILLRPRVLIDVSKIDMSTSLLGYNMPSPIIVAPTGAHKLANPEGEVATARAAAACNTIMMLSFSSSCRIEEVASSCDAIRFYQLYVYKRRDVSATLVRRAESLGFRAIVLTVDTPVLGRREADIRNKMIAPPLSNLEGLMSLDDFDDAEGGSKLERFSRETLDPSLSWKDVEWLKSITSLPILLKGIVTAEDAVGSLACLVLNRRTGYLYGHCLVSLNCDDSVAASSSEEGRGGGGGRLDRVQPRRPAAGLCAGHHLGARRGKVVKAVAGAVPVLVDGGVRRGTDVLKALALGAKAVMVGRPVFFGLAARGEAGARHVIEMLNKELELAMALCGCRSVAEVTRAHVQTEGDRIRALL

SEQ ID NO: 6059 - protein, 99 aa, Zea mays
  VARIANT 11: note = Ancestral polymorphism is S, Derived polymorphism is L
  VARIANT 41: note = Ancestral polymorphism is P, Derived polymorphism is L
MHSFQMASEDSKDMLKNVDWKTVGGAVTTESSQPVVKKRLPKKIRQVPECYFLPRRSLPSALAIYGAVCAAGVGAGMLIEVWINKKIKEDSAIIWEMDK

SEQ ID NO: 6060 - protein, 188 aa, Zea mays
  VARIANT 4: note = Ancestral polymorphism is S, Derived polymorphism is L
MASSPALPLVLLALLLAPTGLAASGSGGGGGGEKRTRIRVYVHERFTGRNATVGSVAPSLRGGNSTFGEVGVVDDVLRAGPRASSQEVGRYQGLFAGADLADDSGGGGGYFSAITLVFAAGEHRGSTLSLQGRYSFPADGALERAVVGGTGGFRMARGFSLLQVASAPPEAAVFQLDLVVFTPRGHRY

SEQ ID NO: 6061 - protein, 405 aa, Zea mays
  VARIANT 74: note = Ancestral polymorphism is W, Derived polymorphism is R
MGPTLDGAAGGGKKRKRVPPGLADLHDDMLERVLARLPPASYLRLRGVSRRWRAAAESSTFRAACARVTARDPWFLMLDDPDHQDEQRPRYTAAAVVFDAAERAWARWRGAPGPQRPVAAAGGLLLYRDPGTGDLTVVNPLTGAAHALPPPPPPALTRALQAIAMYGAPYRVVLILGELPDLSTVAYDSSTDAWGEEAALSRKPEEEGGGGGGDGTVYFLSKSGDVVATTTQRSAARQYSSAVACGAGADAVAYFLSRSGTVVACDLARRAFAELPRILPAHHEHSVDVAACGGAAYAVVLSEFLDAASLRVWEFARGAWRQVAAMPPAMAHAFRGAKADVNCVGHGGRVMVCVSSSSSSASGCFMCDVRTNRWEELPRRQGGDGDGSTGFVAALSFEPRMEAAV

SEQ ID NO: 6062 - protein, 177 aa, Zea mays
  VARIANT 60: note = Ancestral polymorphism is R, Derived polymorphism is H
  VARIANT 61: note = Ancestral polymorphism is S, Derived polymorphism is F
  VARIANT 72..177: note = Derived polymorphism lacks residues 72 to 177
MKHVGWAQVLGVGAHGRFHQHRRPVPHSPCGGQKRPTGYTSYSPHPPVANAAYCWFTARRSARPASLLCLPCCATIQIWRMPVATRMGLWPRSALSMEASTPRSTASGRWCPAPSSTPSSPRATVIPSSTSPSSTTCPGSGTGSGRITVHRRASARARAAARRCLSAATATAKASSA

SEQ ID NO: 6063 - protein, 282 aa, Zea mays
  VARIANT 126: note = Ancestral polymorphism is C, Derived polymorphism is Y
  VARIANT 82..282: note = Derived polymorphism lacks residues 82 to 282
MHVRITTPFHPAYVTAERIKKAKNLEFLLTAGIGSDHIDLPAAAAAGLTVAEVTGSNTVSVAGDELLRILILLRNFLPGYQQVVQDEWNVAGIAHRAYDLEGKTVGTVGAGRIGRLLLQRLKPFNCNLLYHDRLQIDPELEKEIGVKFEEDLDAMLPKCDVIVINTPLTEKTRGMFNKERIAKMKKGVIVVNNARGAIMDARAVADACSSGHIAGYGGDVWFPQPAPKDHPWRYMPNHAMTPHISGTTIDAQLRYADGVRDMLDRYFKGEDFPVQNYIVKEG

SEQ ID NO: 6064 - protein, 153 aa, Zea mays
  VARIANT 99..153: note = Derived polymorphism lacks residues 99 to 153
  VARIANT 97..153: note = Derived polymorphism lacks residues 97 to 153
  VARIANT 70: note = Ancestral polymorphism is P, Derived polymorphism is S
  VARIANT 50: note = Ancestral polymorphism is L, Derived polymorphism is P
  VARIANT 48: note = Ancestral polymorphism is M, Derived polymorphism is T
  VARIANT 1: note = Ancestral polymorphism is M, Derived polymorphism is I
MATDSEASKAAEVVVDWHKQDKKRMLHAVYRVGDLDRTIKYYTECFGMKLLRKRDVPDEKYTNAFLGFGPENTNFAVELTNFAEVSRPTKLSGFFCRCRPLSKNEVSSSLNANGGTTKKTFKFDRVFTPKDDQGYSDLIILEKEAGDELIKFL

SEQ ID NO: 6065 - protein, 96 aa, Zea mays
  VARIANT 15: note = Ancestral polymorphism is T, Derived polymorphism is M
  VARIANT 38: note = Ancestral polymorphism is E, Derived polymorphism is D
MAIRGVASTREEDMTLEEFKEWLKQFDADGDGRISRNELREALRRRGRGRGWLTAWRSDRALRHADKDSSGFLDDSEIENLVAFAQKDLGMKISTW

SEQ ID NO: 6066 - protein, 531 aa, Zea mays
  VARIANT 249..531: note = Derived polymorphism lacks residues 249 to 531
MPVTRRRAAVAAVAQEEGRDAAIYISSDSDAGSDPEDSESEEEEDTSDEDFIDVSDSEADDGESSDEEGEEDSESEAEAEAEQLGADRSEVACNKIAGLLSSNILEPLYLSPCNFRTDPQSFKHSQNKEFPVGGRSLEGLKLAEYKVYLKKNGLSQTGGMDTCVDRIVLHWRFKDADPRRIYPRSSFCINCKGDVCRGDAVLFKQKVYEKSGKRHAKCIGNRIVAGKVIKESYGKQKQQHTFTTTLLVSIDSSVLEQRTWEITTFASVACQRAQPIQNDDFSSALKGKKKLHKEKHKSRSERPHRQSNITELDKGKKRPAQSSKSDLPNKRSKKEGSQVPSRKKDTGGRMAKKNGPCQDKSICTGQNSSLCKDNREKHSHATFQKKCHAEPLNNGPSGSGWNRTAGGHSQFEGRHITPASHVEANHGNFVSVQHPCVERLQRPTQSREVALAHPGGGHPYVLSSAAMGLRHQNGATAGVHAPAYFRGLPLSQQRAAFPSASTPQTGYHPHPEELFVAPHFRYPRGSAGFRR

SEQ ID NO: 6067 - protein, 574 aa, Zea mays
  VARIANT 507..574: note = Derived polymorphism lacks residues 507 to 574
  VARIANT 472: note = Ancestral polymorphism is S, Derived polymorphism is L
  VARIANT 391: note = Ancestral polymorphism is P, Derived polymorphism is L
  VARIANT 300..574: note = Derived polymorphism lacks residues 300 to 574
MGGCHAKPLTQDADGSPPHAAPATPPPGNATPGPGKKHWAVSPFFAFSTPSPSPAHHLFGGSAASPRKSPAPPGSAPTTPARRILRLPFPPPSPAKHIRAALARRHGPPRPSIPEEGGGEGEGGGGARGLDKGFGFNKGFAAKYDLGDEVGRGHFGYTCAATVKKGARKGESVAVKVIPKAKMTTSIAIEDVRREVKILKALLCEGGELLDRILSRGGKYSEDDAKAVLVQILNVVAFCHIQGVVHRDLKPENFLFTSKDENSHLKAIDFGLSDFVKPDERLNDIVGSAYYVAPEVLHRCYSTEADVWSIGVIAYILLCGSRPFWARTESGIFRSVLKADPSYNEAPWPSLTPEAMDFVKRLLCKDPRRRMTAAQALSHPWIRNYNAIRLPLDILIFRLIKAYIRSSSLRKAALRALSKTLTVDELFYLKAQFSLLEPDRNGCITLDNIRMALTREATDAMKESRVQDILVSLSALQYRRMDFQEFCAAAVSVHQLEALDRWEQHARSAYEYFEKEGNRAIVIDELASELGLSPSVPLHVVLQDWIRHTDGKLSFLGFVKLLHGMSSRSLSKMR

SEQ ID NO: 6068 - protein, 444 aa, Zea mays
  VARIANT 29..444: note = Derived polymorphism lacks residues 29 to 444
  VARIANT 39: note = Ancestral polymorphism is I, Derived polymorphism is M
  VARIANT 284..444: note = Derived polymorphism lacks residues 284 to 444
MAMGLEDGEYGAFMEKFKMLPSQSQHQQQLPLHGLTFAIKDIFDIGGRVTGFGNPDWARTHAPAGATSPVVLAALAAGAISIGKTVMDEMAYSINGENAHYGTPTNPCAPDRVPGGSSSGSAVAVAAKLVDFALGTDTGGSVRVPAAYCGIFGLRPSHGLVSTENVIPMSQMFDTVGWFARDLSMLSCVSNVLLPLAADNTIKQPTHVTIPKDCFEILGSLSDQTYQILNASVAKRFGNDAVDNRNLGEFVSANVPTVGKFISDFSRSEAPSVPALSVISYVMRCLQRSEFKANHGEWVKTVKPNLGPGIRERVHEAIASEDGPMEDFHVLKTEFKSALSALIKDDGILAIPTVPGSPPKLRMEAVALENFRARAFSLLSIAGLSGFCQLSIPLGVRHGVPVSVSLVACHGADRFLLSVAQELYGTLKQETKKAWSWSSSDSSL

SEQ ID NO: 6069 - protein, 267 aa, Zea mays
  VARIANT 51: note = Ancestral polymorphism is G, Derived polymorphism is S
  VARIANT 53: note = Ancestral polymorphism is A, Derived polymorphism is T
  VARIANT 75: note = Ancestral polymorphism is W, Derived polymorphism is G
  VARIANT 179..267: note = Derived polymorphism lacks residues 179 to 267
MQSNQKLQGLREELNAIVPYLEEMRKKKVERWDQFVDVIEQIKKCWIVSTGNAPSVPLLLLKFFLLLPSNLQLRWTLNPYMSGAIDPALVLEQIEAHIATVKEEAFSRKDILEKVERWLNACEEEAWLEDYNKVAMLDDNRYNAGRGAHLTLKRAEKARILVNKILGLVDVLTTKIVAWEAERGKEFTYDGNQEQSGSSSLGSSGMLYEGSSGDNAPFDINDFPQLNGRPNSAEGGQGQYGNTAMLPNIPMISRLYITSDYSYLKDH

SEQ ID NO: 6070 - protein, 436 aa, Zea mays
  VARIANT 157..436: note = Derived polymorphism lacks residues 157 to 436
MEAAAAVLPTLVPSGSAVVSRRSSLATVVPLVCCGLLHMDRSLCTCVLALCCAGGGAPRLPRVSRRRWSHPPREARRRSPTPGLLSPPLSLQRYLLLPLFPESSGQPAELFDRLPLILVWLAGLLSLLLLLGLSAFGVYMGWMSPTVVADMGLELLSVTFIFSVIVSFALYIAGIKSGHKSSSLRPHVSGSFMQDWWFGVQLNPHFMEVDLKFFFVRAGMMAWLFINLSLFAKSYFAGSANLSVILYQFFCAWYIIDYFVHEEFMTSTWDIIAERLGFMLVFGDLVFIPFTFTIQGWWLLKNKVELSLLSGLANLCIFLIGYLVFRGANKQKHVFKKDPKAPIWGKPPKVVGGKLLASGYWGIARHCNYLGDLLLALSFSLPCGVSSVVPYFYPTYLLILLVLRERRDEARCSQKYREIWAEYCKLVPWRILPYVY

SEQ ID NO: 6071 - protein, 115 aa, Zea mays
  VARIANT 58: note = Ancestral polymorphism is P, Derived polymorphism is S
  VARIANT 51: note = Ancestral polymorphism is D, Derived polymorphism is Y
  VARIANT 50: note = Ancestral polymorphism is P, Derived polymorphism is L
  VARIANT 46: note = Ancestral polymorphism is G, Derived polymorphism is D
  VARIANT 25: note = Ancestral polymorphism is C, Derived polymorphism is F
  VARIANT 11: note = Ancestral polymorphism is R, Derived polymorphism is T
  VARIANT 8..115: note = Derived polymorphism lacks residues 8 to 115
MPEFEASQFLRREADVSVDDVYGHCWKGEADVEDVGAEYGFVFAPGAKRPDGWPYRFPSTNTTILYHWSSTLCDLEPLNPSDRVTSYAMHLDRPPAFLKSNLYMLHVLVLNTGGR

SEQ ID NO: 6072 - protein, 129 aa, Zea mays
  VARIANT 9: note = Ancestral polymorphism is G, Derived polymorphism is V
  VARIANT 21: note = Ancestral polymorphism is S, Derived polymorphism is F
  VARIANT 28: note = Ancestral polymorphism is K, Derived polymorphism is N
MGEGSDEDGFPVSFSETKKSFEMVSNKNGGKDKETSNEDRKRKSGAISDCGDSSGELKAEMDGASKEKKKGNDKSTDMNTEKVNNEEKEVKQHDSPADPISTKQKKKKNKNKSASRGDGSEQSAKTTIC

SEQ ID NO: 6073 - protein, 242 aa, Zea mays
  VARIANT 81: note = Ancestral polymorphism is E, Derived polymorphism is K
  VARIANT 86: note = Ancestral polymorphism is D, Derived polymorphism is H
  VARIANT 232: note = Ancestral polymorphism is L, Derived polymorphism is R
MDPKPDASAPAAVPAEHAAYPRLSPEDIAPPPPPVVPPSGANPYVLSAPSPNPPAKSARENLREMFGMVGKKFNEAARKTEGIAGDVWQHLKTGPSITDTAMGRIAQISKVISEGGYDKIFQQTFECSPDEKLNKAYVCYLSTSHGPIMGVLYLSTVKIAFGSDSPVKYVTEDNKTESSFYKVVLPLHHLRSVTPTASQQNPAERYIQVVSVDNHEFWFMGFVNYDSAVKNLQESVRVVHGA

SEQ ID NO: 6074 - protein, 315 aa, Zea mays
  VARIANT 116..315: note = Derived polymorphism lacks residues 116 to 315
MDMDFNGDADSFALDFIRDLMLGGDSSIPVPSPVAASSDDVTCPVLPPQLEFQSVSFLPHQQRQGYIDLTTSECVGAAPAAATVVGEAVFRAQEPAPPVMIKFGTEPSSPLATTRQPLTISVPPSSYAWAAVEDYRKYRGVRQRPWGKYAAEIRDPKRRGSRAWLGTYDTPVEAARAYDRAAFRMRGAKAILNFPNEVGTRGADLWAAPTANKRKRQQMVEGEDDPEPEVEVVPMVNKAVKTEAQSSMTTQASSPSPSSTVASTTTGTTGGAGWLPVTPSSGSSEQYWETLLRGLPPLSPLSPHPALGFPLLSVN

SEQ ID NO: 6075 - protein, 78 aa, Zea mays
  VARIANT 53: note = Ancestral polymorphism is M, Derived polymorphism is T
  VARIANT 49: note = Ancestral polymorphism is A, Derived polymorphism is T
  VARIANT 46: note = Ancestral polymorphism is R, Derived polymorphism is H
  VARIANT 45: note = Ancestral polymorphism is R, Derived polymorphism is H
  VARIANT 35: note = Ancestral polymorphism is P, Derived polymorphism is L
  VARIANT 32: note = Ancestral polymorphism is S, Derived polymorphism is L
  VARIANT 15: note = Ancestral polymorphism is L, Derived polymorphism is P
  VARIANT 3: note = Ancestral polymorphism is T, Derived polymorphism is I
MATAAARATLPRPLLSLPPFLLPPHPPCVSPSLAPPSIAVGNTRRRPCAPRHMLLQAVVPVSAVEGLVPVMLKKKPID

SEQ ID NO: 6076 - protein, 354 aa, Zea mays
  VARIANT 70: note = Ancestral polymorphism is A, Derived polymorphism is V
  VARIANT 82: note = Ancestral polymorphism is S, Derived polymorphism is N
  VARIANT 92..354: note = Derived polymorphism lacks residues 92 to 354
  VARIANT 119..354: note = Derived polymorphism lacks residues 119 to 354
  VARIANT 193..354: note = Derived polymorphism lacks residues 193 to 354
  VARIANT 283..354: note = Derived polymorphism lacks residues 283 to 354
MFGTCEQWSARGSSAAEEAALSACSAQGCRNQQCCVPQADGWCPYWETHESSAAAVDSTDPPAEKHEYQVEVNRLMVLIVHNLYSNKEVFLRELMCGNGFCCIARFMEEHKNTLGTIRYDSGETVRSAKFISRKQWVVAGADDMFIRVYNYNTMDKVKVFEAHTDYIRCVAVHPTLPYMLSSSNDMLIKLWDWDKGWVCTQIFKGHSHYVMQVTFNPKDINTFASASLDRTTKIWSLGSPDPNFTLDGHQKGVNCVDYFTGGDRPYLITGSDDSTAKTKRCVQTLEGHTHNISVVCFHPELPIIITGSEDGTVRIWHSTTYRLENTLNYGLERVWAVGYMKGSRRSEFRHPNAV

SEQ ID NO: 6077 - protein, 150 aa, Zea mays
  VARIANT 113: note = Ancestral polymorphism is A, Derived polymorphism is V
MRGGGGGGMMDDEERVGHAEIPTSFGPELRACLRCRLVKTYDQFRENGCENCPFLEMDREHDNVVNCTTPNFTGIISLMDPSRSWAARWLRIDVPICCTVALLTEIIYQCHYAGRFIPGCYTLAVSEELPEEYQGICQDNNVQYVPPKRV

SEQ ID NO: 6078 - protein, 350 aa, Zea mays
  VARIANT 94..350: note = Ancestral polymorphism lacks residues 94 to 350
MERPAPVRKSHTSTADLLIWPEGAPQESPAGATPPSNRRPHQPSEALRKVVFGGQVTEEEAESLNKRSPEIYGTTLGTVISFVCAVVDLCCCGWRNSLDLRLVHGGSCGSPSRSFSPFRKPCSAPKWKEMTGSGIFAAGGEAEEDESANASATPIRTAPKNYQTNPTAFSQTQAISTISHISFSEEESISPKKPTSIAEVAKQRELSGTLLSEDDSKMKKQISDLKSKELSGHDIFAPPEDPRPRNSENGSTSQTPGKNAHVSNFKFGEADEDGMVKTAKKIPTKKFTDLAGNIFKGDETPPGTAEKHLSTAKLKEMTGSDIFADGKAPSRDYLGGIRKPPGGESSIALV

SEQ ID NO: 6079 - protein, 213 aa, Zea mays
  VARIANT 134: note = Ancestral polymorphism is R, Derived polymorphism is L
  VARIANT 110: note = Ancestral polymorphism is G, Derived polymorphism is S
  VARIANT 97: note = Ancestral polymorphism is A, Derived polymorphism is V
  VARIANT 75: note = Ancestral polymorphism is A, Derived polymorphism is T
  VARIANT 26: note = Ancestral polymorphism is G, Derived polymorphism is C
  VARIANT 24: note = Ancestral polymorphism is G, Derived polymorphism is D
  VARIANT 10: note = Ancestral polymorphism is H, Derived polymorphism is N
MDGACVAVCNLRCEISTVSVTGLGCGGGGELFLRCHVPAGGGRAIQIDSRGAGQTGGEALLWRDVASLSCDGSPACVRQLVDQGSVVFEVRRRRGRAALLGRVRGSELVGRAEVPWRDAGDLGLGAAAATLERRVELAAPAIGSRRVPAREAAVAPVLYARISVRLSETAVPVSRRRADASARQHGGESGCEWSVGDDDAFAAVACAVDDAFE

SEQ ID NO: 6080 - protein, 116 aa, Zea mays
  VARIANT 6: note = Ancestral polymorphism is R, Derived polymorphism is C
MGAESRRRGFLLAYNSARYVGQKLLLSRHRAPNKLEPLSPAASAASPSAAPKPPRKRPRVSRRPPPTVITTDVSNFRAMVQEFTGIPTPLPFAPHHLAALPAARSSVALPTIPPRQ

SEQ ID NO: 6081 - protein, 329 aa, Zea mays
  VARIANT 199: note = Ancestral polymorphism is L, Derived polymorphism is I
  VARIANT 242: note = Ancestral polymorphism is S, Derived polymorphism is F
MTKHTAFAGADGGTTAAAAVTLCAPPRARGARRVAAGSLPELVRRHADLDDWMEKHPSALAGFESVLAAAEGKQVVMFLDYDGTLSPIVKDPDSAVMSEEMRDAVRGVAEHFPTAIVSGRCRDKVFNFVKLAELYYAGSHGMDIKGPTAQSKHTKAKAEAVLCQPASAFLPVIDEAYRALTARTAPIPGATVENNKFCLSVHFRCVQEEKWRALEEQVRSVLKEYPDLRLTKGRKVLEVRPSIKWDKGNAIQFLLECLGFADSNNVFPIYIGDDRTDEDAFKVLRGMGQGIGILVSKIPKETSASYSLREPSEVKEFLHMLVRSKQRRD

SEQ ID NO: 6082 - protein, 308 aa, Zea mays
  VARIANT 186..308: note = Ancestral polymorphism lacks residues 186 to 308
MEAVGEEKGATVAEEGKMMKEQGEKGVVASTSEAEKEKMVEAKGEKAVAASEAEGGKMVEGQGEKAVATSEAEDVKMVEGKGEKAVATTEAEDVKMVEGKGEKAVATTEAEDVKMVEWKGEKAVAATEAEIGTSEPKDVAGGRLITLKSSDGKVHRASVAAAQLSVILSGMIEEVVTDDEVVIVPLVDGPTLVTVLEYCTKHAEVAAAARGTSAVAFATASKALEAWDRDFLDRLTMDALHDLFVASNFLEIQGLLNAIAQKAADVIKGKTTEQIRDAFNIVNDLTPEQEATAAELRRKYTWDYHPEA

SEQ ID NO: 6083 - protein, 140 aa, Zea mays
  VARIANT 54: note = Ancestral polymorphism is G, Derived polymorphism is S
  VARIANT 38: note = Ancestral polymorphism is A, Derived polymorphism is G
  VARIANT 23: note = Ancestral polymorphism is Q, Derived polymorphism is P
MARLGLLALAVAVLALASGVASQAPGPAPSADCASALAGLMGCLPYVQQGSTQGKPDRECCAGVKAALKSPATVVCLCAAVGQNYGMPVNLTRGAGLPAACGEDPAALSKCNSQYSAALVSALTTAVNQISCIVIWSLCN

SEQ ID NO: 6084 - protein, 258 aa, Zea mays
  VARIANT 30: note = Ancestral polymorphism is Q, Derived polymorphism is L
  VARIANT 34: note = Ancestral polymorphism is H, Derived polymorphism is R
  VARIANT 168: note = Ancestral polymorphism is G, Derived polymorphism is V
MVPWEGYVSDETMGTFSPIVLYWLYAGGYQLILHRRPLERYRLHTRDEEEEKNLVSLSTVVRGVLLQQLVQAIVAMILFMVTSDSSITVVQPPIVVQIFQFLVAMLVMDSWQYFVHRYMHQNKFLYRHIHSQHHRLIVPYAIGALYNHPLEGLLLDTLGGAISFLVSGMTPRTAMFFFCFAVLKTVDDHCGLWLPYNIFQHLFQNNTAYHDIHHQLQGTKYNYSQPFFSIWDRMLGTHMPYDLVSRKEGGFEARPSRD

SEQ ID NO: 6085 - protein, 355 aa, Zea mays
  VARIANT 247: note = Ancestral polymorphism is L, Derived polymorphism is Q
  VARIANT 226..355: note = Derived polymorphism lacks residues 226 to 355
  VARIANT 158: note = Ancestral polymorphism is W, Derived polymorphism is R
MQAPREGYGLATMDFEYVPASPGSSRWAGESAARRRQRRLSSPSLRTYLTPAFDAVAGGEGGVSGYSSSSSSGGLELGFDASLLRYRRSCLAASADLDSRVLLYSPQSLPPPPPQMRAAYMPADDEVWAPGVSHYGSKHEVMSFEVHYRTDRRLLLCRFYVPWWTMLPQLAFAVALLLKGMYKYNDDACLGACRQLMPYWFPSLLVQAPCLRSFFSKTTNSLRLEKVGDWRENLDVAIVKLGLICSQYCPMAGRLTGAPGFQDSENRIAFVSPSRTSSNLHTTVLGASTPVKLPAELQLPEGSAELPTPKPEATPSALKLSADPEPDVDADEITEALYGGSGHRRLPIFREICPE

SEQ ID NO: 6086 - protein, 655 aa, Zea mays
  VARIANT 445..655: note = Derived polymorphism lacks residues 445 to 655
MATGADLTSPTGAAAAAAAARKDRHIVSWSSEEDGVLRAQIALHGTDNWTIIAAQFKDKTARQCRRRWYNYLNSECKKGGWSREEDMLLCEAQKVLGNKWTEIAKVVSGRTDNAVKNRFSTLCKRRAKDDELYQENGVPCSNTNAKKVLTETGRLTPGGAGSLVHIKQTRSSSYNLKENLVPNMKLFELEKSTQDARQPLATISSNNQDNVNTVKSQNLVPTTKQLLGPEQHCVKREGNFLKKDDPKVATLLQQSDFLCSLATKIKSDNTSKSMDEAWQQLQDHLVKKEHNKVPENSGSEIASLLEELDDLIVDPYERKDEDEQKLSEHNGRTDVDNDHCNGSSQTSIVVTTNMVPEEMMGDCPVDNCNEDSSLCRKVLSGSTEPCPGAKMTGCGNLSEDQVAEGSVLQRVESISPVITDIDDLLVDPYESEAEDEEKSGEQNGQIDVHAEQCFGSSQTIIEVISDMAPDEVMETCSADNREEHSSICRNVLSGSMAPCPGAEIPTSEKMSELAEDSRLQCMEFASPVLANFASKECGETPEPQVLNEIVEDSRLQCIEFNSPAHTILPDKTGAENFASPSFDVVAKDSKPPSLEFTSPAHTVATFQPYADGIPTPKFTASERSFLLSVLELTSPGSRPETSQQPSCKRALLNSL

SEQ ID NO: 6087 - protein, 193 aa, Zea mays
  VARIANT 80: note = Ancestral polymorphism is R, Derived polymorphism is G
MVHVNFYRNYGKTFKKPRRPYEKERLDAELKLVGEYGLRCKRELWRVQYALSRIRNAARELLTLDEKNPRRIFEGEALLRRMNRYGLLGEGQNKLDYVLALTVENFLQRRLQTIVFKNGMAKSIHHARVLIRQRHIRVGRQLVNIPSFMVRVESEKHIDFSLTSPLGGGPAGRVKRKNQKKASGGGDAEEDEE

SEQ ID NO: 6088 - protein, 243 aa, Zea mays
  VARIANT 80: note = Ancestral polymorphism is R, Derived polymorphism is G
MVHVNFYRNYGKTFKKPRRPYEKERLDAELKLVGEYGLRCKRELWRVQYALSRIRNAARELLTLDEKNPRRIFEGEALLRRMNRYGLLGEGQNKLDYVLALTVENFLQRRLQTIVFKNGMAKSIHHARVLIRQRHIRFVYMLLIPRLCINVSCILKFSQRVKVCNCGSEQFLCFLCVYVLCSFKFWHSLSISYVSYEFSITVIVCAQFSLCFAAAGCMLVVKTHLTLDGPYDEKPCAILTTVV

SEQ ID NO: 6089 - protein, 119 aa, Zea mays
  VARIANT 18..119: note = Derived polymorphism lacks residues 18 to 119
MLRAAVAAKTPLGIKAKEAMNKGELVSDDLVVGTIDEAMKKPSCQKGFILDGFPRTVTQAQKLDEMLAKQGANVDKVLNFAIDDAVLEERITGRWIHSASGRTYHSKFAPPKSPGVDDT

SEQ ID NO: 6090 - protein, 255 aa, Zea mays
  VARIANT 113: note = Ancestral polymorphism is R, Derived polymorphism is M
  VARIANT 102: note = Ancestral polymorphism is A, Derived polymorphism is S
  VARIANT 44: note = Ancestral polymorphism is E, Derived polymorphism is K
MIALVRLAGRAASRSRVGIAAAAAPPPVGLSVQRRRAFQGVRMETGGSKGGRGALVVLEGLDRSGKTSQCARLLSFLKGKGYNAEGWRFPDRATSVGQMISSYLANDSQLDDRTIHLLFSANRWEKRALMESKLLSGTTLIVDRYSYSGVAFSAAKGLDIEWCKAPENGLIAPDLVIYLDVQPEKAAERGGYGGERYEKIEFQKKVAEHYHSLRDSTWKVVDGFLPMETVEEKLRDLATSCIQDCQGNPLTNLAW

SEQ ID NO: 6091 - protein, 267 aa, Zea mays
  VARIANT 104..267: note = Derived polymorphism lacks residues 104 to 267
  VARIANT 122..267: note = Derived polymorphism lacks residues 122 to 267
MSGNDDKPHAAADRIKAATLSVAKGLSRAQAERAATAAARNVNAYGQKEEGPSRWQERKEAKRQMYLMSTEKAAKLGTVKPKASETSSVGAYTQCQKCFQHGHWTYECKNERVYISRPSRTQQLKNPKLKKSVPVSYQFENPDIIKEKEEEQKMMKEKQKKEKAERKKGKSKRKHRSPSDSDSSNSAASVFDSDSESSGSEYSSGTSSSYSSSDSEDKKRQHRRKQKKRRHRRDSTSSASSESESASDSDSDDKSSRRKSRRRGGRR

SEQ ID NO: 6092 - protein, 398 aa, Zea mays
  VARIANT 84: note = Ancestral polymorphism is C, Derived polymorphism is Y
MAIHPRTTGGRRQPLPLPLKGALLAAIAVATALSVLFVLSFTDTLTFTDTLPYLGFRPRDVDKRDGNRRYLYWGSRVDCPGKHCGSCAGLGHQESSLRCALEEALFLDRVLVMPAKMCLSSVHNTKGVLQSSNATSQQRWETGSCAMESLYDIDLISRTVPVILDNPRSWYEIISRSTKLGEDGLVVHVQGVSRAELKQNSNYSGALLINRTASPLAWFMECKDRTKRSSVMLPYTFLPTMATRKLRDAANKMKEILGDYDAIHVRRGDLLKNRKDRFGVERSLHPHLDRDTRPEFIKKRIAKWIRPGRTLFISSNERTPGFFSSLSDKYRLAYSSNFSSILNPIVKNNYQLFMVERLIMQGARTFVKTMKEFDEDLALCDDPKKNTKDWREPVYTDD

SEQ ID NO: 6093 - protein, 501 aa, Zea mays
  VARIANT 3: note = Ancestral polymorphism is K, Derived polymorphism is N
MAKVAALTITLLGLLVSVTCQGSTYPAQQQQEASSSSSSPGCILRGWIPFLPPCRDDQAPTPNPLPPPSGAGLTVGYYKNCPGAEGIVREAVEKAMDNGNRGIGAGLVRIFFHDCFVRPNEFGLGDNGGKKPKSDIHESGKVPLIPVNQKTSSSEFKEAMFATDPQTNECDKCNEEGENLGDENNEKVDFEDSDEDLLSSQELNNFVKGMGVEIADEQELEMDEGELLKVQDEQQTGKDKKGKAKLGCDASVLLRNTSGSSNQTEMFGLPNINSLRGFQVIDDAKAELEKACPRTVSCADIVAFAARDATRNLSYGAIDFQMPAGRLDGRVSLKEEAEKNLPGPFDSLDDLQKSFAAQGLGFNDMVTLSGAHSIGVARCRFFTNRLPPNPSDMDRDLARSLKATCDQNGLDSKVVQDPVTPVALDNQYYKNVHNGKVLFTSDAALNSTDDARKVVDGFANNAVDWYRAFADAMVKMGNIRDRTINRPKPEIREKCFIYNTY

SEQ ID NO: 6094 - protein, 623 aa, Zea mays
  VARIANT 116..623: note = Derived polymorphism lacks residues 116 to 623
MASLEGDRWSEIVASGRARPPRVGVVYGRRLVEESSGRANMETRASFSGLRRPSFVPRKRTSWNRSLSIRGRESIFVAPGANLQQKPCEAMKRPPKPCNRVLTLLFLHAYFSEFVESCCLQKKRLGGPPDLSKEKAYFEEIDAFDLMEESPSPKNFASWTKGMGQNLIIHDLPAILERWKISTLARRVSSEPLFDIVETPILPSVLSNSSTSNNGSETYTAGRAISVSYTDISLKSIAEDSLITSFGKVKIKEEPVEASIPWNGEALTAFDQLLMVCRQSAPVTLAEVFSAYCELGSIKKLGEGTYGEAYRAGRTVCKVVPFDGDLLVNGESQKRSEEILEEVLLSLTLNNLRADRGGDVKTNSCNGFIETKDFRVCQGPYDPFLISAWEDYDAKRGSENDHPKEFTREQCYIVFVLADGGTDLESFALVEYNEVHSLLVQVTASLAVAESACEFEHRDLHWGNILLAQEETPDTNHTMSFTLQGKRMHARTFGLNVSIIDFTLSRINTGTAILFLDLSADPALFQGKKGDKQAETYRRMKQITQEHWEGSFPKTNVVWLIYLVDMVLQKLKSPAHGNKIERELRSLKKRLASYESAGDCLRDPFFADVLLIEDDQVPSMPPL

SEQ ID NO: 6095 - protein, 528 aa, Zea mays
  VARIANT 63..528: note = Derived polymorphism lacks residues 63 to 528
  VARIANT 148..528: note = Derived polymorphism lacks residues 148 to 528
  VARIANT 318..528: note = Derived polymorphism lacks residues 318 to 528
  VARIANT 491: note = Ancestral polymorphism is L, Derived polymorphism is Q
  VARIANT 512: note = Ancestral polymorphism is S, Derived polymorphism is L
MRRYNILLAQPPNVSQALTAAAKHVWLWKDLVAGEPPLAESPYISSITNGSVDHSNASKNMDSDSSVATPHSSTQGQNSIPCDQQKGGNSKADKQSKVRQPRKNQSDEASVDGLPGSPKGSTAPEPNQSQPSSSSLPSSDLQDEGGAQVVQLNTQKNQPSSQPKKPVKSTLSHQKSVPHDFYHGKKPGASTDSSSKNGAPEVTNNGRPRQQKPQSSKQPRQQKPVNHRPHGGSSGNFQSSNSHRSNSCPALAGHNGIPTAPMQFWPSGPHYHGPPINYPDTDRLNISEYPSGIHNNQGLHANYHPNHPGAHHIIQPGYNGYSYRPPTRPNMPSNMQNIGHWGANPGCPQPSSDPQDLVRYILGALEVLKTEKIPPTEQYITDCICYGDANLPKFDVKKALQVAMQHQAVVKKKLGKMSLFLRKDEDLWKCVNIMDDNAKYPKETLDTVHAFMSSAPAYPEIKSSQSRYQAATMFKKTCLKHLALAEVLQVLNVIINTKKWLVPHSSGWQPLSFNIIVADATTAASEKA

SEQ ID NO: 6096 - protein, 135 aa, Zea mays
  VARIANT 80: note = Ancestral polymorphism is L, Derived polymorphism is S
  VARIANT 73: note = Ancestral polymorphism is I, Derived polymorphism is V
  VARIANT 16: note = Ancestral polymorphism is S, Derived polymorphism is C
  VARIANT 13: note = Ancestral polymorphism is P, Derived polymorphism is H
MRSSEAMELLGFPPYSRPSPSEVKAAYRRMVMESHPDRVPTHLKSQAESKFKEVRCKPFPNCVTSELDRLRKIAEAYSCLKDGRRSGSRMEVHAVHVMRSGVPTSHGRSNRTLVKAPFLLIMFAAVSFGAFSASR

SEQ ID NO: 6097 - protein, 478 aa, Zea mays
  VARIANT 261..478: note = Derived polymorphism lacks residues 261 to 478
  VARIANT 114..478: note = Derived polymorphism lacks residues 114 to 478
  VARIANT 50..478: note = Derived polymorphism lacks residues 50 to 478
  VARIANT 36: note = Ancestral polymorphism is I, Derived polymorphism is T
MRMGKYEMGRTLGEGHFGKVRLARHADTGRPFAIKILDRQRILAMKIHDQIKREIATLKLLKHPNVVRLYEVKLVSASKTKIYMVLEYVNGGELFDKIALKGKLTEKEGRKLFQQLIDAVGYCHEKGVYHRDLKPENVLVDAKGNIKVSDFGLSALPQNQQVCHPSSLVSDQSESFCLCVPKMTALFFFPQKDGLLHTTCGSPNYIAPEVLLNKGYDGSISDVWSCGVILYVMLTGNLPFDDQNVVVLYQKILKGNAHIPKWLSQGAQDILRKILDPNPVTRIDVDGIRAHDWFKQGYAPAMPFSDDEEDISMDEDSLNITEHNDIQDKIAINQINAFQLIGMSSCLDLSGFFEKEDVSERKIRFASNYSPAYLFEKIESIVRKMGFQVHKSNGKLKVIQDCKGLANSRGQESLLISAEVFEINEYLYVVELKKSSGDCSLYRKLCETLSEDLGTCKSQQFLKQDSIRQDIGRYNSSF

SEQ ID NO: 6098 - protein, 369 aa, Zea mays
  VARIANT 303: note = Ancestral polymorphism is R, Derived polymorphism is H
MPPTGDDPSAAAGISFPDAGGGGDSEDGDFAGSHLLDPTDPGLPNPTTSSATGLPHAIPAAGSGGGPVTSGNGGERRPLFQRLWTEEDEIVILRGFAEFTAARGTAFASHQYDTDPFYEDMRRRLQLDFSKSQLVEKLRRLKRKYRNCVSRLRESGATFTFRSPHEQAIFEIARNIWRPANKHGRDPSADSDDEDAAAAAATQIPANTSPNGEVRSPSSARQRRRRRATEFTPATNMLQPPQPVPLSVSVPVKTDDSLPAQPQTPMPTMDGSEPVRLPVVSPQSGVSDAEKTCLTPLFREIIHAAMNVGANPFGAKLPEPPLGLPLPMEGEKWRRQRILELEVYLKRIELLQDQAKATLEELKSSTPGT

SEQ ID NO: 6099 - protein, 528 aa, Zea mays
  VARIANT 237..528: note = Derived polymorphism lacks residues 237 to 528
  VARIANT 25: note = Ancestral polymorphism is H, Derived polymorphism is D
MGLAWMVTAAVAAVLASWAFNALVHLVWRPYAITRRLRAQGVRGPPYTFFTGSLGEIKRLRAKGATVTLDVDDHDFIPMVQPHLRKWIALYGRTFVYWTGARPNVCVADVNVVRQVLFDRTGLYPKNLMNPHISRLLGKGLVLTDGNDWKRHRKVVHPAFNMDKLKLMTATMSDCARSMISEWDAQLQKEESGRDGHGHGHVEEELSSRFEELTADVISHTAFGSSYSEGKRVFLAQRKLQHIAFSTIFNVQIPALKYLPTEKNLRTRKLDRQVRAMLMDIIEARLASKDTAGGYGNDLLGLMLEACAPPPEHHGEMAPTTLSMDEIVDECKTFFFAGHDTTSHLLTWASFLLSTHPEWQHRLRDEVRRECGDDEVPTGDALNRLKLVNMFLLETLRLYGPVSLIQRKAGSDLDLGGIRVPEGAILTIPIATIHRDKEVWGEDAGEFRPERFENGVTRAAKHPNALLSFSSGPRSCIGQNFAMIEAKAVVAMILQRFALELSPKYVHAPMDLITLRPRHGLPMLLKRL

SEQ ID NO: 6100 - protein, 529 aa, Zea mays
  VARIANT 284: note = Ancestral polymorphism is A, Derived polymorphism is V
MGLAWMVAAAVAAVLASWAFNALVHLVWRPYAITRRLRAQGVRGPPYTFFTGSLGEIKRLRGEGAAVTLDVDDHDFIPMVQPHLRKWIALYGRTFVYWTGARPNVCVADVNVVRQVLFDRTGLYPKNLMNPHISRLLGKGLVLTDGDDWKRHRKVVHPAFNMDKLKLMTATMSDCARSMISEWDAQLQKEESGRDGHGHGHVEVELSSRFEELTADVISHTAFGSSYSEGKRVFLAQRELQHIAFSTIFNVQIPALKYLPTKKNVRTRKLDRQVRAMLMGIIEARLASKDTAGGYGNDLLGLMLEACAPPPEHHGEMALTTLSMDEIVDECKTFFFAGHDTTSHLLTWATFLLSTHPEWQHRLRDEVRRECGDDDEVPTGDALNRLKLVNMFLLETLRLYGPVSLIQRKAGSDLDLGGIRVPEGAILTIPIATIHRDKEVWGEDAGEFRPERFENGVTRAAKHPNALLSFSSGPRSCIGQNFAMIEAKAVVAMILQRFALELSPKYVHAPMDLITLRPRHGLPMLLKRL

SEQ ID NO: 6101 - protein, 156 aa, Zea mays
  VARIANT 133: note = Ancestral polymorphism is S, Derived polymorphism is G
  VARIANT 111: note = Ancestral polymorphism is A, Derived polymorphism is T
  VARIANT 98: note = Ancestral polymorphism is V, Derived polymorphism is L
  VARIANT 19: note = Ancestral polymorphism is C, Derived polymorphism is Y
MGRLEVLTATDRLLPRSACRYQRLLGGGTSPPPPQPMSGSVVRARRPLRLRRRACKAAGRWWGASATTTTTASGKRLRPLRLVRLLLLLPARRVAALVAELVRRLAAAEAAADCPAIVFSSQWGLPVLSHSASCRSSRLRALYLDRNLSAGTGSPC

SEQ ID NO: 6102 - protein, 134 aa, Zea mays
  VARIANT 45: note = Ancestral polymorphism is A, Derived polymorphism is D
MQIYLVCREYGRVRSGSGPHLVRQCFFLCSWTNLEFLRSSSVKLAVIFVMMNPVMAKPVRKGQLRFHSRRKKTGHGSNVFISSASGLLEISYLRSSASAFASGEKWMGGEWNMSVRAGAASVRARLGGGRGMGR

SEQ ID NO: 6103 - protein, 57 aa, Zea mays
  VARIANT 37: note = Ancestral polymorphism is A, Derived polymorphism is S
MKTFDPWPVFFRREWKRNWPFLTGFAITGFIITKMTANFTEEDLKNSKFVQEHKKKH

SEQ ID NO: 6104 - protein, 201 aa, Zea mays
  VARIANT 29: note = Ancestral polymorphism is G, Derived polymorphism is C
MAAPRPLLRRMLSFREPLLLLPCLLSVLGAAASALARSHASLLHSLARSLVRPAPAAVNDNMKHAAAHAPSSAAAAATRPDDGEDAVAALSKAEVEAVMAAIGLAASGRGEGLAAAVGRGDVAGLFDADEPSFAEVRGAFAVFDADRDGFIGAEDLRAALARLGVRQDAAACRAMVVAAGGGRDARMSLFQFVAFLENGLC

SEQ ID NO: 6105 - protein, 133 aa, Zea mays
  VARIANT 115: note = Ancestral polymorphism is G, Derived polymorphism is R
  VARIANT 112..133: note = Derived polymorphism lacks residues 112 to 133
  VARIANT 100: note = Ancestral polymorphism is L, Derived polymorphism is P
  VARIANT 83..133: note = Derived polymorphism lacks residues 83 to 133
  VARIANT 79: note = Ancestral polymorphism is A, Derived polymorphism is T
  VARIANT 52: note = Ancestral polymorphism is R, Derived polymorphism is W
  VARIANT 49: note = Ancestral polymorphism is R, Derived polymorphism is M
  VARIANT 48: note = Ancestral polymorphism is Q, Derived polymorphism is P
  VARIANT 36: note = Ancestral polymorphism is R, Derived polymorphism is H
MAARAPLIMSRAASSVGPLPAAATTVARHQSAQCLRARGAVDGLFFDQRTARPVHHLLPGAKFEAIGSTAEAALSEGLAQKLQGVDVFDLSGKAVPIVDLWKERKAVVAFARHFGCVLCRKRVDLLAVKQVPG

SEQ ID NO: 6106 - protein, 630 aa, Zea mays
  VARIANT 498..630: note = Derived polymorphism lacks residues 498 to 630
  VARIANT 493: note = Ancestral polymorphism is A, Derived polymorphism is V
  VARIANT 475: note = Ancestral polymorphism is S, Derived polymorphism is P
  VARIANT 412: note = Ancestral polymorphism is P, Derived polymorphism is L
  VARIANT 369..630: note = Derived polymorphism lacks residues 369 to 630
  VARIANT 320..630: note = Derived polymorphism lacks residues 320 to 630
  VARIANT 187..630: note = Derived polymorphism lacks residues 187 to 630
MVNKGKVISLPCHAIIHVVHPQRPLLRSRHTDKDQPPATTTYSGTTSVYPEWPSFQPIVPPYGTPSPPPYVMYPPRTVYAHPSTPHAMHPFGHYPMPTNGHVETHDSHSKDNDGKEDGDSQNSMSYLASQGVVNQTMAMLPMQPGAMVGGVPSSTAANLNIGVDYWAAPGSAVVPAAHGKAPAGSARGDQWDERELKKQKRKQSNRESARRSRLRKQVYPFLPNFPGHTHRYKQTEQETRPYLSLQLFGSTEEDFPPKMDSVNKYLSYESSNPLDERSPSSSLPITRKFFPIHSVDEEVQHPHITDYGEDATMGEVSTNQAWLAPPLDLFKDSERPIENGSPPNPGYQSCYASTSCSDHSTSTSNSDGQDRTGRIIVQLFGKEPSTIPRNLRDDIVNWLKHSPTKMEGYICPGCLVLSMYLLMPGIAWDELEENLLQRVNSLVQSSDLDFWRKGRFLVRTNSELVSYKAGMTRLPKSWRTWNTPELTLVSPIAVVGGQKTSLILKGHNLSIPGTQIHCTSIGKYISKEVLCSAYPGTIYDDSGVETFDLPGKLDLIIGRCFVEVENRFRGNRFPVIGGLCTLCFFEEDVVLTITTPRELNNYLRKGTFYLWIYHGIIAKIQKTLKRLNDI

SEQ ID NO: 6107 - protein, 155 aa, Zea mays
  VARIANT 128: note = Ancestral polymorphism is L, Derived polymorphism is S
  VARIANT 64: note = Ancestral polymorphism is A, Derived polymorphism is T
  VARIANT 53: note = Ancestral polymorphism is E, Derived polymorphism is G
  VARIANT 9: note = Ancestral polymorphism is T, Derived polymorphism is I
  VARIANT 5: note = Ancestral polymorphism is C, Derived polymorphism is Y
MLEGCLANTVTFNTLIKGFCMAGQIQGAIDLMQKNTESGFFPNCISYSTIINELFTCCGGHPSARILKPDIVAYNILIRRCNIHGEFDKGLGIYSDMVTNGVRPNWDTYRALFLGASLMTTNRRTLLLTPDVRAISVLIYWNRLNQDGCQMQKSI

SEQ ID NO: 6108 - protein, 167 aa, Zea mays
  VARIANT 7: note = Ancestral polymorphism is C, Derived polymorphism is Y
  VARIANT 45: note = Ancestral polymorphism is A, Derived polymorphism is T
  VARIANT 66: note = Ancestral polymorphism is A, Derived polymorphism is V
  VARIANT 118: note = Ancestral polymorphism is G, Derived polymorphism is E
  VARIANT 141: note = Ancestral polymorphism is V, Derived polymorphism is D
  VARIANT 142: note = Ancestral polymorphism is L, Derived polymorphism is V
  VARIANT 145: note = Ancestral polymorphism is L, Derived polymorphism is V
  VARIANT 159: note = Ancestral polymorphism is S, Derived polymorphism is I
MQRRDGCRGVRELVHDERPRGAELEEEQQQCVPYDALEGRLEHAASLARTTSFCSVSAARNRRFMAYRSLVEMKWKDLNQALKIDYSQVIDTTYIFKYANLPTTASPSLNSLCKAVLEYLVREEGEPHNCLKDAEAAMNLVLAKLKNEFNDPIEIAASIVSAKKRCS

SEQ ID NO: 6109 - protein, 191 aa, Zea mays
  VARIANT 48: note = Ancestral polymorphism is D, Derived polymorphism is N
  VARIANT 47: note = Ancestral polymorphism is V, Derived polymorphism is I
MASANNDDREAAGILRLLMGMAAAAAPASALPRGGGLMMVQHVILDVNGELFSGGVGGGGVPPASKAAIAALKEVKAGEGEDALGECAICLDAVEGTGKEMPCGHRFHGRCLERWLGVHGNCPVCRRELPAPAKEEEEEDSAASAEGGEEERRRPRAAVVVSYLVFGGGRAEVQQEPEREEPWNIRIEDVD

SEQ ID NO: 6110 - protein, 99 aa, Zea mays
  VARIANT 19..99: note = Derived polymorphism lacks residues 19 to 99
MAKRLLPSLNRVLVEKLVQPKKTAGGILLPETSKQVLNAAKVVAVGPGERDKAGNLIPVALKEGDTVLLPEYGGSEVKLAADKEYLLFREDDILGTLVD

SEQ ID NO: 6111 - protein, 106 aa, Zea mays
  VARIANT 72: note = Ancestral polymorphism is K, Derived polymorphism is E
  VARIANT 20: note = Ancestral polymorphism is D, Derived polymorphism is G
  VARIANT 4: note = Ancestral polymorphism is K, Derived polymorphism is T
MDEKEFWRMLDLFPVVRSRDYCADPGTSIRGTRQRSRVQEAAKGNDKDSSDAQDLFMQKLKMAAEKKIGTTKAEFFCKAFEETHEKLVYKELNLDAAKKFLSAYES

SEQ ID NO: 6112 - protein, 102 aa, Zea mays
  VARIANT 92: note = Ancestral polymorphism is A, Derived polymorphism is S
  VARIANT 82: note = Ancestral polymorphism is E, Derived polymorphism is V
  VARIANT 81: note = Ancestral polymorphism is S, Derived polymorphism is P
  VARIANT 80: note = Ancestral polymorphism is G, Derived polymorphism is D
  VARIANT 77: note = Ancestral polymorphism is R, Derived polymorphism is W
  VARIANT 75: note = Ancestral polymorphism is H, Derived polymorphism is L
  VARIANT 73: note = Ancestral polymorphism is A, Derived polymorphism is T
  VARIANT 67: note = Ancestral polymorphism is A, Derived polymorphism is T
  VARIANT 32: note = Ancestral polymorphism is P, Derived polymorphism is L
MEETKPAPEAMLRCARAALLLASLRRPRAPTPTQDRRRTSYSPSSAAAAELARLRSEGLLRSAEIAAARREAAAHARVAGSELLLVLAVAPAVLLLLLLGLL

SEQ ID NO: 6113 - protein, 450 aa, Zea mays
  VARIANT 177: note = Ancestral polymorphism is S, Derived polymorphism is N
MAPPSRDYWLGFFRGAGDNIFDAIEAAITVAASDHPAALRERRDGIAERLFTALLVTSAAAAAAGAAAAAPGGGAAGGTPVAGAPTPAQLHPEGAASVPSLCSSDRAEAIADDAAPRCDDPVLAETERIKAVLLSDQEKPEAELLELLRRLQELDLAFDTLDATAIGKAVANFRKHSSKQIRNLVRSLIEDWKHTVDVWIAHRRDAVVDQTPQSMGPSSLEQEDRGAASTHMDEGDLFATPSTTIRLSEENMDGDGSIMTNDSRDCGQRYPMMNQEPARRPPPMGQRYDPEPCWRQSRPQELSNGQTKEQFVAEMLARPSSVESGPGRPQARPRQQHQDTPAAQARPQPAASEKPAAQLDANSVRAKLELAKNAKLEATKRKLQEGYQESDNGMRAAAAAMAKKQRNVQMVGPQNLPKQGNTNNNRSFQPSGSGRPRSSGNVNSNRNWSR

SEQ ID NO: 6114 - protein, 569 aa, Zea mays
  VARIANT 54: note = Ancestral polymorphism is G, Derived polymorphism is D
  VARIANT 65: note = Ancestral polymorphism is R, Derived polymorphism is C
  VARIANT 73..569: note = Derived polymorphism lacks residues 73 to 569
  VARIANT 80: note = Ancestral polymorphism is P, Derived polymorphism is L
  VARIANT 405: note = Ancestral polymorphism is L, Derived polymorphism is Q
MASPSSCNATGVPFTLLGALITAGPAAWPACVGGGRAFLRDYARRGTNALLWAGLLAVTWLLLLRVAALLRLWALGSRIPGPRALIADPGLASVLRNGGDISGFLSKLHGRYGPVVRLWVGPSQLLVSVVDPTLVKEVLSKAKDKLPLTGRTYNLACGRLALFVSSFQKVKRTRDSLKIFLNERLTVGTGQSSFKIIDAVLNRIDSIMSKDFMDTRSFSQHMAFNIISATLLGDAFFDWSDAAAYEELLMLVAKDGCFWASYTIPPFWRPSYRRYQTLCAKLKILTESVIRKSRYQNSSLHHFDQRSCQKSEGTDPHRSVLDNMMRSHCLHGAAKGPLNLEEETCGNIMGLMLHGISTSANLIGNILTRLVLFPELQDQLHEEIVSVCNKSSKVEVDDLLRMQVLLATVCESARLLPAGPLLQRCSLKHDLTLGSGVTVPARSILVVPLHLVQMDASVWGDDADQFNPHRFLKRDIDLGEILGAPKGSTRLNISSECTKAESFLPFGSGSRACVGQKFVVLAISMLIASLLRSYEVQPHPSLSKEMDTTVDSSHLHLPNPKIILTKRRI

SEQ ID NO: 6115 - protein, 174 aa, Zea mays
  VARIANT 55: note = Ancestral polymorphism is R, Derived polymorphism is W
  VARIANT 85..174: note = Derived polymorphism lacks residues 85 to 174
  VARIANT 89: note = Ancestral polymorphism is R, Derived polymorphism is W
  VARIANT 91: note = Ancestral polymorphism is R, Derived polymorphism is W
  VARIANT 96: note = Ancestral polymorphism is D, Derived polymorphism is N
  VARIANT 102..174: note = Derived polymorphism lacks residues 102 to 174
MAATLLLASATALLALAAAWLWDYVVGVRGPPYSFLSGCNREMRKMKAEADDGLRLDVHDHNYLPRVMPHFLARKQQYGEPFLYWMGPRPRVCLFDYESVRQVLSNKSGHFFKDDAHPTILAMLGKGLVLVEGTDWEKELANAAGKLAECQKTIASLERQIKSLTDLIKHMIYI

SEQ ID NO: 6116 - protein, 465 aa, Zea mays
  VARIANT 266..465: note = Derived polymorphism lacks residues 266 to 465
  VARIANT 288..465: note = Derived polymorphism lacks residues 288 to 465
  VARIANT 308: note = Ancestral polymorphism is I, Derived polymorphism is T
MEICSIIYENNTATRHTPAVWRAQHLCSASPRIGCCRAQIRRAPGPANPPRQLRPLDSPPSARIPRRRPRGWKVAHTDGRLRTRRTQTNTAGRLRQIVHPPQRPRMKGCATKSRGWKVHLLLLLSPNRASAAPSNPAGVQLFLGHRQWKVPISSRHYRARPVNSHISSRHSLGASTAIHGRQTIPSSRFMKVLFLRLGFSGVADMKIRRSEWGGALVAPRRSGSLSARISAALSGGLVLAPPAVEEKVEVNSTIFPKGPPVPLPVQKMARHIDTTEVSRGPDDLPGYWVVTGAKLCMEGGKVALKVHIVLPIVQEADGKKIQIQLTGFMEKNTVKFMKELWSLLLSAQQNASGVPQQFLDEKEAEIHQKKLCKGVGFVHGRGVLHRDLKPHNLLMDRKTMALKIADLGLSRAITVPVKKYTHEILTLWYRAPEVLLGATHYTPVDIWLLGTPNEEMWPGVGSILF

SEQ ID NO: 6117 - protein, 190 aa, Zea mays
  VARIANT 8: note = Ancestral polymorphism is S, Derived polymorphism is G
  VARIANT 46: note = Ancestral polymorphism is V, Derived polymorphism is A
MSDVTFKSIGDVLKLLPTATVIVYEVLNPIATNAGDCGGAAAGYKVATGVLLGLSAFFCAFSTFTDSYVGADGKVKYGLVTPRGLLPFNDGGGGGGAARRDFSRYRLGFPDFVHAAFAVAVFAAVSLLADANTVACFYPSLRDQQKKVVMALPVVVGAVASVVFALFPSTRHGIGYPPSKPEASALVASQ

SEQ ID NO: 6118 - protein, 504 aa, Zea mays
  VARIANT 336: note = Ancestral polymorphism is P, Derived polymorphism is H
MALRRALLRSVNFSPDSKAAIEYFYSFSRAQSACSLNGAGLCPASRSFSTQAATTSSTPQPPPPPPPPEKTHFGGLKDEDRIFTNLYGLHDPFLKGAVKRGDWYRTKDLVIKGADWIVNEMKKSGLRGRGGAGFPSGLKWSFMPKVSDGRPSYLVVNADESEPGTCKDREIMRQDPHKLLEGCLIAGVGMRASAAYIYIRGEYVNERLNLEKARQEAYAAGLLGKNACGSGYDFDVHIHFGAGAYICGEETALLESLEGKQGKPRLKPPFPANAGLYGCPTTVTNVETVAVSPTILRRGPEWFASFGRKNNSGTKLYCISGHVNKPCTVEEEMSIPLKELLERHCGGVRGGWDNLLAVIPGGSSVPLLPKHICDDVLMDYDALKAVQSGLGTAAVIVMDKSTDVVDAIARLSYFYKHESCGQCTPCREGTPWLWMIMERLKVGDAKLEEIDMLQEVTKQIEGHTICALGDAAAWPVQGLIRHFRPELERRIRERAERELLAASA

SEQ ID NO: 6119 - protein, 454 aa, Zea mays
  VARIANT 216..454: note = Derived polymorphism lacks residues 216 to 454
  VARIANT 175..454: note = Derived polymorphism lacks residues 175 to 454
  VARIANT 85: note = Ancestral polymorphism is H, Derived polymorphism is P
  VARIANT 61..454: note = Derived polymorphism lacks residues 61 to 454
  VARIANT 38: note = Ancestral polymorphism is G, Derived polymorphism is R
MGCAQGKCCLPRHPRRGSAAVGGRGGATLGRAAVPGAGLVLEYAALAVAGLYPDSPARESQDTHLVATRFAGDPDLHLFAVFDGHGAAGASCAGFARDALPRLLLASLAAGPAAAFRDAMLAANAEMHAAPGVDDSMSGTTAVAALVAGGALHVANVGDSRAVAGVWRAGRLVAEDLSWDQTPFRADERARVKACGARVMSVEQVEGMRDPEDVGWTPNEGDPPRVWARDALYPGTAFTRSLGDLAAEAVGVIAEPEVKSVEITPSHLFFVVASDGVFEFLSSQEVVDRVAMYQDPRDACSAIAAESYKLWLEHENRTDDITIIIVHIRDMENAGPAGSDKADYGSIGASIAGQTIQSEIPVFVQPEASNMNRSAATGMRSPSFGSPTERSLSCVAPSPTDPLLIHGRVSDASKPGQSEQRAASQPPVQTWHQIDGVTTELERSMQQSILPTSC

SEQ ID NO: 6120 - protein, 132 aa, Zea mays
  VARIANT 9: note = Ancestral polymorphism is A, Derived polymorphism is V
  VARIANT 14: note = Ancestral polymorphism is R, Derived polymorphism is K
MWTISAACATQIRRICASTAFPTGAGRCRRRRRRFLRSCPSRRSASTLRATACCAATGSHSSPSTLTRGSSLSYSSVTRGSFSCMWFLPMQLLSDLKCTSTYLPCMHRMTSVDRKLTDYSFSCLTIQTYGGG

SEQ ID NO: 6121 - protein, 945 aa, Zea mays
  VARIANT 207: note = Ancestral polymorphism is K, Derived polymorphism is Q
MEGAGEGSALTGMMGPALDKLASLVDKYTELRNARKKMEQLRKELIAINLALEKHAAMENPDAQAKAWAAEMRELAYDMEDSIDLFTHHVDHEPADTATTGVKRFFLRIIRKLKKLHYRHRFAQEIKQLHDLANESYRRRKRYRIEEGGSSLPHAEIDPRLEALYVEVEKLVGIQGPSQEIIGQLVGENAAERRRVVAVVGSGGSGKTTLAKQVYEKIRCQFSCAAFVSVSQKPNMNSLLWELLSQIGNHGGDLGMMAVGYCSDKQLIDRLRSHLEKQRTDFSTASQSALRYLVVIDDVWTNSAWETIQCALPKNAHASKIILTTRINSVGQFSCTPDEGFIYQMKPLCRNDSENLFLKRTLCDKDKFPAQLEGIKNEIIEKCDGLPLAIVTLASMLATKQRTREEWERALDSIHSTHKKDSSLEVMDKILSLSYRDLPHNMRNCLLYISTFPEDHTIYKDALVWRWMAEGFIAETQGFTLEQVAEGYFYEFVNRSLVQPITLRSRYEMRGEGGCRVHDIVLNFLISRAAEENFLTTLYGAQGVPSSDRRIRRLSVWDSPEHALAVSRATMNLSHLRSVRICNVGDWPVPAVLDLPVLRVLDLEGCRDLRIVDPDCILSLFHLRYLGFRSASGVVLPAQIGNLHHLQTIDLSGTGVTQLPESIVQLKRLMHLVGQRLIMPDGFGSMESLEELGTIDCCKCPAEGAPSDRVAFVGVETSDMETRRKSLMSSLCKLGGDNLRRVTIIDLAGGGDCFVESWHPPPRLLQKFIHISQQQHFSRFPEWISSCLCDLTHLDIKAEKMEREHLSVLEHLPAIRYLYLFVKRVSEDGLVISHSAFRCLRRLEFCNLDGPGLMFAGGVPMLEWLRLGFDADRAQSTYGGLEVGIQRLSSLKHVVLIVCMVSEGGDDPAEQAVWSAINGQVEMLPNSPTVDIRFRRRSQLQASSE

SEQ ID NO: 6122 - protein, 122 aa, Zea mays
  VARIANT 35: note = Ancestral polymorphism is E, Derived polymorphism is G
  VARIANT 30: note = Ancestral polymorphism is I, Derived polymorphism is T
  VARIANT 10: note = Ancestral polymorphism is R, Derived polymorphism is L
MHEQLNFPSRLNQTELAMGLQRKILGKRTIRQVSEEEEDVSIPQLVELRPLKLKRSYSHGGDEDEEGPRQLSPLSSATASGAGTERPPRCPPAPKKPRLLLGCSLDGFKVLRVMDLRCFLRR

SEQ ID NO: 6123 - protein, 378 aa, Zea mays
  VARIANT 154: note = Ancestral polymorphism is L, Derived polymorphism is I
  VARIANT 173: note = Ancestral polymorphism is S, Derived polymorphism is P
  VARIANT 180..378: note = Derived polymorphism lacks residues 180 to 378
  VARIANT 317: note = Ancestral polymorphism is W, Derived polymorphism is R
MSFFFRAASRQRPLPQEIARSLKDSLVALDTKTGAKALEDAEKNILTLRHTLAGDGEVEPNQEQVLQIALEICKEGVLSLFVQNLPSLGWEARKDLVHCWCILLRQKVDESYCCVQYIENHFDLLDFLVVCYKNLEVALNCGNMLRECIKYPTLAKRINCTHVALLLQNQMCSFRYILESSSFELFFQYVELSNFDIASDALNTFKDLLTKHEDAVSEFLSSHYEQFFGLYTKLLSSTNYVTRRQSVKFLSEFLLEAPNAQIMKRYILEVHYLNIMMGLLKDSSKNIRICAFHIFKLCVSTTPLPSFWFWRFIFAAWMQVFVANPNKPREIIQVLVENHREVLKLLHNLPTSKGEDEQLDEERDLIIKEIEKLVRLSV

SEQ ID NO: 6124 - protein, 67 aa, Zea mays
  VARIANT 7: note = Ancestral polymorphism is L, Derived polymorphism is V
  VARIANT 21: note = Ancestral polymorphism is N, Derived polymorphism is D
MTEAPFLPRERLFKLQHHFQNMTKHTYLKGRYDVITSVAIPLALAASSMFMIGRGVYNMSHGIGKKE

SEQ ID NO: 6125 - protein, 406 aa, Zea mays
  VARIANT 149: note = Ancestral polymorphism is N, Derived polymorphism is I
  VARIANT 249: note = Ancestral polymorphism is R, Derived polymorphism is C
  VARIANT 320: note = Ancestral polymorphism is L, Derived polymorphism is V
MMIPWGGVGCCLSAAALYLLGRSSGRDAEVLRSVARAGSMKDLAAILDTASKVLPLVVAVSGRVGSDTPLICQQSGMRGVIVEETAEQHFLKHNDAGSWIQDSAVMLSVSKEVPWYLVTNCRCYYAVIFFYFSNKTSNLPWTRTITTVNMLIYANLGLRLWMKMNMSIPNGNISGATIAIDTTVQVQPKTQGWGCCTVTPMDMVTPDLLYRSLHAKQTNKQTNYVISNNFYSQFATGEVFEESGRTLVRGTLDYLQGLKMLGVKRTERVLPTGISLTVVGEAIKDDVGTIRIQRPHKGPFYVSPKSIDQLIMNLGKWAKLYRLASMGFATFGAFLLAKRAIQHFLERKRRHELQKRVLNAAAQRQAREAEGSIGSSDTEPNSKKDQLVLDICVICLEQEYNAVFVP

SEQ ID NO: 6126 - protein, 154 aa, Zea mays
  VARIANT 101: note = Ancestral polymorphism is P, Derived polymorphism is L
MCPSTRRFAPRRQLPTTTEIQRRKRDNLAARNKGKVVPLLRCPTPRVTLNPSPVWHAVPALLEPEVAPARPPLLSTTTASRLSRTHRDLHNHLGFTLKLPPKILDATSNTATYDLLGAERARGDPRLLGGILAETNDDECESRRPLLLRTPASA

SEQ ID NO: 6127 - protein, 299 aa, Zea mays
  VARIANT 169..299: note = Derived polymorphism lacks residues 169 to 299
  VARIANT 174: note = Ancestral polymorphism is P, Derived polymorphism is L
  VARIANT 193: note = Ancestral polymorphism is L, Derived polymorphism is P
  VARIANT 204: note = Ancestral polymorphism is V, Derived polymorphism is G
  VARIANT 210..299: note = Derived polymorphism lacks residues 210 to 299
MSVRPSPTRLMHAAKSGAVVTLRRCSLTSRSAFFLDQFASVQASTELVNLLLGDHRIECDAREPPPEFVNLLSHANPLTLLCLRPLPASSAHCHPLRPIVYREASIPPSPTHSDPPNTPPSSTRWPHPASLPHRRRGAPSPPEDEHEQQKTLRRSPPSRICPSSPLPLCRLAQPRRYVDLIHHQLEFLLGIALELDAFKYLQIVASYGGCTGANNLDKNELSQSRVYFRGDFEWERITVKSVGIKKEFDADRVFGQEYAQGSLSDNFFAIIVPTEYDCLTASTRKKEIVDVIVKAFKST

SEQ ID NO: 6128 - protein, 816 aa, Zea mays
  VARIANT 39: note = Ancestral polymorphism is R, Derived polymorphism is M
  VARIANT 122: note = Ancestral polymorphism is P, Derived polymorphism is A
  VARIANT 171: note = Ancestral polymorphism is S, Derived polymorphism is N
  VARIANT 197: note = Ancestral polymorphism is E, Derived polymorphism is V
  VARIANT 660: note = Ancestral polymorphism is M, Derived polymorphism is T
MLPAVAAASPGLSHLPRYHHLGRRFHLRRHRLLPAIPARLSCGATHARRLLLAGAFAKGEGSSGQDVDHSAGATNSGSAYLGLFVRLLGLDNDTRDREHAVCTLYQYSLGGRKSIDEIMQFPGCIVLIISLLKSESILACEAATGLLRNITSVHIYRKMAGESGAMEEIINLLCKSTITPKILEQCLCTIWNFSIDEKWRYKVLKSDVLMKIVGYLDEEDIQVKEAAGGIISNLALSSSSHGALVEVGVIPKLVHLLQTKEDDYKIIRKEAKSSLIQLATDDCYYSLIIEEGLVRVPLVGSAAYKAFKPLPHSWPSFPDGSKIQRSSHPSKYGATELLLGLSVNENDTKPDEAKINAMIGRSNQQFLARVGAIELDDQGQEESGSEKNDMYTILPWVDGVARLVLILGLEDVSAIKKAARAMGDASINEHMRTSFKEAGAVKPLLQLLKHKDVHVREAGAYALEKLCVSATVCHNIKTEGGLELLVNIVKDRHTPVELLEKIIYILSRMFDMGICMVAVPDTEGYKDSENSAKTSVNQEMSSELIFDFDAISHLTEVLKEASPRLQAKVCCVLDHIAASEQHATAMTAACTGSVIEAILEIGVIHGTRSDSENFEIPSVVIKELSEAVSAAVRLLSKLLNFDLFIRSINGEKITSLLRRTLKSNFPLQSKDCLAACLIKLESRAGLSGDHGVSSIDMEITIYETIPRLIEQMMISLSFENKRSAVIELNKIISGGVLEYTRAVADSGGIFPLVKMLEEADGDALEAILSILYNLSMDPENHPAIIAAGAVPLLKRIVRTEAPQWSSAIQLLRTLPV

SEQ ID NO: 6129 - protein, 426 aa, Zea mays
  VARIANT 135..426: note = Derived polymorphism lacks residues 135 to 426
  VARIANT 80: note = Ancestral polymorphism is S, Derived polymorphism is P
MGAGRVCRGGPFSASPAAGAAAGRPFPPLTASSSSSPSSAPSETASTSVTKTVNGSHHFKIAGYSLSKGIGVGKFIASESFNVGGFDWAIYFYPDGKSGEDGAAYVSLFIALASEGTDVRALFELTLVDQSGKGQDKVHTHFGRSLESGPYTLKYRGSMWGYKRFFKRVALETSDYLKDDCLLVNCTVGVVQSHTEGPKIYTIPVPRSNMALHIGQLLTSGKRTDIAFEVDGEMFPAHKVILSARSPVFRAQLFGPMKDKDMKCIKIEDMEAPVFKALLHFMYWDELPDLEELTGVNTTWVSTLMAQHLLAAADRYALERLKLLCELKLCEDVAINTVANTLALAEQHHCYQLKTVCLKFVALPENLKAVMQTDGFDYLQQSCPSLLTELLEYVAKIGEHSVSPCLYSTEVLDGGDANGRRVKPRI

SEQ ID NO: 6130 - protein, 162 aa, Zea mays
  VARIANT 132..162: note = Derived polymorphism lacks residues 132 to 162
  VARIANT 38: note = Ancestral polymorphism is V, Derived polymorphism is I
MYIELPKGVPTKLFHCSIQASHVEVGIRGNPPYLNVCVSSEDSLRFSSTQSPRFPDVWLWIDYFFGVILQHDLTHPVKTDSSFWTIEDGEMHITLQKREKGKTWSSPIQGQGILDPYAADQEQKRLMLQRFQEENPGFDFSQAQFSGTCPDPRTFMGGIRSE

SEQ ID NO: 6131 - protein, 56 aa, Zea mays
  VARIANT 33..56: note = Derived polymorphism lacks residues 33 to 56
  VARIANT 22: note = Ancestral polymorphism is G, Derived polymorphism is S
  VARIANT 18: note = Ancestral polymorphism is R, Derived polymorphism is C
MQWFSRPQAGPATENDICAAVGDNSGTSKAIRWLLKQVGGNVRVPRTTAKAFKSVN

SEQ ID NO: 6132 - protein, 262 aa, Zea mays
  VARIANT 57: note = Ancestral polymorphism is G, Derived polymorphism is V
MALLVLRAPAAVHAASRLLPPQPRRRRRLVAVASAASSAPSGEVSSQHGGGGGGGYGIVGGPNGNAVVPATKSTVVETTVERVIFDFRFLALLAVAGSLAGSLLCFLNGCVFIKEAYQVYWSSCVKGVHTGQMVLKVVEAIDVYLAGTVMLIFGMGLYGLFVSNASAGVGSESDRALSGSSLFGMFALKERPKWMKITSLDELKTIVGHVIVMILLVKMFERSKMVTIATGLDLLSYSICIFLSSASLYILHNLHKGDDHEE

SEQ ID NO: 6133 - protein, 547 aa, Zea mays
  VARIANT 53: note = Ancestral polymorphism is N, Derived polymorphism is D
  VARIANT 65: note = Ancestral polymorphism is R, Derived polymorphism is Q
  VARIANT 316: note = Ancestral polymorphism is R, Derived polymorphism is S
  VARIANT 450: note = Ancestral polymorphism is W, Derived polymorphism is R
MVQQQQQHRIYILQFRKGGPEQEVSCKVSQPKGGGRRPVMYYYQDHGSGGGKNGKKVQPRALGLRRFLGMLFLSFLCVGTLFVAPVSFLSFVHSDEGGSAAAAAAAAATAAVRGGVSEPCSAVGNDSLCCDRTSERADICFAKGDVRMHSASASFQLVSAGNSSAAAEEEERIRPYTRKWEANVMATIDEVRLRRVLPGDAARCDVRHDAPAVLFSTGGYTGNVYHEFNDGILPLFVTAHHLRRRVVLVILEYHDWWMTKYGDVVSQLSAFPPIDFAADRRVHCFPELIAGLRIHGELTVDPARTPEGKSIGDFRRLLDDAYRGRIGFLERLERRAARKRLRQRRHRRGGGGGAPPAPGGPREDRPRLVIVSRTGSRVIENEADVAALAADVGFDVRVIRPERTTELCKIYRELNGSDAMVGVHGAAMTHFLFMRPGKVFIQVVPLGTHWAAGAYYGEPAARMGLRYVGYRILPEESSLSREYPTGDPVLTDPAGVAQRGWDVTKKVYLDRQNVRLDLARFREELVRAHRYLAGGGRERPSDVVGRV

SEQ ID NO: 6134 - protein, 266 aa, Zea mays
  VARIANT 70: note = Ancestral polymorphism is G, Derived polymorphism is R
MEVTSSPSPSAPPPASSKPALQLNPAAVLLRRLPTPTPTAATPVTATAPPARPATASNPLAALLVPFWRGLRRAPKQPVHPASAAAARRAAEQQEAEAEAEARQLVGCAVPLFRPYVAQLPWHGGARAWLSKLFPRYGHYCGPNWSSGKEAGSVLWDRRPVDHLDFCCYCHDMAYDTHDQAQLLRADLAFLRCLEGSRHTPARDGIAAAAIYRAMCIFGLKTILIPYRTNLVRLQTGPNYADFFADFVKRVASSSGRPTGGEKQRL

SEQ ID NO: 6135 - protein, 257 aa, Zea mays
  VARIANT 177: note = Ancestral polymorphism is R, Derived polymorphism is W
MSLSPADSAAYWLRWQVLVCGALIALPAAAAAALLPRLRRAAPPLRAADLWVSCWARLHPGWLLAYRAFALAAAVALLARLLVGHGLTVFYFYTQWTFLLVTIYFAFATAISAHGCWVYSRKSLRKSDESHGFLNADVENRDVSNSISGERKKDETKMMVSYYEQIANERRAGFWGRCMQIIYQTSAGATMLTDVTFWGLLVPFFYRDKFGLALVTDGMHSLNAVFLLIDTVLNNMWIFSPSPGTEWLSLFSGAAPM

SEQ ID NO: 6136 - protein, 821 aa, Zea mays
  VARIANT 39..821: note = Derived polymorphism lacks residues 39 to 821
  VARIANT 147..821: note = Derived polymorphism lacks residues 147 to 821
MAASAAAAPGSAERQARGGAASAIGNAVFKSGPLFISSKGIGWKSWKKRWFILTRTSLVFFKNDPSTLPQRSGEVNLTLGGIDLNNSGSVVVREDKRLLTVLFPDGRDGRAFTLNFFIRMPPFLNIQAESSKDLFEWKTSLEEALAQAPNAALLMGHNGIFRNDTTDVYEEAIPNWREKRPTKSLVVGRPILLALEDIDGSPSFLEKALCFLEKHGIKVEGILRQAADVEEVDRRLQEYEQGRTEFAPEEDAHVIGDCVKHVLRELPSSPVPASCCTALLEAFRLDIKESRIKSMRAAISETFPEPTRRLLQRILKMMHTVASHTAENRMTPSAVAACMAPLLLRPLLSGECELEDDFDMSDDSAAQLIAAANAANSAQGIVTTLLEEYESIFNDEHFRCSLSPDSQTGDSGSEESTDDETVDIKDNGFHDAENDVDQELDDAERILNGKLSETSACVHADLHDYKQEVNGNDSDAELFVEDNTFEPNVNLNDTPLSRLIENGKKPSNLASSHETPLSVGEILSSLDAGVPLPGRAAEYSKDRLSSKPNGIQQHVKRTNLWGRSNARKGQRSELVDPSSEEELAIQRLEVMKNDLQVRIAKEARSNAILQASLERRKQALHERRVALEQNVSRLQEQLQAERDLRAALEIGLSMYSSQFSSSHSMDSKVTEIISKNTVQTGFDRTVAFCNQEKQRNEESLPCTSHWRSIKQHVLSQDSSRPFSRKHSSDTSLSDSMEASTSVLAEGGPLLVNIARTTEQGVEYGRPPTVPSSTLVELTTRLDFFKERRSQLMEQLHSLDLGHGSASHGFPYKSSSPWNNPR

SEQ ID NO: 6137 - protein, 774 aa, Zea mays
  VARIANT 110..774: note = Derived polymorphism lacks residues 110 to 774
MHDHTRARAWEATARKVQPVGRRRVSPMSAADDSETASSSSSSSSPAGDDADHVDRGLPNGDFYTGQWRGGAPHGNGKYLWTDGCMYEGEWRHGKATGRGKFSWPSGATYEGEFKDGFMDGSGTYTGAAGDTYRGSWSANLKHGDGNKSYANGDQYDGEWRAGLQDGAGRYTWRNGTEYTGQWRAGLIHGRGALAWSNGNRYDGGWEDGSPRGQGTFRWADGSVYVGYWTRDAHTGIVQQKGVYYPSPAASSPTARDPRDVFARDLPGFLGAGPDTASPRKSRASSGTRAPNGRPSSVSGLSNSSGGDRKYDKICIWESDGDITCDIVDGPALGDEAVTAQRSVRTDDGGGDDRGLPPPSPAPHVTQWLPQRESKRQGETIAKGHKHYELMLNLQLGIRHAVGKQGPIVLDLKSSAFDPKEKVWTKFPPEGSKCTPPHNSCDFRWKDYCPKVFRTLRKLFKVDAADYMLSLCGNEALRELSSPGKSGSFFYLTNDDRYMIKTMKKSEVKMLLKMLPAYYNHVRAFENTLVTKFFGLHCVKLAGANQKKVRFVIMGNLFCSEYPIHRRFDLKGSSLGRTTDKPQTEIDQYTTLKDLDLNFIFRLKKQWFHEFQRQVDRDCEFLEQEKIMDYSLLVGVHFRENTEKLLTEGSIDYDIINNVPTPRLSRGNTDRFLADPNRSPKTKLGANMPSRAELTARKSDCEPQLIGEPTGEYYDVILYFGIIDILQDYDISKKLEHAYKSFQHDPASISAVDPRQYSRRFREFIYKAFQEEDG

SEQ ID NO: 6138 - protein, 240 aa, Zea mays
  VARIANT 109: note = Ancestral polymorphism is S, Derived polymorphism is L
  VARIANT 130: note = Ancestral polymorphism is G, Derived polymorphism is D
  VARIANT 134: note = Ancestral polymorphism is T, Derived polymorphism is M
MPGNGLPLRRWLVACVRPARREARLAVWGGGGTRGAEPGQAAGEVMVEHLGHVVCRADGFRVGRPAPVLGIGDRLEAGRTYLVVPADRLPCAAGGTGGVVTAASLATLSRGKRQAPAGPRNCPFEYAKDGDGRTVIRVAEEFLVRAVAGGANAGRNGKPRGGDGDGDGDGCGSAALCSTPELRKHYEQLVGAVRGRPWSPRLDTIAERKGRRRLADVVSPGRLSPARLLGMGKDKGLSFS

SEQ ID NO: 6139 - protein, 152 aa, Zea mays
  VARIANT 12: note = Ancestral polymorphism is K, Derived polymorphism is R
  VARIANT 65..152: note = Derived polymorphism lacks residues 65 to 152
  VARIANT 88: note = Ancestral polymorphism is S, Derived polymorphism is C
  VARIANT 105: note = Ancestral polymorphism is A, Derived polymorphism is S
  VARIANT 106: note = Ancestral polymorphism is A, Derived polymorphism is S
  VARIANT 110: note = Ancestral polymorphism is R, Derived polymorphism is S
  VARIANT 114: note = Ancestral polymorphism is K, Derived polymorphism is T
  VARIANT 125: note = Ancestral polymorphism is S, Derived polymorphism is A
MAPKAEKKPAAKKPAEEEPAAPAEKAPAGKKPKAEKRLPAGKSAGKEGGVDKKGRKKAKKSVETYKIYIFKVLKQVHPDIGISSKAMSIMNSFINDIFEKLAGEAAKLARYNKKPTITSREIQTSVRLVLPGELAKHAVSEGTKAVTKFTSS

SEQ ID NO: 6140 - protein, 272 aa, Zea mays
  VARIANT 242..272: note = Derived polymorphism lacks residues 242 to 272
  VARIANT 201: note = Ancestral polymorphism is A, Derived polymorphism is V
  VARIANT 109: note = Ancestral polymorphism is W, Derived polymorphism is C
MAVARLCAAAAAARLQPALAAGARGLGTAAEVAAGARWEPMGAREYYDYRRAMYGDITHKAILVDAAGTLLAPTEPMAQVYRTIGQKYGVDYSEDEILMRYRWAYAQPWGRSRLRYVNDGRPFWQYIVSSSTGCSNLEYFEELYQYYTTEKAWHLCDPDAGRVFEALRKAGVKTAVVSNFDTRLRPLLQALKCDRWFDAVAVSAEVAAEKPNPTIFLKACELLGVKPEEVVHIGDDRRNDLWGARDAGCDAWLWGSDVYSFKEVAERIGVEV

SEQ ID NO: 6141 - protein, 63 aa, Zea mays
  VARIANT 3: note = Ancestral polymorphism is P, Derived polymorphism is L
  VARIANT 13: note = Ancestral polymorphism is V, Derived polymorphism is I
  VARIANT 15: note = Ancestral polymorphism is A, Derived polymorphism is V
  VARIANT 19: note = Ancestral polymorphism is M, Derived polymorphism is I
  VARIANT 44: note = Ancestral polymorphism is I, Derived polymorphism is F
  VARIANT 59: note = Ancestral polymorphism is R, Derived polymorphism is C
MEPRVYPNLEAVVSAVGPITPFFIAAGGSHVACNIQINKPICIIGGGNLPDDTVLTCSRGFDK

SEQ ID NO: 6142 - protein, 1737 aa, Zea mays
  VARIANT 1633..1737: note = Derived polymorphism lacks residues 1633 to 1737
MAFFSNSGSKADSEGYNLNEKADDDGIHESIRDGNDGLNSRQWNLNEKAEDAYHSEAEQYESGQSGLYASRQHVQRGGRSSGGPWGTNFLKDSRSKQTAKEVASNSGRGMDAANSHDDMDGSREDDELNRANGEVPAEEMLSDDYYEQDGEDQIESLHRGGMKQSSCSTSGGAAKSGSRQMKKMSKYNAYDNDEYNDENDDDSDADEDDPADMDFEPDGETDKATDKDKFMDSENSDGDDDDDLELSDDEDDFVENRRQPKRLKIVATKTSKGGQLPMPVQPKRGVSHSDEEYFSGKDSDVPSDSDFKHIPKKPDRLHQKPVGRSDVAPISSHNELRTSGRRRTVKKISYAESEESDDSEEKSNKRQKLIKEEPEEEDGETIEKVLWHQPKGVAEEAIRNHRSAQPTVASLTSDFDQQWDELEFYIKWKGQSYLHCQWKILSELQSVSGFKKVINYTKRVSEEQRYKRALSREEVEVERIFADRVSKADGDDLVPEYLVKWQGLPYAESTCFSPLVFVIKSSTSVGIQSSLRRLDGQPEWLKAGKLRDYQLEGLNFLVNGWRNDTNVILADEMGLGKTIQSVSMLGFLHNAQEINGPFLVVVPLSTLSNWAKEFRKWLPNMNVVVYVGNRASREMCQQHEFFSDKKGGRHVKFHTLITTYEVILKDKAVLSKIKWNYLMVDEAHRLKNCEASLYTTLLEFSTKNKLLITGTPLQNSVEELWALLHFLDPVKFNSKDSFVERYKNLSSFNETELANLHKELRPHILRRVIKDVEKSLPPKIERILRVEMSPLQKQYYKWILERNFQNLNKGVRGNQLFQLAHLGIECNLAVSDLDWNNVTILSHLLLLGQAVPHLLLLAQEVSHLAVHYLSNWSMGKATRQDLAVVSLLNIVVELKKCCNHPFLFESADHGYGGDSIGDRNKVERIVMSSGKLVLLDKLLVRLRETNHRVLIFSQGLFSVVWFGSNPHYGCPKRESKKMVKMLDILAEYLSLRGFQFQRLDGSTRADLRHQAMEHFNAPGSDDFCFLLSTRAGGLGINLATADTVIIFDSDWNPQNDLQVLDHLVIQKLNAEGRLEKKESKKGGPIFDKNELSAILRFGAEELFKEDKTDEETKRNLESLDIDEILERAEKVETKGGEGEEGNELLSAFKACDVANFSSVEDDATFWSRLIQPDPADIVQETLAPRAARNKKSYIEDPQLDKNNNRKRRAVETQEKPRRLSGRTVETVNSLPLVDGAVAQVREWSFGNVPKKDASRFVRAVKKFGNATQIGLIVDDVGGVLAKVPHEAQIELFDLLVDGCQEAVKENTDIKGTVLDFFGVAVKAYELLARVEELQFLAKRIARYKDPIKQYRIQLPYKKPQWSASCGWTETDDARLMVGIHWYGYGNWEKIRLDPKLGLTTKIAPATLGERETFLPRAPNLDNRASALLQKEYAKFSGKSLKVKGNTRQTVNNDSNSGVRSMRGRQKDVPEKDDNKPNKDDIQKRRVIVEAEAREEGEISESEAETRYRQDKEEKWLEWCSEVLDEEQETLKRLDRLQNTSVNLPKEKVLSRIRKYLLIIGDKIGEVVRQHSESYRQSRMVMRLWNYVATFSNMSGEQLHDLYMKLSQDQLEGGVGPSHGGNFTSIPPNKGGNSNQLHPSRNQRPTRSLQYNSESFHNESSGSSEAWKRRRRADTDNQFDTQPLCQPPIMTNGNRLQESSSSAGILGWGPVEIRRYGNERPKRAVHPSHFPTGHGPLL

SEQ ID NO: 6143 - protein, 502 aa, Zea mays
  VARIANT 133..502: note = Derived polymorphism lacks residues 133 to 502
MQKPVASVVSLCPQLWHRHFRRAPLLPRARGLPSSSPILTRRRSVLPRSTSTHLAAVSTAAAAAAAPSATPYPVYDRLLPCPLQDDPPRIEHLVAREDEVAADFIARSLGLPPLYAADLIEFGAVYYALVAPQPPPYASPEHFRLFREVTEPSVLRRRASIKGKTVREAQKTFRVTDPNQRLEAGTYLRVHVHPKRFPRCYQIDWKSRVIAVADEYVVLDKPAATSVCSSLPSTFSFVGGLRALNFLDSSCRIMECVSATLALHFVEHSLHVFNSMSFESPMNYDIDFSFTISVVLSKTKEFCSVFHGLIREKQVKKLYLALTTAPVSTGTITHYMRPVNRAPRLVSEDCIERWHLCQMEVLDCSKVPWPSSSIRKAYNVNGCGWPQQEAAYECKINLLTGKTHQIRAQLAAIGAPIIGDSAYMTAAMAAMANPSINPFGRERLSYNSEEEKEAAVEAWIASHGKEPKSVIGLQASEISWDHEGKHHSYKAGVPWWWQDPDS

SEQ ID NO: 6144 - protein, 456 aa, Zea mays
  VARIANT 93: note = Ancestral polymorphism is A, Derived polymorphism is G
  VARIANT 12: note = Ancestral polymorphism is P, Derived polymorphism is S
MDPAAVAIVTVPFPAQGHLNQLLHLSLLLASRGLPVHFAAPEPHLREARARLHGWGPDPAAVCFRALDVPAHDSPSPDPSSPFPAHMLPLFEGFCTGARASLAALLAELAASHRRVVVLYDRMAAFAAAEAARLPNAEALGVHCLAASYNVGWADPGHALLRRHGLVFHPPDACATPEFVALARQMGQERRRAPGAGMVVNTCRALEGDFLDALRGIPSSDGPRLFAVGPLSPVLPLPGASGTRHECLGWLDAQPPSSVLYVSFGTTSSLRPEQVRELAAALRDSGARFVWALRDADRAGMRGGEGGAEALRAAAASELGPDGAGVVVTGWAPQLEILAHGATAAFMSHCGWNSTVESLSHGKPILAWPMHSDQPWDAELVCKYLRAGVLVRPWERRHDVTPAADIRDAIDRVMASEEGAEIRRRAGALGEAVRGAVVEGGSSRQDLEELVAYVTR

SEQ ID NO: 6145 - protein, 978 aa, Zea mays
  VARIANT 378..978: note = Derived polymorphism lacks residues 378 to 978
  VARIANT 454..978: note = Derived polymorphism lacks residues 454 to 978
  VARIANT 646..978: note = Derived polymorphism lacks residues 646 to 978
  VARIANT 672..978: note = Derived polymorphism lacks residues 672 to 978
  VARIANT 677..978: note = Derived polymorphism lacks residues 677 to 978
  VARIANT 693..978: note = Derived polymorphism lacks residues 693 to 978
  VARIANT 712..978: note = Derived polymorphism lacks residues 712 to 978
MTPLSHCSVGNVSLFHIGSYRTTREIQIRRFQGSARYSRVASPSPRRLLQPQTAFHLISIYKRRSWSSPQRPRTLSAATVGTDVTVEDLNPSPSEEASDGNSEAAPDAVDASEQAEASTGQASSARKLGRNIRKSEMPPLNEEDLVPGASFTGKVMSIKPFGVFVDIGAFTEGLVHISRVSDGFVKDISSLFTVGQEVSVRLLEANKETKRISLTMREGDDYVKPQKEMPKAANGGRSATATPKSSPRQTRERQELKETLESKYVPGQSLNGTVKSTTRAGTFVTLPDGSEGFLPREEEALALFTLIGQSAMEIGKQIRVKVLNVAQGQATLTMKGVEDDEDDLKTLNMELKRDWSRGTNAFELAFRRNKEISAFLDQRERTKVPADTSVSAPEAESYQEEAAPEDEESSEELSSVSEVATDVSPPVSDASSQVGIQYSTSVANAAEDQTVGSESSPTISVELSSNGTPDSSIVSSVSETADKPTEPEESSAVEEVLVTASSEAGKEPAADTEAVPALNEKTGAEVAAAAGVAQASTTTATISPTLVKQLREATGAGMMDCKKALAETGGDIDKAQEFLRKKGLAAADKRAGRATAEGRVGSYIHDSRIGVLIEVNCETDFVSRGDIFKELVDDLAMQIAACPQVQYISIDDVPEELVKKETELEMQREDLLSKPEQIRAKIVEGRVKKRLGEFALFEQPFIKNDKVTISEWLKQTIATTGENMKVRRFARYNLGEGLEKKSQDFAAEVAAQTAAKPPPSAPPKEDKPAETTESAEKKPAVAVSASLVKQLRDETGAGMMDCKKALAESDGDLQKAQEFLRKKGLSSADKKSSRLAAEGLVGSYIHDSRIGCMIEVNSETDFVARNDKFRELVNDLAMQVVACPQVDYVSVDDIPESVVGKEKEIEMQREDLQSKPESIREKIVEGRIAKRLGVMALLEQPYIKDDSKTVKDLVKETVASLGENIKVRRFVRYTLGED

SEQ ID NO: 6146 - protein, 387 aa, Zea mays
  VARIANT 33: note = Ancestral polymorphism is G, Derived polymorphism is S
  VARIANT 62: note = Ancestral polymorphism is I, Derived polymorphism is T
  VARIANT 89: note = Ancestral polymorphism is V, Derived polymorphism is G
  VARIANT 151: note = Ancestral polymorphism is R, Derived polymorphism is G
MDTETEGKAAAVEEMREWCVALPKVELHAHLNGSVRNSTLLELAKHLGDKGVIVFEDVKDVIMKSDRSLPECFKLFDLFHILTTDHDTVTRIAKEVVEDFAAENVVYLEIRTTPKNNEAKGMTKRSYMDAVIKGLKAVEDVDVELFGSNFRTNETLSSKLLDGVTKKKKIYVRLLLSIDRRETTSAALDTVNLAVEMMDQGVIGIDLSGNPVVGEWETYLPALQHAKNMGIPVTIHCGEVANRKEIQAVLDFCPQRLGHVCCLNDVEWKKLKSLMIPTKMQVEICLTSNVMTGGAPSLELHHFADLYNAKHPLSLCTDDSGLFSTSLSNEYYLVATTFGLSKFELFQLAQDAVQFVFADDVVKKSLKEVFKHAEKRLLMWDELAAPS

SEQ ID NO: 6147 - protein, 207 aa, Zea mays
  VARIANT 9: note = Ancestral polymorphism is C, Derived polymorphism is R
  VARIANT 40: note = Ancestral polymorphism is R, Derived polymorphism is K
  VARIANT 68: note = Ancestral polymorphism is T, Derived polymorphism is I
MPWLPAQCRTESKHSMAMAQARVVALALCALLLVSGVARRAEAVSYNVGNSAGWDLSADLPSWADGKTFNVGDVLVFQYSSYHTLDEVDQAGFNNCSAANALLSRSDGNTTVPLTAPGDRYFICGSQLHCLGGMKLHVLVSQPAGGAPAKATPQSTPQTGSGAALGPSTDDAGLAGIPWLVLGGSHRATVGSMLLTWLFVATALLLV

SEQ ID NO: 6148 - protein, 797 aa, Zea mays
  VARIANT 652..797: note = Derived polymorphism lacks residues 652 to 797
MLSSSASRREAAAARATKNGELPKSAAAVAWKDVAATARSGELSKAVTGAELSKAVAAVRDAAAVQHEGWMVRYGRRKIGRSFFHTRYFVLESRLLAYYKKKPKDNMVPLKSLLIDGNCRVEDRGLKNHHGQMIYVLCVYNQKEKEHQITMGAHDIEDALAWKKKIELLIDQQPDSAVKTHKSFATIDFDMDLGGQFSLSDHDSAAEDEEERPTLVRRTTIGNGPPDSIHDWTKDADFGMSGQNEPTQLYSKKNWRLLRCQNGLRIYEELLEVEYLARSCSRAMRAVGVVEATCEAIFGLMMSMDATRYEWDCSFRQGSLVEEVDGHTAVLYHRLQLHWCPRLIWPRDLCYVRYWRRNDDGSYVVLFRSTEHPNCIRQRGFVRAFIESGGFKICPLKCRNGRPRTQVQHLMQIDLKGWFLNYSTSFQYHSLLQILNCVAGLREYFSQTDDIHITPRIPAMESMADVNLAQKDEKLKEVDSKTKPEDQQQAENKNMGTIDEESDDDEDYHVPEADIEEITNKSDNEAKHTDEPPEKIDLSCFSGILHHDPDEKSRNCWTVPDSKLFKVRSKNFPNDKSKIPAASYLMELAAIDWFKDTKRMDNVGRQKNCVAQVAAEKGMHTFIVNLQIPGSTHYSMVMYFVTSSLKKGSLLQRFFDGDDDFRNSRLKLIPSVPKGSWIVRQSVGSTPCLLGKAVDCNYFRSPGYLEVDVDIGSSAVANGVLGLVFGVVTTLVVDMAFLIQANTYEELPEQVIGAARLSNVEPSTAVVPDLENNSDGNKDNSSNDATSSEDDSSKKTN

SEQ ID NO: 6149 - protein, 1183 aa, Zea mays
  VARIANT 138..1183: note = Derived polymorphism lacks residues 138 to 1183
  VARIANT 140..1183: note = Derived polymorphism lacks residues 140 to 1183
  VARIANT 459..1183: note = Derived polymorphism lacks residues 459 to 1183
  VARIANT 482..1183: note = Derived polymorphism lacks residues 482 to 1183
  VARIANT 514..1183: note = Derived polymorphism lacks residues 514 to 1183
MAPSSARDSPVPVGRGSRILTRFLLHYLRAATRRPPTLEREGTALAGLADTAVHGMALVEGTTECRHKLERLMGLMLVQATLDDLLVSSDDGGDVYIVNLVMRLVRVFVASKEEADAPSERMRKVGRLVDKYLDEISQDQGLKVSKFLTVSESLPDSARDCYDGVYRVLDIYLKKIVQGGNEFVWSGFDLTIYLEGFDRMAYPKTALLTRMANMLIQMSLQNPLTLAHPELNCQTFDRHLSNILMPQLLLKLKSHWMEDYTNPDLFVNQIIIEGIVQLEKDLKEQQVVQGAVENTLGAGSINLLLENPIPKDQHPLHQCEAKWWTIPRPVDNCRWEGRHGSLAPLPQQRPPAPFLARREMDRRIHGSLVSPPLVLPGPPLHDTRPQPLLRCGEVPPPRPDAPKTWSKSTSMMHADSGLVGTSRWSTASFLKMVWSYTNLWGEISASASFCEVDLDSAAQKNGGFSSPPLPPPQAMAGVKLQQRQLRPMSHVGPFTAPFFFYSLLVAFLFFSLVRMAELRLLGQGGLSQRFLKVVSYYGLTTLPYKLVCKLVGANLRRSRIITFSGNRCNQKVVAYLREPYNYWGMVGFGLLNFEHHDLTKNEVQYQSEEPPRGLPSGRFRSPAIGLPTAAEMSGGEKMLLFGSFTEDETKLFQGQPLKSPNKSVSKECERTEIQFGTLNFSVLSLEKVSTSSVVLPAKSANSETSAITKENTCSNEKKAAGSSLPNGRAILANGCPPVNVPANNDLFENVKKTEAVVPPVVPVKSISNPTPQMTLEVHNDGTEPTQSRKLDKEREITENGSPIVDTPIAAAPAEEAVTNLNKKTSQNMPLIPQGLRNTGNICFLNATLQALLSCSPFVHLLQDLRNRSIPKFGYPTLRAFVELISQFDVLDESVNKKKEKATTVAAKPLNPAMFDDVLRNFTPDVPAGITARPRQEDAQEFLSFAMDRVHDELLKLNGNGLDSKEGMVVSSSADDAWETVGRKNKSAIVRTHSFVPSELSAIFGGQLQSVVKAAGNKASATVQPFLLLHLDIFPDAVQTLNDALRLFSTPESLEGYRTTAGKAGLVTARKSFKIHALPKIMILHLKRFSYGNNGSTKIYKPLGFTSELVLSRDLLSSPSQEGRKYELVATITHHGRDPYRGHYTAHAKHADGQWLRFDDDAVVPVGENDVLHDQAYVLFYKQV

SEQ ID NO: 6150 - protein, 159 aa, Zea mays
  VARIANT 110: note = Ancestral polymorphism is M, Derived polymorphism is T
MSAVAAMATSSLNPNAPLFIPAAYRQVEEFSPEWYELVNTTAWFRDHWFRQHQHHEAAFAAAADAELDVAALLPDDSVDLLDTDDLFYAPDVHHPHNAKPALLPGYDLDMLRALSLSSPRAAAAPSPSPLLRAQQQRHADRPAHHARGAARRVIIHQPR

SEQ ID NO: 6151 - protein, 311 aa, Zea mays
  VARIANT 116..311: note = Derived polymorphism lacks residues 116 to 311
  VARIANT 50: note = Ancestral polymorphism is T, Derived polymorphism is M
  VARIANT 41: note = Ancestral polymorphism is S, Derived polymorphism is L
  VARIANT 39: note = Ancestral polymorphism is G, Derived polymorphism is R
  VARIANT 33: note = Ancestral polymorphism is D, Derived polymorphism is Y
  VARIANT 23..311: note = Derived polymorphism lacks residues 23 to 311
MGKLLGKGVFGKVHYARDLESNQGVAIKIMDKDRVLKAGLSEQVKREITTMRLVEHKNIVRLHEVMATRNKIYIIMEYAKGGEVLDKVKRSSRLTEADAHRYFQQLIGALDHCHSRGMYHRDLKPENLLLDENGDLKVPSWFSHKFKRLLYKILNPNPSMRPSIQEIKESTWFRKGPREISAVNEKVLSKNATTTNVVPVLPSRRKEIAHEDMKSLVATNLNAFEIIALSAGLDLSGLFIKECRKETRFTSDKTTLAIISKLEDVAKTLNLRIRKKENNTISIQGRKEGAMVSFSLTRRSLRSHHPVILFR

SEQ ID NO: 6152 - protein, 275 aa, Zea mays
  VARIANT 49: note = Ancestral polymorphism is F, Derived polymorphism is C
  VARIANT 33: note = Ancestral polymorphism is G, Derived polymorphism is E
  VARIANT 30: note = Ancestral polymorphism is L, Derived polymorphism is F
  VARIANT 25: note = Ancestral polymorphism is G, Derived polymorphism is W
MSSAHLLSSEETFDRSLGVPALLCGSLFELHLGNFSSNSSFFWPGRNIFSYSTGKGLGDTESCTNYLGIKSMKLWDQGRIQGTGHPWTDCNLAGALGLLRILIYKVYADGTTTMCTHERKASIREFYAVIFPSLMQLHERINEVEDRKQKAICLERYRRRDEDPKTVVSEIDDNIEEECGICMEINVKVVLPTCSHAMCIKCYREWRSRSQSCPFCRDSLKRVNSADLWIYTDSKDIVDMATVRRENLRRLFMYIDKLPTVIPESVFDVYDSHVK

SEQ ID NO: 6153 - protein, 1029 aa, Zea mays
  VARIANT 535..1029: note = Derived polymorphism lacks residues 535 to 1029
MGGSRWLLHFLLVSVLLHVVRSLESQACHPADLRALLDFSGGWDSKAAGLVGWGPGAAACCSWTGVACDLGRVVALDLSNRSLHGVISPAVASLDGLAALNLSRNALRGAAPEALARLPRLRALDLSANALSGPFPAAGFPAIEELNISFNSFDGPHPAFPAAANLTALDVSANNFSGGINSSALCLSPLQVLRFSGNALSGEIPSGLSQCRALTDLSLDGNCFTGNVPGDLYTLPNLRRLSLQENQLTGNLGSDLGNLSQIVQLDLSYNKFTGSIPDVFGNMRWLESVNLATNRLDGELPASLSSCPLLRVISLRNNSLSGEIAIDFSRLPNLNTFDIGTNYLSGAIPPGIAVCTELRTLNLARNKLVGEIPESFKELTSLSYLSLTGNSFTNLASALQVLQHLPNLTSLVLTRNFRGGETIPVDGISGFKSMQVLVLANCLLTGVIPPWLQSLGSLNVLDISWNKLNGNIPPWLGKLDNLFYIDLSNNSFSGELPISFTQMRSLTSTNGSSERSPTEDLPLFIKRNSTGKGLQYNQVSSFPPSLILSNNLLVGPVLSSFGYLVKLHVLDLSWNNFSGPIPDELSNMSSLEVLNLAHNDLDGTIPSSLTRLNFLSMFDVSYNNLTGDIPTGGQFSTFAPENFDGNPALCLRNSSCAEKDSSVGAAGHSNKKRKAATVALGLGTAVGVLLLVLCAYVIVSRIVHSRMQERNPKAVANAEDSECSSNSCLVLLFQNNKELSIEDILKSTNNFDQAYIVGCGGFGLVYRSTLPDGRRVAIKRLSGDYSQIEREFQAEVETLSRAQHENLVLLQGYCKVGSDRLLIYSYMENGSLDYWLHERADDSGVLLDWRKRLRIAQGSARGLAYLHMSCDPHILHRDIKSSNILLDDNFEAHLADFGLARLICAYETHVTTDVVGTLGYIPPEYGQSPVATYKGDVYSFGIVLLELLTGRRPVDMCRPKGTRDVVSWVLRMKEEGREAEVFHPSIHHEDNQGQLVRILDIACLCVTAAPKSRPTSQQLVAWLDDIAEG

SEQ ID NO: 6154 - protein, 254 aa, Zea mays
  VARIANT 43: note = Ancestral polymorphism is R, Derived polymorphism is W
  VARIANT 105: note = Ancestral polymorphism is S, Derived polymorphism is L
MADPTERDQFTDDEEEEDYLEDGEQGLGSEDEEGGGAGGKRKRLGNTLGGIGKRGVCYLSRVPPHMNPSHIRQMLSKYGEVLRIYLVPEGQGHHKHTSVKAKAYSEGWIEFAKKSVAKRVANLLNGEQIGGKKRSPFYYDIWNIKYLRKFKWDDLVGEMAEKTHIREQKLTLEIAAAKKQRDHYLSNIEKSRALKHIQERRKKRQKTEGAEASNVPETKTARSIPQKKPVVETDAKTKSTLSKDILAGVFGGSS

SEQ ID NO: 6155 - protein, 312 aa, Zea mays
  VARIANT 19: note = Ancestral polymorphism is R, Derived polymorphism is Q
  VARIANT 21: note = Ancestral polymorphism is R, Derived polymorphism is G
  VARIANT 22: note = Ancestral polymorphism is P, Derived polymorphism is L
  VARIANT 38: note = Ancestral polymorphism is E, Derived polymorphism is K
  VARIANT 41: note = Ancestral polymorphism is R, Derived polymorphism is W
  VARIANT 45..312: note = Derived polymorphism lacks residues 45 to 312
  VARIANT 54: note = Ancestral polymorphism is R, Derived polymorphism is C
  VARIANT 56: note = Ancestral polymorphism is V, Derived polymorphism is M
  VARIANT 59: note = Ancestral polymorphism is R, Derived polymorphism is K
  VARIANT 69: note = Ancestral polymorphism is G, Derived polymorphism is S
  VARIANT 70: note = Ancestral polymorphism is R, Derived polymorphism is C
  VARIANT 71: note = Ancestral polymorphism is S, Derived polymorphism is G
  VARIANT 75: note = Ancestral polymorphism is A, Derived polymorphism is V
  VARIANT 96: note = Ancestral polymorphism is A, Derived polymorphism is P
  VARIANT 119: note = Ancestral polymorphism is R, Derived polymorphism is H
  VARIANT 178..312: note = Derived polymorphism lacks residues 178 to 312
MIQEMKGEIGAISSRGVLRLRPGSHAGAGRAPAAEPDEAPREGCWAQLPLELLRMVLVRVEDQEPRWPGRSAVVACACVCRCWRAAVKEIVRVLEASGKLTFPISLKQLMMGNFLLAARKCRRPACTEYLISLDAKNTSAGSYIGKLRSNFLGTKFTVYDAHPPCARAAVSKGYMIGSAHVSPGVPAGNYPVSHISYYATLGSRVPRKMKCVMDSIPVSAIKGGGTAPTQTEFPSMSSSSFASVPFFTRKPGHRPDSCPGVPPGTQNETKTVLKNKSPRWHQPLQCWCLNFHGRVTVASVKELPAGGGFGRE

SEQ ID NO: 6156 - protein, 153 aa, Zea mays
  VARIANT 1: note = Ancestral polymorphism is M, Derived polymorphism is I
  VARIANT 17: note = Ancestral polymorphism is G, Derived polymorphism is R
MGGMTGAARSGVGAITGGSVAGASAAGGIATGGEATGAGVAGAGAATATVGDATGGSVAGGVAETGGVAASGGEETGGNVAASCGEAAAVGGAAAPVGGAVAEACGAAADVVGAAAKACGGKAAFVGAAAEAWGAEADVVGGKAAVAGAAAET

SEQ ID NO: 6157 - protein, 148 aa, Zea mays
  VARIANT 122: note = Ancestral polymorphism is R, Derived polymorphism is C
  VARIANT 109: note = Ancestral polymorphism is A, Derived polymorphism is T
  VARIANT 108: note = Ancestral polymorphism is A, Derived polymorphism is T
  VARIANT 100: note = Ancestral polymorphism is P, Derived polymorphism is S
  VARIANT 85: note = Ancestral polymorphism is A, Derived polymorphism is T
  VARIANT 78: note = Ancestral polymorphism is L, Derived polymorphism is P
  VARIANT 74: note = Ancestral polymorphism is R, Derived polymorphism is W
  VARIANT 62: note = Ancestral polymorphism is A, Derived polymorphism is V
  VARIANT 50: note = Ancestral polymorphism is A, Derived polymorphism is T
  VARIANT 43: note = Ancestral polymorphism is G, Derived polymorphism is R
  VARIANT 41: note = Ancestral polymorphism is A, Derived polymorphism is T
  VARIANT 40: note = Ancestral polymorphism is A, Derived polymorphism is T
  VARIANT 21: note = Ancestral polymorphism is S, Derived polymorphism is L
  VARIANT 19: note = Ancestral polymorphism is T, Derived polymorphism is M
  VARIANT 10: note = Ancestral polymorphism is R, Derived polymorphism is Q
  VARIANT 1: note = Ancestral polymorphism is M, Derived polymorphism is I
MPATASGGARPEEVLPAPTVSASASSCMGTRAEELTARLAAAGPSPGAGAGGEEVEHERVRALREIKNQIIENRTKKLLYLRLGAVPAVVSALADPGASPAALVQAAAAAGIFACGVEDCARRAGRRHYGAPHSAPRSPRREGSGDAI

SEQ ID NO: 6158 - protein, 573 aa, Zea mays
  VARIANT 155..573: note = Derived polymorphism lacks residues 155 to 573
MGCVHGRPTTSSPAPAATSSRRRDQPAASQPHQEGVDSSDAAPPADAAAPEQPAAEKPEKVKRERRSRSSRSAATAAAAHAEVRLGGSFANKARGEQVAAGWPAWLSAVAGEAIDGWTPRRADSFEKIDKIGQGTYSNVYKARDSLSGKIVALKKVRFDNLEPESVRFMAREILILRRLDHPNVIKLDGLVTSRMSCSLYLVFDYMVHDLAGLAASPDIKFTLPQVKCYMRQLLSGLEHCHNRGVLHRDIKGSNLLLDNNGVLKIGDFGLASFFDPNHKQPMTSRVVTLWYRPPELLLGATDYGVGVDLWSAGCILAELLAGKPIMPGRTEVEQLHKIFKLCGSPTEEYWKKSKLPHATIFKPQQPYKRRIADTFKDFPQSALRLIETLLAIDPSDRLTATSALNSDFFKTEPYACEPSSLPQYPPSKEMDAKRRDEEARRLKAAGGRANGDGTRKTRTRDRPRAVPAPEANAELQANIDKRRLITHANAKSKSEKFPPPHQDGALGFPLGCSNHMEPSFEPPDPSSFSTVFPYEKSTVPTWSGPLADSAAGNQKRKHKSGRSSKQPATARAR

SEQ ID NO: 6159 - protein, 102 aa, Zea mays
  VARIANT 10: note = Ancestral polymorphism is D, Derived polymorphism is N
  VARIANT 19: note = Ancestral polymorphism is H, Derived polymorphism is N
  VARIANT 29: note = Ancestral polymorphism is P, Derived polymorphism is S
  VARIANT 30: note = Ancestral polymorphism is P, Derived polymorphism is L
  VARIANT 31: note = Ancestral polymorphism is A, Derived polymorphism is T
  VARIANT 34: note = Ancestral polymorphism is P, Derived polymorphism is S
  VARIANT 38: note = Ancestral polymorphism is R, Derived polymorphism is Q
  VARIANT 44: note = Ancestral polymorphism is P, Derived polymorphism is L
  VARIANT 58: note = Ancestral polymorphism is P, Derived polymorphism is L
  VARIANT 75: note = Ancestral polymorphism is G, Derived polymorphism is C
MPPPPPDRRDYLYREGRRHDGGEGDPLLPPAPTPPRWRDSPYHPSPPPPLRDHARPSPRQAPTSASSEGYYRQGGGAYDRSYPDDPPPVYTSSRSDRYWPIL

SEQ ID NO: 6160 - protein, 155 aa, Zea mays
  VARIANT 6: note = Ancestral polymorphism is E, Derived polymorphism is K
  VARIANT 13: note = Ancestral polymorphism is R, Derived polymorphism is W
  VARIANT 14: note = Ancestral polymorphism is A, Derived polymorphism is T
  VARIANT 30: note = Ancestral polymorphism is S, Derived polymorphism is L
  VARIANT 36: note = Ancestral polymorphism is R, Derived polymorphism is H
  VARIANT 71..155: note = Derived polymorphism lacks residues 71 to 155
  VARIANT 98..155: note = Derived polymorphism lacks residues 98 to 155
MKNKVESMKKRYRAETAAVARASPAAAGLSWRFFARMDGLLKGPPVGPDQVQQQPKLTNGRIDLQAPAKPEAEEEADFAAQLQDAVPGAFTDLMKWTRMAPSRIKRRRLITACRRRAGLLIAMPTSVLRGVRWRTRTWRTRSGTGPRRERAQTSI

SEQ ID NO: 6161 - protein, 461 aa, Zea mays
  VARIANT 126..461: note = Derived polymorphism lacks residues 126 to 461
MAAGAHCVVQPSAKGMEYTWSSHGPTADGDFGVSISAPGGAVAPVPTWTLQSRMLMNGTSMSSPSACGGVALLVSGMKVEGIPLSPYSVPSIIENTAASISNAPEEKLTTGNGLLQVDRAFEYAQQANKLPLVSYRISINQVGSQVGSYHASSLFVATRPPTYGVVSRGIGVEGVSTVLAGLWGTGVGSATITENVHTIAVTKMGSRRAVGFGAILLVLLSIVVKNSHAVRKGKVGAFIASIPDVMVAALLCFMWAMLCALGLSNLHYSATGSSRNSIIVGLALFLSLSVPSYFQQYGVHPSANSSVPTYFQPYVVASHGPVHIGSGGVNYVLNTILSFNMAIAFLVALVLDNTVPGGRQERGLYVWSEAEATMRESTFMKDYELPFKIGRLFRVWSCLGQDDMATVVSTVLLITEVTTLLHMFVGTRLPLVQGPSFVYLAPALAIINSQEFFRINDNVIE

SEQ ID NO: 6162 - protein, 766 aa, Zea mays
  VARIANT 544..766: note = Derived polymorphism lacks residues 544 to 766
  VARIANT 698..766: note = Derived polymorphism lacks residues 698 to 766
MAPPAVAASAFPFRLFSAEARRNNKSGRGKRSAARPLKSSPPPRPPSSSSVIGGGVAATTFTRLPLRDAPESTEVTLDRFPTAPANPGAPALTLGSVQRLENEEFDVGWRPNSVARIPLRDSSDGVELTIGQFEARAAGRKSTGGRGFTRQTVERLGDDGEGEELVVTSLDVFEVKNGRRDRGLVPEVLDDGDDVVVFDPDYGVDSDDEEEEFEMFPFDKSHHEEADAVPRAEIGEVEYGDENDDNDGDEVVVFYADYDEEEDSEEDGYEVENAEEGEGDVKEKGVPAVMRCFDTAKIFAKAGDGGNGVVAFRREKYVPYGGPSGGDGGRGGDVYVQVDGEMNSLLPFRKSVHFRAGRGAHGMGQQQAGAKGEDVVVKVPPGTVVRTSDGGVELLELMKPGQRALLLPGGRGGRGNAAFKSGTNKVPRIAEKGEKGPEMLKFKLPSGIDNDHQCTIWWLELELKLVADVGIVGAPNAGKSTLLSVISAAKPAIANYPFTTLLPNLGVVSLDFDATMVVADLPGLLEGAHRGYGLGHEFLRHSERCSVLVHVVDGSAQQPEYEFEAVRLELELFSPSLVDKPYVVVYNKMDLPEASERWNTFKERLQSEGIEPFCISAINRQGTQDVIHAAYKLLQKERQRMKETEGWSGTENLNHVSEAIKKERRAPMNEFEVFHDKGTNTWNVVGAGIQRFVQMTNWQYSDSLKRFQHALEACGVNRALMKQGVKEGDTVIIGEMEMVWNNETDRARPSKTMNTQDDAVRWPEFG

SEQ ID NO: 6163 - protein, 1592 aa, Zea mays
  VARIANT 702..1592: note = Derived polymorphism lacks residues 702 to 1592
MGDDAELEEGEACACGDDTAFVDPDVALSYIDEKLQDILGHFQKDFEGGVSADNLGSKFGAYGSFLPTYQRSPLPQTRSPPKAGNITSKSPFHQSNEDLSQKPPAVAVSSTPQSNGPVVPFSGDSIKKEIRPSTKSERGSVSHDSYGPSKCSDQNRLKVRIKVGSDNVLARNNAAIYSGLGLDISSPSSNEDSPDGRGSLSPEVNNVPHESPQTILQIMTCFSVPGGFLLSPLPANILQLTKKVVSSSKKWESNVDVENVQESYEGHVAKRVKSDGNKKRLIDAKNSKNKNDISAVMKKEIDMELVAGQKIVSEALKISLLSDPRAMDAKGENRLEEEPAENNLVGIRDARLKERCTKTDSMTVKVEPAKAEVMECLENSSFGSSEMDLSAVKGKSKPKTEKGEATLEDRNTTNDKDLISDRKQKKKIKSGSKYNASNFEGSISNVINEGASAVFHMGKISGLEALPYDTNGENNSKSEVKKMQREQKANVSTSSDFLEEEKHIHSSAAVKERSDMQSKPIHTGKKPKAKSHRDVRDNNFPEGSYGSKEQDSLENKSAFGDPRPKEKPWKFDSEDSDAPGISRKDSSYVKLDKHLATEEQKMHILPPATASTANAAFIHAAPVVIEEHWVCCDICQKWRLLPYEMNPSDLPKKWKCSMLQWLPGMNRCEISEEETTNALNALYVPAPANGIPSVGLPHVASSGLVTSSTPNMNGHIEQSRKRKNVLSDGNFVAEGSHQTQGSGHPMSNQHAPNKSKTHTDGIQYPIDRDSVSKSVDPTIKKQRSKSKHHSSYSDGVDLVERPKKHSKVKSKRDLDRDEYKASKKIRKEERHFDRDRNLGSGLASRDVPDEAKAFPVKSVTSKGSGERSDLSSSKQKNVSHHNHLENSKKARQDYVGFPEDESKEYFHQSDVQRSDLSSKKRIVKKWEESQYNPVAQVSKGAIKETYRDQNLKEAKLMSLNSEELFSMTSSKPPKAQHADQVLFYDGGRTNSELVEDNTHFSGKTGLPEQENSLSDKALDLGKPASDVAYIQTSAVTSSSSKASVSQKKKQTTQAMKTSSIESLSLSPQRNSNIDNVSASHSRVSGKDGSLNANSSTVPAMAKQLNTQVGVAVNDQWSSEPILVGSSRRKSDRDNGQVQLTQGHASDGIHPERGLNEDLQPESGRKDSNIKNSHIPKSSNHLHSGEKNNYNTDGSPMQPGKHLVDPKTPVLDKGDSSMHENKKSANSLQDRNGSTHCPPDGNPLLGLPSGKEKSYLKNNRQDSQKPKPQISPLKESKLDSHSTPLKPNGSKLTPQSRQYNAENGGRHGTAKQAIRSPADTFSPARKDNTSTAYALKEARDLKHKANRLKEEGKELESTRLYFDSALKFLHVASLLEPPSFDGLKQGDAAQSMYSDTAKLCNFVGHAYEKCKKMAAAALAYKCVEVAYLKAAYCKHPTASKDRQVLQAVVQTAPGESPSSSASDIDNLNNNGLSKGPSSKDANSPQVVGNHLLLATRNQPHLMRLLAYTNDVNSAFEATRKSHMAIASASGNHENGVDGLSSVKTVLDFNFRSVNDLLSSMKLNIIQQCKSIGLSFELAGQLVQRVIIFLLFLR

SEQ ID NO: 6164 - protein, 108 aa, Zea mays
  VARIANT 79: note = Ancestral polymorphism is P, Derived polymorphism is R
MSGSGGGVWVFNKKGVMQLEQLAPASRKALVYLPTDEVVRSVEALERRLGALGWERYYENRSVVQLHRRGGGADLITIPRDFAGLRSTHMYDVVVKNRHHFKVVDRDA

SEQ ID NO: 6165 - protein, 537 aa, Zea mays
  VARIANT 28: note = Ancestral polymorphism is A, Derived polymorphism is E
MAGSAALPPLAAFASLLTARRFAAARSALRSLLTPRLLAVPFADLAASSLPRGAPPHAVAAFHDMLFRAYADAGAACRAAEALDAAVSRLGSLDPRSLTSSLLSLRRAGRLADAAGLLERALGSCPGSVSPLAASVVVDGLCKSGRVDDARRLLDDMPRHGVSLNALCYNSLLDCYVRQKDDGRVQEILEIMENEGIEATVGTYTILVDSLSTARDISKVEALFNEMKANNVVGDVYLYTAVINAYCRAGNMRRAAKVLDECVGNGVEPNERTYGVLINGFCKIGQMEAAEMLLADMQGQGVGLNQIIFNTMIDGYCRKGMVDDALKIKAAMEKMGVELDIYTYNTLACGLCRVNRLDEAKTLLHIMIEMGVVPNYVTYTTLISIHCKDGDMVEARRLFREMAEKGATPSVVTYNVMIDGYTKKGSIREAERFRKEMEKKGFVPDVYTYASLVHGHCVNGKVDVALKLFEEMKQRGTEPNVVAYTALISGLAKEGRSEAAFQLYDDMLKAGLIPDDSLYSALVGSLHTDNRKDVKVS

SEQ ID NO: 6166 - protein, 159 aa, Zea mays
  VARIANT 34: note = Ancestral polymorphism is A, Derived polymorphism is D
  VARIANT 35: note = Ancestral polymorphism is P, Derived polymorphism is A
  VARIANT 43: note = Ancestral polymorphism is V, Derived polymorphism is G
  VARIANT 44: note = Ancestral polymorphism is Q, Derived polymorphism is E
  VARIANT 45: note = Ancestral polymorphism is V, Derived polymorphism is G
  VARIANT 46: note = Ancestral polymorphism is A, Derived polymorphism is E
  VARIANT 47: note = Ancestral polymorphism is A, Derived polymorphism is E
  VARIANT 90: note = Ancestral polymorphism is P, Derived polymorphism is L
  VARIANT 109..159: note = Derived polymorphism lacks residues 109 to 159
  VARIANT 137: note = Ancestral polymorphism is E, Derived polymorphism is K
MAEDQTNPSGPAPASGEEREVVVEHQQEEPRRRAPKLRYLDFVQVAAAQAAVCIAALYGLAKDHAGPLRPGVDAVESAVKGVVGPVCGLPLDVLAFVDRKIVVPTAAHWAEKYNRAVATAADHGYAGATYLPTIPTKRIAKRSFGYSSCSIGWHRVELE

SEQ ID NO: 6167 - protein, 1057 aa, Zea mays
  VARIANT 387: note = Ancestral polymorphism is S, Derived polymorphism is L
  VARIANT 433..1057: note = Derived polymorphism lacks residues 433 to 1057
  VARIANT 549..1057: note = Derived polymorphism lacks residues 549 to 1057
  VARIANT 579..1057: note = Derived polymorphism lacks residues 579 to 1057
MVDTRRSSAAKRRGPSEDSSPSPPTTQADPTTAGLPVEPASPPPSSGSRSGKRAKVAVARAEDPGAPRGKAVDPAAVDVLDSSVANLQGVARPPAANVAASSAVSNSVGRRKRNQSVRAIPTGEGTLWKPRPAGGRAEAWGRLISQSSEYPSIPIYTTHFTIGNGGKCDLKLTETSPGPLICKLKHVKRGAALEIYMNKVVHVNGKALDKAAKVTLIGGDEVMFVSLGTHAYIFQQLLEEKASTPSLCSKCVIQQEQYPVVKDKEIVSSLCKTVGEQSYHPSEENMTFGRHQLLKDDLKKAAISASDISESFDNFPYYLSENTKNVLLSSSYVNLCCKESTKWTKDISSLCKRVLLSGPPGSEIYQELLVKALTKSFGAKLLVIDYSLLSGGQPSKSKESKPYKKGDRVRYIGPIQSSGFMFEGQRAPDYGSQGEVRLTFAENGSSKVGVRFDKQIPGGIDLGGSCELDHGLFCSVDSLCLDGPGWEDRAKHSFDVVFEFASEESQQVPVILFLKDVEKICGNNYTYHGLKNKLESFPAGVFIVGSQIQTDARKDKSNNGSPWLKFSYSQAAILDLAFQDSFGRAGEKNKEALKMSKHITKLFPNKVTIESPEDETELSQWKQLLGRDIEILKAKANFLKIQSFLTRHGMECTDLESVVCVKDRNLTSECVDKIVGYALSYQLKDHPIQTPGKDARVVLSGVSLKYGIDLLESIQSGPKKKSTKKSLKDVVTENEFEKRLLPDVIPPDEIGVTFEDIGALENVKETLQELVMLPLQRPELFSKGQLMKPCKGILLFGPPGTGKTMLAKAVATEAGANFINISMSSIASKWFGEGEKYVKAVFSLASKISPSVIFVDEVDGMLGRRENPGEHEAMRKMKNEFMVNWDGLRTKDKERVLVLAATNRPFDLDEAVVRRLPRRLMVNLPDAPNRKKILSVILAKEDLADDVDLEALANLTDGYSGSDLKNLCITAAHRPIREILEREKKERTLAEAENRPAPPQCCSGDVRSLKFSDFKHAHEQVCASISSDSKNMNELVQWNDLYGEGGSRHKTPLSYFM

SEQ ID NO: 6168 - protein, 419 aa, Zea mays
  VARIANT 35: note = Ancestral polymorphism is K, Derived polymorphism is N
  VARIANT 30: note = Ancestral polymorphism is L, Derived polymorphism is V
MPNDGGILEHGHLEKTYRFSQEDIMTEVVLLSSRNPFDMILPVLGPYNIGYTSNGRYMLVGGRKDHLAMMDMLHMDLIKEFEFSFHSRKQFLLCHTSSALAFTKESKGQNKNSGGKKFFIKRKTVGYAMIYKDLSVALLTFILRFLNGGHRRRRGADFVARRLLRVACRHGRHHAKKHSKKDAWATLDPERIRRTGGDPGAGPSNVAAPAAPPQQPPAPRQDRWVCSPSPSPERVAERLRESETQQPLRPMRYCPLHGWGPCPARQPRAPPTDADTAAPAVRSSGLLVQVTSPARPRAQTRLTARKSTGPRGRPVGQIASTSTAAVAVDATSSSSDDERIALVLGDGVQQRLPTPTPDDGPSGTVSPPALLSPSGNRVVRRLAHHLSPRPRAPGSWSATARPSDDDVRERSRSPPRRLP

SEQ ID NO: 6169 - protein, 470 aa, Zea mays
  VARIANT 70: note = Ancestral polymorphism is H, Derived polymorphism is Y
  VARIANT 45: note = Ancestral polymorphism is H, Derived polymorphism is D
MAQAEREHLSVVMFPWLAHGHITPYLELARRLTSEDGGDVDVTVHLVSTPVNLSAIARQQTPRIRFVELHLPAALDLPPALHTTKHLPARLMPALKRACDLAAPRFGALLDELRPDLLLFDFLYPWAPLEAASRGVPAVHLSTCSAAATSFMVHWFGSARAGRAFPFQGVGLGGAEEEAKYTSLLLREHPDGLVPERDRLLLSLARSSGFVAIKTCADIERPYMGYLSELLGGKEMVPIGPLLVDGSDTGGGTTSPDPDRVTRWLDLQPPASVVLVSFGSEYFMSEQQLARMARGLELSGERFVWVVRFPKGDEGDAAARALPRGFAPAPGRGLVVEGWAPQRRVLEHPACGAFLSHCGWSSVLESLAAGVPIVALPLHIDQPLDANLAAELGAAVRVPQERFGEFRAEDVARTVRRAMRGEESRALRRHAAELREVVARNDADDAQVAALVQRMARLCGKGQQRVAVPN

SEQ ID NO: 6170 - protein, 337 aa, Zea mays
  VARIANT 104: note = Ancestral polymorphism is G, Derived polymorphism is D
  VARIANT 176: note = Ancestral polymorphism is E, Derived polymorphism is K
MLRLRFRPAPLSLKLAFTVSLAVSFSVSCCASSSYSSRTSSRSPQAVAADLLSVLAGPRAAARVPAAEASRLRACLRFLAPANPTAQKVSSWSRGGPRKFLLDGCDAGAAEADEMVMWPPAPVLDLARLAVDSGGDPGAIHRALDPTMLPVPDVEGSQKNKCHLTRTPYGRRFANEEINSYFAFLFELIVARAPSVGLNVSLNRYDLFHGHLFLASETGRLGILFHAKEYPAFNKELFPYNLGYCQAGSNVPYDDSMNLRNVLWLAPLPSKETKAWLAPGVLVVLDAHPDGIIYQEMIRDYVQIVRTVYEDDLGENTVDVNYLNVANAAPVDRIYIC

SEQ ID NO: 6171 - protein, 306 aa, Zea mays
  VARIANT 166: note = Ancestral polymorphism is S, Derived polymorphism is C
  VARIANT 155: note = Ancestral polymorphism is G, Derived polymorphism is E
  VARIANT 20: note = Ancestral polymorphism is A, Derived polymorphism is T
  VARIANT 13: note = Ancestral polymorphism is D, Derived polymorphism is Y
MSDEGGTGEPLSDSQKREIAVWFLSNAPAGEIHYVAKDVRALLGDDAVYEAAAAEAFPEYNKARLVSLELPDRSGDIIITAYGEIDKNNYLDPRTAQVASIDHMKQTCTKLRPAEDEELPSAYIEEFRCALDVELSKYVAEAYPKGTCAVYCTSGKDIEGPGADFCFAAVISATKRSPQNFCNGSWRSIWTMEFNYELQFVDIKGNIQVDAHYFEEGNVQLDTNIDRKDSTIMQSPDDCAVSITSIIRHHESEYLSSLEESYLNLSDATFKDLRRKLPVTRTLFPWHNTLAVSLTRDLAKQLALGK

SEQ ID NO: 6172 - protein, 204 aa, Zea mays
  VARIANT 47: note = Ancestral polymorphism is G, Derived polymorphism is R
  VARIANT 55: note = Ancestral polymorphism is D, Derived polymorphism is H
  VARIANT 88: note = Ancestral polymorphism is R, Derived polymorphism is Q
  VARIANT 101: note = Ancestral polymorphism is E, Derived polymorphism is V
  VARIANT 112: note = Ancestral polymorphism is T, Derived polymorphism is I
  VARIANT 117..204: note = Derived polymorphism lacks residues 117 to 204
  VARIANT 132: note = Ancestral polymorphism is G, Derived polymorphism is R
MEELCNSNSEQGYHFPLFTGGKVEGEQGAAIHVVLFDAGTGCVVSSGPEPSANLDIVVLEGDFNNEDEEGWTGEEFGSHVVKEREGKRPILTGDLQVTLKEGVGTIGELTFTDNSSWIRSRKFRLGLKIASGFCEGVRIREAKTEAFMVKDHRGELYKKHYPPTLKDEVWRLEKIGKDGSFHKRLNKSGISTVEDFLRLVVRDP

SEQ ID NO: 6173 - protein, 587 aa, Zea mays
  VARIANT 197: note = Ancestral polymorphism is N, Derived polymorphism is I
  VARIANT 403..587: note = Derived polymorphism lacks residues 403 to 587
  VARIANT 485: note = Ancestral polymorphism is D, Derived polymorphism is Y
MFPIQIPTPAAAGLVRTLTTPPSAFQSTTHAPFLSGVINSAAARSCRKRRYADAHEGASSPRRRRRRRFLLVPNSFLAGRSFALRTLASALHKRRHDAATSSARPSSRRLRLLSPVLFPALRPLSPRVSLATAPRSHRKIHVDDARRAVSTPCRRRRRSSLLPRVRHFRPFALRFLLTPGALSPHRRRKPAEVDMGNLISQLLWKSTRDGVSEAHTKRLDGSPEVVDLTVEPELENNDAVGRMFGDRSVPALGSSKSPEKKATFYEEPHGRRLQESGFKKLKLAELPDPLDNTSKEDLSELFTPLSDKDEREVNALLCSSDDSDKIVVIHTPSNIEITKEKLQCLRPRGWLNDEVINLYIELLKEREKREPNRFLKCHFFNTFFYKRVLDFRFTYCMHKYPLKCWSYYIIFETYGFILHRKQKHCHLGFDIWLMNEFMTQIFVPVHRNAHWCLALINMKDKTLQYLESLVGWGRDVLDILVGLSDQTESYTILRLECLNCMGLPLQIIHARYIVDELKDKSNIEVEPSSWTVVSESLPLQQNGWDCGMFMLKYIDFHSRGIKPSFSQEHMMYFRKRIAKEIMALRAD

SEQ ID NO: 6174 - protein, 376 aa, Zea mays
  VARIANT 6: note = Ancestral polymorphism is T, Derived polymorphism is I
  VARIANT 166: note = Ancestral polymorphism is H, Derived polymorphism is Y
  VARIANT 183..376: note = Derived polymorphism lacks residues 183 to 376
  VARIANT 196: note = Ancestral polymorphism is W, Derived polymorphism is R
MSAEPTSPPLSTAQVRGSLIPPLPDDLAVHCIALLPRAAHPSLALVSRAFHALLCRHPEPLLAARRTLRCSEPHVLLSLRPPSSASPIFFLLLPHPGWPPLPLPSPPVPVSSSASAATDGARLFLVGGSVSAVPSASVQILDPRARSWSAGPRLSSTREFAAAVAHSGALFVAGGCIPSSPFWAEALDLSTPNAKWRAVASPAHLREKWMHGCASLDGKVVVVADRGGLSYDPSAPPAEAWAPVSPVLDMGWKGRAAVVEGILYSYDYLGQVKGYDPYTDSWSTVEGLEGELPKFLCGATLADVGGLLYLVWEGKWKGKLKGKMEMRSMVVIEWASIQITRVQEGRLRGKVVSRDTVLFPDMPRGSTITHCIALEL

SEQ ID NO: 6175 - protein, 130 aa, Zea mays
  VARIANT 1: note = Ancestral polymorphism is M, Derived polymorphism is I
  VARIANT 4: note = Ancestral polymorphism is G, Derived polymorphism is D
  VARIANT 60: note = Ancestral polymorphism is G, Derived polymorphism is A
MARGVVSAKGGTAAGKKKGSVAFTIDCTKPVEDKIMEIASLEKFLQERIKVAGGKAGNLGESVIISREKTKVTVTCDGPFSKRYLKYLTKKYLKKHKVRDWLRVIAANKDHSVYELRYFNIAENEGEEED

SEQ ID NO: 6176 - protein, 1053 aa, Zea mays
  VARIANT 109..1053: note = Derived polymorphism lacks residues 109 to 1053
  VARIANT 94: note = Ancestral polymorphism is S, Derived polymorphism is L
  VARIANT 61..1053: note = Derived polymorphism lacks residues 61 to 1053
  VARIANT 57: note = Ancestral polymorphism is D, Derived polymorphism is Y
  VARIANT 47: note = Ancestral polymorphism is S, Derived polymorphism is F
MSNDGTMSAAGEDMEAKPKQDPLLEMMEAAVRHCNLDLSYLQRKIFSWSIQDVFNKDLLKQQVRRIPDTFMLLNAYLDSFTGPLIEEVHCDVFLSLSGYAHANFIEIVRLDKLNHEKSIYGFVVSMPSKDAKSREIYAPKEGDIVVVSLQKPKHVSDLTKNRSSYNLGSILKSGKEEEEDSDLPPNFCIVRFLSAIPVEVDPETSKPRGPCFAVFLINTTTYDHIWTCLHLVANDHNLAPLQKRGSNTAIVNLVWQYKRRAAEDGSLSFSQLSQSVTQSVDDLGLEKFGLNDSQLHAVADCVLSAIDNRLPSLKLIWGPPGTGKTKTICTILWAMLMKGLRTLTCAPTNTAVLEVASRIVRLVEHLHGSVCFLNDIVLFGSKEKMKIGREDALSMVFLDSRAKRLLPCFMPTTGWMHCLRSLMDHLESPITQYRLHLEKLLKNEKKKESNKGGSRATQGTIIRIPPFKDFFKGYFNKVSNLLRKCVETMYNDHPRSPETGHSFQCMLEVLELIGILQELINCKNDDIWSDEFHDCKIEDDGDPILWSEQLAHVRSNTSKKHKLKLARSLCVRELRYLHKNLELPGYSSKRSVETYLLQRAKCILCTVSSSFRLYNVPMDSSCTDIHSLLKGPETFKLLDMLIVDEAAQLKECETLIPLQLPGIRQAVFVGDEYQLPALVRSKISDGANFGRSVFERLSSLGYGKYLLNVQYRMHPEISRFPVATFYDGKLSDGPNVTSMSYERTFLASKVFGPYSFINVDGGRETTEKHGTSLKNTVEVAAVLRIVQRLFKESVSTGCKLSVGVVSPYNAQVRAICQKVGESYNAHDGFSVKVKSVDGFQGAEEDVLIISTVRSNGAGSVGFLTNLQRTNVALTRAKHCLWIVGNGATLSSSKSVWQKIVKDARDRGCYFEASDDGDLSNAVVKAIIEQDDADNLVRMESLHISRPRSQLQDEDEDQDQDEDEDEDEDEDEDEDEDEDEVEGGGEEAEAGGEQGEGGGGDETEAEAGGAAEGGDEAEAALARRPRKFRRPHAVQPPPVPSSETGKTVISPVGD

SEQ ID NO: 6177 - protein, 149 aa, Zea mays
  VARIANT 19: note = Ancestral polymorphism is C, Derived polymorphism is F
MASSKALLLLAAAAVAAACLVGAADAKFGRLGRLVITGVVPCNTGSLIDIASSPAFPNADVELRCAGRVVAGATTNTNGTFSMELDMTNALAAFIGGCTLVVDTPLVKCNADLTDVGSLVSYLQGPLTRLLGGIFHLFPAGFSFHVRRA

SEQ ID NO: 6178 - protein, 877 aa, Zea mays
  VARIANT 11: note = Ancestral polymorphism is P, Derived polymorphism is L
MTKLTSELLRPVVPAAALDEAALLRYLVANVPGFPGPAPALSLTQFGHGQSNPTYCIHASAPGGGQPRRYVLRKKPPGAILQSAHAVEREYQVRSGSISIFPPPLFFCGKDANPIVSFLLITHMGLLQSFPIGKQVLKALGDHTDVPVPKVYCLCTDASVIGTPFYIMEYLEGIIYPDSALPGVTPSKRRAIYLSTAKTLAAIHKVDINAIGLQKYGRRDNYCKRQVERWERQYLASTGEGKPARYQRMLDLARWLKEHVPEEDSSPGPGTGLVHGDYRPDNLVFHPTEDRVIGVIDWELSTLGNQMCDVAYSCLPYIIDAAPSARTSYGGFQDTGIPDGIPQLEEYLSIYCSFAARPWPAANWKFYIAFSLFRGASIYAGVYHRWTMGNASGGERAKFAGRVANAMIDCAWDFINRVNVLQELPSKGSQVLGASWQEFHREEESSTSEKNQGKFVPSEKVMQLRKKLIKFIEDHIYPMEAEFYKHAQSTSRWTIHPEEENLKALAKKEGLWNLFIPLDSAARARKLLFEDHSQISLGSSNNLLLGAGLTNLEYGYLCEIMGRSVWAPQIFNCGAPDTGNMEVLLRYGTKEQQKQWLVPLLEGTIRSGFAMTEPQVASSDATNIECSISRQGDFYVINGRKWWTSGAMDPRCKILILMGKTDFSAPKHKQQSMILVDINTPGVQIKRPLLVFGFDDAPHGHAEITFENVRVPVTNILLGEGRGFEIAQGRLGPGRLHHCMRLVGAAERGMNLMVERALNRTAFGKRIAQHGSFLSDLAKCRIELEQARLLVLEAADQLDRHGNKKARGILAMAKVAAPNMALKVLDMAMQVHGAAGVSSDTVLSHLWATARTLRIADGPDEVHLGTIAKLELRRARL

SEQ ID NO: 6179 - protein, 170 aa, Zea mays
  VARIANT 99: note = Ancestral polymorphism is P, Derived polymorphism is T
MEDDSTEAASSARATVPPPGWTRALANTGASGLAAASLVLLLLYLTGRFLWLYNKNAARAADSSRTPGAAAGASTSLLPAASPPPRRDVPLPSSLSTIPVFFVLHVAAPGLGGGEKAECAVCLAEFGEWEAGRLLPRCGHAFHEECIATWLRVSTTCPLCRAATAPCASV

SEQ ID NO: 6180 - protein, 320 aa, Zea mays
  VARIANT 5: note = Ancestral polymorphism is A, Derived polymorphism is V
  VARIANT 201..320: note = Derived polymorphism lacks residues 201 to 320
MAASVSASCLISLSSLAVVLVALASAASAQLSSTFYDRSCPNALSTIRSGVNSAVRQEPRVGASLLRLHFHDCFVRGCDASLLLNDTSGEQSQGPNLTLNPRGFVVVNSIKAQVESVCPGIVSCADILAVAARDGVVALGGPSWTVLLGRRDSTASFPGQTSDLPPPTSSLRQLLSAYNKKNLNPTDMVALSGAHTIGQAQCSSFNDHIYNDTNINSAFAASLRANCPRAGSTALAPLDTTTPNAFDNAYYTNLLSQKGLLHSDQELFNSGSTDSTVRSFASSTSAFNSAFATAMVKMGNLSPQTGTQGQIRRSCWKVNS

SEQ ID NO: 6181 - protein, 314 aa, Zea mays
  VARIANT 2: note = Ancestral polymorphism is A, Derived polymorphism is S
MAASASCLLSLLVVVVLAALASAQLSSTFYDTSCPSALSTISSGVTAAVAQEARVGASLLRLHFHDCFVQGCDASVLLNDTSGEQNQIPNQTLNPRGFDVFDSIKAQVEAVCPGIVSCADILAVAARDGVVALGGPSWTVALGRRDSTASFPAQTSDLPPPTSSLQQLLRAYSKKNLNQTDMVALSGAHTIGQAQCLSFNDHIYNDTNINPAFAMSLRTNCPASGSSSLAPLDAMTPTAFDNAYYTNLLSQRGLLHSDQELFNNGSADSTVSSFAANAAAFTSAFATAMVKMGNLSPLTGSQGQVRINCWRVNG

SEQ ID NO: 6182 - protein, 430 aa, Zea mays
  VARIANT 103..430: note = Derived polymorphism lacks residues 103 to 430
MPPATGAVASAAGTVLLGRYELGGLLGRGASAKVYLARDLRTGRSVAIKSFPNPRAASDRPVAIEREAGILRRLRHRHVVRLHEILATRTKVHFVLDLAAGGELLSLVDASGRMTEDLARHYFRQLVCAVRYCHARGVCHRDIKPENLLLDGAGALKVADFGLGAVAGAGGDLLRHTTCGTPAYVAPEILSRKGYEYDPAKVDIWSCGVVLFVLAAGYLPFNDASLVNMYRKIYAGRFRCPAWFSPALRDLLRRVLHPDPSARADADSIVAHPWFRHGASDEEMGRLMHGGGGDEDEEAWVGAAADEDDAGREPTAFDILSFSPGCDLSALFLGGGCKERVFVGEAAAGVLGRVEAAGRKGGYRVRKEGKRGVRVEGEEGGVVAKVSVVRLADAVSVVEVVKDDGADAALFWTELLEPAVCVPATALCHV

SEQ ID NO: 6183 - protein, 233 aa, Zea mays
  VARIANT 47: note = Ancestral polymorphism is D, Derived polymorphism is V
MNSWFHFHRLRRKRAGAGAIANAAAAEPPPPPPCSPNRASYYVPSRDRAVPRRPDNNPKLRDTQFPRSPQASDNVFDVVARSSPAPELKLRPILTRPPPRPDGGGGAAVSPTGRVRPPPGFHHAATPDRRRRNKAEEEACTRRASGLRQAYEGLVVVVESADPEEDFLESMAEMATANGVRSPRGLEELLACYLALNAADHHRAIVAAFRRAWMHLHLLRRCMHEHESCVVAD

SEQ ID NO: 6184 - protein, 163 aa, Zea mays
  VARIANT 81: note = Ancestral polymorphism is V, Derived polymorphism is L
  VARIANT 80: note = Ancestral polymorphism is C, Derived polymorphism is F
  VARIANT 46: note = Ancestral polymorphism is R, Derived polymorphism is S
  VARIANT 28: note = Ancestral polymorphism is A, Derived polymorphism is V
MALPASSSGLFRFVSPRSRPQSTDIVAAASWGVFAGTAGLYLVQVRINRPARISYPPLALLDRGSSHVYKARRLSSRLLCVIFDESSGSADVISFLGIRFPAWLIDDLSNVIFSCCYWIDAWSIRQTKKGKRLVEQGSRRIRKITSDIYSKAHGWKPVDRRLQ

SEQ ID NO: 6185 - protein, 203 aa, Zea mays
  VARIANT 19: note = Ancestral polymorphism is K, Derived polymorphism is N
  VARIANT 95: note = Ancestral polymorphism is D, Derived polymorphism is N
MDADQQGVVAAAVKPALAKGTPSASFRLRNGSLNAVRLRRVFDLFDRNGDGEITVDELAQALDALGLDADRAGLSATVGAYVPDGAAGLRFEDFDKLHRALGDAFFGALGGQDDATAAADGAGAGAEEDEQEMREAFKVFDVDGDGFISAAELQEVLKKLGLPEASSMANVREMICNVDRDSDGRVDFNEFKCMMQGITVWGA

SEQ ID NO: 6186 - protein, 126 aa, Zea mays
  VARIANT 12: note = Ancestral polymorphism is R, Derived polymorphism is C
  VARIANT 21: note = Ancestral polymorphism is G, Derived polymorphism is V
  VARIANT 22..126: note = Derived polymorphism lacks residues 22 to 126
MPTSLFSLLLLCVLSHTFALGYRTKFDGRLQTFSDMLTTAHELARSGFARVTVYEKENCLGGHARTMTVEDADTVVTMHLDLGFMVFNRIPDYHGIIKHPMDFSTIRKKLDKGIPTWSDLRRYSLQ

SEQ ID NO: 6187 - protein, 1330 aa, Zea mays
  VARIANT 237..1330: note = Derived polymorphism lacks residues 237 to 1330
  VARIANT 390..1330: note = Derived polymorphism lacks residues 390 to 1330
  VARIANT 406..1330: note = Derived polymorphism lacks residues 406 to 1330
  VARIANT 431..1330: note = Derived polymorphism lacks residues 431 to 1330
  VARIANT 470..1330: note = Derived polymorphism lacks residues 470 to 1330
  VARIANT 1189..1330: note = Derived polymorphism lacks residues 1189 to 1330
MEAVKASEARRDPPLLRAVELSRVVAEEGAGAELAGILVSNLCFAHNSPSLWKLLGQAVASRLLCPLHVLALLTPRVLPQRRAQPEAYRLYLELLKCHATSSLLAMEAGPNRDKIGKSIAEALQLSKVYGFSGTEFGHVVILFVLAVVNKLIDSILEDCGFPSAMAEGQESVYAIEGPQPMDLDIKRGSTENQNEHREQLRRKNTFMALDVLHMMAADRKIQSFLSLIFLNMYIFSYPFSRWSSMYYPPMDKFNFNWLQLRVRPEKFSSLRQRLSSIEAHKVTLETLLPSGHKINDLLINIWRVCKAGYQPNNKHILGVLGNMGSGGSLLGQLTGAGRPACWIIFDIYVENAIDGKHLSVTSAIGIIKEMTKTMQVLNEASWQETFKALWISTLRLVQRAREPLEGPIPHLDARLCMLLALIPLSIAAILQEESDMFGVEGNKILPQRQGLISSLQDLIQYSGLLVPPSSVVNAANAAASKAAIFKANYKAGAGNTSMMDQTDSSMKAAGNMLHLIIEACISRKLIDTSAYLWHGYVVPSRTLKDTALPQESPWLNFMKGSQLSEPLIDALVATPASSVAELDKLYSVATNGSEEEKTAAAKILCGASLVRGWNIQEHVVSMVVKLLSASLPSDSSTSTPGSMSHYLAHMSTLNEILLGVSYGDVIHILSLYGMVPDVAVALMPLCEAFGSIAPPPNHKSTILGETSVYLVFSCAFLCLLRLWKFYRPPQEYCLTGRGGSVKLELTLDYLLLMHNNRIFSNSSAPNRDSYNSMGSVNEVSAQPIYIDSFPKLSAWYFQNQACIASTLSGLCNKNPVHQVANKILNMICRKMNKGGVSSSNLSSTSSSSVSGSSVSASDDSYQRPAVPAWEFLEAVPFVLEAVLTACAHGRLSSRDLTTSLRDLVDFLPASLAAIVSYFSAEITRGIWKPVPMNGTEWPSPGASLHSIEAEVKEILASAGVQINSCYPRGVPPMLPLPMAALVSLTITFKLDRSLEYIQGVIGHALENCAGGSSWPSMPIIGALWTQKVRRWHDFIVLSCMRSPFGRDKDAVAQLIRSCFSSFLQSSSSGSDIIANRGVGALLGDSITDQGLRLPMAPGFVYLRTCRTFHDTYFVSEVILKQVIEWAHKLANGWSFNGPPQLKSGRTPLSCAASMAHQVAMLGGGLLCIAGGPLVVQVLYEDTLPTLLLSAREQSLKDPGPVSSTLQGYAMANMLFYCGSLLWGADRSSPVMKLSFLSRRPRVVRNHMDFIAGVLDGHILLGCDPGTWKAYVSQFMFLVVKFVPSWLPDIKLDTLKKIAAGLRSWHEHDLALSLLERGGPQAISVVVETFL

SEQ ID NO: 6188 - protein, 466 aa, Zea mays
  VARIANT 288: note = Ancestral polymorphism is N, Derived polymorphism is Y
MRRYSALPNGGRQETLADRAHRYRGVLLVVLAPLALVSLVLLLMPRSPAGATAGARRSGPPGADKYAVIFDAGSSGSRVHVFRFDANLDLVHIGSEIELFVQIKPGLSHYANDPREAAESLVSLLDDAKRVVPAELRDQTPVRVGATAGLRNLGAQKSEAILQAVRDILREKSSFKNQPDWVTVLDGTQEGAYEWVTINYLLGNLGKTYADTVGVVDLGGGSVQMAYAIAEKDAEKAPKPSEGEDAYVKKLFLKGTTYYLYVHSYLHYGLLAARAEVLKAGNGNGYSNCMLEGFQGKYKYGDDSFEASGPPSGASYSKCKDDAVKALKVDEACTHMKCSFGGIWNGGGGAGQKNLFVASFFFDRAAEAGFVNANAPVAKVKPSDFRQAAERACSLSVKNAEATFPGVQKDSIPYICMDLVYQYTLLVEGFGVDPDHEMTLVKKVPYSDAYVEAAWPLGSAIEVASS

SEQ ID NO: 6189 - protein, 595 aa, Zea mays
  VARIANT 539..595: note = Derived polymorphism lacks residues 539 to 595
  VARIANT 379: note = Ancestral polymorphism is P, Derived polymorphism is H
MMGGGTLMMDHGMAAGGKALYGECFFGEEDLVNPGPAPANEEMTTMNFPLDEMMMSDDDVDGIEELERRMWRDRVRLRRLKEEQQQKSGRPSAGSGAKQEASSSRQRQSQEQARRKKMSRAQGGILKYMLKMMEACNAQGFVYGIIPENGKPVTGASDNLRAWWKEKVRFDRNGPAAAAKYQADNAAAGGGGGVAAAALAGPHSLHVLQDTTLGSLLSALMQHCDPPQRRFPLERGVPPPWWPQAAVPGDLLGPPPYKKPHDLKKAWKVAVLTAVIKHMSPDVDKARRLVRQSKCLQDKMTAREIVTWLAVLRQEEELYLQLHPGARPAPSSAAAAAATTIPFRASSGEYDVDGEDTGMNHQPPSMDDAGHNKFVMVAPAALMKEEATDAEFFQKRSAADPELMLGSSFRAYTCGNVQCPQGFPDRNARNAHQHTCKSNNNSVGAAVPPQLRATESVFPAPFGPPGQAEALGGLGFDLPVDGQRSLAELMDMYETANVGGAPSSLVVSNVDTVAPGVRVSAPFPTPCLFGDTVRNVIQQSAAAFYGRGDDAPFGGDVAAASPELRFGSGLNVAGGGALQPQPHKSTGSSNANWFY

SEQ ID NO: 6190 - protein, 501 aa, Zea mays
  VARIANT 330..501: note = Derived polymorphism lacks residues 330 to 501
MSAPPPAGEYQDDEPLQRSTVPAKAPTANGGLALSTQCEFPAIARSASRDRFAVLVHAKAPSDVARAPLDLVTVLDVSSSMKGQKLELLKQAMCFVIDQLGPTDRLSVVTFADDASRLTRLSRMSDSGKACAKMAVLSLGVLKNTNIGRGLRVGAQVLAGRREKNVVAGMILLSDGQDTSGFWPTVGPDGTKSYAALVPPSSAPIHTFGFGTNHDAAAMHAVAEATGGTFSFVGNEAAIQSSFARCVGGLLSVAVQEARVAVTCLHRGVWIQEVKSGAYVSHLGADGIAATIDVGELYEAEERRFLVLVYVPMVRSTEEVTRLVKARCTYREAATGLARHVAARAAVVQRPLELATLPAPSVDVERERVRLAATEGIAAARVAADGGQNAGAARILESRLKAVEQSAPGDPTCEAIKEELRDLSARVGDRAEYQKTGRACLLVGMSSHAQQRASGMDVEATSKASAYLTPKMEEMVDLSRETGSSGKQEQPVKQAKVEEEV

SEQ ID NO: 6191 - protein, 347 aa, Zea mays
  VARIANT 210: note = Ancestral polymorphism is R, Derived polymorphism is C
  VARIANT 198: note = Ancestral polymorphism is T, Derived polymorphism is K
  VARIANT 99: note = Ancestral polymorphism is P, Derived polymorphism is R
  VARIANT 43: note = Ancestral polymorphism is G, Derived polymorphism is S
MAARDHRELSGDEDSVVAAGDLRRGPWTVEEDMLLVNYVAAHGEGRWNALARCAGTRCCMLVATLRDDDQTNNTMNCAYAGLRRTGKSCRLRWLNYLRPDLRRGNITAQEQLLILELHSRWGNRWSKIAQHLPGRTDNEIKNYWRTRVQKHARQLNCDVNSQRFKDLMRYIWMPRLLERIGSDDSGDGAFVIDAATPTPTPTLLTAATWCVDDVELSCTTAVSSSSSVSTDSMHQQQQQQQLVAVSPPPQPAAFGESNNDASHYGVHNSNAAMSMWGDTLCQPPHSATPHLAGAGTCSWSDESLLVPDAGGGVYADMGLPDLCDTDTMWAAGASADDDLWYTQIMGL

SEQ ID NO: 6192 - protein, 539 aa, Zea mays
  VARIANT 134: note = Ancestral polymorphism is E, Derived polymorphism is D
  VARIANT 360..539: note = Derived polymorphism lacks residues 360 to 539
MSLRVLNPNAEVLNKSAALHMNINAAKGLQDVLKTNLGPKGTIKMLVGGAGDLKLTKDGNTLLKEMQIQNPTAIMIARTAVAQDDTSGDGTTSTVLFIGELMKQSERCIDEGTHPRFLVDGFDVAKRACLDFLDKFKTPVVTGEEPDRDTLKMVARTTLRTKLYEGLADQLTDIVVNAVLCIRKPDEPIDLFMVEIMHMRHKFDVDTRLVEGLVLDHGSRHPDMKRRAENCYILTCNVSLEYEKSEINAGFFYSNAEQREKMVAAERRQVDERVKQIIELKNKVCAGGDKNFVVINQKGIDPPSLDLLARAGIIALRRAKRRNMERLVLACGGEAVNSVDELTEDCLGWAGLVYEHVLGEEKYTFVENVKNPRSCTILIKGPNDHTIAQIKDAVRDGLRSVKNTVEDEAVVLGAGAFEVAAKKHLIDNVKKTVKGSWQQRAQLGVEAFAEALLVIPKTLAENSGLDTQDVIVSLQNEHDRGLVVGLNHHSGDPIDPQMEGIFDNYSVKRQIINSGPIIASQLLLVDEVIRAGRNMRKPT

SEQ ID NO: 6193 - protein, 225 aa, Zea mays
  VARIANT 138: note = Ancestral polymorphism is V, Derived polymorphism is E
  VARIANT 153: note = Ancestral polymorphism is D, Derived polymorphism is G
  VARIANT 154: note = Ancestral polymorphism is H, Derived polymorphism is L
  VARIANT 183..225: note = Derived polymorphism lacks residues 183 to 225
  VARIANT 184: note = Ancestral polymorphism is S, Derived polymorphism is N
MGPCWPRKARTHETQEYSRTGHSRRLFVFLPVRVGERRGVSGVRTAAVDSDSVTATRRSPKLPSPQVLVGMASTACFVIVSKNDIPIYEAEVGSAPKKEDLSYHHQFILHAALDVVQDLAWTTNAMFLKSVDRFNDLVVSVYVTAGHILYKFGHGSAIFSLTATLAHTRFMLLHDSRSEDGIKSFFQEVHELYIKIFLNPLYLPGSRITSSHFDTKVRALARRYL

SEQ ID NO: 6194 - protein, 98 aa, Zea mays
  VARIANT 46: note = Ancestral polymorphism is Q, Derived polymorphism is L
  VARIANT 51: note = Ancestral polymorphism is S, Derived polymorphism is C
  VARIANT 76: note = Ancestral polymorphism is R, Derived polymorphism is S
  VARIANT 89: note = Ancestral polymorphism is E, Derived polymorphism is D
MINEVDADGNGTIDFPEFLNLMARKMKDTDSEEELKEAFRVFDKDQNGFISAAELRHVMTNLGEKLTDEEVDEMIREADVDGDGQINYEEFVKVMMAK

SEQ ID NO: 6195 - protein, 801 aa, Zea mays
  VARIANT 319..801: note = Derived polymorphism lacks residues 319 to 801
  VARIANT 296..801: note = Derived polymorphism lacks residues 296 to 801
  VARIANT 57: note = Ancestral polymorphism is S, Derived polymorphism is Y
MPPPPPPSVRGFLDAHFASPDDLAAAPALAELLRRECDGLDASLRRAEARLGAAAASWLARYSEARANLLRVRSRGGRLVAEDDGAEAVRTVGLPALVREIQRIDTIRLYAEATLQLESLVGNLEDAAFSIVRQAPKSKLSSILRKSNETEWKQGKLLHAVDAVKDIERELVRISTSRPQWANLVMAVDSRVDKTLSILRPQALTDYRALLASLGWPPSLSSPDTEKDKYPQIPNPLVLMNEGNKARYSQSFQALCALQHVQGNRESRLCQTAKVTPALADLKYFTRTACFDNGLWAIDELVHPIASRMEYHFVKWSEQPEFIFTLVYKITKDFMDGVDDVLQPLIDQARLVGLSAKESWVTGMVKILVGYLERQIFPALVCSYQDHATVGKPEVDSSWLHLNDVMISFDKRMQLLADSGIQKMTSLSEGLSRSLSVFSIYAEHPDWLQIWADVELCSAQDKLKSEMEDETSWSCSGQHDQRGHMENSTKFLLSTREDYKAPPVCEFVTKTALSMVERGRVLPNRGMQIQYNRSSSVRFLNGFFLVLRERCEALQLSNTALEDHSLSKTSCAINAARYCENVLREWDEDTTFLDMGPQGSLYTDEIGFLVKLGTDHLEQILSWVLLEFEDLSWEYVQSIGSWSGQTILDDEILDEENTGVSPGFVPSLDVLMDRTAKLKRYLNSKDFLDLWRSIAEGLDYYIYSSIRWAEVSFSDPGITQLRVDIKALLHIFRPFCSRPEAFLPFLSESLRLLTMKKSDAQCLLETLMDDTKSDDCLKREGLHHVNASQAAKILSSRKFSG

SEQ ID NO: 6196 - protein, 1024 aa, Zea mays
  VARIANT 132..1024: note = Derived polymorphism lacks residues 132 to 1024
  VARIANT 556..1024: note = Derived polymorphism lacks residues 556 to 1024
MLRAAAAAAAIFPARVAAAPAAAAAEELRYPLLRVIGTLRGSRGSVLLGRRVRFCSNSSASDSEVAAADAEANAEDATVAEEEAGSKASSAIVPTSTNIDDCLSVIALPLPHRPLFPGFYMPIYVKDQKLLQALIENRKRSAPYAGAFLVKDEEGTDPNIVTGSDSEKSIGDLKGKDLLKRLHEVGTLAQITSIQGDQVVLLGHRRLQITEMVEEDPLTVKVDHLKEKPYNKDDDVIKATSFEVISTLREVLRTSSLWKDHVQTYTQHIGDFNYQRLADFGAAISGANKLLCQEVLEELDVYKRLKFTLELVKKEMEISKLQELGLETDDKTALSAKFRERIESKKDRCPSHVLQVIEEELTKLQLLEASSSEFSVTRNYLDWLTVLPWGNYSDENFDVHRAQKILDEDHYGLSDVKERILEFIAVGKLRGTSQGKIICLSGPPGVGKTSIGRSIARALNRQFYRFSVGGLADVAEIKGHRRTYVGAMPGKMVQCLKSVGTANPLVLIDEIDKLGKGHSGDPASALLELLDPEQNVNFLDHYLDVPIDLSKVLFVCTANVIETIPNPLLDRMEIIAIAGYITDEKMHIARDYLEKNTRQACGIKPEQVEVTDAALLALIENYCREAGVRNLQKHIEKIYRKIVTNILLHLSAILFDSFFLVLDSFCTFLFYHQVSLASSSLPLVAPHLNFLSLQIALQLVRQGVSNEPDQESLGVTVNEESNSGDSITAKDEIVKDPAVEDASVANNVTNPASEEANEVNLTTEAPKEDSTSKVLYIVSVLLIDTLLILGNKKTDGVAEDAADKATEKVVVDSSNLGDFVGKPVFQAERIYEQTPVGVVMGLAWTAMGGSTLYIETTKVEEREGKGDLVLTGQLGDVMKESAQIAHTVGRTVLLEKEPDNHFFANSKVHLHVPAGSTPKDGPSAGCTMITSMLSLAMGKPVKKDLAMTGEVTLTGRILPIGGVKEKTIAARRSAIKTLIFPAANKRDFDELASNVKEGLEVHFVDTYSEIYDLAFQSDAGTEMI

SEQ ID NO: 6197 - protein, 549 aa, Zea mays
  VARIANT 60: note = Ancestral polymorphism is T, Derived polymorphism is I
  VARIANT 165..549: note = Derived polymorphism lacks residues 165 to 549
  VARIANT 172..549: note = Derived polymorphism lacks residues 172 to 549
  VARIANT 228: note = Ancestral polymorphism is S, Derived polymorphism is L
  VARIANT 364: note = Ancestral polymorphism is A, Derived polymorphism is P
  VARIANT 384: note = Ancestral polymorphism is V, Derived polymorphism is G
MAPPPPPPSSAPTKNRIRWLRGNKKVVDRYLGEARAALAAAAQDTEDADDAAAAALGLVTVALEMSPRAEAALELRARALLALRRYRDVADMLCDYIPSCCAKSCSADDATTASSSSSCSSGSGADLLSPDHDRPDAGRFLCCLDVSGLKRRLVATFSSIHAHQWRYLVLGQACFHLGLMEDALVLLQTGRRLASAAFRRESVCWSEDRFPPPSNLLAPANTRAESVSQLLAHVKLLLRRRAAAVAALDAGFPGEAVRHFNKVLDTRRSVLPHPFATACLVGRAAAFRSAGRPADAIADCNRALALDPAYIPALRARADVLESVGALPDCLRDLDHLKLLYDAALRDGKLPGPCWRPQGGIRFAEIAGAHRTLTARIQQLRGRVAAGVDYYALLGVRRGCTRSELERAHLVLTLKLKPERSVSFAERMELVDEHRDLEAVRDQARMSALFLYRMLQKGYSFIMSAVLEERGKDAAATAGPEEEEKEVVATVQGSATANGGNMPMATAATPPLIPPFHGVFCRDMAVVGTLLSRGGFDRPIPVNCEAMSC

SEQ ID NO: 6198 - protein, 82 aa, Zea mays
  VARIANT 31: note = Ancestral polymorphism is V, Derived polymorphism is E
MAPSYRPYHVAGEDQQRKVKAGGKWLAAWSVLGVGGDPAEMKRRRRVASYKAYAVEGKVKASIRRGIRWVKAKCDRIAAIHN

SEQ ID NO: 6199 - protein, 440 aa, Zea mays
  VARIANT 52: note = Ancestral polymorphism is K, Derived polymorphism is N
  VARIANT 125..440: note = Derived polymorphism lacks residues 125 to 440
  VARIANT 138: note = Ancestral polymorphism is V, Derived polymorphism is A
MATAARERRLPPALPLATLIGRELRAGGSERPALRYGHAGFAKRGEDYFLVKPDCLRVPGDPASAFSVFAVFDGHNGVSAAVYSKEHLLEHVMSALSPDIGREDWLQALPRALVAGFVKADIDFQRKGEVSGTTATLVVIDGFTVTVASVGDSRCILDTQGGELQLLTVDHRLEENAEERERVTASGGEVGRLNLFGGQEVGPLRCWPGGLCLSRSIGDMDVGEFIVPIPHVKQVKLSNTGGRLIIASDGIWDALSNEAAAKACRGLPAELAAKLVVKQALKTSGLKDDTTCVVVDIIPSDHLTSPQLSPKKNQNKLKSLFRRRSHSSVRKLGGKSASIGSVEELFEEGSAMLEERYACSSNVPLHSLGRNLSLKAASPPFRCAICQVDQEPFQDLMADNGGGYCSSQYAPWGGPCLCLDCRKKKDAMEGKRCSRSTACR

SEQ ID NO: 6200 - protein, 654 aa, Zea mays
  VARIANT 17: note = Ancestral polymorphism is F, Derived polymorphism is S
MAMLPVVVRMAAMPFIFLVLLAHTASAQPDAGCNGILLTYTLQRRDKIRPHVAAPNSQPYSFSASATVVNAGTRPLRSWALLLTFVHGEILVSVDGAVLTSGAALPYNTTAGDAAGRPTPTSFTGYPQTDLLTPIATAGDPAKTQATVSLVGTLFAGPEPYVPLPSFLSLADPSYTCPPATNATSSPTNLTTCCVFTAGGDPTGGLVESGFLPRRTGDLVITYDVLQSYDTTYLALVTLENDALLGRLDAWQLSWRWEHGEFISSMRGAYPREVDTAECLYGPQGQYYKDLDFSKAVLNCDRRPVVHDLPPSRANDTEIGRIDHCCRNGTILPKSMDVARSKSAFQMVVYKMPPDLNRTKLYPPTGFNVTGAASALNPEYACDPPISVSPSEYPDPSGLTSITVAVATWQVVCNITTSPKKPPRCCVSFSSFYNESVVPCRTCACGCPSSAPTCSTTAPAMLLPPQALLMPFDRRASEALEWADQKHLGVPKPMPCGDFCGVSVNWHVATDFTGGWSARLTLFNWDGTDMPDWFTAIVMDKAYDGFEQAYSFNATGVGNSTIFVRGAQGLNFLLGERNMSGVDYPVPGKQQSVFSFTKKKTPGIDIIAGDGFPSKVFFNGDECAMPLRIPSQGTSVVVPMQLCLLVSAFMLLLL

SEQ ID NO: 6201 - protein, 534 aa, Zea mays
  VARIANT 123..534: note = Derived polymorphism lacks residues 123 to 534
  VARIANT 260..534: note = Derived polymorphism lacks residues 260 to 534
  VARIANT 295: note = Ancestral polymorphism is G, Derived polymorphism is V
MRRRPFLDQRRPSFKRRWQQRPWWVCLLLSLLALSCVLLGSPDPDTSPSTSAASSGSEATSSPLLSQAQTMEMMYTIIADEFKSMDNKDMRPEDHLNFFCLGTGKNHHLMAAQNQRNLHIKVQRSLSLCLVELMRRDDVGAAAANRNRNGSVMRVKEKCSEEEGDSVCSVCIDGGELLLCDKCPSAFHHACVGLQATPEGDWCCPLCRCGVCGGSDLDDDTAEGTGPDSRSVKKALPGPCCCCLRGMLVKEALFLRKIYWKSLCKSISFDCVDSVENNCVSVLSCPSFLSCRLFGDSFEIEISVKDLQNVLRVNLDMTLKCFDMVVRLLAIKESHMSKDEMIKDKKHYMDMRFWRMVGFGKLLKYHEDPTAEELAKTLDCWPSLNYYITGCKYVLMPWKFNGCYALFVIDHGKKHVTFIDFTPTQDLCKHMPYKRFAEAIIMSSKKYKIAYNKKRSGWAEDIFGQTLFYRVNTSYFVLQAMIMWGSARRMKFDRDAKILRRNFVIDLLNYEDNSCRYDIPTNIQQRLINIAKND

SEQ ID NO: 6202 - protein, 127 aa, Zea mays
  VARIANT 29: note = Ancestral polymorphism is W, Derived polymorphism is S
MLHNCTIEPHPDFEANAGGKIPTYLARPWKEYSRTLYIQNDIGGFIDPKGCLEWNSDFALETLFYAEADNRGAGTDMSKRAKWGSIKTVTYEEGQKEFTVETLHPGPAVHLQVRGGPNNIVLNNVQH

SEQ ID NO: 6203 - protein, 299 aa, Zea mays
  VARIANT 275..299: note = Derived polymorphism lacks residues 275 to 299
  VARIANT 245..299: note = Derived polymorphism lacks residues 245 to 299
  VARIANT 154: note = Ancestral polymorphism is R, Derived polymorphism is S
  VARIANT 153: note = Ancestral polymorphism is R, Derived polymorphism is H
MGGAAPGGTSAAPVLALEHGVDTEEKIRKMANEIMDIVVDMSLDFCVDKVLAEEDGEYLEGAADGISIDMVAESPTDCPMKVVNGGSLDGVLVDKLPAAFSVVGGVSDDGVCGGGSPSEAMLMADTEATMVAADLVQESHPGRPRECLAVYARRGAVSAPPCSRRGLQQPGLGALSSDMLVAAAGIKEVVSQPTRSSPRLAGGADHHILEKAKLRAAWRNLDGPEFEHSDNDEVDKYESYNLTLGHLCGDFVEEVMDEDSDHLSCDFHTVFKKNKSKGSSRSKGSTKIKFVKKHKRCTK

SEQ ID NO: 6204 - protein, 950 aa, Zea mays
  VARIANT 900..950: note = Derived polymorphism lacks residues 900 to 950
MLLSRPQTLPLPRARLSSPTLRHLRALAAPLRALVSSPPLGFTSAARGPAPLRAAVSESDREQREAGVEAGEQGRPLRVGLVCGGPSGERGVSLNSARSVLDHIQGEDLVVCCYYIDCAMKAFAISPAQLYSNTPSDFDFKLESLAQEFDSLSDFAEHLATNVDIVFPVIHGKFGEDGGIQELLEKANVPFVGTPSKECQRAFDKHNASLELNAQGFLTVPNFLVEKDKLAKPELEAWFQTVNLNKENGKTIVKPTRAGSSIGVVVAYGVNDAAQKAEEIISEGIDDKVIIEVFIEGGTEFTAIVVDVGIANNSEPVVLLPTEVELQYSNNSDTKEDTIFNYRKKYLPSRQVAYHSPPRFPAEVIDCIRQGISLLFCRLGLHDYARIDGWFLPSPVASLPPAENSDKFGNTKYGSVLFTDINLISGMEQTSFLFQQASAVGFSHSRILRTVVQHACSRFPSLLPCNNAWTALSRKLQPSKQVEAIHKGTSRQKVFVIFGGDTSERQVSLMSGTNVWLNLQGFDDLDVTPCLLAPAHGYFSSHDQDFSDSSREVWTLPYSLVLRHTTEEVHAACVEATEPERVEITKRLRDQVMNELGSALSKHDWFAGFDIAYEQPIKYSLQQWIDHVKETEAVVFIAVHGGIGEDGTIQTLLESAGVPYTGPGPIASRTCIDKVASSLAVDHLASYGIRIIPKDVRATEEVLNSSLVDIWNELKAKLETETVCVKPARDGCSTGVARLCCPKDLEVYTNALRRKFQHLPANCLSRAHGVIEMPVPSPESLIFEPFIETDEIIIANKLEDGSARHLVWKGENDWLEITVGVVGKRGEMHSLNPSITVKESGDILSLEEKFQGGTGINLTPPPATIMGEDALQRCKKSIETMANALGLEGFSRIDAFVNVRSGEVLLIEVNTVPGMTPSTVLIHQALAEEPPVYPHRFFRTLLDLVFARAK

SEQ ID NO: 6205 - protein, 151 aa, Zea mays
  VARIANT 88: note = Ancestral polymorphism is R, Derived polymorphism is G
  VARIANT 63: note = Ancestral polymorphism is E, Derived polymorphism is A
  VARIANT 28: note = Ancestral polymorphism is G, Derived polymorphism is S
MPSRALTFSQLGAATDGFSSQNLLGEGGFRRVYKGLLEDTEEVIAVKHLNRDDLQGNSEFLVEVLMLSLLHHPNLVKLLGYSTNSNQRPCACRRTLPAGRGSATSSRRSPSSPTRNTTIPKARELSTRALIVGQTMIAILLGLKWSGQTMT

SEQ ID NO: 6206 - protein, 366 aa, Zea mays
  VARIANT 240..366: note = Derived polymorphism lacks residues 240 to 366
  VARIANT 221..366: note = Derived polymorphism lacks residues 221 to 366
  VARIANT 186: note = Ancestral polymorphism is E, Derived polymorphism is G
  VARIANT 161..366: note = Derived polymorphism lacks residues 161 to 366
MPLHLPAMQGRSAYMQVLLENDAIVSVLTGSYRKRAEYRTSKFPFRTEQRFKPVHPRPIDAGTLWLGHNFGPSSSQNLHDNLNQFDQASSAPTLQQQSFTGNGQLTQGYPGDMHVLQFVEPTPQIDHQNGDEGQSSIPVKLLMAYIRVRAVLGARYYRVPWKSLSDLPAPPHTCLRRMALLLKTNGKIRGAIMCLCNLLGERYIRYLEKERSLKRRRLFPQISNRSQENSLDSDCEQFNWDDFEVPEIKSALNEVLELNQTEKIDQAKRIGPVNQKNINNDNDVTKDTICSQELPNNQALRGETKTSAVSESGFCDPEKTCGHSNAESENMEVFCKPQEKIIKDHRNKIIERGIWKSLAVEKSYKG

SEQ ID NO: 6207 - protein, 1036 aa, Zea mays
  VARIANT 946..1036: note = Derived polymorphism lacks residues 946 to 1036
MRSNTLRKSSTGHLLRSSRTAVAATTTSLYTVLVNSLSADEAARRPAEAALAQCETRPGFCSCLLEIISARGLACREDVRLLATVYFKNSINRYWRHRRDSYGISNEEKDHLRKNLLLNMREENSQIALQLAVLISKIARLDYPKEWPELLSVLAQQLQSADVLASHRVFMVLFRTLKELSTKRLAVDQKNYAEITGHLFEYTWNLWKSDVQTILQNLSMLSQRNDIDSVFEQSNDLALICDRWLLCLMIVRLLIFSGYASDSRTAQEVWQVREVCPTVLTAIKSLLPYYDTFKDKHAKLCDFAKRACTKLMKVLVTLQGRHPYSFVHETVLSATVDFCLNMITNPEQTGTTFEEFLIQSMVLVKSVLECKEYRPSPMGRVINENEPLSLEQRKKNFAAVASDMLKVILSGDRVVLLCNILVRRYFIFTAKDLEEWSENPESFHHEQNLVQWTEKKRPCAEALFIVIFEKYRELLAPVVVSVLREAMAISPPQETEVTAGMLLKDASYTAAGHVYYELSNYLSFNEWFHGSLSIEISNHHPNMRIIRRKIALLLGHWISEIKGDTRKLVYRALVGLLQDNDIAVRLAACSSLCYLFQESCFSELDLFECLPTCWTMSFKLIEDVQEFDSKVQVLNFISVLLEHAGDKVIPFACQLSQFFQMIWNESAGESLLQIQLLTALRTFVSSLGFQSPLSYHMLIPILQSGINIDSPDALNLLEDSVLLWEATLSNAPSIVPQLLDLFPYLVGIMNRSFDHLEVTMKIIEDYIIFGGSEFLKSHGASLANIIDTIVGNVNDKGLLTALPIVDLLIQIFPLEAPPLISSALQKLTFISLSQDDGQNPSRTTVRASSGAILARLLVMNTNFSAQLLSEPALLASIQQAGISVNNNLLFSLVDMWIDKVDDANAIQQKEYAMALSVILTLQVPQVIDKLDDILSVCTTVIIGSREVKTDDDTSGDITSSSWIGNDGSGYSNTSSKELRKRQVKDSDPIKQTSLEMVLRENLKACAVFHGDAAFNAAIGRIHPSSFAQLQQALNTA

SEQ ID NO: 6208 - protein, 223 aa, Zea mays
  VARIANT 196: note = Ancestral polymorphism is H, Derived polymorphism is Y
  VARIANT 133: note = Ancestral polymorphism is G, Derived polymorphism is C
  VARIANT 103: note = Ancestral polymorphism is Q, Derived polymorphism is H
  VARIANT 84: note = Ancestral polymorphism is L, Derived polymorphism is I
  VARIANT 62: note = Ancestral polymorphism is C, Derived polymorphism is Y
  VARIANT 38: note = Ancestral polymorphism is V, Derived polymorphism is A
MAGQSDPHLSIFSPSEVTNPFPSTLHWQGLSSSVLLQVEFVAEDEIVEIVLNIRMDALNMIYVRLPARHHPFPSLSTPHPHLFIHLTLPPPLCRGDFGPFFPQIPTKVPLWLAVALKKRSKCTIRTPDWMTVGQYWKRKESRLGNSSHCHSTILKFLSAGDDISDAYLVRSLIEDIRDVRFHKVKNGLETISGRTYAVKLKNLSAMEVNIVRPFHGENFAGIL

SEQ ID NO: 6209 - protein, 606 aa, Zea mays
  VARIANT 407..606: note = Derived polymorphism lacks residues 407 to 606
  VARIANT 376..606: note = Derived polymorphism lacks residues 376 to 606
  VARIANT 13: note = Ancestral polymorphism is R, Derived polymorphism is L
MGTTYKCCFIFKRRFHTRDAPPPEDVRALFSVHAGGGPHMGADDLRRYLVATGQEEAEVERLLEQIVQGRARVPRLARPLLSLDDFHRYLFSHDLNPPIRHPQVHHDMTRPLSHYFIYTGHNSYLTGNQLSSDCSDTPIIMALERGVRVIELDMWPNSTIDDINIVHGRTLTTPVSLIKCLRSIKKHAFVASPYPVIITLEDHLPSQLQEKVAKMVVEVFGNILYYPPDDTHELKELPSPEQLKGRVLLSTKPPKEYLETKLSDSTKEGDADLHLGKGTGDDAVWGKEVPDFRTEIQSAEKDDENDDVDDEEEQKLQPHIAPQYKHLITIRAGKPKDSLADALKSDPEKVRRLSLSEQQLAKAAKDHATEIVRKSLLPLLKRSASSVPNPNRFTQRNILRIYPKGTRVTSSNYNPFVGWVHGAQMVAFNMQGYGRALWLMHGFYKANGGCGYVKKPDFLMQTEPQVFDPREPQPVKKTLKVKVYMGDGWRMDFKQTHFDQYSPPDFYTRVGIAGVPADSVMKKTNAIEDNWTPVWEKEFSFPLTVPELALLRVEVHEYDMSEKDDFGGQTVLPVSELRPGIRAVALFDRKGMKYNHVKLLMRFEFA

SEQ ID NO: 6210 - protein, 817 aa, Zea mays
  VARIANT 531..817: note = Derived polymorphism lacks residues 531 to 817
  VARIANT 586..817: note = Derived polymorphism lacks residues 586 to 817
MSSSSAASIGQPPPPAPPPEEEKKCLNSELWHACAGPLVCLPTVGTRVVYFPQGHSEQVAASTNKEVDGHIPNYPNLPPQLICQLHDVTMHADVETDEVYAQMTLQPLNPQEQNDAYLPAEMGIMSKQPTNYFCKTLTASDTSTHGGFSVPRRAAERVFPPLDFTQQPPAQELIARDIHDVEWKFRHIFRGQPKRHLLTTGWSVFVSAKRLVAGDSVLFIWNEKNQLLLGIRHATRPQTVMPSSVLSSDSMHIGLLAAAAHAAATNSRFTIFYNPRASPTEFVIPLSKYIKAVFHTRISVGMRFRMLFETEESSVRRYMGTITEVSDADPVRWPSSYWRSVKVGWDESTAGERPPRVSLWEIEPLTTFPMYPSLFPLRVKHPWYSGLAALHDDSNALMWLRGVTGEGGFHSLNFQSPGIGSWGQQRLHPSLLSNDHDQYQAVVAAAAASQSGGYLKQQFLHLQQPMQSPQEQCNLNPLLQQQILQQASQQQMVSSDAQNIQSVLNPGAIQQQLHQLQQMQHTHNDQKQKIQPDQQYQVASSAVLPSPTSLPSHLREKFGFSDPNVNSSSFISSSSNENMLESNFLQVSSKSVDLSRFNQPVVSEQQQPQQQQAWKQKFMGSQSMSFGGSVSLNSPTSKDGSVDNKVGRDVQNQSLFSPQVDSSSLLYNMVPNLTSNVADNNISAFPSGSTYLQSPMYGCLDDSSGLLQNTGENDPTTRTFVKVYKSGSVGRSLDITRFSNYAELREELGQMFGIKGQLDDPDRSGWQLVFVDRENDVLLLGDDPWESFVNSVWYIKILSPEDVHKMGKPGNDPRYLS

SEQ ID NO: 6211 - protein, 347 aa, Zea mays
  VARIANT 241: note = Ancestral polymorphism is A, Derived polymorphism is V
MASPKHSHRHHRAAATKHRRPLALRRAMLHSCVCFLVGLVTGLAPSDWTDAASRAAVHANGAATAQVFRALHAMNQTAAAGALGQLLALQHYQQQPVVEKEKEKEKKPLDLVVVVTTTTTSTGLSERERRSAGLTRTAHALRLVSPPLVWLVVEAAREAGPTARLLRRTGVVYRHLTYAENFTSEAWEEERHHQRNQALAHIERHRLRGVVLFAGLADVYDGRLLEQLRRHIRTRSVGAWAVATVWEQEKRVAVEGPVVVCNTTTTTTSAASTACAWFSASDSTLLAAAAAAAPPVTADDSVHGFAFASDLLWDPSRWDRFPTSEPDQSQVRPINAIPSLPPTPLID

SEQ ID NO: 6212 - protein, 403 aa, Zea mays
  VARIANT 225: note = Ancestral polymorphism is S, Derived polymorphism is F
  VARIANT 281..403: note = Derived polymorphism lacks residues 281 to 403
  VARIANT 333..403: note = Derived polymorphism lacks residues 333 to 403
  VARIANT 346: note = Ancestral polymorphism is P, Derived polymorphism is L
  VARIANT 350: note = Ancestral polymorphism is F, Derived polymorphism is S
MDAEMEDAGRQTEIEWGGGGGADAVLGLAGGASSVSLCYHQAFGPHDDLVLLEAADDLLPDLLQGRVTVRGRPDEDAVLCTPCATYSMKFVGTSNSMFLIPPGEPSAKCLRPDNTSGNANALAATIKLAPGSIELVRVAPRLDKLKSLLRERPYILDEDIGDDDLQHKNKKGLYTWQDLCKLIQASDGELLDALNALSAVDIDGFWRTVDASSVNTILDMILHNSVLRDWPLKAMPESDVLSVMGSDGFTHNIVTHCLNRFGTKVEQEARSFWSLDEKRVCLQFARRALGAGKMKLSNFMEKWKRSIPSGMCCPDLQMLEGEVLCEKLGAETWVHAFSVTDLPLAPAERFAALFRERAKWEWKDLQPYIRDLHVPGASSEGLLIKYTRRSQPNAEAEPIFTAR

SEQ ID NO: 6213 - protein, 250 aa, Zea mays
  VARIANT 77: note = Ancestral polymorphism is A, Derived polymorphism is V
  VARIANT 73: note = Ancestral polymorphism is G, Derived polymorphism is R
  VARIANT 69..250: note = Derived polymorphism lacks residues 69 to 250
  VARIANT 54: note = Ancestral polymorphism is G, Derived polymorphism is R
  VARIANT 51: note = Ancestral polymorphism is T, Derived polymorphism is I
  VARIANT 40: note = Ancestral polymorphism is A, Derived polymorphism is T
  VARIANT 32: note = Ancestral polymorphism is C, Derived polymorphism is Y
  VARIANT 29: note = Ancestral polymorphism is E, Derived polymorphism is K
  VARIANT 28: note = Ancestral polymorphism is A, Derived polymorphism is G
  VARIANT 20: note = Ancestral polymorphism is K, Derived polymorphism is E
  VARIANT 16: note = Ancestral polymorphism is V, Derived polymorphism is I
  VARIANT 6: note = Ancestral polymorphism is P, Derived polymorphism is L
MVKAYPTVNEDYLKAVDKAKRKLRGLIAEKNCAPLMLRLAWHSAGTFDVATKTGGPFGTMKNPAEQAHGANAGLEIAIRLLEPIKEQFPILSYADFYQLAGVVAVEVTGGPDVPFHPGRQDKPEPPPEGRLPDATQGSDHLRQVFSTQMGLSDQDIVALSGGHTLGRCHKDRSGFEGAWTSNPLIFDNSYFKELLSGEKEGLLQLPSDKALLSDPSFRPLVDKYAADEDAFFADYAEAHLKLSELGFAEA

SEQ ID NO: 6214 - protein, 227 aa, Zea mays
  VARIANT 150: note = Ancestral polymorphism is D, Derived polymorphism is Y
  VARIANT 144: note = Ancestral polymorphism is E, Derived polymorphism is K
  VARIANT 112: note = Ancestral polymorphism is C, Derived polymorphism is Y
  VARIANT 111: note = Ancestral polymorphism is H, Derived polymorphism is Y
  VARIANT 108: note = Ancestral polymorphism is I, Derived polymorphism is F
  VARIANT 105..227: note = Derived polymorphism lacks residues 105 to 227
  VARIANT 90: note = Ancestral polymorphism is S, Derived polymorphism is P
  VARIANT 83: note = Ancestral polymorphism is S, Derived polymorphism is C
  VARIANT 73..227: note = Derived polymorphism lacks residues 73 to 227
  VARIANT 63: note = Ancestral polymorphism is A, Derived polymorphism is V
  VARIANT 57: note = Ancestral polymorphism is A, Derived polymorphism is S
  VARIANT 56: note = Ancestral polymorphism is L, Derived polymorphism is R
  VARIANT 54: note = Ancestral polymorphism is A, Derived polymorphism is T
  VARIANT 40: note = Ancestral polymorphism is R, Derived polymorphism is G
  VARIANT 38: note = Ancestral polymorphism is S, Derived polymorphism is I
  VARIANT 32: note = Ancestral polymorphism is S, Derived polymorphism is N
  VARIANT 27: note = Ancestral polymorphism is L, Derived polymorphism is Q
  VARIANT 26: note = Ancestral polymorphism is L, Derived polymorphism is Q
  VARIANT 22: note = Ancestral polymorphism is G, Derived polymorphism is E
  VARIANT 21: note = Ancestral polymorphism is P, Derived polymorphism is L
  VARIANT 14: note = Ancestral polymorphism is S, Derived polymorphism is R
  VARIANT 10: note = Ancestral polymorphism is R, Derived polymorphism is G
  VARIANT 3: note = Ancestral polymorphism is L, Derived polymorphism is F
  VARIANT 1: note = Ancestral polymorphism is M, Derived polymorphism is I
MGLLGYIFSRSTISLVLGIAPGLATLLLGTLNLKFWRSGGSSFLLILAQAAISAFLAWKYSHAYFLTNRLLPWGFYASLRSFSLYRPSPSKAFSPFGQRSDGLSCLKIMQHCNGLFLRLCATCGRKSRKYMLFCFCDPLPKYLEGKLDFDVSILKLPISNKSSIESVFYVFIMMDKVHHDSRIFLHHGYLVLIHPFCAPIILVNLSIELGLLLISFLCLLTWDNLIF

SEQ ID NO: 6215 - protein, 63 aa, Zea mays
  VARIANT 17: note = Ancestral polymorphism is S, Derived polymorphism is Y
MFAMHASLTAKGYKVVSNGIDNHLVSVNLKNKEAKGTRAGLMGTTILAMVNCIDDSPTNFEHN

SEQ ID NO: 6216 - protein, 592 aa, Zea mays
  VARIANT 44: note = Ancestral polymorphism is A, Derived polymorphism is D
  VARIANT 82..592: note = Derived polymorphism lacks residues 82 to 592
  VARIANT 270..592: note = Derived polymorphism lacks residues 270 to 592
  VARIANT 397..592: note = Derived polymorphism lacks residues 397 to 592
  VARIANT 447..592: note = Derived polymorphism lacks residues 447 to 592
MPGVSGISLLSRIMRHNIFKNIPVIMMSSSDDMSTVFKCLSKGAVDFLVKPIRKNELKNLWQHVWRQRCHSSSGSGSESGIQTQKCAKSKGVNESGNNSGSNDDEAGMGLNARDDSDNGSGTQAQNSWTKLAVEIDSPQATSLDQLADPPNSTCAQVIHSKSEICSNRWLPDKSNRNCKKPKNTNDDFKGKDLEIGGPENLYMGHQSSPNGRSIKAADHENNSKESMMENLEEPTVRAADLIGSMAKNMDTPQAARAAEDTPNFSSKVPEGKGKNNQNDKYVLPSLELSLKRSRSCGDGANNKNTVKDDEQRNCVLRRSNLSAFTRYHTSAASNQGGTGLVGSCSPHDNSSEAVKTDSTYNMKSNSDAAPIKQGSNGSSNDNDMGSTTKDVVTKPMLPSAIKANGYTSAFHPVQQWMVPANATAGKTKADENTARNHCVHFENGGSGALQCGSSNVFDPPLEGQATNNYGGVKAGSNSGSNKGQNNGSTAAANAGLAETEIQAMDKSGVGGGNGNGNGSGSGSGNDTYVRRLAANMTPRQAQLKKYREKKKDRNFGKKVRYQSRKRLADQRPRVRGQFVKQAVQNQDGARER

SEQ ID NO: 6217 - protein, 1168 aa, Zea mays
  VARIANT 400..1168: note = Derived polymorphism lacks residues 400 to 1168
  VARIANT 284..1168: note = Derived polymorphism lacks residues 284 to 1168
  VARIANT 167..1168: note = Derived polymorphism lacks residues 167 to 1168
  VARIANT 109..1168: note = Derived polymorphism lacks residues 109 to 1168
MSRRCCSGRRATPTRGGGRATSGPPSPNGSTQTSRMENRVKIMLKLLGQEADSFGKRAEMYYHTRPEVISHVEQVYRAYRALVERYDHISKELHKANHTIATACPEEVQYAMLEEEDHDFPKAITPIKTHKSLVQEILNAKRQGPSGSGWNKPPSHPRMSAEEAQEEIGRLQKSILVLQTEKEYVKSSYESGIARYREIEKQIADTQNEICLIQDRFDAHAAIGDDEARALMTITALRSCQGTIAELVRHFEELIKLAAVELEKTKSLRAQLYAMMDGDTDTCSREASSTDTSVVARSYPVTKAILELQPIYEKLDKFFSSGSESSAEEIAENVDELVDKVINLELKFPKQTAQINQLIQENENLKNKLDELQDEMALRDDQSELNEQIKQLEDEFSTVRVLERSILEEEASVSTGFSEVFSCIINISKALGSFGPEDLHNLSAAVEDGAMVPRDVFLEQSAEESKGGDFRDIEAPTLRHSLGQDREDVSEVVSDNGNDGIHGSRNANEEIIPGSCLMQQVRYKLRLHFDDHIDPLFSSENENIVHDSGEGNVDSSSGKVFQSSSETENGSRNFPNGEIMRGEYPLGIVGQTHLLHSGSMDHLDRKYDSNEASQSLMEVAEGNIDDGNSFSSSSVIQEEGLGDSKSQNTSGQISPIASSDLYRLKEYDSVEESSFPKATCFSGADKKSLHMGHADEAKSVEESPHQVDQLNGPQNIESSNECNQVGLLKEDDCISLVHVDNVHDMKNIYSSEVRDETSICAPAGDYEQVPTNSERKTSHGRELASEATTSNNHGGRSQGVKSGLMGEDFVPSWQEFLPDGLEGKEAILLADCTSVLRNYKETKRRLSELERRNQEHLEETKAVIRELRNANSMKYVEIRSLRDLLDSSEVPPSKAGGNSNGFLSLRSFREIDRSIATLGRDISAVEENSSSNIETPNNTSLHKMTRFRNDIDALVEENLQFLVRYSMACYRMQEFDRRYQEAQDEMEDNKSREPDTPAEPGPAEKKLRELRTELDVWFEQSALLDQEVQLKSASLCRMQEEIAEALRGSLEMDRARFTPYEAAKFQGEVLNMQQSTSKIEGEMQAASEHMRGLQAKVSHALEGLRESFEISSQRLSRPETERSHEKQFKHFPSRTRVPLRNFLFGTKRKKKSIFACINPTFQKQFSDL

SEQ ID NO: 6218 - protein, 77 aa, Zea mays
  VARIANT 62: note = Ancestral polymorphism is P, Derived polymorphism is L
  VARIANT 60..77: note = Derived polymorphism lacks residues 60 to 77
  VARIANT 49: note = Ancestral polymorphism is V, Derived polymorphism is M
  VARIANT 43: note = Ancestral polymorphism is S, Derived polymorphism is F
  VARIANT 35: note = Ancestral polymorphism is L, Derived polymorphism is H
  VARIANT 32..77: note = Derived polymorphism lacks residues 32 to 77
  VARIANT 3: note = Ancestral polymorphism is Q, Derived polymorphism is H
MRHVLLDAARKVGIEGVEELFEDPAKGVDEVQEELKKYSSGISGVPHFVINDKYQLSGGQPPNLFMRAFEIAAKDGA

SEQ ID NO: 6219 - protein, 172 aa, Zea mays
  VARIANT 15: note = Ancestral polymorphism is E, Derived polymorphism is K
  VARIANT 42: note = Ancestral polymorphism is T, Derived polymorphism is R
  VARIANT 68: note = Ancestral polymorphism is H, Derived polymorphism is D
  VARIANT 69..172: note = Derived polymorphism lacks residues 69 to 172
  VARIANT 75: note = Ancestral polymorphism is S, Derived polymorphism is R
  VARIANT 83: note = Ancestral polymorphism is S, Derived polymorphism is L
MRLAHAWVVNYIFSEVQHCLLLVNPPQLHSNLKFVHLFRRETKLISEVEYYLTNLISAEMFIIDVSAHSLSMEESEFQKHMESARLATQVSVASPSSSQGLPTYARANQEETDMAGSRFPFMDSETESLTPGEVKQLHDLYKRVVTRYTLFSEALRKLSIDEDHLLNSMHDP

SEQ ID NO: 6220 - protein, 74 aa, Zea mays
  VARIANT 59: note = Ancestral polymorphism is T, Derived polymorphism is M
  VARIANT 9..74: note = Derived polymorphism lacks residues 9 to 74
MFQLLTYGRRIPTPELFARIDVVDASIVKRVANRFIFDQAATTGSVQLEAMVVIEMVVTEPTTHGRGEHVKAPP

SEQ ID NO: 6221 - protein, 326 aa, Zea mays
  VARIANT 232..326: note = Derived polymorphism lacks residues 232 to 326
  VARIANT 113: note = Ancestral polymorphism is P, Derived polymorphism is S
  VARIANT 27: note = Ancestral polymorphism is P, Derived polymorphism is R
MICGSIVEETTALIHIRSTLKGRYSVRASWKQSDDCCSWERVRCNNGTRVVDLNLSDLRLNSTTGGGCWNLNLAIFSAFHELQQLDLSYNQACLQSFLDVELLGLGLGDIDDPSFMFTTTSQYSIVQSFTFSTKGSVRVYSSGFLDLMFGIDLSANMLSGEIPFQMGNLSSVKSVNLSNNFFTGQIPATFAGMRAIESLDLSHNGLSGQIPCELTKLWSLEVFSVAYNNLSGCVPWSGQFSTFSTESYVGNVNLHSTCVSDSSPIKEEAAGASYQEEDPVLYTMSVTAFLLAFFATVSIMLFHSFLSFGRGTDPINFFDVISSLQR

SEQ ID NO: 6222 - protein, 208 aa, Zea mays
  VARIANT 74: note = Ancestral polymorphism is R, Derived polymorphism is H
MASPSPSSPARASGRRVPPPCWTTDETLALARAYTARRLAVGREHLTSTDWAAVAAAAPSKTARQCRHKIEKLRRRLRSNRRRPCPLLDAMDLLDGPSPPFFSKSQSRSTSLSSSPPPPAAVSTPSPPSPPASPPRKRRRDDAWDEDGVSDVVGALRAIGEGFLRAEERRMEAARETQRMRMEMALRHLDAQRRLMDALVGRIIDALD

SEQ ID NO: 6223 - protein, 144 aa, Zea mays
  VARIANT 45: note = Ancestral polymorphism is A, Derived polymorphism is V
  VARIANT 110: note = Ancestral polymorphism is G, Derived polymorphism is D
  VARIANT 111: note = Ancestral polymorphism is G, Derived polymorphism is V
MTARRVLAPHRRLLCLMRAQPPGPAGIFDATNNTRKRIYMLMKMAEDNCKAKKDEKKQKAEGNILLASIENMQYVVTIDVLHEQLLERFFHFINLILKAWSFFSASGSNGGGIDQPSFREAGHIDQPSFREVGHDLYNMPIKWL

SEQ ID NO: 6224 - protein, 319 aa, Zea mays
  VARIANT 93: note = Ancestral polymorphism is E, Derived polymorphism is K
  VARIANT 97: note = Ancestral polymorphism is A, Derived polymorphism is V
  VARIANT 104: note = Ancestral polymorphism is G, Derived polymorphism is S
  VARIANT 106: note = Ancestral polymorphism is S, Derived polymorphism is F
MSDKKDDEAGTSTPSVAAAAAPAPAPRPSTYAPMGALRDEECANLLALVSTVSRPLEDAVADFLARVPPDRRLRFGTSISFVLEDKMMLQPAERLVAFAILHQGYSSQLANPFLPLLINAACDETSEEAEQAFLQLLLSSTNGDNIEVLKQSAVAYLNGSDYASQVFLPREQLEKQCSYDAARPLPFSSNFRDATVRSTIPDPDVLQSFGSSSELSSIIPNRDDMVATLLQQTSLKGLPPQWIRPSPPRLEIFEGELQWLNIDNNHELLWDSTMCADTSRGAVIRDLVEQACKAPLALAQHEVFSATLFSNGYADNLVY

SEQ ID NO: 6225 - protein, 232 aa, Zea mays
  VARIANT 2: note = Ancestral polymorphism is E, Derived polymorphism is D
  VARIANT 10: note = Ancestral polymorphism is S, Derived polymorphism is I
  VARIANT 15: note = Ancestral polymorphism is F, Derived polymorphism is S
  VARIANT 158: note = Ancestral polymorphism is H, Derived polymorphism is Y
  VARIANT 218: note = Ancestral polymorphism is Y, Derived polymorphism is C
MENKIDTNASIKLVFQVHGGFDIKEITKYLRKDWKLVYHCGMTPQKLPDLVEHNPHIAVEVLSKLINSPDMDAYFDAIVHMDMSLHSMEVVNRLTTAVVLPPGFVHDYISNCIRSCEDIKDKYMQNRLVRLVCVFLQSLIRNRIIDVASREVPRCSCHLPKVSNRIARSLRGGASILHRLLANKGGSGVVQAPEISRMKSAAPSVGRWILRTEIPKVYIHGSAFCFQAADPA

SEQ ID NO: 6226 - protein, 429 aa, Zea mays
  VARIANT 295: note = Ancestral polymorphism is R, Derived polymorphism is L
MLLRTVRFLCSVVAAFARLVRELRKAGVMLSACSPSPVAILSAPTVPAASPINLIASTPLPKRKKTLARVAILENLLAAPPTTLLPPSLVVGLPAKVSDVVSEAAMVEQQQAAQSLMKKASLAARRRPARLVIPVGDDAGEVAAGWGAAAAPAKEADVEVEGEGFSLASRAGPRHAMEDAYAVVTDADSQLAFYGVFDGHGGRAAVDFVSERLSKNVVSAVLAAAGKDTRCEASSSGDDDAVSAAIRAAYLATDSELLTQHQQGASGGACAATAVVKGGDLYVAHLGDCRVVLSREGAAVALTADHTCAAEDERARIEREGGYVSRSGSGVWRVQGSLAVSRAFGDGALKQWVISEPAVTRVPLAAGCEFLVIASDGLWDKVSNQEAIDAVSGGRSRAASCRDLVDMARRRGSRDDVTVMVVDLQRFVR

SEQ ID NO: 6227 - protein, 115 aa, Zea mays
  VARIANT 71: note = Ancestral polymorphism is A, Derived polymorphism is S
MAYLSRTAAAVAVAVRSAVRSAPLTGRVLGAPLPSLASPSAARSARILRRTAAAASAGLETLMPLHSAVAAARLRSCIAVDSSCWSSLSQGNPLSGLLPLEGIMACCQIIGPVVG

SEQ ID NO: 6228 - protein, 283 aa, Zea mays
  VARIANT 241: note = Ancestral polymorphism is A, Derived polymorphism is G
MAALAPSKILGTKLNFAGSSRYATAAPTAGAQKIVSLFSKKPAQKPKPSAVSSSSPDISDELAKWYGPDRRIYLPDGLLDRSEVPEYLTGEVPGDYGYDPFGLGKKPEDFAKYQAYELIHARWAMLGAAGAVIPEACNKFGANCGPEAVWFKTGALLLDGNTLSYFGNSIPINLVVAVIAEVVLVGGAEYYRIINGLDLEDKLHPGGPFDPLGLASDPDQAAILKVKEIKNGRLAMFSMFAFFIQAYVTGEGPVENLAKHLSDPFGNNLLTVISGAAERTPSL

SEQ ID NO: 6229 - protein, 670 aa, Zea mays
  VARIANT 206: note = Ancestral polymorphism is G, Derived polymorphism is V
MDRHRRRHFPFLLALVLLAALSSSSRGAAAEASADTSTPLKAFTWGSNFSGGSLYQGNRDTVVRRLVSGPATSGGVFFNYSSCGDGPDVVYGVAMCYADSQWDDCQQCLHRALSYVFTQCLYSRSAAIMYSDCVLRYSHDAFFSNETEWGHVFNVWSTAFVDDAARWNQTRWTMMTQLAAEAAVSMPRLATGNATYKDGGTDKVYGLLQCRNDLSAGECSNCLSSQLQYLLGSFPNSVNTYVSVKGFSCFVRQDVNPIVLMVPFGAPSPSSPPSSSSKAHKMALTIGLAAAASVILFLFVLATALFIYRRQKRTAATVADQESNKDDETEGVFRFFSKASAGPKRFAYDVLAAATGNFSDDRKLGEGGFGSVYRGFLAELGLSVAVKRVSSSSTKRRKEYASEVTIISRLRHRNLVKLIGWCHTHNELLLIYELMTNMSLDMHLYSAENNVLSWRRRYEIILGIGSAVLYLHQDCEQGVVHRDIKPSNVMLDASFNAKLGDFGLARLVDHARGAHTTELAGTMGYMDPACISTGRFSTQSDMYSFGVVLLEVASGRQPVVVHQGKTIHLARRVLEVYGRGAVLDAADHRLNGDFNARQMECVLVVGLWCTQQDPTLRPSIRQAVSALRDEAPLPTIIVSKAPLLVERLGSLPSSFVPDEGRVTSRMTSTY

SEQ ID NO: 6230 - protein, 327 aa, Zea mays
  VARIANT 45: note = Ancestral polymorphism is L, Derived polymorphism is H
  VARIANT 171: note = Ancestral polymorphism is A, Derived polymorphism is T
  VARIANT 179: note = Ancestral polymorphism is A, Derived polymorphism is T
  VARIANT 248: note = Ancestral polymorphism is M, Derived polymorphism is I
MTSPMHARKAKLKTHFISAKAKLKHNVTPRRVVLLAAAATSAFLLLFTLRTLHSAASRSARASAAATVAAAIASTSPASVAADHADQLEQHHHQECAKVPSSVAEALVHYATSNETPHQTVAEAGAAARVLARRAPCSLLVLGLGPDSALWAALNHGGRTLFLEADAGRIASARAAHSAGIDLQAHPVAFQQEAMTPSDDLLALRNSSDCAASPPKPLTVDHLEQSPCTLAPRGLPETFYEAEWDVIMVNAPVPGAIYTAAVAARARRPGTGETDVLVHGVDDTTEESFARAFLCEPYLKEEASRLRHFSIPSHMDKDAMPFCPLIR

SEQ ID NO: 6231 - protein, 187 aa, Zea mays
  VARIANT 61: note = Ancestral polymorphism is R, Derived polymorphism is Q
MACLAAPVAALVPYGRPGGGLWDLMLLDDPFRVLEQSPLAASSVPRASLDSTSAAGVALARCDWKETPDAHVISVDVPGVRREDVKVEVEENSRVLRVSGERRADEEKEGDRWHRAERAAGRFWRRFRMPAGADVDRVSARLENGVLTVTVPKVAGHRGREPRVISIAGGDMGGVDVAEVMASKAEM

SEQ ID NO: 6232 - protein, 395 aa, Zea mays
  VARIANT 289: note = Ancestral polymorphism is A, Derived polymorphism is S
  VARIANT 280: note = Ancestral polymorphism is A, Derived polymorphism is T
  VARIANT 255: note = Ancestral polymorphism is D, Derived polymorphism is G
  VARIANT 135: note = Ancestral polymorphism is A, Derived polymorphism is T
  VARIANT 127: note = Ancestral polymorphism is A, Derived polymorphism is G
  VARIANT 61: note = Ancestral polymorphism is D, Derived polymorphism is E
  VARIANT 12: note = Ancestral polymorphism is I, Derived polymorphism is M
MKVFKGKIWAAIGSLMDHAGAASTTAKSSSSAAAVPDRALLTDIEAAIERCTGSSGGGGNDDDRHVHEILFLVSNARGAITFLSRRITARLEAARAPAAALRSLLLVHRLLRAGDRYFEQDFRSLWASRELRVDAPRCSCSPLAAGVGYASGACAFVHGYSAYLEGRMQWVINQAGNLEPARKPPPPPPDHDAGKPMPSSSSDDAGAETLLFKLAMCQRLLDLAIQLLPDNNTSASTAARSAFGIVLRESFKVYDAFAEGIDVMLLLSKSLAGQSKPSRATAHEILKKACVQTLELKEFYHKCKRSSANSKSIEYPLVRVVTPAQAVVMEMELELVPIPEEDGCQEEVEAKPQAEAIDGGGSPFAHKMETTISTVWVGFDDEDQKLITAPDAGDP

SEQ ID NO: 6233 - protein, 373 aa, Zea mays
  VARIANT 343..373: note = Derived polymorphism lacks residues 343 to 373
  VARIANT 306: note = Ancestral polymorphism is P, Derived polymorphism is L
MRAPRGGGGCRGGQEHVELIPGIPDDVAVDCLARVPHASHRAMRRVCRGWRSAAAAPAFASARAAAGANEDLVYLMQFGNPSGDDGPKDGDDGPGSTPAYGVAVYNVTTGEWRRERGAPPVVPVFAQCAAVGTRVAVLGGWDPRTFEPVADVHVLDAATGRWRRAAPMRSARSFFACAEAGGKIYVAGGHDKHKNALKTAEAYDAGADAWDPLPDMSEERDECDGMATVAGDRFLAVSGYRTARQGGFERDAEWFDPAARAWRRLDRVRAPPSAAHVVVRGRVWCIEGNAVMEWMGTRRGWREVGPYPPGLKAGTARAVCVGGGEKVVVTGALDGEGGRHALWVFDVKTKSWTVVRPPPEFAGFVFSVASVRI

SEQ ID NO: 6234 - protein, 587 aa, Zea mays
  VARIANT 180..587: note = Derived polymorphism lacks residues 180 to 587
MAVRCSCTALFPLFFCFMICQLCYGTVTDIQCLKKLKASVDPDNKLEWTFNNNTEGSICGFNGVECWHPNENRVLSLHLGSFGLKGEFPDGLENCSSMTSLDLSSNSLSGPIPADISRRLPFVTNLDLSFNSFSGEIPEALANCSYLNIVNLQHNKLTGTIPVQLAALSRLAQFNVADNQLSGQIPSSLSKFPASDFANQDLCGRPLSNDCTANSSSRTGIIVGSAVGGAVITLIIAAVILFIVLRKMPKKKKLKDVSLFEKSVSKMNLNDLMKATDDFTKDNIIGTGRSGTMYRATLPDGSFLAIKRLQDTQHSEDQFTSEMSTLGSVRQRNLVPLLGYCIVKNERLLVYKYMPKGSLYDNLHQQNSDKKALEWPLRLKIAIGSARGLAWLHHSCNPRILHRNISSKCILLDDDYEPKISDFGLARLMNPIDTHLSTFVNGEFGDLGYVAPEYTRTLVATPKGDVYSFGVVLLELVTREEPTHVSNAPENFKGSLVDWITYLSNNSILQDAVDKSLIGKDNDAELLQCMKVACSCVLSSPKERPTMFEVYQLLRAVGEKYHFSAADDELTMLPQNANPEDELIVAN

SEQ ID NO: 6235 - protein, 437 aa, Zea mays
  VARIANT 300..437: note = Derived polymorphism lacks residues 300 to 437
  VARIANT 272..437: note = Derived polymorphism lacks residues 272 to 437
  VARIANT 251..437: note = Derived polymorphism lacks residues 251 to 437
  VARIANT 86..437: note = Derived polymorphism lacks residues 86 to 437
  VARIANT 83..437: note = Derived polymorphism lacks residues 83 to 437
MSRTTPKTTLTRISSPAAATAPRPNLCSCHREYVSFLPTEFPVRTVAWATVLGHIVFDIDSLAKAVDRNRESSSVDDILNVNWLYQDLLLELYVWDRRLHQLVDCTPAENAIVANGQTAAAAEADSEASISSDDLSSYDTSLLLSSSLHPEIDVNGTTTLKWRTCLAKILGTDQELLEHLEGEARSDTRKLHPLVDEFIPTIDGENGICYTHPERLPATCEQGRACPALLPPAVQGVHDGDEEAAEGAQRRRRRQDAVAQDGQDQAGAVQQQAPRVQEILVLYTNYGKQRKPENNWVMHQYHLGSDEEERDGELVVSKVFFQTHPRQCGYTMARESAVIVPAAAAVTGSSNAFIAGHHQSGGGGSSVLREANGGADQLYSPGAMMGYDQGGLETGHLLPLLCLPTSCLTLLSMQQGLALPLEPRIQDKIQTYQICQI

SEQ ID NO: 6236 - protein, 26 aa, Zea mays
  VARIANT 21: note = Ancestral polymorphism is G, Derived polymorphism is D
MQTCMRCYCVGTVHCSVYLHGTLNVQ

SEQ ID NO: 6237 - protein, 185 aa, Zea mays
  VARIANT 61..185: note = Derived polymorphism lacks residues 61 to 185
MGLNAIQYNSMTIPPLTVLVAKKHLAGRIDRVDCSLDECQVITEATREEVTIIHGDLSAFQKEMETVHLVVRSLETKLGRLAYTQVDIYITDSFFSQRLNYISNLILKCLRIGQHEEYMICVNSLKDWIRARKLILVRQVTSSTSRPAIESSERIIRVVRSSTVMSASGLSLLAGTTIPPKRCAH

SEQ ID NO: 6238 - protein, 95 aa, Zea mays
  VARIANT 34: note = Ancestral polymorphism is A, Derived polymorphism is T
  VARIANT 48: note = Ancestral polymorphism is P, Derived polymorphism is T
  VARIANT 54: note = Ancestral polymorphism is A, Derived polymorphism is S
  VARIANT 56: note = Ancestral polymorphism is P, Derived polymorphism is R
  VARIANT 62: note = Ancestral polymorphism is S, Derived polymorphism is Y
MEGKPARSVDLAEHEKQAIKHLYLLTMKPVIYVANVTESYLAEPDINPHDKEVAKRASDLQSGMVTIPARVETELTEVPLEERVEYLKSLLLKVD

SEQ ID NO: 6239 - protein, 170 aa, Zea mays
  VARIANT 6: note = Ancestral polymorphism is S, Derived polymorphism is F
  VARIANT 16: note = Ancestral polymorphism is G, Derived polymorphism is D
  VARIANT 40: note = Ancestral polymorphism is Q, Derived polymorphism is H
  VARIANT 69..170: note = Derived polymorphism lacks residues 69 to 170
MSTPRSTAWSLRYQRDLLQIQALVLSEEAQVSRRFKSNGQILAIDELYQTNEDEVAVNLIVLQETIGKWDDLEISECNPTKIKNCGIWLCYQCRTGYHDLHKEYRNTILNGAMEQMYNETASCLSPYVQIIKTATINFKLCKRDNTKQFHNSKFKFPLVYCNKSGHKIGS

SEQ ID NO: 6240 - protein, 476 aa, Zea mays
  VARIANT 109..476: note = Derived polymorphism lacks residues 109 to 476
  VARIANT 108: note = Ancestral polymorphism is N, Derived polymorphism is K
MTMNAAIASRLGLAVSRCGAGSRVDSRPLTPAVGFTAGPRARSVAVTAASSSPATGGVTPVPPRSNRSVMKRHTLSVFVGDESGMINRIAGVFARRGYNIESLAVGLNKDKALFTIVVSGTDKILNQVVEQLNKLVNVIKVDDLSMEPQVERELMLIKVNAEREKLPEIMGLVRIFKAEVVDLSDYTLTIEVTGDPGKMVAIQKTLSKYGIREIARTGKIALRREKMGETAPFWRFSAASYPDLEVAIPSNFQQNTGVKAINQNPEESSGGDVYPVESYESFSSTSQILDAHWGVMTDGDPTGFCSHTLSILVNDVPGVLNLVTGVFSRRGYNIQSLAVGPAEKEGTSRITTVVPGTDESIAKLVHQLYKLIDVYEVQDFTHLPFAARELMIIKVAANATARRDVLDIAQIFEAQKVDISDHTITLLLTGDIDRMVRLQKMLEQYGICEVARTGRIALLRESGVDSKYLRGFSLPL

SEQ ID NO: 6241 - protein, 125 aa, Zea mays
  VARIANT 8: note = Ancestral polymorphism is V, Derived polymorphism is M
  VARIANT 11..125: note = Derived polymorphism lacks residues 11 to 125
  VARIANT 53: note = Ancestral polymorphism is C, Derived polymorphism is Y
  VARIANT 96: note = Ancestral polymorphism is K, Derived polymorphism is R
MQREELEVDLQKVREQMLAVQPSGKARRYMEDGMVDLADSSRHPIDMHNELLCAQETIRILRREVSEKESEIAQCNAHISELNVHVEAVAQEYKHKMNSKKDEELSAAKQRIVELEGIAARRQRE

SEQ ID NO: 6242 - protein, 304 aa, Zea mays
  VARIANT 41: note = Ancestral polymorphism is A, Derived polymorphism is T
  VARIANT 122: note = Ancestral polymorphism is G, Derived polymorphism is R
MNYIIGAFKPPCDIFVTFADERTRKQVQIKKDNGKTVMVPAFQTLETIAGEVSIAPVPGKRLEHTGVKIELLGQIELYFDRGNFYDFTSIVRELDVPGEIYERKTYPFEFSTVEMPYESYNGTNVRLRYILKVTIGRNYVGSIVESRDFCVRNYSLVPTINNSIKMEVGIEDCLHIEFEYSKSKYHLKDVIIGKIYFLLVRIKIKNMELEIRRRESTGSGPNTYVETETLAKFELMDGAPVRGESIPVRLFLTPYELTPTHRNINNKFSVKYYLNLVIVDEEDRRYFKQHEITMYRLLETPQSS

SEQ ID NO: 6243 - protein, 99 aa, Zea mays
  VARIANT 82: note = Ancestral polymorphism is N, Derived polymorphism is K
  VARIANT 44: note = Ancestral polymorphism is A, Derived polymorphism is V
MTTTTTTLPTGRAVALLLLLLATTATEAANPCNPAQLTPCAGPALFGGAVPPACCAQLRAQQGCLCGYARSPNYGSYIRSPNAARLFAICNLPMPRCRY

SEQ ID NO: 6244 - protein, 582 aa, Zea mays
  VARIANT 52: note = Ancestral polymorphism is K, Derived polymorphism is E
MSAAVACAEKATNDMLIGPDWAINIELCDIINIDPGEAKDTLKLLKKRLGSENSKVQILTLYVLETLSKNCGDIVHQQIVERDILSEMIKIVKKKPDLNVREKILSLIDTWQVVFGGPSGKYRQYHAAYEELRAAGVDFPPREENSLPLFTPPQTQPLRHSHLYPPPGQSYEDAAIQASLQSAPPAPALSLSEIQSARGIVDVLDEMLNALDHRHPEGVREEVIVDLVGQCRSYQSRVMDLVNSTGDESLLFQALGLNDELQRVVQRHDDIAKGILPPGTGAPVPASANVNQGTTPPRPTAVSFSPLLNVHEDDEPEDEFVVLFRRPARDGTVARNNLPYARRNERPYRSPLLPPPPASKRPVYTEASSIDYLSGGSYKSSEKVPDDFINPTAPANVTTSPHSKPEAYPPPSYSSRPDSVSDDFINPTAPSFSAPSRPTDEEPTRSPVKRQESIPDDDFINPTALPGFSSSSATKEFSEDLPRAPWEAQAAAAGSLPPPPARHGQRQQYLEQNVYSGGSNGGGYDELLTRTENLSLNPEKNASRPTASCQAKPEDSLFKDLVDFAKTKPSSPSKSANSRRTR

SEQ ID NO: 6245 - protein, 549 aa, Zea mays
  VARIANT 68..549: note = Derived polymorphism lacks residues 68 to 549
  VARIANT 257: note = Ancestral polymorphism is P, Derived polymorphism is L
  VARIANT 368: note = Ancestral polymorphism is I, Derived polymorphism is S
MAIRSKAWISLLLALAAVLSARAEEPAAAEAEAVLTLDVDSFDEAVAKHPFMVVEFYAPCANFQVQTQMSSAELVNCTCCIIFFVDFCFGLGNGSRMMNRGFCSPFAYENAAKELSKHDPPIVLAKVDANEEKNRPLATKYEIQGFPTLKIFRNQGKNIQEYKGPREADGIVDYLKKQVGPASKEIKSAEGVAAHFDDKKIYIVGIFKEFSGTEFTNFMELAEKLSSDYDFGHTLHANHLPRGDASVEGPLIRLLKPFDDLVVDSKDFDVAALEKFIDASSTPRVVTFDNNPDNHPYLMKFFQSSAPKAMLFLNFSTGPLDSFKSVYYAAAEEFKDKEIKFLIGDIEASQGAFQYFGLKEDQTPLILIQDGDSKKFLKDHIEADQIVSWLKEYFDGKLTPFKKSEPIPEVNNEPVKVVVADNIHDVVFKSGKNVLIEFYAPWCGHCKKLAPILEEAATTLLSDEEVVIAKMDATANDVPSEFEVQGYPTMYFVTPSGKVTSYDSGRTADDIVDFINKSKETASAVQATATASGKAADAAEKTEPVKDEL

SEQ ID NO: 6246 - protein, 143 aa, Zea mays
  VARIANT 120: note = Ancestral polymorphism is M, Derived polymorphism is I
  VARIANT 95: note = Ancestral polymorphism is V, Derived polymorphism is L
  VARIANT 24: note = Ancestral polymorphism is L, Derived polymorphism is V
  VARIANT 23: note = Ancestral polymorphism is Q, Derived polymorphism is E
MDDFTFPTLHAGVQLLPSAFPHQLGLGGSPSPWFLAAAAEEEEEEEEKMDMLWEDFNEELASVPPLCPLSPVINKGGLAMKEAAGWLDDDEMIVLDLEKHGKHMHPQDGRVVRRRKWSLMLMLRLVKKLLMVKKYRNPRTAPI

SEQ ID NO: 6247 - protein, 199 aa, Zea mays
  VARIANT 11: note = Ancestral polymorphism is P, Derived polymorphism is L
  VARIANT 63..199: note = Derived polymorphism lacks residues 63 to 199
MAAEGEAEVMPAIVPMYSAPSSPASSLASSPPPVNKPCSGRGGDGRGDEAAPAGGLAIARSIQKLEADVSETRHEVSRFRKRCAETEVALASLRAQLHRGLSTLAGTEADRAAAAARRSVGGDTDDSASSSSLTLRSGRWGGGLAASECLSLGEVDYGVELVGSRRRNVKLVVPLIGDILFSRRRSTNEKGDGGFYSAW

SEQ ID NO: 6248 - protein, 462 aa, Zea mays
  VARIANT 27: note = Ancestral polymorphism is A, Derived polymorphism is T
MAHVAGDIAVLVLFLSLSCQSTVSAGAAVLGRKAGGSSPATTHEGTNPAGTGTGTAQYAVIFDGGSTGSRVHVFKFDKQLDLVKIGDDIQFFAQVKPGLSEYAGEPQEAARSIAPLLEKAQGAVPASLQSTTPLKLGATAGLRLIGDEKSEEILEAIRDLVKSKSEFEYNPNWITVLEGSQEGSYLWVALNYLLGKLGGDYSDTVGVVDLGGGSVQMAYAISDDASANAPAVPEGQDPYVTKEHLKGKHYNLYVHSYLHYGLLAARAEILKANNGPFSPCILRGFSGTYTYNGEEYEAAAAPEGASYEKCRDGAVAALNLGARCEAKNCTFNGVWNGGGGAGQADLYVASYFYDRASQVGIIGGDAPNGRSTPAAFADAALKVCSLSVADAEAAFPDAWDAEYLCMDLVYEYTLLVDGFGLEPTKEFTLVTKVKYGEYYVDAAWPLGDAIETLSSQKLNQIA

SEQ ID NO: 6249 - protein, 178 aa, Zea mays
  VARIANT 108: note = Ancestral polymorphism is P, Derived polymorphism is L
  VARIANT 103..178: note = Derived polymorphism lacks residues 103 to 178
  VARIANT 76: note = Ancestral polymorphism is C, Derived polymorphism is Y
  VARIANT 68: note = Ancestral polymorphism is R, Derived polymorphism is H
  VARIANT 46: note = Ancestral polymorphism is H, Derived polymorphism is Y
MEGKVCGVTSEGETAKCKKVVCDPSYLQNKVRKIGRVVHAIAIMSHPIPNTNESHSVQIILPQKQLGRRSDMYVFCCSYTHNVAPRGKFIAFVSAEAETDNPQSKLKPGIDLLGSVDEIFYDIYDRYEPVNEPSLDNCFVSTSYDATTHFETTVTDVLNMYTMITGKVTWTSSFYLLE

SEQ ID NO: 6250 - protein, 284 aa, Zea mays
  VARIANT 190: note = Ancestral polymorphism is E, Derived polymorphism is V
MPPNTTLTHPIDQLITTTTHTPHGRSILLYACMEGSSSQLLETCLPASLYAVTPPPCAHPHPLLAPLPNQQHMLLQMPFVKEQAANNHGLMLSSDHHHHSGLLYPLLLPGIPFCPSVAAACEKTTTTGSGALDAGEAGTSSAAAKATGEIASTAATACNSPSSCNWWKGPAAAAAGEKGGRMKVRRKMREPRFCFQTRSDVDVLDDGYKWRKYGQKVVKNSLHPRSYYRCTHSNCRVKKRVERLSEDCRMVMTTYEGRHTHSPCSDDADAGGGDHTGSCAFTSL

SEQ ID NO: 6251 - protein, 523 aa, Zea mays
  VARIANT 52: note = Ancestral polymorphism is L, Derived polymorphism is F
  VARIANT 76: note = Ancestral polymorphism is P, Derived polymorphism is L
MAMAAVLANGDSQGRPQRNYQVVVAGTRDMGIGKDGVLPWKLPGDLKFFKELTLITSDPVKKNAVIMGRKTWESIPVKSRPLPGRLNVILTRSGSFDFATVENVVICGSMESALELLASTPYCLSIEKVFVIGGGQVLREYLKGPACEAIHLTDIQSSIECDTFIPPVDFSVFQPWYSSFPVIESNIRHSFVSFVRVRKSVAETHESNGKESTEVDTKNDKFETENFSFLPKMVYDRHEEYQYLNLVEDIIRSGAQKNDRTGTGTLSKFGCQMRFNLRKNFPLLTTKRVFWRGVVEELLWFISGSTNAKVLQEKGIHIWDGNASREYLNSVGLAHREEGDLGPIYGFQWRHFGAEYTDMHADYTGKGFDQLMDVIDKIKNDPDDRRIILSAWNPSDLKKMALPPCHMFAQFYVENGELSCQMYQRSADMGLGVPFNIASYSLLTYMIAQVCDLSPGDFVHVIGDAHVYRNHVRALEEQIQKMPKPFPILKINPSKKDIDSFMASDFKLVGYDPHQKIEMKMAV

SEQ ID NO: 6252 - protein, 319 aa, Zea mays
  VARIANT 89: note = Ancestral polymorphism is G, Derived polymorphism is C
  VARIANT 87: note = Ancestral polymorphism is I, Derived polymorphism is N
MEQNDGSFLAVRRLSGGAIHHHRHHSSPAEVVGVSTAWIGKGLTSCVCAQGTESDGRLSFDLSPIQFALLKRFLLFELKLFSRKCCIDCFDTAYLSVINIVCHCLHYVLKYTGYSLLQEECLHRLQNRIEVQYDGSNLEHQKALVALWHASFPGTELLGLVSDQWKEMGWQGKDPSTDFRGGGFISLENLLYFSKKYPKSFHELLRKQNGDRALWEYPFAVAGVNITFMLIQMLDLQAAKPTSLVGAVFLNLLLENDRAFDILYCITFKLMDQKWLEMHASYMDFNVVIKSTRRQLERELLLEDIQRIQDMPSYMLLTC

SEQ ID NO: 6253 - protein, 203 aa, Zea mays
  VARIANT 109..203: note = Derived polymorphism lacks residues 109 to 203
  VARIANT 145: note = Ancestral polymorphism is H, Derived polymorphism is Y
  VARIANT 166: note = Ancestral polymorphism is P, Derived polymorphism is R
  VARIANT 174: note = Ancestral polymorphism is G, Derived polymorphism is E
MAAAGGETMMTREQLLHLFSRFSFVTSLPGRSPSPPRFRFAPHPPPIRFPLIFVPCPRVPEVKQRIADAVRDKQEAVAVTTEIQEEILREMGVDPSFGIGCLGKVNVVYKNDKDLMIKFYQFVAKEEMAIDEAELEPRELAEKLHAQQIMQEKQLNMLVEMRKYSRESQSVILGTLHKELEEANFDINASILSPEQMQEIVQK

SEQ ID NO: 6254 - protein, 963 aa, Zea mays
  VARIANT 514..963: note = Derived polymorphism lacks residues 514 to 963
MGEFLVSASTGAMGSVLSKLATMLSDECKAFKNVRGDIKDLKKELEHMHAFLLAMADVEDPDEQTKLRARDVRELSYDIEDTIDKFTVHFERECNPKSRGFKVLVDKCRKLMTSDIKIRRQIAKEVKDIKNQIKDTSERYARYSTTAGGCSTRNVVVDTRVLAVFKDTSELVGLDGPSDELVKLLKFEEGDSAHHLEVVSIVGFGGLGKTTLANHVYNKLGENFDCRAFVSISRNPDTSMILNSILSQVGSQKNANGFAEVQQVIRDIREFLKDKRYFIVVDDIWDVQAWKILECAFAKGGRPGSRILITTRKMEVAKVCSSPPDEDHIYRIKALSDADSKKLFFKGIFGCEEKCPSELREASNGILKKCGGLPLAVITISSLLATGQKKEDQWERVHRSIGFAFGRSCEVDGMRGILSLSYFDLPHCLRSCLMYLTLFPEDYVIERVRLVHKWISEGFIVCGQDTNNLVELGDMYFHELINRSLIQPIDIGYDGKARGCRVHDTILDFLVQKSAEENFSATLMLRSNQQQQQQQQEASKFVRRLSLIAHGTSDQEEEANIYNVLEECMDTSHLRSYSIFGRGSKKLLSFIPYLNYLRVLDIEGCPTLEDDDLTNIGRLYQLRYLNVSKTGITSFPTDMEGLQHLDTLNARYCRRLRNLPKAFIWFKQLVRLIVTYGTRLPDGIGNLKNLQELGDVYVPKCSLNFPQELGELTNLRSLSIGLDTIQGDKACYMEKLVSSLCKLDACNLSDLSLVLALHGDGHGDDIVSFPALSSIRKVWLSSPGISKTTTRWLVSLVNLEYLNIYVADVIEQRDIELLVGSIPTTHLLDLTVTVRRTYNFVGPQVFIIRGFQQVQRFSFRSDDDSSGTLVVQVEGGSGGAMPTLKELKLKIHPPALNSAVLGGFDFGIQHLSCLASFTLRGVKMASSDVEAAERAFKSMVETIVLNDRLRHLAAPSSSRFVGM

SEQ ID NO: 6255 - protein, 307 aa, Zea mays
  VARIANT 193: note = Ancestral polymorphism is W, Derived polymorphism is L
MRPPGRRRVLAAGACALLLAATFLAAGLLTTSSLAPYLLPPLALSLPCLPAVTAPAGSGYGAAPGVAALAEAAVAYATSETVPQQSVDEISLSLAVLRRRAPLRLLVFGLGHDSRLWHALNPGGATVFLEEDPAWYRVVRAQSPFLRAHLVAYRTRLDQADRLLATYRRHPACLPGGGGGNDTLQLPRVRGNWACPLALYNLPPEVYETEWDMVMIDAPKGYFAAAPGRMAAIWTAAAMARARQGEGDTDVFLHDVDRRVEKAFAEEFLCERFRVGGTGRLWHFRIPPVSRRGEDGTATAGDRNPFC

SEQ ID NO: 6256 - protein, 303 aa, Zea mays
  VARIANT 33: note = Ancestral polymorphism is S, Derived polymorphism is N
  VARIANT 77: note = Ancestral polymorphism is Y, Derived polymorphism is C
MLAAAAAMAVTVPRAASHCFPANTARKCRTCWSCRAARVEAGHSRLEVRKVTYRPPGTEQNLLNEINLSLQEKRQAYLPWLHYIFGCFYIPKSVFVQFWFDIWTEWEWKDNPFAVKILVSQLLAGLSEPTSGSICIQKYDDTGNPIGLPELLTSQRVGIVFQFPERYFLADTVLEEVTFGWPRQKADLLLKEQLALNLQNAFNSVGLTTISLDENPQALSGGFKRRLALAIQLVQTPDLLLLDEPLAGLDWKARADVVNLLKDLKKHHTILVVSHDLRELYPLVDRSWRMEMGGSLKEEALPV

SEQ ID NO: 6257 - protein, 325 aa, Zea mays
  VARIANT 19..325: note = Derived polymorphism lacks residues 19 to 325
  VARIANT 43: note = Ancestral polymorphism is P, Derived polymorphism is L
MDAPEARSSASSSPEFEFWPLYPNPAASPSCADELFAGGVLLPLPILPPKPESRNKGSGISQCVPVAEPEPESQLGEASLLATAAAPTASMTSQAPSTGSGGGGSKRWTDIFSKKPAPGGEEKDREKDKEKRKDGACSRKQGSGHTGGAGSELNINIWPFSRSRSAGGGSGSSKPRPPTRKVSSAPCSRSNSRGEAGAPPLRRWAASPGRSGGGVPVGRSSPVWQIRRPAGKPAPAPAPGPAPSASELFSDRRAPPRQHKDKPAGVANGRKPGLSGGVRGLNLSVNSCIGYRHQVSCRRVEVGAARGPGPGGLFGIKGLFSKKVH

SEQ ID NO: 6258 - protein, 823 aa, Zea mays
  VARIANT 558: note = Ancestral polymorphism is S, Derived polymorphism is W
  VARIANT 276..823: note = Derived polymorphism lacks residues 276 to 823
MPAAAQLNGTAGILLVFNASWCATPDATLVANFTVSSDLRNTERLMVTTTVLMTILGAALFALCLVGRISGRHRGGHSTATRLFFRASFALFLPFMSYMFSQARSKGAPARASLILLWMLLVELLRKKVYAMVAPAGDAFALGVGRYSFFDAVDEAARVVWVGYLIYSYVHGTAVKSFFIILWIFSVVKLCKRVICIEKAKRSYDLAKNASLVSGYMAQLVQADRQLFPAPTPAPGAAENVLSTCNYVVMGESQLERQKTPYGFRLPELDGILDGQRSELAAPAGAGAASETTTKLIRVCDVWHLADSDLLFRHDDNRKRKLQDTCLGLALFKLLRRRIEGHQMVEAGPAGRKQARALVRDGLLGELGAERAFNVVEQELTFLDEYYQAIIPLALPRPQLFFANFIFSILFVLLYCVAVMLVTGNGDMFLVLASIFHGFVSVSADMVLQYRCFAHQTSVLIGMVLSSSDLIVTFLLTLTLLTVETYEFVQYLLSDWHLASMLCSYGRKLALRRQSSVRRTVKAALWMKKRSKPVIKVHQFTVLKLDQFHPRRVWMLLSRLLKRRLVGLSDVVVHAQAKEAIAAVLKDVLDVVDDNAEGQFSNGSNALRRRGGFRHLEWACDQSEGAATVILVWHLATTLLEASGGKNDPLPPTGEAALMLSRYCAYLVAYEPRLLPDDPAWTEKAYRDIKRELAGFFQGCCTCSPTDRRERLVAAGFSRDDIKVSTAMEKGVMLAKELEREIGSNATPPVHSERVWGMLLELWAELLVFVSRSPSGGPHAHALALANGGEFITHIWAMLTHAGVQAYVPDLRDSNVEHTDIPI

SEQ ID NO: 6259 - protein, 300 aa, Zea mays
  VARIANT 99..300: note = Derived polymorphism lacks residues 99 to 300
  VARIANT 100: note = Ancestral polymorphism is H, Derived polymorphism is Q
  VARIANT 105: note = Ancestral polymorphism is S, Derived polymorphism is F
  VARIANT 146: note = Ancestral polymorphism is G, Derived polymorphism is S
  VARIANT 183..300: note = Derived polymorphism lacks residues 183 to 300
  VARIANT 198..300: note = Derived polymorphism lacks residues 198 to 300
MQKKPDDAMEEEAAAAPGPEIGFWLAARRRLAPEDPFFAAGDLERELLAKHLALDLSEDDRNQLEKMEVASTCTVFCPIAGCGAHLDCLEEFEDHYVTRHTASCSVCSRVYPTSRLLSIHVSETHDSYFQAKVARGFPMYECLVEGCGMKLKSYKSRQQHLIDKHQFPKSFEFFKKARDSQRQRQKSQRRQTAHKGEETRDNSMDVDGKGARQTNRRYRLKQHDHSEPKENKQQHKEAQEDEMEVEQKIDELTSAVSRLSTADSTPSSVTFGHRRSRGLTFVPRSIRQNKQAALPAGSNK

SEQ ID NO: 6260 - protein, 371 aa, Zea mays
  VARIANT 356: note = Ancestral polymorphism is R, Derived polymorphism is W
  VARIANT 285: note = Ancestral polymorphism is A, Derived polymorphism is V
  VARIANT 280: note = Ancestral polymorphism is N, Derived polymorphism is I
  VARIANT 264: note = Ancestral polymorphism is T, Derived polymorphism is R
  VARIANT 257: note = Ancestral polymorphism is P, Derived polymorphism is H
  VARIANT 81: note = Ancestral polymorphism is S, Derived polymorphism is Y
  VARIANT 8: note = Ancestral polymorphism is Q, Derived polymorphism is E
MSTANRYQHIKSTKPVVGKARKLKDLMIKSDNRICADCGAPDPKWASANIGVFLCLKCGDVHRALGPDISKVLSVTLDDWSDSDIDSMVEVGGNSHANSIYEAFLPKDHLKPKPDSTMEYMTKIIRAKYETQDFLKPSLRISSRSSFKSTTSMKSVDINFSSTSRKDISEDTREFVGELNITLVKGTNLAVRDMLTSNPYVVLTLGPRRADCYELKLDLLYLFLHLFVLHLEDSLDDWFDEQLENYLDDDYLVFDCPGQIELFTHVPVLRNFVEHLKRKIFNVCAVYLLDSRFVSDVTKYISGCMASLSAMIQLELPHINILSKMDLISNKKDVEEYLDPNAQVLLSQLNRQMAPWFGKLNKCLAELVSLL

SEQ ID NO: 6261 - protein, 184 aa, Zea mays
  VARIANT 147: note = Ancestral polymorphism is A, Derived polymorphism is V
  VARIANT 164: note = Ancestral polymorphism is K, Derived polymorphism is N
MGKLWTILTHLHSLAGPTVMLLYPLYASVRAMESPSKLDDEQWLAYWILYSFVTLMEMLLESLIYWIPIWYELKLLFIAWLVLPNFRGAAFIYDKFVREQLRKHGLTAAGSVKSSSPSSKDKDKPKNKFLAFVTPKKVRAPQHQIYASPVTPADHDVFSPLLFKYFLSLTEDAIGVLCLNVSGS

SEQ ID NO: 6262 - protein, 137 aa, Zea mays
  VARIANT 22: note = Ancestral polymorphism is D, Derived polymorphism is V
MGARALYRYASVRALESSPKLDDEQWLAYWILYSFTTLLEMVLQPLIYWIPVWYELKLLFMAWLVLPNFRGAAFIYDKFVRDQVKRRTGSTQAASAASTGSSNVSASKDNKILSTSPKEKKPKRKLLSMAIPKMLKF

SEQ ID NO: 6263 - protein, 135 aa, Zea mays
  VARIANT 123: note = Ancestral polymorphism is T, Derived polymorphism is I
MATSHKLQPVLAVMFFTIFVIGANGERCNTSSIAVDTVNSGATVPWGDTIFSVEVKNRCPCAVRNVRLDGGGFATTVDVDQAAFRADGGGGGSGVYLVNGGEPIASMAAVSFQYAWDHFFQMTPRSLEVDDDGQC

SEQ ID NO: 6264 - protein, 131 aa, Zea mays
  VARIANT 98: note = Ancestral polymorphism is A, Derived polymorphism is V
  VARIANT 84: note = Ancestral polymorphism is A, Derived polymorphism is V
  VARIANT 82: note = Ancestral polymorphism is D, Derived polymorphism is H
  VARIANT 19: note = Ancestral polymorphism is A, Derived polymorphism is V
  VARIANT 10: note = Ancestral polymorphism is L, Derived polymorphism is I
  VARIANT 9: note = Ancestral polymorphism is K, Derived polymorphism is E
  VARIANT 3: note = Ancestral polymorphism is T, Derived polymorphism is I
MTTTAAVVKLLTAVLLFFAVSLRGTKGEPCGTSSIHVQTVNTGATAAAGDTLFEVQVKNLCLCSVRNVRVDGGGFATTVEVDPALFRPVDGGVYLVNAGESIASMGIVSFRYAWDHFFQLTPRSLEVDGQG

SEQ ID NO: 6265 - protein, 738 aa, Zea mays
  VARIANT 305..738: note = Derived polymorphism lacks residues 305 to 738
MKQEGRRRQHQHQHHRPPPRLELAMAHARGGGGHGHGHEEEAEAAVCLDGDSEAGEARSAGRAPPWRDQLTARGMVASLAVGAMYSVIVMKLGLTTGLVPTLNVSAALIAFVILRGWTQALARFGVATRPFTRQENTVVQTCAVACYSIAVGGGFGSFLLALNKRTYEMAGEDTEGNLPGSYKEPGIGWMTGFLFAVSFVGIVALIPLRKVGKLSSLIYSQEIDNCDITFLHQSRSVPLLLPVKMLILRLFQIMIIDYKLTYPSGTATAVLINGFHTTHGDATAKQQVNGFTKYFAISFFWSFFQWFYSGGDNCGFSQFPTFGLRAWKQTFFFDFSLTYVGAGMICSHLVNLSLLLGALLSWGIMWPLVSDLKGDWYPADMPESSMRSLQGYKAFICIALLLGDGLYNFVKVVAFTVKSLLGRSRLKNAKKEEDIPVLDEIQRNEIFTRDSIPTWLAYSGYLALSAVAVFAIPLMFHEMKWYYVIIAYLLAPALGFCNAYGAGLTDINMAYNYGKVALFILAAWAGKDSGVVAGLVGCGLVKSLVSISADLMHDFKTGHLTLTSPRSMIIAQAIGTAMGCVIGPLTFLLFYKAFDIGNPDGYWKAPYALIYRNMAILGVQGFSALPLHCLQLCYGFFGFAVAANLMRDLLPPKYGKWVPLPMAMGVPFLVGASFAIDMCVGSLMVFIWHIIDRSKASLMVPAVASGLICGDGLWIFPESLLALAKISPPLCMAFRSSH

SEQ ID NO: 6266 - protein, 421 aa, Zea mays
  VARIANT 44: note = Ancestral polymorphism is A, Derived polymorphism is S
  VARIANT 131: note = Ancestral polymorphism is R, Derived polymorphism is G
MATASAACHGGGIVYYKVLPMSMFLLLLRGLVQPVAAAACSVDAIYSFGDSIADTGNLLREGPVGFFASIGSYPYGQTLRKPTGRCSDGLLIIDYFAMALNLSLVSPYLDKGADFASGANFAVAGATALDRAVLLQSGIMAPPASVPLSSQLDWFKAHLNATACPSLQGAAVLLIDMELCKSTMFIHIFNLNIVADCAKKLAGALFLVGEIGGNDYNYGFLQGFRSIEAMKAYVPQVINAIMDVAKEVIELGATQIVIPGNFPIGCSPSYLSLFAASGDLDDRGCLRSYNAFAQHHNEQLQAAIDGLRKANTDVTVVYADYYGAFMHLLDHASLLELKHSLVPGFEQGALLQACCGAGGAYNFNMNSMCGAPGTTTCADPARNVSWDGIHLTQQAYRAIALSLLMEGFAQPDDAVQEIWSC

SEQ ID NO: 6267 - protein, 68 aa, Zea mays
  VARIANT 24: note = Ancestral polymorphism is I, Derived polymorphism is T
  VARIANT 8: note = Ancestral polymorphism is Q, Derived polymorphism is E
MRKGLHPQMQWISYVTQSGRLINTMMTKVNHTGKVYHMRAKRQMAQSLGQIAKFKRRYEQEAVESKDK

SEQ ID NO: 6268 - protein, 488 aa, Zea mays
  VARIANT 266: note = Ancestral polymorphism is S, Derived polymorphism is A
  VARIANT 295: note = Ancestral polymorphism is L, Derived polymorphism is V
  VARIANT 421..488: note = Derived polymorphism lacks residues 421 to 488
MVRLPYTTALTTLFSYGLLFAFGQLRDFFRKFVDWFKAKNVKGYAPICLGLEDFYVRRLYLRIQDCFGRPIASAPDSWFDVVERTSKDNNKTLQRTSNTTRCLNLGSYNYLGFAAADEYCTPRVIESLKKYSASTCSVRVDGGTTKLHNELEELAARFVGKPAAILFGMGYVTNSAIIPCLIGKGGLIISDSLNHNSIVNGARGSGATVRVFQHNSPAHLEEVLREQIAGGQPRTHRPWKKIIVIVEGIYSMEGELCKLPEIIAVAKKYKAYTYLDEAHSIGAVGQSGRGVCELLGVDPADVDIMMGTFTKSFGSCGGYIAASKEIIQHLKHSCPAHLYATSMSPPAVQQVISAIKVILGEDGSNRGAQKLARIRENSNFFRSELKKMGFEVLGDNDSPVMPIMLYNPAKIPAFSRECLRQKVAVVTVAFPATPLLLARARICISASHTREDLMKALDVISRVGDLVGIKYFPAEPPKIAGADHDKLE

SEQ ID NO: 6269 - protein, 98 aa, Zea mays
  VARIANT 14: note = Ancestral polymorphism is R, Derived polymorphism is H
  VARIANT 67: note = Ancestral polymorphism is A, Derived polymorphism is V
MKTQVVTTQRQLMRDLEVLPLEEATTSAKSMNVNGACQRGKLLRFLEQVVVMVVAVDVDEVLGSFLAALNKFVVDRCLWNHSVSKYHVYEFFKVNMKS

SEQ ID NO: 6270 - protein, 573 aa, Zea mays
  VARIANT 43: note = Ancestral polymorphism is V, Derived polymorphism is A
MAYFPDEVVGYILGYVTSHQDRNAVSLVCRAWYDIERHGRHSVLVRNCYAVCPERVHMRFPNMRALSLKGKPHFAEFNLVPAGWGATANPWVDACARACPGLEELRLKFMVVTDECLKLLSLSFTNFKSLVLVCCEGFSTTGLANIATNCRFLKELDLQKSCVKHQDHQWINCFPKSSTSLECLNFSCLTGEVNAVALEELVARSPNLKSLRLNLAVPFDVLSRILSRTPKLEDLGTGSFLQGNDPAAYASLCRALENCTSLKSISGFWDAPGFYVQGILSNCKIRNLTCLNLSYATLIQSTQLIGIIRHCKKLHVLWVLDHIGDEGLKAVSFSCPDLQELRVYPSVVAPRGTVTEEGLVALSSCRKLQHVLFSCVRMTNTALMTIARYCPRLTSFRLCIRKPRSADAVTGQPLDEGFGAIVRSCRGLRRLAMSGLLTDSVFLYIGMYAEKLEMLSVTFAGDTDDGMVYVLNGCRNLKKLVIKESPFGDAALLAGAHRYESMRSLWMSSCQITLGGCKALAATMPNINVEVIGGASFGAMDGGVSGARKVDMLYLYRTLAGPRCDTPGFVSIL

SEQ ID NO: 6271 - protein, 552 aa, Zea mays
  VARIANT 314: note = Ancestral polymorphism is G, Derived polymorphism is R
  VARIANT 350: note = Ancestral polymorphism is L, Derived polymorphism is V
  VARIANT 438: note = Ancestral polymorphism is V, Derived polymorphism is G
MPSPPEDESGDPGLAECLRLLEAVPAAAASCPAFRRHWPSISASLAALSDSLTSHAVPPASPLLAPLAAALRALLSVSAAGDAPRLGHLHTISLLSSTAATLSQLAADARLLAAPATSGADHGSAADALVSRLRLGSAASRAAALDELASAAPSLPEPSAAAAVSAVAELLDSGGGGGGGDLRERAVAALAALACSDAARPALAQEAGAVVPHLCRALESGSSSGAEHACAALLPLTAASRDAAAAVAARGGVAALLAACAGGTPAAQAAAAGVLRNLAAFPDLRPALRDEGALPMLLQLVSLGTPRARELALGCLQSLTAGDDDGDEEGQRLKVEAFQAGALGCVRDFLDGSRGDEAGLAPALGLLRNMASFRYIAEIAAASGGFAAHVAAALGSDRSATRTEAALALAELFGNAGGVKAGRHQHEAVAADCVPRLVWMMEAKAAAERDAAARALAALLAASGGCRRAFRKDERGVVNAVQLLDPGARAVDRRFPVSVLLAVAPSRRCRKQMVAAGACGFLQGLVAAEVEGAKRLAEWLGKGKMLGVFPRT

SEQ ID NO: 6272 - protein, 257 aa, Zea mays
  VARIANT 41: note = Ancestral polymorphism is P, Derived polymorphism is T
  VARIANT 69..257: note = Derived polymorphism lacks residues 69 to 257
  VARIANT 180: note = Ancestral polymorphism is Q, Derived polymorphism is L
  VARIANT 223: note = Ancestral polymorphism is R, Derived polymorphism is L
MINGSDLLFSFPIGDLLLWKDYADVSAVQELQHALEGVLLPVVLGLTTTKESRLESSVQFSWKTLDDDQANLLLLPKNSQGGGERKVSEDGKKDAVGSLLSASGCLHYSVHGILVQIPAQVKKSFPSYLHEGMLEAISIQALAQPCTTTLVSCSTRAASRQTMSVQSAASLQLMTYFRELKGLVECLLGRSCHKGRVPPPWGVMKNMHKEIPDVACKKFQVYRQGTSCRALIHSGRMLMASLRFRVPRSIRTMTKMK

SEQ ID NO: 6273 - protein, 261 aa, Zea mays
  VARIANT 155: note = Ancestral polymorphism is E, Derived polymorphism is V
MDRPDHQQQQFFMPTTVQVPQPQQQQQQLCVPMLDEPPSSFLAGRGGGGASGRGERKRRFTEEQIRSLESMFHAHHAKLEPREKAELARELGLQPRQVAIWFQNKRARWRSKQLEHDYALLRAKFDDLHAHVESLKQDKLALTTQLSELSERLRERDDRAAAAGGGGRETMASSSSCIGGGGEEEAEDDKRNVLLFGCVDMEPPAESCVLVGSTCAALADVSVESECDDQHLHYDDEFPESYCAMPELWEPWPLVEWNAVA

SEQ ID NO: 6274 - protein, 344 aa, Zea mays
  VARIANT 139..344: note = Derived polymorphism lacks residues 139 to 344
MAGLSLQHPMAFAFGLLGNIISFMTYLAPLPTFCRIYRNKSTEGFQSVPYVVALFSAMLWIYYALLKSNEFLLITINSAGCVIETLYIATYLLYAPNKAKLFTAKILLLLNVGVFGLILLLTLLLSAGPHRVVVLGWVCVAFSVSVFVAPLSIIRQVVRTRSVEFMPFSLSFSLTASAVVWFLYGLLIKDKYVALPNVLGFTFGVVQMGMYALYRNATPRVPAAKEAAAAADDGNTFNFKAPGEHVVTIAKLTAAAPATAAELIIKARDDAQHPPEEEAAAAKAAPAKSKLLIPLPEHAYACMCIIRSGSHHKLGRACLLGTSTRPPACLPARMIQSSCYIRKG

SEQ ID NO: 6275 - protein, 306 aa, Zea mays
  VARIANT 176: note = Ancestral polymorphism is G, Derived polymorphism is R
MSMAAAAAPAAASSTLLRASNFSIARPVPSGVVCCIRAVSGRRASVVRVAAAGDRAAPAGAFPAALLFDCDGVLVDTEKDGHRISFNETFAERELGVSWDVELYGELLRIGGGKERMTAYFNQTGWPAKAPKTDDKRKEFIASLHKRKTELFMALIEKKLLPLRPGVQRLIDEALGKAVKVAVCSTSNEKAVSAIVSYLLGPDRADKITIFAGDVVPHKKPDPAIYILAATTLGVDPQSCVVIEDSTIGLAAAKAAGMKCIVTKSGYTAEEDFETADAVFDCIGDPPEVRFDLDFCAKLLKKQYVS

SEQ ID NO: 6276 - protein, 325 aa, Zea mays
  VARIANT 118: note = Ancestral polymorphism is R, Derived polymorphism is L
  VARIANT 166: note = Ancestral polymorphism is R, Derived polymorphism is H
  VARIANT 277: note = Ancestral polymorphism is K, Derived polymorphism is T
  VARIANT 310: note = Ancestral polymorphism is V, Derived polymorphism is L
MASRQFFTYDPYEFAYDQYYNLYEPYYLRQSAPTRRARDIFAGAEPAAAKARSTPRATESETQTSFSIPVNGPDSPDRAPSLVVEARTGPMAPAMSAEDAAARMQAAARGFLARKSVLAVRQVDQEAAQVAGKMACEAETLLADPRARVAVWEALMRMLLRLDAVRGARDYRRRVTKRVVALQDAVDALVAKPAPATVEMAEEIAIAPELPDAEDEKEDEEAETHEAAAVEIAEESNTNVGVDEPEGSEILAEENEHTSPALTAVAGAASDVVDARKLMQMVATLCEQSAQQCALIEALAERVDMLERTLRRMQDADSAGGRPTS

SEQ ID NO: 6277 - protein, 343 aa, Zea mays
  VARIANT 92: note = Ancestral polymorphism is E, Derived polymorphism is D
  VARIANT 137..343: note = Derived polymorphism lacks residues 137 to 343
  VARIANT 202: note = Ancestral polymorphism is T, Derived polymorphism is I
  VARIANT 267: note = Ancestral polymorphism is S, Derived polymorphism is I
MGKNQAYKAMQWARLGSSSDALGTADALEDGMASNRCGILATIPLSLWVKDKEKELWLMRVVAGIQDGMKQGIINPSDIDVTFEDFPYYVSENTKNVLLSCAFIHLEKKEFIKQFAEISSINQRILLFGPAGSEIYQETLVKALAKHFGARLLVVDSLLLPWIPDGNDLGGLCEEDHGFFCSAESLRPDFSAGEEVERLAMTELIEVISEENKSGPLIVLLKDVEKSFIGVTESLSSSRSKFESLPSGVLIIGSHTQMDSRKEKLESDLNLKRKTEQGVAQVILRGNIDFKREPWPNISENAKDLVRHMLEPDPKLRLTAKQVLVQNRDGVQFDFAFLMYFHF

SEQ ID NO: 6278 - protein, 498 aa, Zea mays
  VARIANT 194..498: note = Derived polymorphism lacks residues 194 to 498
  VARIANT 385: note = Ancestral polymorphism is N, Derived polymorphism is I
MATPLAPASSFITRPLALALVLVAAALCRPASCAAAAAAADRITRLPGQPEVSFGQYSGYVGVDGDGGGKRALFYYFVEADAPDPASKPLVLWLNGGPGCSSLGVGAFSENGPFRPSGQVLVKNEYSWNKVLFLACSKKKKKNKNMETAEANVIYLETPAGVGYSYSADAAYYQGVDDKMTAMDNMVFLQRWLQKFPQYRGRDLYIAGESYAGHYIPQLAEAMVEFNNKEERIFNLKGVALGNPVLEFATDFNSRAEYFWSHGLISDATFRAFTSACNYSRYVAEYYGGALSPLCARVMNRVTRETSRFVDKYDVTLDVFLSSVLSQSKTLSPHEQVGQRVDVCVEDETVRYLNRRDVQAALHARLVGVDKWAVCSSVLQYELLNLQIPTINVVGSLVRSGIRVLVYSGDQDSVIPLTGSRTLVQSLARGMGLKTTTPYRVWFEGQQVGGWTQVYGGGALSFATVRGASHEAPFSQPGRSLVLFRAFLQGQPLPETFS

SEQ ID NO: 6279 - protein, 110 aa, Zea mays
  VARIANT 7: note = Ancestral polymorphism is R, Derived polymorphism is H
  VARIANT 18: note = Ancestral polymorphism is R, Derived polymorphism is G
  VARIANT 76: note = Ancestral polymorphism is G, Derived polymorphism is R
  VARIANT 87: note = Ancestral polymorphism is P, Derived polymorphism is L
  VARIANT 99: note = Ancestral polymorphism is D, Derived polymorphism is Y
MALPYGRLMLVVLKDRTRDTCAAKSGQWHKHSCSTRSWGTQTSSLVRSLLERCMTFGEQNTEKEAHDIIAYSFDQGVNILDTAEIYPVPMNKETQGRTDLYNGRWMQSKP

SEQ ID NO: 6280 - protein, 382 aa, Zea mays
  VARIANT 110: note = Ancestral polymorphism is R, Derived polymorphism is H
  VARIANT 54: note = Ancestral polymorphism is A, Derived polymorphism is D
  VARIANT 40: note = Ancestral polymorphism is T, Derived polymorphism is K
MSTAPHFVLVPLLAQGHMIPTMDLARLIASQGARVTVVLTPVNAARHRAVLEHDTRAGLAIDFAELAFPGPAVGLPEGCESFDMLADISLFATFYEALWMLPEPLEAYLRSLPRLPDCLLCDSCSSWTATVARRLGVLRLVVHFPSAFYILAAHSLAKHGAYDRAADDFEPLEVPAEFPVRAVVNRATSLGLLQWTGFERFRRDTLDAEATADGILFNTCAALEGAFVERFAAELGKRIWAVGPVCLVDSNAARATAERGDRAAVDAEQVVSWLDARPAASVLYVSFGSIARLLPPQVAELAVALEASRWPFVGRVDIERTVSELMDQGSSSTMRARAKELAAEVRAAMAKGGSSDADVKDIVRHVIEVAKNKREHARGHHS

SEQ ID NO: 6281 - protein, 189 aa, Zea mays
  VARIANT 64: note = Ancestral polymorphism is R, Derived polymorphism is W
MYSSSCHVMSEKPNGSKAVTLLLRLSTLVLSLISAVVMATATSDCTIYGHGGAAKVTIMFKNYRPFVFLVVLNIAAAVLEAAAIYLQVVKGDDGDEAPKLPRIILVVLDVVVLALVNAATGAVVAAVIAYGPEIDACTVAGGGRFREQVRRSELLSIAASISAVSAAVAKDVPLPFSVWPLSSESGDYY

SEQ ID NO: 6282 - protein, 81 aa, Zea mays
  VARIANT 30: note = Ancestral polymorphism is S, Derived polymorphism is P
  VARIANT 16: note = Ancestral polymorphism is V, Derived polymorphism is A
  VARIANT 13: note = Ancestral polymorphism is G, Derived polymorphism is W
  VARIANT 12: note = Ancestral polymorphism is T, Derived polymorphism is S
  VARIANT 11: note = Ancestral polymorphism is G, Derived polymorphism is R
  VARIANT 6: note = Ancestral polymorphism is S, Derived polymorphism is I
MATTAIGSGRGSGTAALCFLVACLLLASPSSFVAGTEAAAAYGAGAGAGAGRKLMQTSAGAMGYPGTNLPPATYPAVPCCP

SEQ ID NO: 6283 - protein, 519 aa, Zea mays
  VARIANT 233..519: note = Derived polymorphism lacks residues 233 to 519
MLPPFGNPLWVPEDMDDQQQHAPPPTPMELLTVPAQGHEEQNLLALASAAAVAGAGCVFSSPAMLDDDWYFDPVAAAAATGAQGHLLLAPPGPVPGPGAGSQMFSLFNVGGAATFDVHGFDIGLGTLGGGSGGDLVPLAGAGNTSNSASFSMSLNAGLLASSFGGFGTAPAQMPDFGGLGGFDMFNNGAGSSSAAPPPASASLTVPFSGRGKPAVLRPLETFPPVGAQPTLFQKRALRRNGGGEDYDKKRKAEATAAAAGASSACGGDDAEDDDGGSIDASGLNYDSEDACRGVEDSGKKDGKGSNANSAGDGKGKRKRLPAKNLMAERRRRKKLNDRLYMLRSVVPKISKMDRASILGDAIEYLKELLRKIEELQNEVESSASPASTASLPPTPTSFRPLTPTLPALPSRVKEELCPSALPSPTSKQPRVEVRTTREGREVNIHMLCARRPGLLLATMRAIEGLGLDVQQAVASCFNGFSLDIFKAELCKDGPALLLLPEEEIKSVLLQSAGLHGVAP

SEQ ID NO: 6284 - protein, 358 aa, Zea mays
  VARIANT 297..358: note = Derived polymorphism lacks residues 297 to 358
  VARIANT 254..358: note = Derived polymorphism lacks residues 254 to 358
  VARIANT 15..358: note = Derived polymorphism lacks residues 15 to 358
  VARIANT 11..358: note = Derived polymorphism lacks residues 11 to 358
MMEGGSRADGQNPNQLRLFTCTGNLLHRAHGCAWWAQGGIVMLAAVYGPKPGTVTEMASCFCRKAREGVMFAWLVATMLLLIYFCCSINSSTIVVGCVRDRREKLSEDFYFHILPTDMQDAQGSLDRRGVFSLDTHSPSVCLLIQLEKAATEEGGVTPSVYSHKEPVHLAKKEKQKLQVWSRIMPCKESFAWAMIPLFEGNHAGGLSDAAHKYYISNPFQSITRYHLHVTPYLAPILTRTFLLQLKRKHNDRTENEATESNDWMSPGYANAGSSPVPTPPSGKGLKASTKPKATKGQKSGPRTPLGFGSPGNPSTPVGGCRYDSSLGLLTKFLNLLKGAPGGIVDLNNAAETLEVDHS

SEQ ID NO: 6285 - protein, 142 aa, Zea mays
  VARIANT 103: note = Ancestral polymorphism is P, Derived polymorphism is T
  VARIANT 99: note = Ancestral polymorphism is G, Derived polymorphism is R
  VARIANT 74..142: note = Derived polymorphism lacks residues 74 to 142
  VARIANT 66: note = Ancestral polymorphism is R, Derived polymorphism is Q
MAAILPHEPPRWPRSSLSLPPRSAPPISTIPVPSPCVSAVIFPTGSSGWGQDGAAWGKMVRWLTYRKRHSYATKSNQTRVVKTPGGKLVFQYTKKRASGPKCPVTGKKIQGVCAAHLSILSSRYCVRSLHHAPCRDFNFNAA

SEQ ID NO: 6286 - protein, 201 aa, Zea mays
  VARIANT 30: note = Ancestral polymorphism is S, Derived polymorphism is N
  VARIANT 114: note = Ancestral polymorphism is T, Derived polymorphism is I
MSSAAASSSPAAGSEGSGGAVEGREIAYVSYGGEHHLPLVMSLVDEELSEPYSIFTYRYFVYLWPQLTFLAFDARDGKCVGTVVCKMGEHRGAFRGYIAMLVVLKPYRGRGIATELVTRSIRVMMESGCEEVTLEAEVTNKGALALYGRLGFIRAKRLYRYYLNGVDAFRLKLLFPRPDPGLPPMMVGNDRDDQKMDSPYL

SEQ ID NO: 6287 - protein, 176 aa, Zea mays
  VARIANT 170: note = Ancestral polymorphism is R, Derived polymorphism is S
  VARIANT 165: note = Ancestral polymorphism is R, Derived polymorphism is C
  VARIANT 103..176: note = Derived polymorphism lacks residues 103 to 176
  VARIANT 56: note = Ancestral polymorphism is R, Derived polymorphism is I
  VARIANT 44: note = Ancestral polymorphism is R, Derived polymorphism is C
  VARIANT 3: note = Ancestral polymorphism is G, Derived polymorphism is E
MCGMIIVNVIHDISRMFGRASPRMNLIQSAAMKKISPRSTTNKRKKRTSPKDDELRVLDPTTPTSVSKRTKNVGTGNSRTRINKHTQDGNVVEMMGRFLEMKEKQAEAEERATTNANEDDFPIQTCIAIVDGMEELSDDEKVDAYDVFKDAQNRDIFMTAKDATRIKWLRKKIART

SEQ ID NO: 6288 - protein, 194 aa, Zea mays
  VARIANT 1: note = Ancestral polymorphism is M, Derived polymorphism is I
  VARIANT 54: note = Ancestral polymorphism is T, Derived polymorphism is I
  VARIANT 65: note = Ancestral polymorphism is E, Derived polymorphism is K
MAAALLRRALHLRRNAATTTIDLSSDESRRRLLNRLVYRSKQRGFLELDLVLGTWVEQHVHAMDEPNIRALLQVLDLVSSPACGVGVGVADQSLFLCGVPGYLSVVETDSGVEELDNLHRNDQENPDLWKWLTSQEQPPEDLISNPVFSAIKSKVTDNLIKHASPETRSTPGQPWVRGWDDIKKGKDGPNYGNQ

SEQ ID NO: 6289 - protein, 147 aa, Zea mays
  VARIANT 30: note = Ancestral polymorphism is L, Derived polymorphism is P
MALQAPSLMRAPAAQRSAPPRPSFSAPWSLRLPAPARRRVATAARITMRVASKQAYICRDCGYIYNDRTPFDKLADNYFCPVCGAPKRRFRPYEPAVSKNANATDARKARKEELKKEESMGKALPIAIVVGIIALAGLYFYLNNVYS

SEQ ID NO: 6290 - protein, 239 aa, Zea mays
  VARIANT 157: note = Ancestral polymorphism is I, Derived polymorphism is N
  VARIANT 143: note = Ancestral polymorphism is S, Derived polymorphism is N
  VARIANT 114: note = Ancestral polymorphism is T, Derived polymorphism is R
  VARIANT 67: note = Ancestral polymorphism is H, Derived polymorphism is R
  VARIANT 29: note = Ancestral polymorphism is Q, Derived polymorphism is L
  VARIANT 6: note = Ancestral polymorphism is T, Derived polymorphism is R
MPRRSRRRYCFPCGIIQVINTSRRMHSMQKFADVRWHFVRNKNPLCIAGLWNELKTGTPHSINQKRRISGIKIAPENRSLEGQKWYQSVFFCLPIFLSESGFVCDQFQIIVSIRTLSRQSICRLITDSTRLTLHIKVLDNMVNSFLVTWPSNRRKKIDIADQRNSSGPRLVRESVGLFILHLEGHRRKSLFISHQNLQLSEGQLKKGKASDAYAHKLKVNHVPVFVQEKGSDWAVDLAT

SEQ ID NO: 6291 - protein, 569 aa, Zea mays
  VARIANT 6: note = Ancestral polymorphism is G, Derived polymorphism is V
MEEEAGRSWTTDERGDDDGDQLRGTTTATGSRRVAAAAAGASGEIEMLQTEAAATVVVVGGGASASASVQQGGGDADDECGIQQIPIWKRFLTHAGPGFLVSLAYIDPSNVQTDLQAGSSHKFELLWVLFFGFFFVLVIQSLAAKLGIITGRNLAQMCMYEYPKLVKYGLWLLIEVGVIAATIPGVLGTALAYNILLNIPFLVGVLICGASTFLLLALQIYGVRKIELIGVIFMLLIAISFFVELSTVNPPMGEVIQGLFIPRLRGVYAVSDAIALFSVLVVPHNLFLHSSLVVSRKISPSPKGFKDTSTFFLIENAFAMLLVLLVNVAIVSTTGTICANNTQLVDNNNACSGLTLNSASVLLKNMFGRSTSKIYGLALLASGQSNTMTTSYSGQYIMQGFSGMRKCIVFIIAPCFTVIPSLIICSVAGAPHVRQLINVSAIILAFVLPFSLVPLLKFSSSCAVKVPYKNSACIVQVAWILSIVIMGINIYFFCNSFISWLVHSELPRIVNVIISTLVFPFMAAYIAALIYLAFRKVNAAGIFPSVSASTGTEVEAWRQDGNIDDIGVH

SEQ ID NO: 6292 - protein, 788 aa, Zea mays
  VARIANT 3..788: note = Derived polymorphism lacks residues 3 to 788
  VARIANT 17..788: note = Derived polymorphism lacks residues 17 to 788
MQQQHQGGGGGGGGGSQFGAPPPDMGPFSPTPAATGPMPLSSRPPSAQPQQQPRTSYEELAPMVPGAAAASGFDDETMGSGGGGGGSSGASSNRWPREETQALIRIRSEMDATFRDATLKGPLWEDVSRKLADLGYKRSAKKCKEKFENVHKYYKRTKEGRAGRQDGKSYRFFEELEALHAAAPQPPPQHLPAASTAPQLHALAAPVSPTPQQQLPASSAAPPLHAFPAPVSAPPPLSSMPLLTGPMQPAPISSAAPAPAPVDLLVAHQPLNLQGFSFSSMSDSESDDESEDDDMTAETGGNQDRLGKRKRGDGGGSSSNKMMSFFEGLMQQVVDRQEEMQRRFLETMEKREAERTAREEAWRRQEVARLNREQEQLAQERAAAASRDAAIIAFLQRIGGQSVQPPATAVVVPMPAPVSVHTTPPKQPSRQQQQPPPPSPQAGQATPQSKPISAAPLQQQPPQQQPKDTSQQDAGTPRSLPPASSQSLELVPVAATEHHVDSGLGGGDGGAASSSRWPKTEVHALIQLRMDLDMRYQETGPKGPLWEDISSGMRRLGYNRSSKRCKEKWENINKYYKKVKESNKKRPEDSKTCPYFHQLEAIYNRKHLRSLTTAATSSAAAAPRPAYPDQLNPSRQEIEGKNINDDKRNNGGSGGGTQVPTSNGETATTTTTTTLVAFDADTGMKKTDARRLTGYVLAVKPEDIVRELNEHPRREFTTEDETDSDDMGDEYTDDGEEGEDDGKMQYRIQFQRPNPGGTNTAPAPAAATTAAPAVPTSAPTSTFLAMVQ

SEQ ID NO: 6293 - protein, 203 aa, Zea mays
  VARIANT 2: note = Ancestral polymorphism is A, Derived polymorphism is T
  VARIANT 23: note = Ancestral polymorphism is A, Derived polymorphism is T
MAPGLLTAAVLAAVAASLAAHVTLNCPVQPVPSHRPPPTPPPNNLLQVNEPGWRSSEDVYVDAAAGGALDTATRDGWLQRMMHPNNGSWERWRFVGGTGLLGVAPSADGTMLVCDADKGLLRVGDEGVTLLASEVESSPIRFADAAIEASDGTVYFSDASTRYVLDDSQGKVINFVTSVTEFNGDIFLGSLATNFVAKLSLAR

SEQ ID NO: 6294 - protein, 420 aa, Zea mays
  VARIANT 311..420: note = Derived polymorphism lacks residues 311 to 420
MQSSLLARDSNHAAAATCPSGDGLACVLGVGTANPANCVQQDEYTDRYFRITNSDHLTHIKPIMKRACEMTGVKKRYVQVDEDLLREHPEFLDPGAASLPSRLAVVAAAMPGLVAAAAAKAIAEWGRPATDITHLVFSTSTSVQVPAVDLRVASLLGLPPTVRRTTLCSHACTGSSGALRVAKDVAETSRGARVLVACADMLSVLGVHAPHDDDDDAVGIVAHALFGDGAGAVLVGADPWDPRERPIFQMLAASQATVPGTDHVVALELASAGVAYRIEAGELAALVGANVERCLSDAMAPLAAVGCVGAWNDLFWVLHPGGPIIMDSFAAALGLQPGKLAASRRVLSEYGNMMGPTLIFVLDEVIRRRRQNHQDRSCGWGFMVGLGPGFTIEVMALRACGDIDNDKSTLPPTPRLKSSL

SEQ ID NO: 6295 - protein, 135 aa, Zea mays
  VARIANT 111..135: note = Derived polymorphism lacks residues 111 to 135
  VARIANT 89: note = Ancestral polymorphism is P, Derived polymorphism is L
  VARIANT 85..135: note = Ancestral polymorphism lacks residues 85 to 135
  VARIANT 60..135: note = Derived polymorphism lacks residues 60 to 135
  VARIANT 38: note = Ancestral polymorphism is S, Derived polymorphism is R
  VARIANT 22..135: note = Derived polymorphism lacks residues 22 to 135
MDLIKVAETKTRSMEEEVIKLQKCLQDKDEQLCSSTSSTEQYHHELDDLRTHLSFTQATGEAVKKHQRTDQELKKRVLKLEFCLWSCHPLVCSPPHLPLLLAPLLFSCCDWDIASWILNLGQNLGRSRTTMMPGT

SEQ ID NO: 6296 - protein, 401 aa, Zea mays
  VARIANT 268: note = Ancestral polymorphism is T, Derived polymorphism is M
  VARIANT 159: note = Ancestral polymorphism is N, Derived polymorphism is K
MAGATVTVDEVRKGQRATGPATVLAIGTATPANCVYQADYPDYYFRITKSDHLTDLKEKFKRMCDKSMIRKRYMHLTEEFLSENPSMCAYMAPSLDARQDVVVTEVPKLGKAAAQKAIKEWGQPKSRITHLVFCTTSGVDMPGADYQLTKALGLRPSVNRLMMYQQGCFAGGTVLRVAKDLAENNRGARVLVVCSEITAVTFRGPSESHLDSLVGQALFGDGAAAVVVGADPDGRVERPLFQLVSAAQTILPDSEGAIDGHLREVGLTFHLLKDVPGLISKNIERALEDAFEPLGISDWNSIFWVAHPGGPAILDQVEARVGLDKARMRATRHVLSEYGNMSSACVLFILDEMRKRSAEDGQATTGEGLDWGVLFGFGPGLTVETVVLHSVPITTGAPTAA

SEQ ID NO: 6297 - protein, 256 aa, Zea mays
  VARIANT 126..256: note = Derived polymorphism lacks residues 126 to 256
  VARIANT 226: note = Ancestral polymorphism is S, Derived polymorphism is L
  VARIANT 228..256: note = Derived polymorphism lacks residues 228 to 256
MEPSSPQIDATRGLLKDHATRHHNPPKTDLVYIYISPFSGRRSPISIRASIEELVTSSMHSCSSGRGISRLGSLQMTNDSAFRWAQRIRSYHIRKGESVEQCLACHSYMCSAWRSGLSYSHVRLLQRSSKPIKISRLWSSFFAYFMCLEVQALVPAGSPNANKSKSRGNDPDDDLCLMDPDGNNLKPEMLAERSCSKTNLCRDYGYTKLYKGGGSEFCASQEAFRSISLFFEFMRAAQDNITALMELDGVIRLDWI

SEQ ID NO: 6298 - protein, 873 aa, Zea mays
  VARIANT 539..873: note = Derived polymorphism lacks residues 539 to 873
  VARIANT 195..873: note = Derived polymorphism lacks residues 195 to 873
MSSLDPSPATSTQQKQLESLVNLLTQGSRFYRKAYNELFSGVTTEQDPDSSTNIPEYMLFGWHLFLMLHLRSPELFKDLVSCIHGLVAVLAILLIHVPAKFRSFTIEGSSHLIKQTEKGVDLIASLCHNYHTSEERLKEMLHKSHNAIEDIFHMKALSASECKPENLDKIDTGMEPFLTYDLMYFKGLIDMECFQSNLEKMEKLCNSNSCKGELDFKSILINNDYIPYDENSTGDSTNLGHSKCAFETLASPTKTIKNMLTVPSSPLSPATGGSVKIVQMTPVTSAMTTAKWLREVISSLPDKPSSKLQQFLSSCDRDLTNAVTERVSIVLEAIFPTKSSANRGVSLGLNCANAFDIPWAEARKVEASKLYYRVLEAICRAELQNSNVNNLTPLLSNERFHRCLIACSADLVLATHKTVIMMFPAVLESTGLTAFDLSKIIENFVRHEETLPRELKRHLNSLEEQLLESMAWEKGSSLYNSLIVARPSVASEINRLGLLAEPMPSLDDLVSRQNVRIEGLPATPSKKRAAGPDDNADPRSPKRSCNESRNTVVERNLQTPPPKQSHMVSTSLKAKCHPLQSTFASPTVCNPVGGNEKCADVTIHIFFSKILKLAAIRIRNLCERVQCVEQTERVYNVFKQILEQQTTLFFNRHIDQLILCCLYGVAKVCQLELTFREILNNYKREAQCKPEVFSSIYIGSTNRNGVLVSRHVGIITFYNEVFVPAAKPFLVSLISSGTHPEDKKNASGQIPGSPKPSPFPNLPDMSPKKVSASHNVYVSPLRQTKLDLLLSPSSRSFYACIGEGTHAYQSPSKDLAAINSRLNYNGRKVNSRLNFDMVSDSVVAGSLGQINGGSTSDPAAAFSPLSKKRETDT

SEQ ID NO: 6299 - protein, 825 aa, Zea mays
  VARIANT 772: note = Ancestral polymorphism is T, Derived polymorphism is I
MAAPPPYTPPAAVPQPLVLLHHPPALVLHVRLRPRSLRLARAPAATATAAAASVAPDDISQLNYRLRAIVRRREGAAAQGATSSSPVDPAQAEAYLRMIRDQQRLGLRQLRREEQEGEGDGDEEGPDGERARKGVAAGSSLGHRVDPRELEPGEYVVHKKVGVGKFACISAEDGADYVFIQYADGMAKLAVDQAARMLYRYNLPHEKRRPRNLSKLNDPSTWEKRRLKGKLAVQKMVVNLMELYLQRMRLGRSPYPKPASMDDFAAEFPYEPTPDQCQAFIDVEKDLTERETPMDRLICGDVGFGKTEVAMRAIFIVVSAGFQAMVLAPTIILAKQHYDVMTERFANYPEMKVAIFSGAQSKEEKDELITMIKNGDLHIIVGTHALLTERMVYSNLGLLVVDEEQKFGVQQKEKIASYKSSIDVLTLSATPIPRTLYLALTGFRDASLMSTPPPERVAVKTYVSAFSKERALSAIKFELQRGGQVFYVVPRIKAIDDVLQFLKDSLPDVPIAVAHGKKLSKNIQLAMEDFTSGKVKILVCTHIIESGIDIAHANTMIIQFAELYGLAQLYQLRGRVGRSGTEGFAYLFYTDKSLLSRVATDRLGAIEEHSELGQGFHVAEKDMGIRGFGSLFGEQQSGDVANVGIDLFFDMLFDSLSKVDQFCLVPVPYKDVQLDINISPRLSSEYISYLENPVELLNEAAKAAEKDLWTLIQFTEDLRRRYGKEPRDMELLLKKLYVRRMAADLGISRIYPSGKMIFMKTNMNKKVFRLMTEAMTSETHRNSLSFAEKEIKAELLVNLPDTLLLNWLFHCLSDCYTVIPALVKY

SEQ ID NO: 6300 - protein, 301 aa, Zea mays
  VARIANT 61: note = Ancestral polymorphism is P, Derived polymorphism is L
  VARIANT 128: note = Ancestral polymorphism is H, Derived polymorphism is Y
  VARIANT 286..301: note = Derived polymorphism lacks residues 286 to 301
MAEALLLACHLALSFSLLAASLSHLIVAAVSHRSPSSLHHHLIRLLRHPLIRLLPPLLALPFAFLPLASTPLLPLLLLPPLLPLLPLPFLPPHLPLLRPLLLTLPLLLLARAADLLAASFPDSDLQAHALAVARLLLLAAAAASLVSSLCASAPRGTTAAGAHFVAEAGLACAGAVGGLWAAQSGLNLYVDACVPTGCHRLLDTGSTAAPATRCDVDEARLRAVAVMDLALSVHCVIVTAIVAGVLLGVARWFGVDSSAGTGRRHNGSSYDALPTVASAGTMVEMEHLQGKGVVGKMVAQE

SEQ ID NO: 6301 - protein, 269 aa, Zea mays
  VARIANT 115: note = Ancestral polymorphism is A, Derived polymorphism is V
  VARIANT 97: note = Ancestral polymorphism is A, Derived polymorphism is T
  VARIANT 85: note = Ancestral polymorphism is R, Derived polymorphism is L
  VARIANT 71: note = Ancestral polymorphism is A, Derived polymorphism is V
  VARIANT 67: note = Ancestral polymorphism is P, Derived polymorphism is S
  VARIANT 58: note = Ancestral polymorphism is C, Derived polymorphism is Y
MRQWKSLVPALHLHAPAASCFPHPPSPSPCPSPPRGDDATTTPPPPPPHLQAVRLVGCDGRVRAYAPPVTARELMQAHPRHLVCRADALLIGEKIPAVAAAEELRPGDAYFLLPAHLFRSALSFVPLASSLLLVLSAASAAGAGKRPFELHRTPAGTLQIKFSDDFLLPAGDAAPAPTKRSQPAAALLRGDDRLAKDYEELVGYAKSRRWAPKLDTIDEVPAPAAAADQPGPAPPGAGRGRRSRALPFLGRLGSRRRRDDACSAVACSG

SEQ ID NO: 6302 - protein, 948 aa, Zea mays
  VARIANT 218..948: note = Ancestral polymorphism lacks residues 218 to 948
MSLSATAAGEAPPQHERVIPHSGTLSKKPRARNSARFVEVAPAPSSAANDDVEITLDVRDGSVAMLSVEPAHAGSAGDDPSVTLLPRPLENNHRRSPSYGHSLIRNASSRIMQASQELRRLGSSSRRGAAGPRTDLSKSAAAHALKGLKFISKAQGTAGWEAVETRFHVLAESGLLHRSKFGECIGMNEAAFAGELFDALSRRRNITGDSISQAEMLLFWDQISDTSFDGRLQTFFDMVDKDADGRITEEEIIEMLLYMAKKRMQIITLSASTNKLSKITEQQAAEYALLIMEELDPGNLGYIDVHNLETLLLQAPSSQSVSIGTGAKDMSQMLSQSLRPTPEPNPLRRWHRRAQYFLEDNWRRVWVVLLWLCVCVGLFAWKFAQYRRRYVFQVMGYCVCVAKGGAETLKFNMALILLPVCRNTITWVRNHTGVGRVVPLDDNISFHMVVAAGITVGAGLHVVSHLTCDFPRLLRATDAAYAPLAQYFGVPRPRNYWWFVKGTEGWTGLAMLVLMAVAFTLAMPWFRRGELALPGPLKRLTDPLKRLTDTLKRLTAGPLKRLTGFNAFWYTHHCFVAVYALLLVHGHYLYLTHKWYKKSTWMYLAAPMVLYACERLTRALRSRVRAVKILKVGLHQAGKDKVMSLHFSKPQGFRYKSGQYIFVNCAAVSPFEWHPFSITSAPQDEYLSVHIKNKGDWTGKLQEVFSRVCRPPTEGNSGLLRDDSANANLSFPEVRIDGPYGAPAQDYKQYDVVLLVGQGIGATPMISIIKDIINNMKQLDVDLEAGAGSSSGLSTAGADTSPPSPSFRTRRAYFYWVTPEQGSFEWFRDVMNEVAETDKKGVIELHNHCTSVYGEGDARSALITMIQSLNHAKHGVDVVSGTRVKTHFARPNWHNVYERIALNHQNQRVGVFYCGGAPEPLKTLRKLAQEFSRETNYDTKFEFHKENF

SEQ ID NO: 6303 - protein, 231 aa, Zea mays
  VARIANT 24: note = Ancestral polymorphism is W, Derived polymorphism is R
  VARIANT 45..231: note = Derived polymorphism lacks residues 45 to 231
  VARIANT 48: note = Ancestral polymorphism is R, Derived polymorphism is K
  VARIANT 79: note = Ancestral polymorphism is D, Derived polymorphism is G
  VARIANT 142: note = Ancestral polymorphism is S, Derived polymorphism is L
  VARIANT 152: note = Ancestral polymorphism is D, Derived polymorphism is Y
  VARIANT 188: note = Ancestral polymorphism is K, Derived polymorphism is T
  VARIANT 191: note = Ancestral polymorphism is S, Derived polymorphism is P
  VARIANT 206..231: note = Derived polymorphism lacks residues 206 to 231
  VARIANT 208: note = Ancestral polymorphism is H, Derived polymorphism is Q
  VARIANT 214: note = Ancestral polymorphism is K, Derived polymorphism is T
MYDEMIESESVTVCVDYQVRQITWPRDFSGHLVVEGLLIAVIVFQLSRKSYKPPKKPLTEKEIDELCDEWEPLWLLLHDAAGPHTIVDGKEVVNFASANYLSLIGNEKIIDSCISSLEKYGVGSCGPCGFYGTTDVHLDCESKIAKFLGTPDSILYSYGISTIFNVIPAFCKKGDIIVADEGVHWAVKMVSIYQEALWCTSSTMIWLHLQALWKNLLVEINVLKRLDATLL

SEQ ID NO: 6304 - protein, 178 aa, Zea mays
  VARIANT 11: note = Ancestral polymorphism is V, Derived polymorphism is A
  VARIANT 28: note = Ancestral polymorphism is S, Derived polymorphism is F
  VARIANT 32..178: note = Derived polymorphism lacks residues 32 to 178
  VARIANT 87..178: note = Derived polymorphism lacks residues 87 to 178
MLFILLATRSVVLYMPAFEATTTVQTLSGSGCFKDRAKQARPGPSMMATGARLRAGLPGDGSQIWPLSPPNRADPRSAAVVADAPPQQEMVAVNGTGQPQLVVDEHKTILEEVPREENGTLSAANYAGYRPQIMVQRRRRLTFHWQRADHLGRTYKMSSVYAPTTHRCGSTLSICMSL

SEQ ID NO: 6305 - protein, 822 aa, Zea mays
  VARIANT 741: note = Ancestral polymorphism is L, Derived polymorphism is Q
  VARIANT 769..822: note = Derived polymorphism lacks residues 769 to 822
MHNPRPGGGDIVEMSSSASAAGEATQNERVIPHSGSLSKSSARKSAGLEEPVTTPLSAPPPRASPSSAAMHALNGLMFISRAEGTVGWEAVERRFHELAENGLLHRSKFGECIGMKEVVFAGELFDALLRRSNISGDNIDKAELLKFWDQITDTSFNGRLQTFFHMVDADADGRMSEEKVRQTITQRASENKLSKITEQAEEYARLIMEELDPDKLGYIEVRNLERLLEDPSQLVSIGTAKDMRQMLRSQSLRPTPEPNPLRRTQYFLEDNWRRVWVVLLWLSICVGLFAWKFAQYRRRYVFQVMGYCVCVAKGGAETLKFNMALILLPVCRNTITWIRNHTGVGRVVPFDDNISFHMVVAAGIAVGAGLHVVSHLTCDFPRLLRATDAAYAPLAQYFGVPRPRNYWWFVKGTEGWTGLAMLVLMAVAFTLAMPWFRRGELALTDLLKRLVGPLKRLTDTLKLTDPLKRLTGQLKRLTAGPRKRPTDPLKPTDPLKRLTGFNAFWYTHHCFVAVYALLLVHGHYLYLTHKWYKKSTWMYLAVPMVLYACERLTRALRSRVRAVRIRKVGVYPGDVLSLHFSKPPGFSYKSGQYMFVNCADVSPFECFPKVRIDGPYGAPAQDYKQYDVVLLVGQGIGATPMISIIKDIINNMKQLDGDLEADAGSGLGSGGVDASSSSSLPSFRTQRAYFYWVTREQGSFEWFHGIMDEVAETDKKGIIELHNHCTSVYKDGDLRSRVIAQLQMLNQAKHNIDVISGTRVKTHFARPDWPNVYKHIAENHQNQRVGVFYCGGGPEPLKTLRELAKDFSRKTNTKFEFHKENF

SEQ ID NO: 6306 - protein, 123 aa, Zea mays
  VARIANT 74: note = Ancestral polymorphism is C, Derived polymorphism is Y
  VARIANT 48: note = Ancestral polymorphism is G, Derived polymorphism is R
  VARIANT 45: note = Ancestral polymorphism is P, Derived polymorphism is L
  VARIANT 40: note = Ancestral polymorphism is G, Derived polymorphism is D
  VARIANT 12: note = Ancestral polymorphism is A, Derived polymorphism is V
MNAKRLTLVLLAILMMTCLVFATNCAIAGGHDVETTPASGLRWPPPDREKTMLGSSDINVKLCLKAQCAGYKSYYCCFTLPGLPCWPDQKTCWQECPSHQRLRSTRSMKHTNAMPSIGPSRFS

SEQ ID NO: 6307 - protein, 461 aa, Zea mays
  VARIANT 19..461: note = Derived polymorphism lacks residues 19 to 461
  VARIANT 96..461: note = Derived polymorphism lacks residues 96 to 461
  VARIANT 124..461: note = Derived polymorphism lacks residues 124 to 461
  VARIANT 131..461: note = Derived polymorphism lacks residues 131 to 461
  VARIANT 173: note = Ancestral polymorphism is G, Derived polymorphism is R
MMASMAAGESGSSMRRRAWVVEVEKTLDEADASVEVSRWQLHSIYRVPACIKDLNRKAYKPQVVSLGPFHHRRDGELLPMEEHKKRALRHLLRRSKRPLEEFAAAVADVAGQLESAYLDLGAEWRGADGRERFLEMMIVDGCFLLEVIKATEMDGRNVVSDYAPNDPIFSHHGVLYMVPYIRRDMLMLENQLPLLLLEKLVAVQTGKPPSADAINRMVLKFMSGSPSARLPPGSTLGLHPLDLRRRSMLFGPQQAPQPVSRDMAPETTDIIRSAVELYEAGIRFRKTSSDSLHNVRFRGGVLSMPAVSVDDSTEYMFLNMMAFERLHVGAGNDVTAYVFFMDSIIDSAKDVALLSTSGIIQNAVGSDKAVAQLFNSISKDVVLEPQSSLDAVQREVNAYCGKPWNLWRANLIHTYFRSPWAFMSLAAAVFLLVMTVMQTVYTVLPFYQQDQGSSPAAPAPL

SEQ ID NO: 6308 - protein, 533 aa, Zea mays
  VARIANT 134..533: note = Derived polymorphism lacks residues 134 to 533
MKSCLFADRVTKDTTLIISRIQEAFSLEQVLRVDSISENKPNKNFDLFANFGLPNPHERSSLTLEGVRRALEKDLDLKIYSLDAHKKFIKQCVDKVFAESADENANDDALEDSDAKDDHLSKEGTDVAKPMPVSNKMSSNADVVTSSKTGKDPEEEKNQTSSSDISEDMIKEAIEKRASYFRKNSDTLTLQGVRRTLEEDLKLQKKALDAYKNFITTGLDKILQEPANGTKKKSKNGSSKDTDKTSKGSKRVHEESDSSELNDRKSDMDNSDVDSRPRKKRAEKAKVTKKQKIVTNERKLSTPKAKKVAKQDLGSSTEEQGGNSAEEDNSHSSAEEDNKRKRQQTPAYGKQAEHLKSIIKSCGMTIPPTVYRRVKQAAENKREACLIKELQDILEKEGLSKNPSEKEIKAVKKRKERAKELEGIDMSNIITSSRRRSTSSFIPLPPPPQIEVDSDDDEDDDDDAEGNDAEGDDDDAEGDDEDDAEGDDDDAEGDDAEDDDEVDEENVKGRDEGDNDTAEAANGSADDAEKENN

SEQ ID NO: 6309 - protein, 251 aa, Zea mays
  VARIANT 135: note = Ancestral polymorphism is R, Derived polymorphism is C
MRKKLGTRFPAARIKKIMQADEDVGKIALAVPVLVSRALELFLQDLIDRTYEITLQSGAKTLNSFHLKQCVKRYSSFDFLTEVVSKVPDLGGADSCGDERVLPRRRKSNGSDPENDESRSSKMAIRNANTSPRGRGRGRGRGRGRPPTKRKEVGYVQFEDESSMFAEQGETLPGEGTVPEINSGNEITPQSTQPPLTAPAQATNSKVEEASTDHQSDWPMPDATGNIGVGPSGFGHLTVQVDEDEDYDNED

SEQ ID NO: 6310 - protein, 201 aa, Zea mays
  VARIANT 189: note = Ancestral polymorphism is R, Derived polymorphism is M
  VARIANT 157: note = Ancestral polymorphism is T, Derived polymorphism is A
  VARIANT 120: note = Ancestral polymorphism is D, Derived polymorphism is V
  VARIANT 111: note = Ancestral polymorphism is I, Derived polymorphism is N
  VARIANT 104: note = Ancestral polymorphism is L, Derived polymorphism is H
  VARIANT 89: note = Ancestral polymorphism is S, Derived polymorphism is L
MDAFFQYRADFPSDLQKQVVFVDLAPIFSLMANAILRRQIQLTVDTISEAIDGAEGFQNTHQPQHYESAKFSIEQVVFILEKIRIMWESILPRSIYRKSMCNVLGSVFSRITRDMLLIDDMAAEETLQVIHVMPYWFEITPNNYCPELLDMSLKSIATCWESGDLVRCGFTSSEVQNFIKAIFADSPLRKECLGWIVRTPA

SEQ ID NO: 6311 - protein, 510 aa, Zea mays
  VARIANT 72: note = Ancestral polymorphism is F, Derived polymorphism is S
  VARIANT 158: note = Ancestral polymorphism is S, Derived polymorphism is L
MDLRRLAVFAAALAAGWWSRGAEASIHTYDREPFREVGNAFLLSGGSEGIVADGADPAAPASSFIKFVNVTFWRTPEAAESHAKMAHSTGLVQAILFEVVDRDNIGGSAYGGQRSICCTPDLAKLEGCKQGEVIRRPSSDDPDWPFVLDTHFSANHLSVKLEDEPVRITKTGMYNLFFISCDPKLRGLTMSGKTIWKNPGGYLPGRMAPLMKFYVLMSLAYLLVMIVWFSQYVRFWRDILPIQNWITLIIALGLFEMTLWYFEYLNFNSSGVRPVGITTWVVTVGAIRKTVSRLLILSISMGYGVVRPTLGGLTSKVLLLGLTYFLASELLDIAENVGTINDISGKARLFLVLPDAFLDAFLILWIFTSLSRTLEKLQARRSSVKLDIYRKFTNALAVSVIASVAWIGYEVYFKATDPFSERWQSAWIITAFWDVLAFVLLLVICYLWAPSQSSQRYAYSGEAADDDDEESQSLTKGDGEVGMVKIDKDRNAGVSSAFGLEDEAEEDKRE

SEQ ID NO: 6312 - protein, 396 aa, Zea mays
  VARIANT 297: note = Ancestral polymorphism is N, Derived polymorphism is K
  VARIANT 184: note = Ancestral polymorphism is G, Derived polymorphism is D
MLRACTRVGGAGAGGCGRRERLMASLIPFLPPSPYSTHLPRQPQSQPPTAATQPAAAARPSRFRLLFARAAAQRQRDSEPAPAAEERRSLAVRTGELFLGLAALLLRGTGAERSGGAAVEEMEARDGVVWEQRPQDVDAERRRRELTSPGFSFSAAGLLFPYHLGAAQCLMDRGYITETTPLAGSSAGAIICAVIASGNTMQDALQVTKVLADNCRSKGTAFRLGAVLKDVLVEFLPDDLHIRCNGRIRVAITQLSWRPRALLVDQFDSKEDVINAVITSSFIPGYLAPRPATFFRNRLGIDGGLTLFMPPTSAAETVRICAFPASRLGLQDIGISPDCNPENRASPRQLFNWALEPAADETLDKLYELGYLDAAVWAEQNYAELIAKNDQSLVAD

SEQ ID NO: 6313 - protein, 67 aa, Zea mays
  VARIANT 61..67: note = Derived polymorphism lacks residues 61 to 67
  VARIANT 37..67: note = Derived polymorphism lacks residues 37 to 67
  VARIANT 10: note = Ancestral polymorphism is A, Derived polymorphism is D
  VARIANT 2: note = Ancestral polymorphism is A, Derived polymorphism is V
MAVAKQTTIAAAVLVIAAILLCSSPCYQAGNSSLRLRAVLSPRGFLYHGEMPHAVPIQRIQNQQSPL

SEQ ID NO: 6314 - protein, 89 aa, Zea mays
  VARIANT 7: note = Ancestral polymorphism is S, Derived polymorphism is R
MAVMKSRTVIVAAVLLAVVILSSLCPCYEAGGCIGKPPKTPAPKRPCFSPYSEDHCDRQNCRFVCMSHGYSDGGWCDEREVRKMCCCYH

SEQ ID NO: 6315 - protein, 276 aa, Zea mays
  VARIANT 209..276: note = Derived polymorphism lacks residues 209 to 276
MSPSEPTREESVYMAKLAEQAERYEEMVEFMERVARSAGGAGGGEELSVEERNLLSVAYKNVIGARRASWRIISSIEQKEEGRGNEAHAASIRAYRSKIETELARICDGILALLDSHLVPSAGGAESKVFYLKMKGDYHRYLAEFKSGAERKDAAESTMNAYKAAQDIALADLAPTHPIRLGLALNFSVFYYEILNSPDRACNLAKQVCFFSFYPPFAFDEAISELDSLGEESYKDSTLIMQLLRDNLTLWTSDTNEDGGDEIKDAAAPKESAEGQ

SEQ ID NO: 6316 - protein, 104 aa, Zea mays
  VARIANT 9: note = Ancestral polymorphism is P, Derived polymorphism is L
  VARIANT 37: note = Ancestral polymorphism is H, Derived polymorphism is D
MALLFKKSPTNITDLIIASLLVLLFIMASMSPSFQVHVKGDDGHQHEGSLELAQQLRTTTCIAVKGGICFQKKCQGICESNGFNAATAFCYKPPGLHLPQCCCP

SEQ ID NO: 6317 - protein, 168 aa, Zea mays
  VARIANT 130..168: note = Derived polymorphism lacks residues 130 to 168
  VARIANT 126: note = Ancestral polymorphism is D, Derived polymorphism is V
  VARIANT 112: note = Ancestral polymorphism is P, Derived polymorphism is T
  VARIANT 27: note = Ancestral polymorphism is T, Derived polymorphism is I
  VARIANT 2: note = Ancestral polymorphism is A, Derived polymorphism is V
MAPGISLKKLLAIGMAICAMSLASAATATKTSPENYVELHNAARSAAGAGRVSWDAEAARHAAKRAAAGCAAGLRSMSLPVVAGGGYGENVFRGTPGKAWAAADAVRAWTAPAATEYVQLVWPASVRIGCARAACAGGRGVVISCSYKPAGNLLVLTRNDFTIHTCSS

SEQ ID NO: 6318 - protein, 81 aa, Zea mays
  VARIANT 25: note = Ancestral polymorphism is G, Derived polymorphism is R
  VARIANT 39: note = Ancestral polymorphism is K, Derived polymorphism is I
  VARIANT 77: note = Ancestral polymorphism is R, Derived polymorphism is I
MSKYYGESERLLGSIFYLANDLPERGNIFLDEVFNMLGKSIDADQRLTLDGDKLTTDLAGLFTRTSKSPAYHVYVMRSNRK

SEQ ID NO: 6319 - protein, 258 aa, Zea mays
  VARIANT 75: note = Ancestral polymorphism is L, Derived polymorphism is F
MKVQCDVCTAEAASVFCCADEAALCDACDRRVHRANKLAGKHRRFSLLHPCSSSSSSAAHKPPLCDICQERRGFLFCKEDRAILCRECDAPVHSASDMTRRHSRFLLTGVRLSSAPVDSAGPSEEEEQENSRGPCNDESCSSGSGAGGATTATASDGSSISEYLTKTLPGWHVEDFLIDDASAGDVGACSDGLYQGQNGQISGVLQEAYLPWTEREQVQTDVADERASWERWVPQMHAEFGGGGKRPRASPSPPCSYW

SEQ ID NO: 6320 - protein, 101 aa, Zea mays
  VARIANT 94: note = Ancestral polymorphism is S, Derived polymorphism is L
  VARIANT 91: note = Ancestral polymorphism is L, Derived polymorphism is M
  VARIANT 87: note = Ancestral polymorphism is A, Derived polymorphism is V
  VARIANT 86: note = Ancestral polymorphism is T, Derived polymorphism is M
  VARIANT 77: note = Ancestral polymorphism is L, Derived polymorphism is F
  VARIANT 63: note = Ancestral polymorphism is A, Derived polymorphism is V
  VARIANT 55: note = Ancestral polymorphism is A, Derived polymorphism is D
MSDEELMEQCDMGTFKASGPGGQHRNKRESAVRLKHLPTGIIAQEMQALLDLLFAVEGSVSDAAKILGLSTGALSRLILSDDSLRTAANELRASKVTLQIC

SEQ ID NO: 6321 - protein, 213 aa, Zea mays
  VARIANT 154: note = Ancestral polymorphism is P, Derived polymorphism is L
  VARIANT 112: note = Ancestral polymorphism is R, Derived polymorphism is W
  VARIANT 90: note = Ancestral polymorphism is T, Derived polymorphism is K
  VARIANT 87: note = Ancestral polymorphism is L, Derived polymorphism is P
  VARIANT 83: note = Ancestral polymorphism is S, Derived polymorphism is G
  VARIANT 81: note = Ancestral polymorphism is E, Derived polymorphism is G
  VARIANT 66: note = Ancestral polymorphism is A, Derived polymorphism is D
  VARIANT 54: note = Ancestral polymorphism is P, Derived polymorphism is H
MATAGSSPPASQQPFKLILGSSSVARKHILEEMGLEFQVMTADIDEKSIRRENPDDLVMVLAEAKADAIMSRLNIDDYQKEGSQPTLLITSDIVVVHEGIIREKPTTKEEARQFLKGYSGGHVSTVGSVVVTNLTTGKRLGSLDKAEVYFHDIPDEVIKSLIDEGVVFRVAGGLLLEHPLTLPFVEAVVGSSDSVMGLSKEVANKLIHDALST

SEQ ID NO: 6322 - protein, 164 aa, Zea mays
  VARIANT 20: note = Ancestral polymorphism is K, Derived polymorphism is T
  VARIANT 47..164: note = Derived polymorphism lacks residues 47 to 164
MQTQRRMQTERRGQPAHEVKGTTHPTGRRRDLAVLRGVAIGGAAEVWAEPMAIRRRKALDDADADGRYTPAIDIWSIGCIFAELLTGRPLFPRKNVVHKLDIITDLLGTPSSETLSRNESSLFSHPAPFEVAQSSVLTSTFTCLKPVDMYLGGFLHIRKARRAF

SEQ ID NO: 6323 - protein, 195 aa, Zea mays
  VARIANT 137..195: note = Derived polymorphism lacks residues 137 to 195
  VARIANT 85..195: note = Derived polymorphism lacks residues 85 to 195
  VARIANT 35: note = Ancestral polymorphism is A, Derived polymorphism is T
  VARIANT 34: note = Ancestral polymorphism is T, Derived polymorphism is M
  VARIANT 28..195: note = Derived polymorphism lacks residues 28 to 195
  VARIANT 20..195: note = Derived polymorphism lacks residues 20 to 195
MLDDEKGDFVGTAVHEVEEETGIKLNIEDMVDLMTLLDPATGGRMLPSPQDECYDPATLVASSAWDVAKLRARFCVPSTPLEDTQCCDLHAGVRLCVSCSLDDVNLKFYDVVLDSWSDGPHTGSMEETGIERVCCVQSSPVQDPVLIEFLDGVTKLVGDANGETMSQEIHAAPAAEGGVPANAPLGFQRKFGSNK

SEQ ID NO: 6324 - protein, 68 aa, Zea mays
  VARIANT 53: note = Ancestral polymorphism is Y, Derived polymorphism is H
  VARIANT 37..68: note = Derived polymorphism lacks residues 37 to 68
  VARIANT 28: note = Ancestral polymorphism is E, Derived polymorphism is G
  VARIANT 18: note = Ancestral polymorphism is P, Derived polymorphism is S
  VARIANT 9: note = Ancestral polymorphism is P, Derived polymorphism is L
  VARIANT 5: note = Ancestral polymorphism is V, Derived polymorphism is M
MPMAVSKNPNIAFMFLTPGSLPFDKLWEKFLQGHDGRYSIYINASLSHTYYMYILSLFLLGVKFTVKR

SEQ ID NO: 6325 - protein, 474 aa, Zea mays
  VARIANT 21: note = Ancestral polymorphism is E, Derived polymorphism is K
  VARIANT 209: note = Ancestral polymorphism is S, Derived polymorphism is T
  VARIANT 313..474: note = Derived polymorphism lacks residues 313 to 474
  VARIANT 329..474: note = Derived polymorphism lacks residues 329 to 474
MESSSASNEEVTAVPASWNFEPNETLLGLMALSVRGVLARIKAEMVAGGGGGRPVIPMGHGDPSAFPCFRTAPEAVDAVAGALQSGEYNSYSTCVGLEPARRSVARYLSRDLPYELSPDDVYLTNGGAQAIEIVCSALARPGANILLPRPGYKLYEARAVFSGMEARYFDLVPGEGWEVDTDSVRALADKNTVAVVIINPGNPCGNVYSYEHLAKASARYFWLALGLVAETARKLGVFVVADEAYAHLTFGERRFVPMGVFGAVAPVITLGSISKRWLVPGWRLGWIATSDPSGVFQRTKVLDLLLLLLHSKCSHEMMFLVFQVASSIKTYHYICSDPTTFVQGAVPNLLENTSEEFFRRNIRTLKESADMCWEKLKGVNGIACPSRPMGSMFVMVKLDLSCLQGIEDDMDFCCRLAKEESVVVLPGRVVGCEDWLRITFAIDPSSLEDGLDRLRSFCSRHSKPAAQGSAASVV

SEQ ID NO: 6326 - protein, 199 aa, Zea mays
  VARIANT 178: note = Ancestral polymorphism is D, Derived polymorphism is Y
  VARIANT 158: note = Ancestral polymorphism is A, Derived polymorphism is T
  VARIANT 121: note = Ancestral polymorphism is R, Derived polymorphism is Q
MLSEACNTGLILKNVASLFMNKDSLKVEADTRLWELIKYVCKRGRAWRVSGEQQGAEVPAMWTSSVGERRGTGSSSAGMQRAREAAAMRERISMRNRVLTRTDQMQEDIEMKLMATRIHRRRESTNVEDMFLAHIFGMDTLACGLHNVVKLIEMIFSAKRYQSFDSEIGALIEDGKGDFEMLKKKVLECSALFHPASRN

SEQ ID NO: 6327 - protein, 384 aa, Zea mays
  VARIANT 3: note = Ancestral polymorphism is R, Derived polymorphism is S
  VARIANT 21: note = Ancestral polymorphism is A, Derived polymorphism is V
  VARIANT 46: note = Ancestral polymorphism is S, Derived polymorphism is R
MSRCLVLAAVLLAALALAPAARGIPFSERDLASEESLRALYERWRSHYHRVSPRDGDDKQQQARRFNVFKENARYVHEANRKDGRPFRLALNKFADMTTDEFRRTYAGSRTRHHRAQLGEARSFAHAQHGRGGSGTTNLPPAVDWRLRGAVTGVKDQGQCGSCWAFSAIAAVEGVNKIMTGKLVSLSEQELVDCDDVDNQGCDGGLMDYAFQYIQRNGGVTTESNYPYLAEQRSCNKAKERSHDVTIDGYEDVPANNEDALQKAVASQPVAVAIEASGQDFQFYSEGVFTGSCGTDLDHGVAAVGYGTTGDGTKYWTVKNSWGEDWGERGYIRMQRGVPDSRGLCGIAMEPSYPTKKPAGHGGGIVQDLGQELHQADGGRASYY

SEQ ID NO: 6328 - protein, 105 aa, Zea mays
  VARIANT 38: note = Ancestral polymorphism is T, Derived polymorphism is A
MSFNKNLAVVVGFTLALLIASNGEETSSYGGSALCDSTTGVACASDAVCVTICKRRAGQNYVYGHCYKEPSGGRSCLCTVRCDPRSAAAPAPAPAPAWRGIGMLG

SEQ ID NO: 6329 - protein, 647 aa, Zea mays
  VARIANT 340..647: note = Derived polymorphism lacks residues 340 to 647
MATATESGSAPPVDGEVRQRGRPRGSGRGRERSQSARRSKRPRKPRPWRSASPPALEPLVPLPPGTEVEVRIDDDGFHGTWFEATVLDFAPARGYRNPARYTVKYVHLLADDEGALSEPFAPSQIRPRPPPLSSPPRFQLHDIVEAFHNEGWWSGIVVSAPDATGAGVTVSFPITREVIEFPSSLVRPRRDYVAGDWIPSRAAMVLRPNRAVKVYEVGEKVEVLRNRDVYGNSWFPATVRVVIDDLSYVVEYFDLEEGKGGSEKATEYLHWWFIRPAVEHSPSKREFQLRPGAAVEAYCDGAWSLGVVTRVVGEDEYEVGIIGKKTRLLVTKVVELLKPQYIWNGNQWRITTAKGQTKLRRPSKSGESPSAPVNLISSGEEQSHDPDSSSTKKSRKELKQLDPTLAKNSEHASVSEVDIPLLGMCKSPESTHSQNSLLSEKSSPQGSHEIVNSVPMNGLLCASSGHSAPVNNQELLSEMGVFDGELQGSVSGRSVDAHDMLCIAELRKKTASVRRNSAVRHTEEQLVKSLGVKKCISNSKEGKTSPIQELQGKLKGNNNFSRNIVLALSVSRDGQTNLSPDRLVSIGTKRGSSTKVLACKKLAKRRRSKELCNLNSSLDVTRTDQQRGRKEAAANERSPLSIGVFEI

SEQ ID NO: 6330 - protein, 363 aa, Zea mays
  VARIANT 348..363: note = Derived polymorphism lacks residues 348 to 363
MATATESGSAPPVDGEVRQRGRPRGSGRGRGRGRGRGRERSQSARRSKRPRKPRPWRSASPPALEPLVPLPPGTEVEVRIDDDGFHGTWFEATVLDFAPARGYRNPARYTVKYVHLLADDEGALSEPFAPSQIRPRPPPLSSPPRFQLHDIVEAFHNEGWWSGIVVSAPDATGAGVTVSFPITREVIEFPSSLVRPRRDYVAGDWIPSRAAMVLRPNRAVKVYEVGEKVEVLRNRDVYGNSWFPATVRVVIDDLSYVVEYFDLEEGKGGSEKATEYLHWWFIRPAVEHSPSKREFQLRPGAAVEAYCDGAWSLGVVTRVVGEDEYEVGIIGKKTRLLVTKVVELLKPQYIWNGNQWRITTAKS

SEQ ID NO: 6331 - protein, 321 aa, Zea mays
  VARIANT 69: note = Ancestral polymorphism is N, Derived polymorphism is K
MACLSPSSSGRRLSELLEEKQEPFVLDLHLLEKGCCSSRLLDGYDSALCWPAAGNDAAAALRRLASKKNKAAKLKPARQHAAGGLLQLLLSKILRGSSAAAQRQRKPAAAALHFSGSLKLPAAVAPASCYVELDAVKTAASDVVVVVVKAQDAATAGRYNDSDCDDDEKQQLSPVSVLDHPFESSPVHATLLSPSSKDAAAMDDFRNLLDAAAYSPALLAKSEHLHLRDADADADEDCYYGGYCVSPKSCRDDRSAATAYWDWDAHTGELARASQLVASELPTSRLVAADVGPERRDVRAEVEAAVFEALMRELVVDLRSC

SEQ ID NO: 6332 - protein, 696 aa, Zea mays
  VARIANT 54..696: note = Derived polymorphism lacks residues 54 to 696
MGSMSQKIKIFTEDEIASITSNYSTLIGKGGFGEVYRGVLDADDDLVAVKRYIRQDLRDEFMDEVNIHSVMNHNNVVKLIGYCIGESTLMLVTEYISNGNLDDILHRSDASIPLDVRLGIAIGCAEALSYMHSMDSQSDNHIYHGDIKPANILLDNNLTTKVSDFGLSRFLFSGTTQFTTTLKGSMGYMDPVYFHEGCLSPRSDVYSFGIVLLELLTRKRAKYGDVNLIPTFNKACAKGKGLRELFDAAIAEKDNVKILKESWKLASQCLSLNIHTRPQMNEVAKRLRMLKKELKTSPQSILATHSMWAKQYRQAGSSSPSFKKKLSFFKGNASSYSKVISELGDNVRVFTKEEINEVTHNYSNLLSGGTSATEVYKGTLEDNTMVAVHRLVYEGSEEAFINGGMVVSKIAHRNIVRVLGCCLEPQTTAFLYEYVAKGSILDILCSQEDFPLDLRMRIAIKTAEALQYLHSSETGVTGHGSVSASTILLDNNLVPKLTEFSRSCTLFKESETTSVVGAGVMITGSLLEKALNDDPSRYGSVLMNLESDVYRFGGVLMALVSRDGDGDGGHDGLLARFTRAYETEETGRALFDRDVITAEEDVALLDELGRLALKCSVLDADRIAVRPTMKEVADELRTMRRSWKERSRSTEAPAAYVDVAAAGAAVVPAEAARLPNLMRHMFGYRRISVGDPIRVC

SEQ ID NO: 6333 - protein, 343 aa, Zea mays
  VARIANT 1: note = Ancestral polymorphism is L, Derived polymorphism is M
  VARIANT 29: note = Ancestral polymorphism is S, Derived polymorphism is F
  VARIANT 137: note = Ancestral polymorphism is D, Derived polymorphism is Y
  VARIANT 160: note = Ancestral polymorphism is S, Derived polymorphism is F
  VARIANT 171..343: note = Derived polymorphism lacks residues 171 to 343
  VARIANT 183..343: note = Derived polymorphism lacks residues 183 to 343
  VARIANT 204..343: note = Derived polymorphism lacks residues 204 to 343
  VARIANT 216: note = Ancestral polymorphism is R, Derived polymorphism is M
  VARIANT 249..343: note = Derived polymorphism lacks residues 249 to 343
MIIDSKPSKGLRKFLQKHCEGETLAVADSKLGNAIKEKLKIDCLHNSAVMELMRGLRNQLTELITGLGAQDLGPMSLGLSHSLSRYKLKFSPEKVDTMIIQAIGLLDDLDKELNTYAMRVREWYGWHFPELTKIVTDNIQYAKVVKMMGNRVNAVNLDFSEILSDEELETQLKEAAVISMGTEVSDLDLSNIRELCDQVLALSEYRAQLYDYLRSRMNTIAPNLTSLVGELVGAGLIAHGGSLLNLAKQPGSTIQILGAEKALFRALKTKHSTPMYGLIYHASLIGKASQKHKGKISRSLAAKTALAIRYDALGDGEDKMCVIVVYWYYIFPLQRTGIQLVIR

SEQ ID NO: 6334 - protein, 476 aa, Zea mays
  VARIANT 373: note = Ancestral polymorphism is G, Derived polymorphism is R
  VARIANT 28: note = Ancestral polymorphism is R, Derived polymorphism is G
  VARIANT 25: note = Ancestral polymorphism is L, Derived polymorphism is P
  VARIANT 21: note = Ancestral polymorphism is P, Derived polymorphism is S
MKAGPPHVAMLATPGMGHLIPLAELAKRLAARRGATATLITFASAASATQRAFLASLPPSVAARALPPVDLSDLPRDAAIETLMTAECARSLPAIAAVLAELGETARLVAFVVDQFGMEAFNAAGVRAARCLFMPMNLHALSLVLHLPELAASVPGEFRDLAEPVRLPGCVPIPGPDIISPLQDRSNPSYAVMVNLAVRCREAAAAILVNSFDAVEPEAAEALRHPAEPGWPPVYPVGPLILQSESGGTGADVDGTPPRAACLEWLDRQPARSVVYVSFGSGGALPKEQMHELALGLERSGQRFLWVVRSPSDDEGTLNGNYYDAESKKDPFAYLPEGFVGRTKEVGLLVPSWAPQTQVLAHGATGGFLTHCGWNSTLESLVHGVPMVAWPLFAEQRLNAVMLSEGAGAAIRLPETKDKESIAAVVRELVEGEGKGAMVRAKVAQLQKAAAEGLREGGAATTALDEVMDKWEAEAN

SEQ ID NO: 6335 - protein, 172 aa, Zea mays
  VARIANT 122: note = Ancestral polymorphism is S, Derived polymorphism is W
MPPPTVPAIPPQSPLVLKYGEEGKVVERVNLATRQLRLLPKPVVRICGLLALDVSRDQLKAIVERAGAGSRPTTQQMGEASRRVVHRRRRPASSPMRRLRGNYDPVEMARMAASAAAAVRHSAKKRPKMSQIVRALEGDISLEDLNDNEGVRPGQSMAFVHVLLSRFYCFLQ

SEQ ID NO: 6336 - protein, 344 aa, Zea mays
  VARIANT 11..344: note = Derived polymorphism lacks residues 11 to 344
  VARIANT 158: note = Ancestral polymorphism is V, Derived polymorphism is G
  VARIANT 159: note = Ancestral polymorphism is P, Derived polymorphism is L
  VARIANT 310..344: note = Derived polymorphism lacks residues 310 to 344
MASKAGGDGKEAINEQVVANTYANMRTEMNQLYTKITELEMEVSEHSLVIGAIEPLDPSRRCYRMIGGVLVERTIKEVLPAVKRNKEGLEEVIARMHEALERKKKEITEFELKYKIRIRKADNDAEDEGGKKEGTAQGVLVGPAGQAVANMDIKLDFVPPWLINFISRQLIGSGHKLYQKAVSTVASHDGDYRKALRGSLYARIREYQDSDNKAKVAPDNATTQNRLSLTNTILNSEIVEETEQNTSIAVDNLPTSQPYVPFSKAIRLEMLPHVMMQLWKRVLLVPELHKQTFVNADDLLNGHPVTTAPQGSRDTRQAHPLASEKISDRAEDAINKSSLKISTT

SEQ ID NO: 6337 - protein, 1046 aa, Zea mays
  VARIANT 387: note = Ancestral polymorphism is R, Derived polymorphism is C
  VARIANT 266: note = Ancestral polymorphism is T, Derived polymorphism is A
MIEFEFIVDLGSFTKLWICNLEKQSDVLDIGSQQVERRSIYAENTFDAAREILYQVEYGYKHANVFYFDGWDGIGASAALKEAAKRLKSSASKFDSVLHLDCSLWKSRRALQKAIAEEIKLPHSVMAILSQHDKEDDFNGVEEGARNEVREIIKHTYTKLATVKRLVVVFHNGSGSFIDLSEFGIPLNRNFKGDVLLWTMQGRFRPYVSYTIKEKDPNMVYLYVDPDTVQLDDTSLWGIVNEEAKEVAQYTGTIDHMAVVACILYTWKLKDMGNIDWDTHASNYWVCDGIIQGSSSSEAWDWKVGDALQRNMHLGWISRSYMDYFFSSSAIEMQMQHYLPRPPAICCTSEIISVPAEATSFFLQPKYGDEESQLLASMFKHSASNLRVLHLSGCTFRFASPPFLCCSNLRFLLLHRCKDDGTSITPTEGKELDDQSGAWRACFGKLQVMDLSYTKWWWLLSQRMNIMANLRELNAKGIKNLSTSHLRGCGRLVKLRVEDGSVDGQRLILENSVALELAVLVNHAKDEGATYISFRGCAQLRSILLGGLFCCLHELDLSCTSVETVDLREVEAQRLKRLILLGCQKLRAILWPPRSSSILETLDVFCVSTTPSTASGQEWPHLCKWEEKRKEATSASTAESSSLDRNWYICVRDARLLRSLDVFYTYENNRCSIGWPARVEFTTPPASGDLVAAQGVNILQQSIHVVDVYARDMITHNQLIHDEDATAGDEDGEGAIHWMWDCPTTRTMHGHGLYIHVQAEDDEQEGELNIGGTWSMPPRFICTSADVMHVHDCLSITSGISLSYITSWDLLNWCRVERCPMLRSVFTAFSEGKENDISSDSWLIFQNLTTFWASHLPMAKHIWNWSPRAYPSAYSFQQLQFLHLDYCPRVIFVLPLDSNMSLPQLETLEIICCGDLREIFRPQDPRLENQEEVVKHFPKLRRIHLHNLPTLRSICGRMMSSPMLETINVTGCLALRRLPAVGGRLGQPPTVVCEKDWWNALEWDGLEAKHHPSLFRPKHSCHYRKPKLLRGSVLRSSDQPIYCMHA

SEQ ID NO: 6338 - protein, 146 aa, Zea mays
  VARIANT 104: note = Ancestral polymorphism is T, Derived polymorphism is M
  VARIANT 76: note = Ancestral polymorphism is Y, Derived polymorphism is H
MATSNTARMEDGGGDLRSTIKKWNIIYPVYLNSKKTVAEGRRIAAAKACPDPTCIEIADCCSHLKIPHAIELDKAYPRDFFQVGRVRVQLKKDDGSPVNPAIKTKKQLMIQVAELVPKHHGRTKKQEPAPNPGGSSKNTKGGKKKK

SEQ ID NO: 6339 - protein, 216 aa, Zea mays
  VARIANT 163..216: note = Derived polymorphism lacks residues 163 to 216
  VARIANT 102..216: note = Derived polymorphism lacks residues 102 to 216
  VARIANT 83..216: note = Derived polymorphism lacks residues 83 to 216
MLPKKSLSGYQKRKKRKHEDQLVVSQKGALHKFFGVSSNVDVNEVEGHESDHAHDDGQQDHDQQYDHNLNAEDEVSEDGSMEENLIVAIDAVEDSMMRENLQPSCDHENSNDDEQDGSGLSIFDPRTWDNLDNNKRGVLIERGPLFKSNKSKSLLASDGVRDWQRLSKRLKEHESSVEHLTNMNTWNELRMRLSKNKTIDDDLQREISKESVGDKF

SEQ ID NO: 6340 - protein, 422 aa, Zea mays
  VARIANT 347: note = Ancestral polymorphism is V, Derived polymorphism is M
MVLQGRGRSCEGRQGHDSMKRANAERAERGDPGWRMSPSMENVGSGTEDVVDADLRETVGIVGEMRVGRGEMADATARAWMDEQMLPKKSLSGYQKRKKRKHEDQLVVSQKGALHKFFGVSSNVDVNEVEGHESDHAHDDGQQDHDQQYDHNLNAEDEVSEDGSMEENLIVAIDAVEDSMMRENLQPSCDHENSNDDEQDGSSLSIFDPRTWDNLDNNKRGVLIERGPLFKSNKSKSLLASDGVRDWQRLSKRLKEHESSVEHLTNMNTWNELKMRLSKNKTIDDDLQREISKERERWRQVLIRIVSTIKFLAKHNLAFRGTNEKLYQANNGNFLGTIEMMGEFDRVIQDHIRRIQNSEIHHHYLGHRIQNEIISLLAHCVKQTILKVIKAAKYFSCIEFRMRLFLFLHRIQNEIISLPCHD

SEQ ID NO: 6341 - protein, 985 aa, Zea mays
  VARIANT 338..985: note = Derived polymorphism lacks residues 338 to 985
  VARIANT 212..985: note = Derived polymorphism lacks residues 212 to 985
  VARIANT 77..985: note = Derived polymorphism lacks residues 77 to 985
MGASAALKEAAKRLKSSASKFDSVLHLDCSLWKSRRALQKAIAEEIKLPHSVMAILSQHDKEDDFDGVEEGARKEVQEINTHTYRKLSTVNRLVVVFHNGSGSFIDLSEFGIPLNRNFKGDVLLWTMQGRFSYNIYEKIYENIPNMVYLYVHRDIVQLDDTSLWGIVNEEAKEVAQYTGIMDHMVVVACILYTWKLKDMGNIDWDTHASNYWVCDGIIQGSSSSEAWAWKVGDALQRNTQLDWRRSYMHEFFSSSAIEMQMQHHLPRPPVICCTSKIISVPAEATSFFLQPKYEDEESPSRGVVTVDTTIQLPASMFKHSASNLRVLHLSRCTFRFASPPFLYCSNLRFLRLHRCEDDGTSITPTEGKELDDQSGAWRACFGKLRVMDLSYTQWCWLLSERMMNIMANLRELNAKGIKNLSTSHLRGCGSLIKLRVEDGSVDGQRLILENSVALEQAVLTNDAKDEGATVDRIRNISFRGCAQLRSILLRGLFCCLHELDLSCTSVETVNLRKVQAQRLKRLILLGCQKLRAILWPLSTSSIAKTLDVFCVSTTPSMTASGQEWPRLCKWEEKRKEANSASTTESSSLDRNWYICVRDARLLRSLQIFRTYENNRFSLGWPTRVEFTTPPASGDLVAAQGVSILQQTIHVVDVYARDMITHNQLIHDEDATAGDEDGEGAIHWMWDCPMTRTMHGHGWYIHVQAEDDEQEGEGGEAQDKTGGTWSMPPSFICTSADVVHVHDCMSITFGISLSYITSWNELHWCRVERCPMLRSVFTAFSEGKENDVSSDSWLIFQNLTTFWASHLPMAKHIWNWSPRAYPSAYSFQQLQFLHLDYCPRVIFVLPLDSNMSLPQLETLEIICCGDLREIFRSWDPRLENQEEVVKHFPKLRRIHLHNLPTLRGICGRMMSSPMLETINVTGCPALRRLPAVGGRLAQPPTVVCEKDWWDGLEWDGLEAKHHPSLFRPKHSCHYRKPKLLRGSVLR

SEQ ID NO: 6342 - protein, 368 aa, Zea mays
  VARIANT 51..368: note = Derived polymorphism lacks residues 51 to 368
  VARIANT 221..368: note = Derived polymorphism lacks residues 221 to 368
  VARIANT 226..368: note = Derived polymorphism lacks residues 226 to 368
MEALWKQASRLKDQVSRQGVFKQFGYGNSDNAFTDESEVKLHQRLEKLYLSTRAAKHFQRDIVRGVEGYIVTGSKQVEIGNKLSDDSQKYGVGNTCTSGDTLSKAATYFGKARSQMEKERGNMLKAFGTQVAEPLRAMVMGAPLEDARHMAQRYDRTRQEAEAQAVEVSRRQNRVRESTGNGDMVSKLEAAEYKLEELKSNMVGLGKEAIAAMSAVEAQQQRLTLQRLIALVEAERTYHQRVLEILDKLEEEMVSERQKIEAPPTPAAENYIPPPAPPSYDEINGAFASTSVNESVQSVDFFLGEALDSFNAESEFELTLSAGDIVIVRKISSNGWAEGECKGKAGWFPHAYIERQERVLASKVPHIF

SEQ ID NO: 6343 - protein, 161 aa, Zea mays
  VARIANT 14: note = Ancestral polymorphism is L, Derived polymorphism is P
  VARIANT 37: note = Ancestral polymorphism is L, Derived polymorphism is P
  VARIANT 43..161: note = Derived polymorphism lacks residues 43 to 161
  VARIANT 49: note = Ancestral polymorphism is M, Derived polymorphism is V
  VARIANT 50: note = Ancestral polymorphism is A, Derived polymorphism is T
  VARIANT 56: note = Ancestral polymorphism is A, Derived polymorphism is V
  VARIANT 71..161: note = Derived polymorphism lacks residues 71 to 161
  VARIANT 86: note = Ancestral polymorphism is L, Derived polymorphism is F
  VARIANT 87..161: note = Derived polymorphism lacks residues 87 to 161
  VARIANT 108: note = Ancestral polymorphism is G, Derived polymorphism is V
MHGHGGILGETDSPELQEAPLLSCESEVADKGFWTKPKDAIHQFIEELMAPPTMSAIIGFVVGLFPWLKSLIVGDGAPFKVMQDSLQLMSDDMIPCITLILGGNLTQGLRKSGLKRAVIVAILCVRFVLLPLIGIVIVRAVYGLGFLSRDPLYCYVLMVSG

SEQ ID NO: 6344 - protein, 585 aa, Zea mays
  VARIANT 191..585: note = Derived polymorphism lacks residues 191 to 585
MPPLAARLYAPLNLAPAVPAASLRPATRLCAASGPRNEKAAAVAVAEKAGGEGGGGEDEGPYDAIVIGSGIGGLVAATQLAAKGARVLVLEKYLIPGGSSGYYRRDGFTFDVGSSVMFGFSDKGNLNLITQALEAVGRKMRVLPDPSTVHFHLPGDLSVLVHRKYEDFINELVSKFPHEKEGILKFYDTCWTIFNSLNSLELKSLEEPLYLFRQFFQKPRECLTLAYYLPQNAGDIARKFIKDQELLSFIDAECFIVSTVNALQTPMINASMVLCDRHFGGINYPVGGVGGIAISLADGLVEKGSEIRYKANVTNVILENGKALSTSVLQVGVRLSNGKEFFAKTVISNATRWDTFGKLVKEELPEEEKNFQKNYVKAPSFLSIHMGVKASVLPAGTDCHHFILEDNWNNLEKPYGSIFLSIPTVLDPSLAPEGHHILHIFTTAGIEDWEGLSRKEYEEKKEVVANEIIRRLEKKLFPGLQDSIVLKEVGSPKTHRRFLARNDGTYGPMPRGKPKGLLAMPFNTTSIDGLYCVGDSCFPGQGVIAVAFSGIMCAHRVAADIGLEQKSPVLDAGLLGLLRWLRTLA

SEQ ID NO: 6345 - protein, 524 aa, Zea mays
  VARIANT 26: note = Ancestral polymorphism is I, Derived polymorphism is T
  VARIANT 479: note = Ancestral polymorphism is L, Derived polymorphism is P
MGMVVNSSAVPFSIALLAVVIAAVVITKAALGRRRRRRTAAANNPAPPPRNDVDTGRRRPPAAITGVTSAVRLVHALATKGFEATLYEQYAKLGSVFTVSLFGMKTTTFLAGPDVSAHFYQGPDSEISHGDLLEFTVPMFGEGVAFAVDAATRAEQHRFYLDALKPARLRCHVAPMLQEVEEFFARWGQQGTVDLKQELEQVLMLITARCLLGKEVRERMLHEVFSAYRDLTENSLHLTSLLFPYAPTPAARRRDRARATLSGIFSEIVRSRRRSGRRAGDDDGDVLQSLVDARYRDGRGTTEAEVTGLVIAILFAGKHTSSATSTWTGARLLRHAECLDAAVDEQRRVVAERGSGVDYDALAEMGFLHCCIKEALRMHPTAPLFLRRAHRGFTVRTREGAEYDVPSGQTVASPLLINHYIPYVYRDPHVYDPRRFGPGREEDRVGGRFCYNAFSGGRHACPGEAYAYMQVKVIWSHLLRNFELKLVSPFPRTDWMKLSPEARGKVVVSYKRRMVPVGSVPVPL

SEQ ID NO: 6346 - protein, 234 aa, Zea mays
  VARIANT 71..234: note = Derived polymorphism lacks residues 71 to 234
  VARIANT 99: note = Ancestral polymorphism is K, Derived polymorphism is E
  VARIANT 178: note = Ancestral polymorphism is D, Derived polymorphism is Y
  VARIANT 195: note = Ancestral polymorphism is G, Derived polymorphism is R
  VARIANT 212: note = Ancestral polymorphism is S, Derived polymorphism is I
  VARIANT 225: note = Ancestral polymorphism is K, Derived polymorphism is I
MVDKLGNYSKNQIYIRGSIRKARPPPVHCSKPSRTDRNRNYRGNYQDGPPQQGNYQNNRPPPQGGYHLPEQPAAARKLPDIPLAARWKRLCPHSRIMHKVVMMVEVLEGRNDYTDRSGYNGPPDFRSQSQYQGHVNPAGQGQGYNNPQERSNFSQGQAGEHLLLLQHLGLMANHQHLDLMVNLIHLVTMGRQGAGPAYGGDNWQRGSGQYPSPGEGQGNWQFKVKLGHHLFDQF

SEQ ID NO: 6347 - protein, 496 aa, Zea mays
  VARIANT 5..496: note = Derived polymorphism lacks residues 5 to 496
MAQRWRSRARWDSDLDEDGSPPFRQPRRGGSDEEDDEVGNEDLSLEIIARAQRKRRWASCGGVTGFANLLSVSSGDDEDAVVELAEADEPRRKQKKRQHWKQRKRQRKEATAAAAAAAAVDEEEKEVGTTQEEQIGTAESVLTEDGVDAPTSHSMFLRKLLRIPRYFDPGETLLETCFNCSEEGHVAANCPMGKRKKPCFVCGLFGHNAKQCKQGQDCFICKKGGHMAKDCPDKHKRNDHQSTLCIRCGETGHDMFGCANDYPPDDIEQIRCYACNQKGHLCCSDFFDNSLEQVSCYNCAQSGHSGLGCAKQRREASAVTTPTLCFKCGEEGHFARGCTKNAKSDGPKGWSSPHSQRKGRWKNDGKSPSHIRRKEKWKKDSSARSAPHDACTTSKSNSPSFEERMGASNHKSKWRGGWTGDDDLPSKKYKPNGWGSPATPKRSYTNHQYLSGGGDYFTPQSSRRHNHGTASPGARKHRFSSSIFAASNTHVRFKRS

SEQ ID NO: 6348 - protein, 525 aa, Zea mays
  VARIANT 45: note = Ancestral polymorphism is A, Derived polymorphism is V
  VARIANT 58: note = Ancestral polymorphism is I, Derived polymorphism is T
  VARIANT 97: note = Ancestral polymorphism is W, Derived polymorphism is R
  VARIANT 235: note = Ancestral polymorphism is F, Derived polymorphism is V
MAAPRGLLALFAVAAAATAAATGVDALGVNWGTMSARRLPPKVMARLLTDNGFTKVKIFDADERTMKGLAGTSIETMIAVPNDMLAAVADYDRARRWVRDNVTKYTFDGGVNIKCVALGPSARVYIYAVHRHWHGPVRFSAGAETFSIVRVRPSRFVAVGNEPFLRAYNGSFDHVTVPALRNIQRALDEAGHGAAVKATVPVNADVYDSPASNPVPSAGRFRSDVARVMADMVRFLNRSGAPLTVNIYPFLSLYGNDDFPLDYAFFDGGAGAPVVDGRAVYTNVFDANFDTLVSALKRVGLGHLPVMIGEVGWPTDGDRHATAALAERFYAGLLQRLAARRGTPLRPGARIEAYLFGLVDEDAKSVAPGNFERHWGIFTFDGRPKFPLDLRGDGRPAMPVPARGVEYLPRRWCVLNPISIAGDGRLADNVAYACSRADCTALGYGCSCGALDPRGNASYAFNAYYQAQGQVESACDFQGLAVVVDEDASQGACNFSVQLVGSGAPVATAVTTMAAVLVPLFLVLL

SEQ ID NO: 6349 - protein, 415 aa, Zea mays
  VARIANT 181: note = Ancestral polymorphism is V, Derived polymorphism is A
MTHLCEETPVTVVNGQLPGPAIEVTEGDSVAVHVINKSPYNMTIHWHGVKQRMNCWADGVPMVTQCPIRPNHSFTYRFSVAGQEGTLWWHAHVSCLRGSVHGALIIRPRHGASSYPFPKPHKEVPLVIGEWWQTDLGQIDKSLAVGFFGFNPSSATLNGKLGDLNNCSSGGVTEEGYVLEVEAGKTYLLRLINAALISEYYLKIAGHRFTVVAADANYVKPYATDVIAIAPGETVDALLVADAAPGRSYYVRGGSLESIIVATMNNASFQLPAAAAKTILEAHYDHTHNHTAAGELYTPLPERPPWPFNFTDRAFIPIGPVEAPLEPTRKATTGRRFRYGDAVEVVFQNTAVMQSDYNPMHLHGHDMFVLAQGRGNFDAARDAARFNLVDPPVRNTVLVPSLGWAVVRFVADNPG

SEQ ID NO: 6350 - protein, 228 aa, Zea mays
  VARIANT 174: note = Ancestral polymorphism is L, Derived polymorphism is H
  VARIANT 140..228: note = Derived polymorphism lacks residues 140 to 228
  VARIANT 102: note = Ancestral polymorphism is S, Derived polymorphism is P
  VARIANT 84..228: note = Derived polymorphism lacks residues 84 to 228
  VARIANT 69..228: note = Derived polymorphism lacks residues 69 to 228
  VARIANT 42: note = Ancestral polymorphism is E, Derived polymorphism is G
  VARIANT 20..228: note = Derived polymorphism lacks residues 20 to 228
MASSSPQQHTEVGSSSNLAQFRNSGIISMNMGDIICNIYDHETVNAAAASVSPGPVDPSQACIVETDSQVMQVEEEHIEPLREQSGTQQPPSFGQCGKNGEPLEHMVTTSILQGACLPDLDPDLKGYLPIVVVVVVLWQQILIDNLVGYDTIPTNSLVISPGHGYLYNFEMKELYGLSYRHETPEGPTRFGEGMLTPLDPNPLFTPNLSHLEHLLFLRFISNLHRFKC

SEQ ID NO: 6351 - protein, 191 aa, Zea mays
  VARIANT 146: note = Ancestral polymorphism is R, Derived polymorphism is K
MRPPRGRGGGGRFGGGGGRGGGGGRFGGGGRGGRFGGGFRDEGPPAEVVEVSTFVHACEGDAVTKLTNEKVPYFNAPIYLQNKTQVGKVDEIFGPINESYFSVKMMEGIIATSYKEGDKFYIDPMKLLPLSRFLPQPKGQSQGAPRGGGRGGRGGGRGRGGSFRGGRGPPRGGGRGPRGGSRGGFRGRGRF

SEQ ID NO: 6352 - protein, 756 aa, Zea mays
  VARIANT 551: note = Ancestral polymorphism is S, Derived polymorphism is F
MGWRPHVVSVSSSALLVLLQLLVLLMLPADASSSSQTTTTIYVVYMGEKKHDDPSLVVASHHATLASVLGSKDEALSSIVYSYKHGFSGFAAKLTQPQAEELKKYPGVVSVKPNTYHHVHTTRSWDFLGMSYGQQQSSSWSSSSRLLRKAKYGEDVIVGVIDSGIWPESRSFDDSGYGYGPVPKRWKGVCQTGQAFNASNCNRKVIGARWYAADVSEEDLKNEYRSPRDANGHGTHTASTIAGSPVRNASHHGGGLAAGIARGGAPRARLAIYKACHAVGGSASCGDASILAALDAAIGDGVDLVSLSLGGLGEIYQSLHAVAAGITVVLAAGNDGPVEQSLNNALPWGITVAAATMDRTFPTVVTLGDGEKLVGQSLYYHNRSAAASTSDDDDFAWRHLILFPSCDEKNLGSENITGKIVICRAPVFWSDYPPPRQLSRASRAAIAGGAKGIIFEQYSTNSLDTQVVCQGHLPCVVVDRESIFTIQSSDSNVAKISPAATMVGSQVASPRIATFSSRGPSAEFPSVLKPDIAAPGVSILAAMRDSYVLLSGTSMACPHVSAVVALLKSVHPDWSPAMIKSAIVTTASVTDRFGLPIQANSVQRKPADAFDMGGGLIAPDRAMDPGLVYDIQPEEYTRLDDRADRLNLPSIAVSDLKNSVTVSRTVTNVGPAEVATYRAVVEAPAGVTMDVEPPVIAFERGGARNATFRVTFVAKQRVQGGYAFGSLTWLDDAKRHSVRIPVAVRTVVRDLVADVA

SEQ ID NO: 6353 - protein, 696 aa, Zea mays
  VARIANT 368..696: note = Derived polymorphism lacks residues 368 to 696
MHRAAAATVAAPQATDAQLLAGAVEAAIATRSARLGRAAHARALRLLSPALPPFLCAHLVNLYSKLDLPGAAAASLAADPSPTVVSYTAFISGAAQHARPLQALSAFAAMLRLGLRPNDFTFPSAFKAAASAPPRSAAGTQLHALALRFGYLPDDAFVSCAALDMYFKTGCLALARRLFDEMPNRNVVAWNAVMTNAVLDGRPLETVEAYFGLRGAGGMPNVVSVCAFFNACAGMTNLSLGEQFYGFVAKCGFGKDVSVSNSVVDFYGKCRCVGKARAVFDGMGVRNNVSWCSMVVAYAQNGAEEEAFFVYLGARRAGEEPTDFMVSSVLTTCAGLLGLDLGRALHAVAVRSCIDSNIFVASALVDMYGKCGGIEDAEQVFFEMPQRNLVTWNAMIGGYAHIGDAHNALSVFDKMIMGQETAPNYITLVNVLTACSRGGLTKEGYELFQTMKWRFGIEPRIEHYACVVDLLCRAGMEERAYKIIQGMPMRPSISVWGALLGGCKMHGKTELGRIAAEKLFELDPQDSGNHVLLSNMLASAGRWAEATDVRKEMKNVGIKKDPGRSWITWKNVVHVFQAKDTTHDMNREIQALLAKLKGQMQAAGYMPDTQYALYDLEEEEKESEVFQHSEKLALAFGLICIPPGIPIRIMKNLRICVDCHRAFKFISGIAGREIIVRDNNMFHHFKNYECSCKDYW

SEQ ID NO: 6354 - protein, 586 aa, Zea mays
  VARIANT 163..586: note = Derived polymorphism lacks residues 163 to 586
MCLLQRAALYFLGGADDREALAYAARMPETGTMSLTVVRFKLRNWVGMGGRDEARRGTRSCCRSSGAGTGTTSGVVYVEKTVEDAEGTASVVRAMSEEFCIHGGGGGIEASSPSMAKSRPHLIREKDNEEEESDRDGFFRRLLRDSKEEDMKLTPSSDGLLKRLFRDKEDMQGEDDEKEGFFRRMFKDKNEERRDSNHARHGNEERLGKSVEDDDREGFFRKIFKDKNEERKDEGHQKPDEREKVGFSRIRMEKIKGLFMTGMKMTSVRKVIKKTSSANYLRINMRRGELTDLIKNDDYGKGSSGIEEEDNPEFLSFRRLFRVHPEDPKSGHIESNQSNNLSEGSPGSKGFFKRLFRDRDRSLEDSEIFGSKMAKEARIWSHKHPGTTGINEKQSGKPPLPINAVAELRKGSCYASLELIEALCDTSYGLVDIFPIEDRKIASGREKAPYLICVEVLKAEAPSHSKGSSDGHKLSKGGIPLANGDVQLPKPPPWAYPLWSRHETQNYEIDRMLKSTSQVIDQAMAQIWETKVKFVNVSFSTEKLGRSRSIVLSETGRRLRHDATDSNMIVCKARTFYYNNETHICT

SEQ ID NO: 6355 - protein, 276 aa, Zea mays
  VARIANT 166..276: note = Derived polymorphism lacks residues 166 to 276
  VARIANT 206..276: note = Derived polymorphism lacks residues 206 to 276
MALAFSAAPLTLYVPPMRSLSFFVEAMEVVCRDCGPYSHGVVAHFRRGLSRVLGGLHNNLHAGAGLAISFEIFPASFLPFCARCDVMPRSCAHLPAIKVVTPDEDGRQSPHGGPVPNDGSGAGARKKLRLTNEQSTLLEDTFRAHNILSNAQKQELARQVDLSARQTNETYIKSKSLPIIFDLKIFYFIGFALFCLEAFLSMWVIQLVVNYKLCVLRRVYLYFRGSDDDWLITEAWFALLFCKLLHPSDQFRREPREPCTCGVVHLESDTIIEYDW

SEQ ID NO: 6356 - protein, 254 aa, Zea mays
  VARIANT 37: note = Ancestral polymorphism is T, Derived polymorphism is M
  VARIANT 113: note = Ancestral polymorphism is N, Derived polymorphism is K
  VARIANT 225: note = Ancestral polymorphism is M, Derived polymorphism is T
MPLPDCGRRGFPTLPLLLLVLHALPRRLPRCAAESATCLAVYREGGAPAVFQSAHCPRWTLPPHDGQGGGGGKSIPMGCHVAADRGRRRSQEDRAVCALGIRIPFVGTSQLYNVIWMLQSLVLKSAKNMRIKEVDVGVVAIFDGHNGAEASEMASKLFLDYFLLHVYFLLDGIHSLRFRKSTGKLTYREVTIFNNVFNLYKHGQSDHAERSCWASPAILDRSFHTEILKESLMRAVHDIDLTFSKEGFMFHLYN

SEQ ID NO: 6357 - protein, 510 aa, Zea mays
  VARIANT 97: note = Ancestral polymorphism is M, Derived polymorphism is T
  VARIANT 166: note = Ancestral polymorphism is R, Derived polymorphism is Q
MRIKEVDVGVVAIFDGHNGAEASEMASKLFLDYFLLHVYFLLDGIHSLRFRKSTGKLTYREVTIFNNVFNLYKHGQSDHAERSCWASPAILDRSFHTEILKESLMRAVHDIDLTFSKEALQNNFESGSTATVVLIADGQIISANVGDSKAFLCSEGYNLHHRNRKRRRKRNSINHEEFALANYDGPLYHARELTKDHHPNREDERNRVEAAGGYVLEWAGVYRVNGELALSRAIGDVPYKRYGVISTPELTGWQILSENDSFLIASSDGIFEKMTMQDVCDLMLHAKIRVKHDFGSSAITQRNLADYVVHVALQKGTTDNVAAVVVPLGSPGSTGTTLKDSSQFEEDLKISISPMLNVPYGLKPDHGHSSAVIDMEYFKRSSIKFQRFLVEAKPKKLGCFYLSESLDEDMDYIFRVPEAYQREEVHDFNHIPAETALYSDGNLEKYKDKHFCLYLGPEDGEMGQCNGPEAFANFFGLLDSLPHNGSKPNGSHSFGNTIDFRYLSISQGTF

SEQ ID NO: 6358 - protein, 60 aa, Zea mays
  VARIANT 27: note = Ancestral polymorphism is G, Derived polymorphism is D
  VARIANT 51: note = Ancestral polymorphism is G, Derived polymorphism is D
MLLSGGGASERRGGDVGQKTKAAATTGMRKVKEGMSQGFQWIKDKCQHGGGKKQQGSEAP

SEQ ID NO: 6359 - protein, 174 aa, Zea mays
  VARIANT 57..174: note = Derived polymorphism lacks residues 57 to 174
  VARIANT 143: note = Ancestral polymorphism is A, Derived polymorphism is V
  VARIANT 149..174: note = Derived polymorphism lacks residues 149 to 174
MKYSKFRSEQTFEYTPPEALLNSNWFQGSRSARLKYDIWSVGVVMLELMMGSPHVFQISDRTRILMDQHLGGWSEQTKELAYKLRSYMELCILVPGISSQHHGSGSPEQGQFGLASWKCSEESFAHQVKIRDPLKIGFPNLWALRLARQLLVWHPEDRLSVDEALNHPYFQEPM

SEQ ID NO: 6360 - protein, 106 aa, Zea mays
  VARIANT 51: note = Ancestral polymorphism is E, Derived polymorphism is K
  VARIANT 75: note = Ancestral polymorphism is A, Derived polymorphism is V
  VARIANT 80: note = Ancestral polymorphism is R, Derived polymorphism is C
  VARIANT 81..106: note = Derived polymorphism lacks residues 81 to 106
MKLGSEVFQIGLQLRSYMELCILVPGISSQHHGSGSPEQGQFGLASWKCSEESFAHQVKIRDPLKIGLVFPNLWALRLARQLLVWHPEDRLSVDEALNHPYFQEPM

SEQ ID NO: 6361 - protein, 297 aa, Zea mays
  VARIANT 26: note = Ancestral polymorphism is R, Derived polymorphism is C
  VARIANT 138: note = Ancestral polymorphism is D, Derived polymorphism is Y
  VARIANT 178..297: note = Derived polymorphism lacks residues 178 to 297
  VARIANT 199: note = Ancestral polymorphism is P, Derived polymorphism is L
  VARIANT 213..297: note = Derived polymorphism lacks residues 213 to 297
  VARIANT 224: note = Ancestral polymorphism is A, Derived polymorphism is T
MPCDECFSCADKESLAVGTQLLVFGREYTGLAIWMYNLLTRSWSPCTPMNLPRCLFASGSSGEIAIVAGGCDKNGQVLSQRDSLTCGEEYNLETRTWRRIFDMYPGGTSASQSPPFVAVVNNQLYAADQSTNVVKKYYKANNAWNILKPLSVRADSSNGWGLAFKACGNRLLRSWASSNSSGIMEELQDCNSRSLVALLGSLLLHLFRLFGQQDQSSWQKYIYTYFLLVRNDYFSGESKKHSDVFCDISELDFFPYATYLDSEELELKEHVEYLPGARLAPIDGLRYTECTLNLFQI

SEQ ID NO: 6362 - protein, 105 aa, Zea mays
  VARIANT 49: note = Ancestral polymorphism is A, Derived polymorphism is T
  VARIANT 41: note = Ancestral polymorphism is R, Derived polymorphism is W
  VARIANT 32: note = Ancestral polymorphism is P, Derived polymorphism is S
  VARIANT 27..105: note = Derived polymorphism lacks residues 27 to 105
MASTGREQVRLGWATMARELRRKATAQEAGRPSAWELEGARYRELQRRAQGRGAAAMAELEPGTAPSREGSCGAQTGRAPVEEDPSWGAAGKLHGDHGTTARGIR

SEQ ID NO: 6363 - protein, 114 aa, Zea mays
  VARIANT 42: note = Ancestral polymorphism is R, Derived polymorphism is C
  VARIANT 105: note = Ancestral polymorphism is S, Derived polymorphism is R
MATPRKQIKLTLPSHETTIGKFLTHSGTFTDGDLRVNKDALRIVSRREGGEAPPIEPLDSQLSLDDLDVIKVIGKGSSGNVQLVRHKFTGQFFALKVIQLNIDESIHTQIATVS

SEQ ID NO: 6364 - protein, 159 aa, Zea mays
  VARIANT 77..159: note = Derived polymorphism lacks residues 77 to 159
  VARIANT 40: note = Ancestral polymorphism is V, Derived polymorphism is L
  VARIANT 29: note = Ancestral polymorphism is T, Derived polymorphism is I
  VARIANT 1: note = Ancestral polymorphism is M, Derived polymorphism is T
MIFHIPIGLSLVLEFKLGGVKMENVYKATVGAIAQNGYYVAYDGWGNREEVLKRDIPWEHYMSTKLISGTCLQLLRRYDHKPESQLAPLLEEFKLCKVRSVQFGQKGIPYLNTYDDRTIRYPTLSSRPTTPSRSIWRPTRSWTSSSCICPFMDFTKLYT

SEQ ID NO: 6365 - protein, 90 aa, Zea mays
  VARIANT 52: note = Ancestral polymorphism is R, Derived polymorphism is H
MSMRVERASLEQVQKRFEALKKRKDPSAFTEEDLDERIMKQQQEEEERKRQRKEKKKEKKREQATQHELEDVDPDIAAMMGFGGFGSSKK

SEQ ID NO: 6366 - protein, 211 aa, Zea mays
  VARIANT 171..211: note = Derived polymorphism lacks residues 171 to 211
  VARIANT 19: note = Ancestral polymorphism is R, Derived polymorphism is C
  VARIANT 11: note = Ancestral polymorphism is A, Derived polymorphism is T
MAKFTSQEVSALLEGGNERAKEIYFKHWDLQGPVIDSSDVHRLRNFIKNVYVERRYSDQRIGEHLAQAKGNKDSYGNSNVDSSPGVLRSAYVGTYEDNHDLKRTKESLSENQNNSNGHPVSSTVDQNNNSIMAREKVDLRSHLRPDDLLKTDGKSENNQKVVISSASSAAQASKEINSNKVLLPIKLPDPPRSQKATSSNTSTEAQVMQFL

SEQ ID NO: 6367 - protein, 814 aa, Zea mays
  VARIANT 84: note = Ancestral polymorphism is R, Derived polymorphism is G
MPSCARISSAVSTAAASSSSPPPHPPRCRRLAAATARVREGTLRPEEAHDLLDELQRRGTPVLERDLNGFLAALARAPSSAACRSGPALAVALFNRAASRAQGPRVLSPTSHTYAILMDCCTRAHRPELALAFFGQLLRTGLRVNIIIANHLLEGFCEAKRTDEALDILLHRTPELGCVPDVFSYSILLKSLCDQGKSGQADDLLRMMAEGGAVCSPNVVAYNTVIDGFFKEGDVNKACDLFKEMVQRGIPPDLVTYNSVVHALCKARAMDKAEAFLRQMVNKRVLPNNWTYNNLIYGYSSTGQWKEAVRVFKEMRRHSILPDVVTLSMLMGSLCKYGKIKEARDVFDTMAMKGQNPDVFSYNIMLNGYATKGCLVDMTDLFDLMLGDGIAPDFYTFNVLIKAYANCGMLDKAMIIFNEMRDHGVKPDVVTYRTVIAALCRIGKMDDAMEKFNQMIDQGVAPDKYAYNCLIQGFCTHGSLLKAKELISEIMNNGMHLDIVFFSSIINNLCKLGRVMDAQNIFDLTVNVGLHPDAVVYSMLMDGYCLVGKMEKALRVFDAMVSAGIEPNVVVYCTLVNGYCKIGRIDEGLSLFREMLQRGIKPSTILYSIIIDGLFQAGRTVPAKVKFHEMTESGIAMDICTYNIVLRGLFKNRCFDEAIFLFKELRAMNVKINIITLNTMIDGMFQTRRVEEAKDLFASISRSRLVPSVVTYSIMITNLIKEGLVEEAEDMFSSMQNAGCEPNSRLLNHVVRELLKKNEIVRAGAYLSKIDERNFSLEHLTTMLLVDLFSSKGTCREHIRFLPAKYHFLAEASP

SEQ ID NO: 6368 - protein, 273 aa, Zea mays
  VARIANT 53: note = Ancestral polymorphism is P, Derived polymorphism is R
  VARIANT 85: note = Ancestral polymorphism is M, Derived polymorphism is T
  VARIANT 88: note = Ancestral polymorphism is G, Derived polymorphism is R
MEVAAATCTLLAAVALPVSSSAAAARSATKQSYSRRKTTAVRAVMARPHQVPPPATATATTYRDNWFDKLAIGYLSRNLQEASGMKNRKDGYEGLIEAALAISALFRVDQQWDTVASALQRAFPSYILTMIKVMMPPSRFSREYFAAFTTVFFPWLVGPCEVVRVIIVSPNICKVRESQVDGREERNVVYIPKCRFLESTNCVGMCTNLCKIPCQRFIQDSLGTAVYMSPNFEDMSCEMIFGQQPPEDDPALKQPCFRTKCIAKQNHQVNCSI

SEQ ID NO: 6369 - protein, 290 aa, Zea mays
  VARIANT 242: note = Ancestral polymorphism is A, Derived polymorphism is T
MGDACRVFDGMPHRDAVAWDAVIGGYARAGRLAEAVELFGMMRSADGAWPTEATLMEMKDSVTWSSMIGDGSTSSHCFQNEQAIVNSLIYMYGRCGSLSLSVGAFIIGIMDKDAISWTSMMQVYAWSGLATEVVKLFEMMKKTKVQPKHYTLIAVLTTYKNIGLVEEGMGLLKCIKEQYGLEPVIEHVSCAVDMLCRTGRLSDAYHLIQSSHSEHARNPILWGTLLSSSRYWGELVIGEAETRNLLSLDPGSKANYKMLADIYVSIGRRDKADDVLRMSLSKRTGLETRL

SEQ ID NO: 6370 - protein, 190 aa, Zea mays
  VARIANT 87: note = Ancestral polymorphism is R, Derived polymorphism is C
  VARIANT 47: note = Ancestral polymorphism is R, Derived polymorphism is Q
MHKNRTPPRVLSSFSPVSSYKPLPGRRKTPTPARTAPRKQSLARRARIPRVAGRVRGSMAGKGGGKSLVAAKIAAGMDKDKKSPVNRSARAGLHFPVERIHRHLKDSAQAGERVGATAAVYAAAVLKYLTAEIMELAGNACRDLKVKRITPRHLQLAVRGDEELDTLIKATIAGGGVIPHIHRELIDKAA

SEQ ID NO: 6371 - protein, 242 aa, Zea mays
  VARIANT 211: note = Ancestral polymorphism is A, Derived polymorphism is V
  VARIANT 216: note = Ancestral polymorphism is R, Derived polymorphism is C
  VARIANT 217..242: note = Derived polymorphism lacks residues 217 to 242
MASASIIPTKERPTSPETAELTYYQELFAILTTASTTITGTVSPTDRLGYMTEPRLWPQRPTSEQTFEYTPPEALLNSNWFQGSRSARLKYVSFFPFLFYEFWYDIWSVGVVMLELMMGSPHVFQISDRTRILMDQHLGGWSEQTKELAYKLRSYMELCILVPGISSQHHGSGSLEQGQFGLASWKCSEESFAHQVKIRDPLKIGFPNLWALRLARQLLVWHPEDRLSVDEALNHPYFQEPM

SEQ ID NO: 6372 - protein, 113 aa, Zea mays
  VARIANT 22: note = Ancestral polymorphism is M, Derived polymorphism is L
  VARIANT 63: note = Ancestral polymorphism is P, Derived polymorphism is L
MLELMMGSPHVFQISDRTRILLDRHLGGWSEQTKELAYKLRSYMELCILVPGISSQHHGSGSLEQGEFGLASWKCSEESFAHQVKIRDPLKIGLEDRLSVDEALNHPYFQEPM

SEQ ID NO: 6373 - protein, 817 aa, Zea mays
  VARIANT 87: note = Ancestral polymorphism is R, Derived polymorphism is M
MPSCARISSAVSTAAASSSSPPPHPPPRCRRRILAAATARVREGTLRPEEAHDLLDELQRRGTPVLERDLNGFLAALARAPSSAACRSGPALAVALFNRAASRAQGPRVLSPTSHTYAILMDCCTRAHRPELALAFFGQLLRTGLRVNIIIANHLLEGFCEAKRTDEALDILLHRTPELGCVPDVFSYSILLKSLCDQGKSGQADDLLRMMAEGGAVCSPNVVAYNTVIDGFFKEGDVNKACDLFKEMVQRGIPPDLVTYNSVVHALCKARAMDKAEAFLRQMVNKRVLPNNWTYNNLIYGYSSTGQWKEAVRVFKEMRRHSILPDVVTLSMLMGSLCKYGKIKEARDVFDTMAMKGQNPDVFSYNIMLNGYATKGCLVDMTDLFDLMLGDGIAPDFYTFNVLIKAYANCGMLDKAMIIFNEMRDHGVKPDVVTYRTVIAALCRIGKMDDAMEKFNQMIDQGVAPDKYAYNCLIQGFCTHGSLLKAKELISEIMNNGMHLDIVFFSSIINNLCKLGRVMDAQNIFDLTVNVGLHPDAVVYSMLMDGYCLVGKMEKALRVFDAMVSAGIEPNVVVYCTLVNGYCKIGRIDEGLSLFREMLQRGIKPSTILYSIIIDGLFQAGRTVPAKMKFHEMTESGIAMDICTYNIVLRGLFKNRCFDEAIFLFKELRAMNVKINIITLNTMIDGMFQTRRVEEAKDLFASISRSRLVPNVVTYSIMITNLIKEGLVEEAEDMFSSMQNAGCEPNSRLLNHVVRELLKKNEIVRAGAYLSKIDERNFSLEHLTAMLLVDLFSSKGTCREQIRFLPAKYHFLAEASP

SEQ ID NO: 6374 - protein, 275 aa, Zea mays
  VARIANT 90: note = Ancestral polymorphism is G, Derived polymorphism is R
MEVAAATCTLLAAVALPVSSSAAAARSATKQSYSRRKTTAVRAVMARPHQVPPPATATATATTYRDNWFDKLAIGYLSRNLQEASGMKNGKDGYEGLIEAALAISALFRVDQQWDTVASALQRAFPSYILTMIKVMMPPSRFSREYFAAFTTVFFPWLVGPCEVVRVIIVSPNICKVRESQVDGREERNVVYIPKCRFLESTNCVGMCTNLCKIPCQRFIQDSLGTAVYMSPNFEDMSCEMIFGQQPPEDDPALKQPCFRTKCIAKQNHQVNCSI

SEQ ID NO: 6375 - protein, 154 aa, Zea mays
  VARIANT 38: note = Ancestral polymorphism is L, Derived polymorphism is F
  VARIANT 61: note = Ancestral polymorphism is L, Derived polymorphism is H
MRTVREKADLVSDSQRIKYTIETFTKGIHDARTYLNTLQQLRIKSGLIDHIGIEPLMMEALEKIEKDIKKPLLRSDKKNMATLMAEFDKINAKLGIRKEDLPKIKQELEFEIAKSELTELKKECVEAMETQLKREEFQDEEMPDVRKQDIRNFL

SEQ ID NO: 6376 - protein, 132 aa, Zea mays
  VARIANT 107: note = Ancestral polymorphism is D, Derived polymorphism is Y
  VARIANT 101: note = Ancestral polymorphism is R, Derived polymorphism is C
  VARIANT 100: note = Ancestral polymorphism is I, Derived polymorphism is V
  VARIANT 99: note = Ancestral polymorphism is A, Derived polymorphism is S
  VARIANT 94: note = Ancestral polymorphism is R, Derived polymorphism is W
  VARIANT 93: note = Ancestral polymorphism is P, Derived polymorphism is L
  VARIANT 80: note = Ancestral polymorphism is G, Derived polymorphism is R
  VARIANT 69: note = Ancestral polymorphism is E, Derived polymorphism is Q
  VARIANT 63: note = Ancestral polymorphism is Y, Derived polymorphism is H
  VARIANT 51..132: note = Derived polymorphism lacks residues 51 to 132
  VARIANT 44: note = Ancestral polymorphism is R, Derived polymorphism is C
  VARIANT 33: note = Ancestral polymorphism is A, Derived polymorphism is V
  VARIANT 29: note = Ancestral polymorphism is R, Derived polymorphism is C
  VARIANT 13: note = Ancestral polymorphism is A, Derived polymorphism is T
MAGKGGGKSLVAAKIAAGMDKDKKSPVNRSARAGLHFPVGRIHRHLKDSAQAGERVGATAAVYAAAVLEYLTAEIMELAGNACRDLKVKRITPRHLQLAVRGDEELDTLIKATIAGGGVIPHIHRELIDKAA

SEQ ID NO: 6377 - protein, 81 aa, Zea mays
  VARIANT 11: note = Ancestral polymorphism is D, Derived polymorphism is Y
  VARIANT 15: note = Ancestral polymorphism is A, Derived polymorphism is P
  VARIANT 20: note = Ancestral polymorphism is K, Derived polymorphism is E
  VARIANT 24: note = Ancestral polymorphism is R, Derived polymorphism is H
  VARIANT 29: note = Ancestral polymorphism is E, Derived polymorphism is K
  VARIANT 32: note = Ancestral polymorphism is C, Derived polymorphism is R
  VARIANT 34: note = Ancestral polymorphism is P, Derived polymorphism is L
  VARIANT 40: note = Ancestral polymorphism is A, Derived polymorphism is V
  VARIANT 44: note = Ancestral polymorphism is A, Derived polymorphism is V
  VARIANT 51: note = Ancestral polymorphism is T, Derived polymorphism is I
  VARIANT 54: note = Ancestral polymorphism is G, Derived polymorphism is R
  VARIANT 63: note = Ancestral polymorphism is P, Derived polymorphism is L
  VARIANT 73: note = Ancestral polymorphism is G, Derived polymorphism is V
  VARIANT 76: note = Ancestral polymorphism is I, Derived polymorphism is T
MVKAYPTVNEDYLKAVDKAKRKLRGLITEKNCAPLMLCLAWHSAGTFDVATKTGGPFGTMKNPAEQAHGANAGLEIAVRLL

SEQ ID NO: 6378 - protein, 152 aa, Zea mays
  VARIANT 4: note = Ancestral polymorphism is A, Derived polymorphism is S
  VARIANT 5: note = Ancestral polymorphism is Q, Derived polymorphism is H
  VARIANT 51: note = Ancestral polymorphism is P, Derived polymorphism is L
  VARIANT 81: note = Ancestral polymorphism is D, Derived polymorphism is G
MSEAQRLVQQELELEEWGTEAQVKLGSRLIELLLDSAFVQPPADQTPDSSPYIRPAFKHVLRHPIIENGRLKKKHWVIECDHLVHEGFESTAWHVDIPNLPMLVPRKKWKGYDKGGHLFLPSYIMRTHGVKDQKDAINSVPRKQLRKVFEVY

SEQ ID NO: 6379 - protein, 374 aa, Zea mays
  VARIANT 261: note = Ancestral polymorphism is I, Derived polymorphism is N
  VARIANT 253..374: note = Derived polymorphism lacks residues 253 to 374
  VARIANT 189: note = Ancestral polymorphism is G, Derived polymorphism is R
  VARIANT 56: note = Ancestral polymorphism is P, Derived polymorphism is S
MDSGADTAARRVAVGGLHPDALGVVLRFLPCLADRARVRSACRSWRAASRGRGVAPPLPLLVMPRFRFASMTPGGVLTATARRAWMPQEVDADCVGSSDAWLVGARQAGGECFLVNAFSHEVHHLPRLGDSDLSHSACSLRKVVLSGSPQSGPECIVAAFAFCRSKPELALWRPGMKSWCVWQHSLIAGHIDMAFYQGRLYMLWRFTPSLFVFEIAEDGHGVKFSRMKDCLLEKLLATPLGSSHVLSCNMVEWHGRLLLIIRYYGGYQVRHRVLKVQVFAIDLNTKPNSLTEIHSFGGDCVFVGSGGCKSFPAGQYRGVEGDLIYFVPDHYNPHDAFVYNMMDGKTRFIAEPLPCSISAPEQSSGFPVWLFPPE

SEQ ID NO: 6380 - protein, 132 aa, Zea mays
  VARIANT 24: note = Ancestral polymorphism is V, Derived polymorphism is A
MSRFSLCLAAACCCCCLALLLPAAQGRPDTGGDHRPLFSEPHPHSDAVEKKATPSWSPRPPTAGGVVVTPELRTVPEGANPLHHRGSTTRHRQERALPAVAAGSVSVVVRPELRTAPCGANPLHNHGSTPSP

SEQ ID NO: 6381 - protein, 272 aa, Zea mays
  VARIANT 7: note = Ancestral polymorphism is S, Derived polymorphism is L
MAATWSSSCCAATASSSALLRHARVKSAPWVAGASRSSYRQRRRRRELSIRATAAAPPPPVVYADAGADNVASLKIKLLSAVSGLNRGLAASQEDLDRADAAARELEAAAGCPVDLSRDLDKLQGRWRLLYSSAFSSRTLGGSRPGPPTGRLLPITLGQVFQRIDVVSRDFDNIVELELGAPWPLPPLEATATLAHKFEIIGTSGIKITFEKTTVKTKGNLSQLPPLEVPRIPDNLRPPSNTGSGEFEVTYLDDDTRVTRGDRGELRVFVIA

SEQ ID NO: 6382 - protein, 947 aa, Zea mays
  VARIANT 110: note = Ancestral polymorphism is S, Derived polymorphism is I
  VARIANT 378..947: note = Derived polymorphism lacks residues 378 to 947
MGAIGGDEQVQLDNVDGAEVANDGGAGAAGRLEKILVSVRLRPLSDKEIARRDPAEWECINDTTIISRSTFPDRPTAPTTYSFDRVFRSDCNTKEVYEEGAKAVALSVVSGINSSVFAYGQTSSGKTYTMTGITEHTAADIYDYIGKHEERAFVLKFSAIEIYNEVVRDLLSAENTSLRLWDDAEKGTYIENLTEVILRDLDHLKELISVCEAQRRTGETYLNGNSSRSHQILKLTIESSAREFSGKDKSTTLVASVNFVDLAGSERASQALSVGARLKEGCHINRSLLTLGTVIRKLSKVRNGHIPYRDSKLTRILQISLGGNARTAIICTMSPARSHMEQSRNTLLFASCAKEVVTNAQVNVVMSDKALIKQLQKELARLESELRCPASYPGLEALVKEKDNQILEMEKEIKELKLQRDVAESRLQDLLKVVGDNHGSKHPLASSGRNFDVPQPCEDEQSTTSEVVSSGQNFRLQGRQTTQRDYRLQQSENDVQFATSLSCSVSSPPFSGMPPTNGRDDNSQISNEDSGDLCKEVRCIETNETEENKCLESSAVGSTSLQDSNVASSMHGNNNTNRSVNSRQHDESPITLEQHLENANNSLANLGMDLGSSTGNSPSSKVIDRSRSCRSLMGSTLLEDLEKQDCTPPSRSFVDYPGRPETCQRRVPALNYDVESETLSRTGSMLSEIITARDGLKENSSIAGDTESVAGIGEFVAELKEMVQAQYQKQRGNQGDDGELAEGTIRSVGLDPIMDDLQSPSRWPLDFEKKQQEIIDLWHGCNVSLVHRTYFFLLFKGDPADAIYMEVELRRLSFLKNTYSNGSMGRNVVAGSVSASLVLSAKKLQREREMLCRQMQKRLAIQERESLYTKWGVSLSSKRRRLQVARRLWTETKDLEHVRESASLVARLIVLLEPGKALREMFGLSFAPQQFTRRSHNSWRYGRSSLD

SEQ ID NO: 6383 - protein, 766 aa, Zea mays
  VARIANT 85: note = Ancestral polymorphism is P, Derived polymorphism is L
  VARIANT 101: note = Ancestral polymorphism is R, Derived polymorphism is C
  VARIANT 102: note = Ancestral polymorphism is L, Derived polymorphism is P
  VARIANT 159: note = Ancestral polymorphism is G, Derived polymorphism is R
  VARIANT 213: note = Ancestral polymorphism is S, Derived polymorphism is F
  VARIANT 226: note = Ancestral polymorphism is Q, Derived polymorphism is R
  VARIANT 227: note = Ancestral polymorphism is A, Derived polymorphism is T
  VARIANT 229: note = Ancestral polymorphism is E, Derived polymorphism is G
  VARIANT 244: note = Ancestral polymorphism is R, Derived polymorphism is M
  VARIANT 661..766: note = Derived polymorphism lacks residues 661 to 766
MAADDVRELLLSTTADASDPSTPLSAPDLRLLIDRLRFCSDRLNASALSFAASNRGVLANALLRAASAADSSASLESSLDSALAPLASWPDLSDLRALADRLLAARRELAERQEHLAAASMIASLSSRLREARAAASPLDAAAAIAELKTLLIDLERSGSGQDDPVVFRLLRSDWEQLVDELQVRLSKNVEECVDFAPEGGKVVVSATPKGHSDGSHGVELPVALQALEVSFTEKIQLVLLHHRLTASIIDALDYGMAKIADSMMKHILVPAISNIHVSVLVECGPEHTVSVLSVVHSEENKDNRDGSNLYSRIVDVIKFVCKFICMENSKWVQFFAKLTWPRISDLVITHFLSKAVPNEASKLIEFQDVVQSTTEFENKLRSMMFLLPDRKDGKLTQFVDDVEVHFAVRKRSEILVKARNILVQYDYDSPLPEKCFTSKSALLVMKLVHGALKMRTTTAPFIMACVLPIKQDASLSSARVAKEFCFAARDVLLLYRAIVPVQVRLEKQFDSLSQVAAIVHNDFYHLSQEILGLAFQYRADFPSDLQKQVVFVDLAPIFSQMADAILRRQIQLTVDTISEAIDGAEGFQNTHQPQHYESAKFSIEQVVFILEKIRIMWESILPRSIYRKSMCNVLGSVFSRITRDMLLIDDMAAEETLQLQGLIHLALENLSSLFLSLVENNDGSTKFLDHDAWIQLDGILPSLKKFRKLAELLDMSLKSITSCWESGDLVRCGFTSSEVQNFIKAIFADSPLRKECLGWIVRTPA

SEQ ID NO: 6384 - protein, 112 aa, Zea mays
  VARIANT 93: note = Ancestral polymorphism is W, Derived polymorphism is R
  VARIANT 60: note = Ancestral polymorphism is C, Derived polymorphism is Y
  VARIANT 44: note = Ancestral polymorphism is P, Derived polymorphism is L
  VARIANT 22: note = Ancestral polymorphism is A, Derived polymorphism is V
MGEKKMLTLRSSDCEEFEVEEAVLMKSEIIRFMIEDDCSDNVIPLPNVNSKTLALVIEYCNKHVHDAAKPADAAETTNASSAGGGGEVDLKKWDAEFGKGNCSWYERNIQFT

SEQ ID NO: 6385 - protein, 289 aa, Zea mays
  VARIANT 67: note = Ancestral polymorphism is P, Derived polymorphism is L
  VARIANT 55: note = Ancestral polymorphism is P, Derived polymorphism is L
  VARIANT 54: note = Ancestral polymorphism is A, Derived polymorphism is V
MQLSVGVAREFFALQDRLGFDKASKTVNWLLAQSKPAIDRLNRARLGSERQFVAPPNRTRPEQFVAPRSLSKVFGRRRDWAFCKRHDLSARGSNADLIARLDAAIGRAVSAEEEVAGVAARKGCVRQIGGDADETKKVTFVEVGGDVPLKLSRRNSLAAHVPMTWSRRNSLGADVLVRQSSRNSLCAEAQDCELRSQVTCSPVVAKPRGKSAQAGSVEVGAVVPLRRSRRNSLRAAESEEVQVAVFVDRKRKCKNQENDKGVALSAQVGASSRVTRRSSHALSSLKPGE

SEQ ID NO: 6386 - protein, 194 aa, Zea mays
  VARIANT 44: note = Ancestral polymorphism is P, Derived polymorphism is L
  VARIANT 23: note = Ancestral polymorphism is V, Derived polymorphism is M
MAEKKMLTLRSSDCEEFEVEEAVLMKSEIIRFMIEDDCADNVIPLPNVNSKTLALVIEYCNKHVHADAAETTSASSAGGGGEVDLKKWDAEFVKVAPATLFDLIMAANYLDIKGLQGLTCRAVVDMIQGKSPEEIRKTFNIKNDLTKEEEEAIRSENSWAFDPLPVRSSGPRWLTLLLALISMASLLVCSYLLI

SEQ ID NO: 6387 - protein, 188 aa, Zea mays
  VARIANT 172: note = Ancestral polymorphism is L, Derived polymorphism is I
  VARIANT 155..188: note = Derived polymorphism lacks residues 155 to 188
  VARIANT 40: note = Ancestral polymorphism is D, Derived polymorphism is N
  VARIANT 35: note = Ancestral polymorphism is E, Derived polymorphism is D
  VARIANT 28: note = Ancestral polymorphism is Q, Derived polymorphism is E
  VARIANT 25: note = Ancestral polymorphism is M, Derived polymorphism is K
MAEKKMLTLRSSDFEEFEVEEAVMMKSEIIRFMIEDDCADNVIPLPNVNSKTLALVIEYCNKHVHATTSASSARGGGEVDLKKWDAEFVKVAPATLFDLIMAANYLDIKGLQGLTCRAVVDMIQGKSPEEIRKTFNIKNDLTKEEEEAIRSENSWAFDPLPVRSSGPRWLLLALISIASLLVCSYLLI

SEQ ID NO: 6388 - protein, 161 aa, Zea mays
  VARIANT 3: note = Ancestral polymorphism is K, Derived polymorphism is N
MAKRTEARPAAARPRASVSVPAFGGWEAAGGAAAADYSLDFTKIRAARMQRRKALSWSSFVGNSPAVVVATEAPDSGVGGGEEEEEEEKRQWSSVAASDDDDRERRRYRHRHSHRHRRLRSDDDDRQPIQPAPKVSRMRGRGLVRAFAEADTPETPPFVFF

SEQ ID NO: 6389 - protein, 263 aa, Zea mays
  VARIANT 72: note = Ancestral polymorphism is N, Derived polymorphism is I
MAVLLRRAAALLVVAAVCADGASTFYSSDPNLGSARVVFQTNFGDIEFGFFPHVAPKTVEHIFKLVRLGCYITNHFFRVDKGFVAQVADVMSGRTAPMNEEQKKEAEKTIVGEFSSVKHVRGILSMGRHSDPDSAGSSFSILLGNSPHLDGQYAVFGRVTKGDDTLTKLERLPTRREGIFVMRAVKQKNLFSGGDFLNQHQKLSDGEENALLNGGIRAATCYMHYKRLHIPFHDAGWFPEAGYGRRCGNVYAACSYAITVILE

SEQ ID NO: 6390 - protein, 832 aa, Zea mays
  VARIANT 525..832: note = Derived polymorphism lacks residues 525 to 832
  VARIANT 421..832: note = Derived polymorphism lacks residues 421 to 832
  VARIANT 39..832: note = Derived polymorphism lacks residues 39 to 832
MVLAGLFEMMVLPALPAILAPNRRESCSPNLRWRRLHCRWRCQVCSGVCRWEGMVCSGSGQVVSLSLPFYGLTGTLSTAFGNLTFLRMLNLSSNSFRGEVLATIVRLAHLHALDLSYNAFSGTLFLGHYDFGGSKYMLDNSRAAIPEAMEQQTISIAKAAITIILILGTSFLAAANPIAGCYAALKMLMTFPNATKYLKTIISFGKVDPGHKEKKAWPFLRVLDGCVEEVGGYRVGYDIKLSGTESPRSVTGLEGVCVRVLFAWVLITGVEAADGEVTVHIGPIRKSFPAVGFKSSPWCIIGLATKAWPFLRVLDGCVEEVGGYHVGYDIKLSSTESPRSVTGLEGVRVRVLFAWVPITGVEAVDGEVTVHIGPIRKSFPAVGFKSSPRCIIRLEAWSLVMGWRLRIQANITDHNIKCMRQGKEANRCRFSSFLLDPFLAILDLHSPGLQVDAMLQELEKEIDDVDAQIGNRWQLLDKDHDGKVTPEEVAAATAYLKDTIGKEGVQELISNLSKDTGSFTYMLPQCCLCPIFLYFSERSLYALPQKEKILVEDIVKLASQIENNEEEEEARELRMFMELSLNHIFLSMRMKSTGISLSRELEPPTRLSFIFRRLLQQDKVLSQKYVLKYVAAQSPSQKSRQRLHQMLKFFYCSLMQYWNHSSRHNNSNHKCRCSRRNHKNKQHLLCAENHLLLLGKQQWHINLRRLNLFNLRPRSSVKHQRDLVQWHPQPPVAASAPKPGGSPKKGEVKPAVDPVQTPTTGADSTKPEPSAPSLPGAEGVDKMAIDEASGDAPEVAEELDPALEEEMSMEEMIRVTRAKLRRRTTTEVPAGN

SEQ ID NO: 6391 - protein, 441 aa, Zea mays
  VARIANT 48: note = Ancestral polymorphism is R, Derived polymorphism is Q
  VARIANT 140: note = Ancestral polymorphism is G, Derived polymorphism is V
  VARIANT 177: note = Ancestral polymorphism is S, Derived polymorphism is G
MLGDQCIIQALDSVSSSSSAASAPDSTLSGELPSVSRNCVIGSLQVARAQKGGHVEGLVNCCHSKKKKKNRTGSGLWDSATKSWASGMGGDDENSEANMSELIGRIGRELAISCLLRLPRSYYYDVACVDRSFYSLVRSGNLYRLRRAVGIAEQMIYCSCNVLEWEGFDPCRQRWFGIPSMPPIECFMLADKESLAVGTSILVFGKRVESHVVLRYSLLTNSWTTGEMMNTPRCLFGSASFGEKAIVAGGIGQSGPLSSAELYDSEMQTWTTLPSMSRARQMCSGFFMDGKFYVIGGKAERHNEVLSCAEEFDLENGSWHLIPDMAQGLNGGSGAPPLVAVVNNELYAADYATKEVRKYDKENNAWITLGLLPGRYTSVHGWGIAFRSCGDMLIVIGAMSAGGSGVIEICSWVPNNEQPDWKIIGTRRSGSFVYNCAVMSC

SEQ ID NO: 6392 - protein, 1044 aa, Zea mays
  VARIANT 48..1044: note = Derived polymorphism lacks residues 48 to 1044
  VARIANT 89..1044: note = Derived polymorphism lacks residues 89 to 1044
  VARIANT 653..1044: note = Derived polymorphism lacks residues 653 to 1044
MAAHPHPHGSRKQQPSPSNKQDQEDTRVAKIAEVLSVLEPVRASISQQLGAGAAGRRCVVAAGYTRRRCLAFMETELSIIAEFLKTLSQQHLDADTRRWMEHYELVFSKLDSVIQEVDPSRRTLLRTRLRSATQCILSRNNRSYPFSPNIKQLYYRSEHPCRFKHLLQANSRPEADIGLAPPQLGGGSGTGTNLTASAALPLVGIDRPAKKLLRWLTPREETDKSLRVMSIVGPPGMGKTTLAMEVHRRKKAEDATVSVFQCNLVARFSRGPDRNKLLLQDILSQVSDRAAPALTSSSQSQRKTIKLLIHLVSKHLRDKRYFIIIDDIWDTSDWEKIKDAFPNNNLDSRILITTRVISLSWVCCFDSDDGLVHQMKPLNRTDSERLLLASAFGPSSVDDYDCQQPLCDEILIRCEGVPLFIIGMADLFKEQLLQQKDAEDQRTLAVYSSELEQGPQRLPKCIERALSLAYDDLPYESKLQSLCMTMFPSGYKFDNDRFFFFRWNEDNEVAMRFTIPHLADRNVITRVAGADCRHCPDEEEGCHCQWHVNHFMQQFLASKSAEMGFYFTASSLKKYLLLAGAGANNNRTQRRLILHHPDPNLPSLLQQIDLSQTRSLAVSGAVSGIPMDKFVNLVVLDLEGWENLKDDDLLQICRSKMYFLTYLSVRNTPTSKIPPEIKELWSLQTLDASCTQISDELPLQVFKLTSLKHLDLRGTRVRRISKLPNKQQIVGSRVPLFTLLVGGGGGGGGPMETAARVTPDVRHLQDLEMLATVDLTENPVSFLRALGDLKWLKVLKITWSFCHSTDGECRAALLSSIGRWSHLQSLTIHCGLGCSMEFLGTLSYPPEHLRKLKVTGGVFAGVLRWLSVPSHHLSFLQITICSITADDLKVLADLAQLHTLVLGLDFVPTEAVVIEDGGFPLLRKFFVNCPVPWLAFEIGALPNLAYLQLEFAATLPTQTRAPSGIANIHRITDIALCYGEHYANSPSVKIIVEAVRKQIVEHCNPIDLYINGIEQDDVQAPDDLTEDANVTQSRTGSGSQSPRE

SEQ ID NO: 6393 - protein, 103 aa, Zea mays
  VARIANT 76..103: note = Ancestral polymorphism lacks residues 76 to 103
  VARIANT 78..103: note = Derived polymorphism lacks residues 78 to 103
MVSVLNTKDEEWWALIHSVASFDYSQIIDILLERSMRLTRPFVGADAAVFGSSGFDAAPADHPLVSGNVVSPRKGLKSQISHLPRSGEGVTSIPHALFAELIG

SEQ ID NO: 6394 - protein, 418 aa, Zea mays
  VARIANT 264: note = Ancestral polymorphism is F, Derived polymorphism is S
  VARIANT 130: note = Ancestral polymorphism is P, Derived polymorphism is L
MAIRRGGSQSYGFPIYCAAWLPLAHILKPDRPAAEADADAPSPSPPPPPMVLLGGGGGKGRNGVPNKLVMAALAAGEEAAPALSPDTVSDPSSKIPCGRVSRADLAFRGGGQVIEVRTQEEVPYRMAVHPRGDGVFCAFPNGCKLYRWESQEGEGLQNLSLEPDQEALAELKEDGLQLAISFSQEGSILAIGGEDGHLRVFKWPAMAPVLTETDTKTSIKDLTISSDERFIAVNRSSGPCRVWDLQSSEVVASLPREAGEMFGFCRFCNKADNSHVLFITAMEGDYGKIVSWNTTSWTRTGSKKITREAISAFAVSPNGALLAIGTIEGSVVIVDSKDMRTLVTVKKAHLGVVTTLSFSQDSRTLLSTSFDSTARVTYVGSPKSNGTSIWPILLVIILAVLVYYCMQHKEDILAMLPR

SEQ ID NO: 6395 - protein, 238 aa, Zea mays
  VARIANT 164: note = Ancestral polymorphism is G, Derived polymorphism is A
  VARIANT 163..238: note = Derived polymorphism lacks residues 163 to 238
  VARIANT 60: note = Ancestral polymorphism is R, Derived polymorphism is C
  VARIANT 20: note = Ancestral polymorphism is L, Derived polymorphism is V
MCGSKKSVAYFAHDRAHRLLPIAGGDDFTCGGCLVAGAGPRYRCAHPGCSFTVHEACARRSPRTLRSAVHPLHRLRRREAAGADGSGGGGGCEVCGEAVERACYACVACGVAVHPLCARMPGSARGPAHPDDGHEAWLVRVASPPDDGDGKQKQKQAAGCGSCGRALGAWRYRCVTCAAELHPRCLVPAVDQCRGAGEGEAGRAGSAASSCCLGLVHDLTRCLATLGTALHYRGYYNG

SEQ ID NO: 6396 - protein, 833 aa, Zea mays
  VARIANT 173..833: note = Derived polymorphism lacks residues 173 to 833
MDTVGDVDLSLGFGDGGDISPSPMADVPPPPPTQMSASYLFTRIRTDKGMLINILAVVSALLIGVQALLGSRRRRFGRKEFVRLPLWGIYTISLPVVSYTIGLVQSVESRGMPDSQLLWAVGLLLLLGSVNGMSAFSRRDIEQSTETLVKHVFQTLLVLWLLYSRSYVSDGRWFLLAYFLLCWVYSIFRMAQTMKALRMASSAHGLVRGATVVADYMKDIVVKEQQHDPKDMDECKYLVVGEDDKDNSEPPSKVGPPYLTKVGSKVVKVGMIWTHKGKLLHSAGSEWDSASALKHTCLSFALFKLLKRRFCGLDIAEAADQKTMDFVVDGLLAVDGGARYDYERAFRVVEVELSFMYDFFYTKYPALFPTNRLLGFIRFFVLLGFFKVLLDFMVFESPSDDGDEPPENTFIYFNNVLLIAMLLSIDILQHLTAGYSDWAVVQFVCDYVSKPRHGMRRCWKRGLGIRRALMKLVAAWRWQTSRKWWWSPRCWDNKLGQYSLLESYEPSKTKKTLSWLSLHILGPKTVPLAGEVRKEVLDSLRKTRGLPCVGRSLKESGRHLQLHWACDHLPTHTHTVLVWHIATTMCDLQDTDRPKNAHRRVATTLSGYCAYLLAFVPDMLPDNSYKATQILDAVVAECRAHLLGARDMPTRCDIMFQLGEKKPSSSQAVEDDTPLIVFPEAGAAGNGYKAVPMQVMNGGVVNDEAQTYIPGGGDTMDDTSKRRGMTKPSSSCCSSQIQDDEQYSPAAEEVEDTKILILAAHLGGQLTCVDKPWELLARFWAELLLFLAPSSNADIHAEHLATGGEFITHLWALLTHAGIVERPVVPSMHASPV

SEQ ID NO: 6397 - protein, 578 aa, Zea mays
  VARIANT 136..578: note = Derived polymorphism lacks residues 136 to 578
  VARIANT 184: note = Ancestral polymorphism is A, Derived polymorphism is V
  VARIANT 264..578: note = Derived polymorphism lacks residues 264 to 578
  VARIANT 310..578: note = Derived polymorphism lacks residues 310 to 578
  VARIANT 328..578: note = Derived polymorphism lacks residues 328 to 578
  VARIANT 353: note = Ancestral polymorphism is C, Derived polymorphism is Y
  VARIANT 375..578: note = Derived polymorphism lacks residues 375 to 578
  VARIANT 460..578: note = Derived polymorphism lacks residues 460 to 578
  VARIANT 475..578: note = Derived polymorphism lacks residues 475 to 578
MAPRKHPSGSKKRKRKKEVEEFIESQRGAMDKFVRTNTRTSSNEDQPNLAIVVVAEQPDTNEELEDHDPTLEENVDINTNEKCKSSLGHDGFGDWRHTSERLKEHEASMEHITSMSSWNELRVRLRKTETIDKEFQHQIAKEKERIRQVLLRIIDVVKFLGKRTLAFRGSSEQLYNDQNGNFLACLEMIAEFDVVMQDHLRRTQNNDIQYHYLSHKIQNELISLLASDITKSIIKIVKEAKYFSVILDCTPDVSHQEQMSLLVRCVNMSSGKVEEYFLGFMKVDDTSGEGLFNSLLDSIESFGLNIEDVRGQGYDNGSNMKGKHKGVQRRLLDINPRALFMPCACHSLNLTLCDMAKSCTKAISFFGIVQRICVLFSSSTKRWDVLKGHVESLTVKSWCNTRWENRIKSVRAIRFEAPNIRSALLQLSTDKDVESKDRSDAKNLFDVLGTFEFILGMVIWYEILFTVNKVSKQLQSPSMCLDATLKNIEGAMKFFEYYRNEGFASSLNIAREIASELGVEPSFPVKRHAKRKKQYDETEFEEAKLEAEKAFEVNYFLVMVDVAISSLKSRFEELQSFK

SEQ ID NO: 6398 - protein, 1038 aa, Zea mays
  VARIANT 17..1038: note = Derived polymorphism lacks residues 17 to 1038
  VARIANT 178: note = Ancestral polymorphism is F, Derived polymorphism is V
  VARIANT 231: note = Ancestral polymorphism is K, Derived polymorphism is N
  VARIANT 275..1038: note = Derived polymorphism lacks residues 275 to 1038
  VARIANT 276..1038: note = Derived polymorphism lacks residues 276 to 1038
  VARIANT 309..1038: note = Derived polymorphism lacks residues 309 to 1038
  VARIANT 458..1038: note = Derived polymorphism lacks residues 458 to 1038
  VARIANT 499: note = Ancestral polymorphism is G, Derived polymorphism is R
  VARIANT 646..1038: note = Derived polymorphism lacks residues 646 to 1038
MRTEVILADTIEAAAERILIEISSDDTHTERSNVFYFDGWDGLGASAVLRAVAQRLATASEAPAGLKFDQVINIDCSKWVSRRAMQRVIAEELELPAEFMEMIETRDEEDDYRGEDQSSRDVIPQVINREIYQRLQNRRFLVIFYNGSSEEIDLANLGFPLQDLGFHLYSSNKVLWTFQGSFRLMPMTKVTRALGTTGVFLSATSSQVGQDPHVFWSYLVLQEAAQIVASKDNTGGSIIGDPAQVAECFLYLLDLCLMGHHFIVDYDLETHGCNYWICDGIIHVQHGQREVDRDIGLWKAVEALQREMRMDVDYYHHHDHQDMPTHIVKCADFSPRWTSPTYRVVQILERATPVRCSLDHYDKLGVLKLSYCTFSFSSPPFLCCQSLRFLWLDHCQDMLESGPDGAAQMWEADGIQQCFQRLWVLDVRYTCCDQILSGRMLEFMTQLRVLNVIGAEDWDMRQLQGQLPNICKLGVAKSTIECGTTLWNGDLLAGSKHLRFLDLSGNEIISSGKSCISATEKSCSLETIVIHQGCAGLEKISLAGCAQLENVLLTGSFNELVSLDISGSAVKRLDLSAMIMLKLNELILLDCNMLRAILWPPEGREREYPGKLRIRTKKETTIGSATAPSGLTMMFGSLVPAEYLWWYISVYDERLLWSLLPLKQYFSYHFVHFEISSPGRRPDGLACTSDEMILEVTTPEGYNTSIYVDVAKGQLLHVKGDEGDSPISFTRVWPCPRAPDLVPSNCYLHIQDWPQGRKPQRTSQKTATITIPDTICNRTGSIHVHDSLYITRMPDPAPSGAIWANLFWCRVERCPKMDCVFTSSSMVGAENRDDRIFWRLATLWVSQLPKARFIWSSRKHEISGYSFLDLDFVHVDFCPRLTHVLPLSMALIRGSGLDSLTTLEIVWCGDLRAVFPLDTDAQSYQDHRRNQAITVEFPSLQRIHLHESPKLHGLCGRGRMYAPKLESMVIRGCWNLTRIPSVGDGGDRITKKVKCDCEKEWWDRLEWDWLEERHHPSLYEPTHPKYYKKTLLRTSVLR

SEQ ID NO: 6399 - protein, 115 aa, Zea mays
  VARIANT 54: note = Ancestral polymorphism is D, Derived polymorphism is N
MALLRVVSTAVLPAACCVVLLLLSTTTAPVAMAGSLRDDCRAFCRPRCEGYGADLCHALVNGFPLLQNVLEATCAERFYEVCQPICMNICTANTLTPAAGPGTAPPPPPPCGKQY

SEQ ID NO: 6400 - protein, 96 aa, Zea mays
  VARIANT 69: note = Ancestral polymorphism is L, Derived polymorphism is P
  VARIANT 59: note = Ancestral polymorphism is K, Derived polymorphism is E
  VARIANT 55: note = Ancestral polymorphism is E, Derived polymorphism is K
  VARIANT 34: note = Ancestral polymorphism is R, Derived polymorphism is C
  VARIANT 32: note = Ancestral polymorphism is S, Derived polymorphism is L
  VARIANT 11: note = Ancestral polymorphism is R, Derived polymorphism is P
MELLRAFRLSRSGAQTWSGAGLHRYLAFQTTSRRLADRKTAKFQKNITRRGSVPETTVKKGNDYPVGPLVLGFFIFVVIGSSLFQIIRTATSGGVA

SEQ ID NO: 6401 - protein, 628 aa, Zea mays
  VARIANT 388..628: note = Derived polymorphism lacks residues 388 to 628
MRGADLINPALPDELLDDVIRRVGSGGAKRDLDACALVCRRWRRLERASRRSARLAASGERADEVVRLVAERFTALTEVSVDERLTAAAAASGSAPRSYRSGTLHIPNRIRRRRRLPLASNLTLHIAPFPLDQPVSDERTERSCLTDVGLTHLARGCRGLEKLSLVWCSAISSTGLVRIAENCKNLTSLDLQACFIGDPGLVAIGEGCKLLRKLNLRFVEGTTDEGLIGLVKNCGQSLVSLSVATCLWLTDASLHAVGSHCPNLEILSVESDRVQSVGIISIAKGCRQLKTLKLQCIGTGDDALDAIGSFCPLLEILSLNNFERFTDRSLTSIAKGCKNLTDLVLTDCQLLTDRSLEFVARNCKKLARLKINGCQSMESVALEHIGRWCPRLLELSLIFCPRIENSAFLEIGSGCSLLRTLHLIDCSRITDDALCHIAQGCKNLTELSIRRGYEVGDRALVSIAENCKSLRELTLQFCERVSDAGLSAIAENCPLHRLNLCGCHLITDTGLTAVARGCPDLVFLDMSVLRIVGDIALAEIGDGCPKLREIALSHCPEVTNVGLGHLVRGCLQLESCQMVYCRRITSSGVATVVSGCGRLKKVLVEEWKVSERTRRRAGPVLSFLCTGL

SEQ ID NO: 6402 - protein, 217 aa, Zea mays
  VARIANT 11: note = Ancestral polymorphism is N, Derived polymorphism is T
  VARIANT 22: note = Ancestral polymorphism is H, Derived polymorphism is L
  VARIANT 28: note = Ancestral polymorphism is I, Derived polymorphism is T
  VARIANT 32: note = Ancestral polymorphism is T, Derived polymorphism is I
  VARIANT 52: note = Ancestral polymorphism is A, Derived polymorphism is V
  VARIANT 84: note = Ancestral polymorphism is D, Derived polymorphism is G
  VARIANT 100: note = Ancestral polymorphism is W, Derived polymorphism is C
  VARIANT 104: note = Ancestral polymorphism is A, Derived polymorphism is T
  VARIANT 129: note = Ancestral polymorphism is A, Derived polymorphism is V
  VARIANT 142: note = Ancestral polymorphism is T, Derived polymorphism is S
  VARIANT 155: note = Ancestral polymorphism is S, Derived polymorphism is Y
MLIIQSNADSNFFVVALCYIYHTLWSNTMMCTTFQREMLGPAVTGTINALKAASAANARRVVVVSSMVAVEINPKDWPKDKIKDENCWSDKEFCRNEENWYFVAKISSEEAALEYAKQTRLDVVTVNPAVVFGPLLQPTLNTSCQFLVYFLKGGSDRMRDKLWHIVDVRDTANALLLVYETPQASDRHICAPHFISARDLLELLKTMYPDDYPFISK

SEQ ID NO: 6403 - protein, 127 aa, Zea mays
  VARIANT 82: note = Ancestral polymorphism is G, Derived polymorphism is R
  VARIANT 47: note = Ancestral polymorphism is P, Derived polymorphism is S
  VARIANT 6: note = Ancestral polymorphism is E, Derived polymorphism is V
MGDLKEVFRSLQELFPEVDHRMLKAITIEHHKDVDSAVVTVLDEVMPFMTGSAGVDGYVGNLSSMDGSVGNLFANHSTHEVGSSSSVSILEEAKTPGDMSKVVDPALLAEMAELESDEEEADTDDTY

SEQ ID NO: 6404 - protein, 144 aa, Zea mays
  VARIANT 37: note = Ancestral polymorphism is P, Derived polymorphism is L
  VARIANT 17..144: note = Derived polymorphism lacks residues 17 to 144
  VARIANT 4..144: note = Derived polymorphism lacks residues 4 to 144
MLTQVSNKKGGSCRPLQLRASSRAREDIWMAMGDAKPLVLIPMPSRDRDLLVPTAAVATHASPSARSVADSDDDESKPSSASAAAQTGREAFHKVVHSWASKKFMTVCVILFPIAVTFYVTWWFFRFVDGFFSPIYAHLNACLF

SEQ ID NO: 6405 - protein, 688 aa, Zea mays
  VARIANT 1: note = Ancestral polymorphism is M, Derived polymorphism is I
  VARIANT 62: note = Ancestral polymorphism is A, Derived polymorphism is T
MPATASGGARPEEVSPAPSASASASSCMGTRAEELTARLAAAGPSPGAGAGGEEVEHERVRALREIKNQIIGNRTKKLLYLRLGAVPAVVAALADPGASPAALVQAAAAAGSFACGVEDCARAVLAAGAVGYLTRLLAHPDEKVVDASARALRMIYQSRLAPKFDVNRGKNMNFVLSLLDSENENVTELAAAIISHSCKSSAEQLALCSAGVPQKLVSLFGGSVNLRDACLGSVTVVVQNNQDVASRFVTTVHGKCFRSVVGLIHDRNPSTRLLACRCLIALGHASPGHFQDKQIKTKLIMVLLELIEEPGHIGDEAPLALTTMIKDSFELQKQALATNAVEKLSNHLLAKPLETRQAVAILLALSELCSKLEESRSQMMSDEVSTLLLDALKHDWADIRVAACSCLKNISRSPKVLSGGRLSCDTVIGPLVQLLNDSCTSVQVAALGAICNIAINLTPRKSVLLNSGVVSHLVHLSKSMDPILRLKSVWALRNIMFLLSPKDKDFIVKELTLSTLSSLICDSEHFVQEQTLALVRNLVDGYVDSANFVIGEDGIIMNAIARQLNNASAPGVFVQGMYVLANIAAGNELNKEAVMNVLLPHRADRIKPLFAVNFLQSKDKQLRVATLWCLLNLIYPKCEASSGRAVRLQNAGVIQQVKNMINDHCLDCKLRARMVLQHCVNNADDCFM

SEQ ID NO: 6406 - protein, 339 aa, Zea mays
  VARIANT 107: note = Ancestral polymorphism is P, Derived polymorphism is L
MSSSTSGTREMLSPNSTATSIGQVQKVPGFAKLQGENFVYFMQTYSIMLGRTSRSYTADFDLSKYECGSQCVSRCHACIFYDFELRHFAIEVLGRNGCTIRGVSYLPGSVPIKLNSQDLIEIAGIKFYFLLPSRSIFATLAARDATMLPPQSPSLLHPNYPGNPSANDCGRSNGENGVKISNDMQGKLVKQKRSFSGELDISYSYGTKKNVDRVGTLDGCDKDTDNQQILLEEEKDVTTCLTTLISELSGPKEWVPMERLLSEISKRFGKKWLRDRVSKYLPQKGMSGSSTKVDHRPWCSLWELLRKHPEHFVMTTLTRGEETSDYVGLVHLVSVENEP

SEQ ID NO: 6407 - protein, 625 aa, Zea mays
  VARIANT 21: note = Ancestral polymorphism is A, Derived polymorphism is V
  VARIANT 524: note = Ancestral polymorphism is A, Derived polymorphism is G
MAAAVTAAVFVLFAAMSTTRAPAALVEQTFVVSQMSMTHLCRETMVTVVNGQLPGPVIEATEGDSVAVHVVNQSPHNLTIHWHGVKQQRNCWADGVPMVTQCPILPGHNFTYRFDVAGQEGTLWWHAHVFSLRGTVHGAFIIRPRRRADDDSYYPFPKPHAEVPIVIGEWWETDLEQMDRDFAHGHLDDQPSAATINGKLGDLFRACEGAGVEDGYVLDVEPGKTYLLRVVNAALFSEYYLRIAGHVFTVVAGDANYVRPYRTDVLAVSPGETVDALVVASARPASSYYMVAKPILTPPPDPQIPAFATRATVRYTTAYSSGAPRSSRRRRPRSSSDDDAPVAPEMPDDYDMMTSFYFRGNLTSLRRQPVPSAQADERMFVALALGSVCRRRGQRWCERGDSDETITVATMNNVSFELPPAAATTPMLDAYYRNRSGNGVDDDDDDVAVVVRLPDVPPRAFNFTDRALQPTGPEEEELEPTSRATAVRRFRHGAVVDLVFQSTALWQGDSNPMHLHGHDMFVLAQGLGNYDAARDVARYNLVDPPVRNTVLVPSLGWAAVRFVADNPGMWFMHCHYDFHLSMGMAAVFIVEDGTTADTSLPPPPAVVSSCSHGNVLMPGEILPQS

SEQ ID NO: 6408 - protein, 288 aa, Zea mays
  VARIANT 117: note = Ancestral polymorphism is S, Derived polymorphism is T
  VARIANT 77: note = Ancestral polymorphism is N, Derived polymorphism is I
MFPPPAPVIPAPAMVGRLQFVSVGASNFATEMDFIGSLLPRFRYIAIDAEYPGTVHGAPAGAGLSPAARYYAVVKANVEELPVLQLGLTICDEEGNLPVVMDVDGLPLQIAWEFHFSDFDVARDPHSVESVNFLRAQGFDFVRARAHGVASADFAGKLAALLASVPRWCQPPAWVAFGGAFDFAFMVKMLSGGQPLPENPQDMVARASDLLRGPVFDAKYMAEHCGRPELCVGGLRTVAAILGVPQLDPAPPSLAGPKSHTACRIYYNVMRMLEHDGAGYDGLIDGLY

SEQ ID NO: 6409 - protein, 283 aa, Zea mays
  VARIANT 209: note = Ancestral polymorphism is R, Derived polymorphism is G
  VARIANT 174..283: note = Derived polymorphism lacks residues 174 to 283
  VARIANT 164: note = Ancestral polymorphism is G, Derived polymorphism is E
  VARIANT 150: note = Ancestral polymorphism is S, Derived polymorphism is L
  VARIANT 86: note = Ancestral polymorphism is W, Derived polymorphism is R
  VARIANT 80: note = Ancestral polymorphism is A, Derived polymorphism is V
  VARIANT 66: note = Ancestral polymorphism is R, Derived polymorphism is C
  VARIANT 61: note = Ancestral polymorphism is D, Derived polymorphism is G
  VARIANT 56..283: note = Derived polymorphism lacks residues 56 to 283
  VARIANT 50: note = Ancestral polymorphism is S, Derived polymorphism is F
  VARIANT 27: note = Ancestral polymorphism is N, Derived polymorphism is S
  VARIANT 14: note = Ancestral polymorphism is D, Derived polymorphism is G
MAAIIGRTEETLNDDIVLYLYIEMHDSMTVRLIAFIFSFLLHDLSIQSASASTDSQLNILDKRVWRVLKGPFNYTTRDEVGIPREWFPQIDASAPRLPRSMESAVSRCESGARYLWKARRDEVTSSMPPPLDENIFSDLTLFAPPQEPLSLEKKLCLVMGLHDGSTKCLYPALEYSSKKNAKGNKPRKERNIIFEAFRTPREAIEERRRKYENNEYQVKIEILKINFHERKKNAWEDSSSDDISGVITRFDGVDLQVYETLTQSLSIISIYETDNLVLSPSDG

SEQ ID NO: 6410 - protein, 277 aa, Zea mays
  VARIANT 19: note = Ancestral polymorphism is A, Derived polymorphism is V
  VARIANT 92..277: note = Derived polymorphism lacks residues 92 to 277
  VARIANT 163..277: note = Derived polymorphism lacks residues 163 to 277
  VARIANT 213: note = Ancestral polymorphism is L, Derived polymorphism is P
MGRRGKDIKRREEALKNGADPHLFLHNCCHSSTNCISWEIINPMMLSAGKGEINELYWDHRTSERKLDDDYLVASTDGVGTKLKLAFETGIQDTIGIDLVAMSVNDIVTLGAKPLFFLDYYATSKLDVDLAEKVIKVIRDGCEQSDCALLGGETAEMPGFYVEGEYDLSGFAVGVVKKDKIIDGKNIVKGDVLIGLPSSGVHSNGFSLVRRVLEKSGLSLDDQLPRNDGITTTVGEALMAPTFIYVKQVLEIISKGGVKGLAHTLKGMYLCSFIRAQ

SEQ ID NO: 6411 - protein, 173 aa, Zea mays
  VARIANT 34: note = Ancestral polymorphism is G, Derived polymorphism is V
  VARIANT 93: note = Ancestral polymorphism is R, Derived polymorphism is C
MIRPAPWVGAGHRGRGGEAGACTESLGSESGDVGCDAAEIDQFFPPAPAAGGPDDAGAEPCIPDLAAAAAAGKRRRGGFPPPMPRASGPLFLRAERRGGRLILTEVRADERERRVVFRAERDGGRLRLRFANDGDGPEAAGGGGGAGGGGGELCQVAAGRRGVQVGAVMMGAI

SEQ ID NO: 6412 - protein, 70 aa, Zea mays
  VARIANT 33: note = Ancestral polymorphism is S, Derived polymorphism is P
MQVDEFTTTLLEIHDKMTSTNKNEDIRLGLNRSEYMLDSETSSVLQIDYLIIISWPWLPCLLTMMNDKIF

SEQ ID NO: 6413 - protein, 192 aa, Zea mays
  VARIANT 136: note = Ancestral polymorphism is R, Derived polymorphism is H
  VARIANT 121: note = Ancestral polymorphism is R, Derived polymorphism is W
  VARIANT 26: note = Ancestral polymorphism is K, Derived polymorphism is M
MAEKKMLTLRTSDCEEFEVEQAVLMKSEIIRFMIEDDCADNVIPLPNVNSKTLALVIEYCNKHVHADAAETTSASSAGGGGEVDLKKWDAEFVKVAPATLFDLIMAANYLDIKGLQGLTCRAVVDMIQGKSPEEIRKTFNIKNDLTKEEEEAIRSENSWAFDPLPVRSSRPRWLLLALISIASLLVCSYLLI

SEQ ID NO: 6414 - protein, 340 aa, Zea mays
  VARIANT 257..340: note = Derived polymorphism lacks residues 257 to 340
  VARIANT 80: note = Ancestral polymorphism is Q, Derived polymorphism is K
MVEDAAVWCAVHGLVVGDRANQRSGTVPAVGLVHAPFSLLPARFPASFFNQACELAPIFNELVDRVSLDGEFLQAALSRQVLNSIHWILLVPMCRLSFSNFRTKQVDEFTSRLLEIHDKMMSINKKEVVQNDIPPESMDAMRPVQQHLPTRTSTPASKMNNLPKDAQNMEVSTPVPPINPEGNDEDETPKNTVSRNGGFLQNAVGQDLVHLGVARTASGCPSAVASGVSTRHQHNRMDLDPASSSVDNFKTPELTKENGLEEDGKGESSMYDERQPKRRKRTLMNNEQIDELEKALVDEPEMHKNPVLLQSWSEKLSLQGPEITTSQLKNWLKKSVVCKF

SEQ ID NO: 6415 - protein, 575 aa, Zea mays
  VARIANT 32..575: note = Derived polymorphism lacks residues 32 to 575
MNPFPIPLSGLRRRQGTKPERDGINRGSARLRIGFPHAMSSPCVSHHQQVRLRLRAASRLPAPDTASFAPPAPRRLRVAHAAMSAKAPLGVAPAEEGPGTPGQQAVLGEMVEDAAVWCAVHGLVVGDRANLRSGTVPGVGLVHAPFSLLPARFPVSFFNQACELAPIFNELVDRVSLDGEFLQAALSRQVLNSIHWILLVNNGLSFSNFRTKQVDEFTSRLLEIHDKMMSINKKEVVQNDIPPESMDAMRPVQQHLPTQTSTPASKMNNLPKDAHNMEVSTPVPPINSEGNDEDETPKNTVSRNGGFLQNAVGQDLVHLGVARTASGGPSVVASGVSTGHQHNIMDLDERQPKRRKRALMNNEKIDELEKALVDEPEMHKNWSEKLSLSGPEITASQLKTGKTVLNIRKAKLARIAKERAENADKPSIPHPGESSESAGEDNYLPPAGVMTALSKGGSLLSPDSTEQTSQAELSPNTTMMVRPFTRSFSLEPGRLVSLVDSDGKEVGRGKIFQAPGKSTTKSCVCVVDVTELRTEKWRELPHPSEAFGWTFQEAEVRNGGIIRVSWDAVRLFPVA

SEQ ID NO: 6416 - protein, 328 aa, Zea mays
  VARIANT 117..328: note = Derived polymorphism lacks residues 117 to 328
  VARIANT 49..328: note = Derived polymorphism lacks residues 49 to 328
  VARIANT 22..328: note = Derived polymorphism lacks residues 22 to 328
MSAKAPLGVAPVEEGAGTPGQQAVLGQMVEDAAVWCAVHGLVVGDRANQRSGTVPGVGLVHAPFSLLLARFPASFFNQACELAPIFNELVDRVSLDGEFLQAALSRQVLNSIHWILLVPITKQVDEFTSRLLEIHDKMMSINKKEGPEITASQLKNWLNNRKAKLARIAKERAENADKPSTPHPGESSESAGEDNYLPPAGVMTALSKGGSLLSRDSTEQMLQAELSPNTTMMVRPFTRSFSLEPGRLVSLVDSDGKEVGRGMIFQAPGKCPTESCVCVVDVVDLRTEKWRELPHPSEAFGWTFQEAEARNGGIIRVSWDAVRLFPVA

SEQ ID NO: 6417 - protein, 929 aa, Zea mays
  VARIANT 718..929: note = Derived polymorphism lacks residues 718 to 929
  VARIANT 660..929: note = Derived polymorphism lacks residues 660 to 929
  VARIANT 628..929: note = Derived polymorphism lacks residues 628 to 929
  VARIANT 573..929: note = Derived polymorphism lacks residues 573 to 929
  VARIANT 572..929: note = Derived polymorphism lacks residues 572 to 929
  VARIANT 241..929: note = Derived polymorphism lacks residues 241 to 929
MTHRRVMIAMVSAVEELSWLTSKELGEMLRESDNFVLQSKIEDGGPKQVLVDMEKVVPSLPLHLLAVCLELGQGPDLTYVLRGIRFLHSLSDLASRHTRLEQVLLDDVKLSEQVMDLIFFLLSILAEQKENNNVGASPLVHASLVAGSLHLLTNYFSSQWHELVHILLAHPKVDIFMDVAFDSLHEDVRLLSIRLSSMGFGFFPVGSLESRLAHFICQQCEASLQFLLLLCQQKLFRDRILKNKELSRNGGILSLSHTILKLVVPECLKQSTDLVASISRLKAKILSILLQLCEAESVSYLDEVATNPNNMRLGQTLALEVLNLLKISFGRKINITSDSHDKGKIYPMGSVLISALRLVDVFSDDSNFRSFFLTNTVPFLIQILAAPHDEFVSSWCAVNLPTIEEDASLDYDPFGASEVALLASDNMLTEAKANYSCPFRPSVPSMAYAQTRTSCVVKIIANLHVFIPNICEEQERDLFLQNFQKHLASGSPKLSADLPASSDFKATKVCRNLGFLSDYAKTLVPNLLNGEDLVLLSDFADKLQSWCKSQVAVKVVQNDIPPESMDAMCPVQQLLPTRTSTPASKMNNLPKDAQNMEVSTPVPPINPEGNDEDETPKNTVSRNGGFLQNAVGQDLVHLGVARTTSGGPSAVASGVSTGHQHNRMDLDPASSSVDNFKTPELTKENGLEEDGKGESSMYDERQPKRRKRTLMNNEQIDELEKALVDEPEMHKNPVLLQSWSEKLSLQGPEITASQLKNWLNNRKAKLARIAKERAENADKPSTSHPGESSESAGEDNYLPPAGVMTVLSKGGSLLSPDCTEQTSQAELSPNTTMMVRPFTRSFSLEPGRLVSLVDSDGKEVGRGKIFQAPGKSTTESRVCVVDVTELRTEKWRELPHPSEAFGWTFQEAEARNGGIIRVSWDAVRLFPVA

SEQ ID NO: 6418 - protein, 63 aa, Zea mays
  VARIANT 20: note = Ancestral polymorphism is T, Derived polymorphism is M
MTKGLETDIQTFGSIKTVLMSGWLRDENSFQQPDKVVPAASPITNAGKQISILVDERHVVVAN

SEQ ID NO: 6419 - protein, 280 aa, Zea mays
  VARIANT 225: note = Ancestral polymorphism is P, Derived polymorphism is L
  VARIANT 189: note = Ancestral polymorphism is A, Derived polymorphism is T
  VARIANT 177: note = Ancestral polymorphism is A, Derived polymorphism is V
  VARIANT 176: note = Ancestral polymorphism is C, Derived polymorphism is Y
  VARIANT 172: note = Ancestral polymorphism is G, Derived polymorphism is S
  VARIANT 165: note = Ancestral polymorphism is I, Derived polymorphism is T
  VARIANT 163..280: note = Derived polymorphism lacks residues 163 to 280
  VARIANT 130: note = Ancestral polymorphism is G, Derived polymorphism is V
  VARIANT 118: note = Ancestral polymorphism is E, Derived polymorphism is K
  VARIANT 116: note = Ancestral polymorphism is A, Derived polymorphism is T
  VARIANT 78: note = Ancestral polymorphism is A, Derived polymorphism is T
  VARIANT 77: note = Ancestral polymorphism is C, Derived polymorphism is Y
  VARIANT 61: note = Ancestral polymorphism is G, Derived polymorphism is V
  VARIANT 60: note = Ancestral polymorphism is R, Derived polymorphism is L
  VARIANT 30: note = Ancestral polymorphism is S, Derived polymorphism is Y
MNLAVPLCAARLEETPRRHHMAAAGDGGESHYREALREAFGDSSSSDSDTPAGVSPGAGRGHWRWEAVAGVRGLWLCAAFLSADEQARLLNAIQREGWFINADNQAMRFGDLPSWAVELSALIREAICVGDASAGLGAEATNEDEDACPLPSDLLWREPFFDQMIANRYRPGEGICAHVDLMRFDDGIAIVSLESACVMRFSRAEAASDTPKQGGSASESTAEVPVLLNPGSLALMSGDARYLWMHEINRKPGRQLWDGRELEQRRRTSVTLRKLLPYTD

SEQ ID NO: 6420 - protein, 82 aa, Zea mays
  VARIANT 69: note = Ancestral polymorphism is N, Derived polymorphism is I
  VARIANT 62: note = Ancestral polymorphism is G, Derived polymorphism is R
  VARIANT 50..82: note = Derived polymorphism lacks residues 50 to 82
  VARIANT 37: note = Ancestral polymorphism is K, Derived polymorphism is N
  VARIANT 17: note = Ancestral polymorphism is G, Derived polymorphism is S
  VARIANT 13: note = Ancestral polymorphism is D, Derived polymorphism is N
  VARIANT 1: note = Ancestral polymorphism is M, Derived polymorphism is I
MFEILLCVGNKADLVPGYSVQNIEYIEVCASNADFDKCRSVDGDSQGLKRLLGALSAHMWPGIVLKSRIRITAPFFVEKQGH

SEQ ID NO: 6421 - protein, 216 aa, Zea mays
  VARIANT 187: note = Ancestral polymorphism is P, Derived polymorphism is L
  VARIANT 180: note = Ancestral polymorphism is S, Derived polymorphism is I
  VARIANT 111: note = Ancestral polymorphism is G, Derived polymorphism is C
  VARIANT 103: note = Ancestral polymorphism is D, Derived polymorphism is H
  VARIANT 93: note = Ancestral polymorphism is C, Derived polymorphism is Y
  VARIANT 88: note = Ancestral polymorphism is A, Derived polymorphism is S
  VARIANT 79: note = Ancestral polymorphism is S, Derived polymorphism is L
  VARIANT 63: note = Ancestral polymorphism is S, Derived polymorphism is L
  VARIANT 59: note = Ancestral polymorphism is E, Derived polymorphism is K
  VARIANT 58..216: note = Derived polymorphism lacks residues 58 to 216
  VARIANT 57: note = Ancestral polymorphism is A, Derived polymorphism is V
  VARIANT 50: note = Ancestral polymorphism is R, Derived polymorphism is I
  VARIANT 37..216: note = Derived polymorphism lacks residues 37 to 216
  VARIANT 28..216: note = Derived polymorphism lacks residues 28 to 216
  VARIANT 7: note = Ancestral polymorphism is L, Derived polymorphism is S
MAIHMVLLHYFFRCNARVFNQDTSDWDWEEDLEEDEEMISCYQGQTPSPINGPSFFAWEACASGYSSPTDAMFHLLNVSEYLDQVQDARDAYCRHEAARLVIDKETGKPKGYGFCEYKDEETALSACWNLQGYEINGRRLCVDFAENRRNTDKNREKVDNPQNYYRRVFPTTLEFFVNMSSCIVFVPVNDNSCAFSDHPVSPVAISYKHVYVCTTA

SEQ ID NO: 6422 - protein, 399 aa, Zea mays
  VARIANT 167: note = Ancestral polymorphism is A, Derived polymorphism is T
  VARIANT 259: note = Ancestral polymorphism is I, Derived polymorphism is N
  VARIANT 264: note = Ancestral polymorphism is V, Derived polymorphism is A
MEDRSSKQAGVAVVADLHDDLLVEILSRVPAKSICRFKCVSKAWLDLIAGPDHRKKLRQPMQGLIFMNPEKDRHSFSFLDLPLTVGSVPLDVADPAGFISFLTEQPGIHRLVLLDSCNGLILFQHLMELPHYNSLGYVVCNPTTKQWRAVPEPDCSSHVPINYTYLAFDPTVSSHFHLVRFKKNREYMEPMSVHAYSSKTGIWTYSQTEKEEEEWQNQVYLSISNRCAFVNGFLHLLVWGSNKMQILIVDVQGRPRRMIRLPDVAAGNCEGCYCVYFGQSQGHLHCITKQLFDFNEEKYELSIWALQDYDAQEWVLKDTVSSLQLFGGNCPTSVALELYSEVASMHLDRNVVFFFSHCERRFIAYDMDSKEVSVFSSSKAIHRWKVGCYVPCFSPAPLK

SEQ ID NO: 6423 - protein, 263 aa, Zea mays
  VARIANT 58: note = Ancestral polymorphism is W, Derived polymorphism is S
MAPGGSGERWSLAGATALVTGGSKGIGQAVVEELARLGARVHTCARSAADLEECRRRWAEKGLRVTVSVCDVAVRADRERLVLDTVSAAFDGKLDILVNNAALLLLKPAAEWAAEDYARIMATNLESCLHISQLAHPLLLNASVAGGASIVNVSSIASVLGFPQEVMYSVTKGGLNQMTRSLAVEWACDRIRVNCVAPGVIMTDMGKELPAALVEQERSRIPLRRTGEPEEVASLVSFLCMPAASYVTGQVIFVDGGRTISGA

SEQ ID NO: 6424 - protein, 249 aa, Zea mays
  VARIANT 45: note = Ancestral polymorphism is N, Derived polymorphism is H
  VARIANT 53: note = Ancestral polymorphism is E, Derived polymorphism is K
  VARIANT 61: note = Ancestral polymorphism is T, Derived polymorphism is I
  VARIANT 68: note = Ancestral polymorphism is S, Derived polymorphism is N
  VARIANT 75: note = Ancestral polymorphism is G, Derived polymorphism is E
  VARIANT 80: note = Ancestral polymorphism is T, Derived polymorphism is I
  VARIANT 85: note = Ancestral polymorphism is L, Derived polymorphism is R
  VARIANT 86..249: note = Derived polymorphism lacks residues 86 to 249
  VARIANT 87: note = Ancestral polymorphism is D, Derived polymorphism is Y
  VARIANT 105: note = Ancestral polymorphism is T, Derived polymorphism is I
  VARIANT 178: note = Ancestral polymorphism is G, Derived polymorphism is S
  VARIANT 197: note = Ancestral polymorphism is P, Derived polymorphism is L
MPAGRWTPGRGHAGGRLSASAAPRLGGFEDSSKGQIPPKHISLVNLTVTLNIEGSKYTIETVRGGPRSYKLRMNGSEIETEIHSLRDGGLLMQLDGNSHVIYAETEAAGIGDLFFLRHENRGTLNPYMSGPGIVQMNSETMEILSNKEVIQVNQDPLGVQGRKILGQGKYGCREVWAGPLFGNRFVVALWNVTMKLLALGLDGHAAYSGRDLWKHETLSENVVGTFGAQVDVHDTKMYIFSPATIVALV

SEQ ID NO: 6425 - protein, 75 aa, Zea mays
  VARIANT 34: note = Ancestral polymorphism is S, Derived polymorphism is Y
  VARIANT 28: note = Ancestral polymorphism is S, Derived polymorphism is G
  VARIANT 23: note = Ancestral polymorphism is T, Derived polymorphism is I
  VARIANT 11: note = Ancestral polymorphism is S, Derived polymorphism is Y
  VARIANT 1: note = Ancestral polymorphism is M, Derived polymorphism is I
MEAQAPSSYTSFSSVAMILQAPTVYIKGDVYNISLPLFPKKKPMPSHHAPIFAPAMALTMPAHDPEDESQDSSHR

SEQ ID NO: 6426 - protein, 104 aa, Zea mays
  VARIANT 28: note = Ancestral polymorphism is A, Derived polymorphism is V
  VARIANT 10: note = Ancestral polymorphism is A, Derived polymorphism is G
MFFVHFLKVGTLGNKVEKEMEDMAFFFAELALMQYEYGLVTRLPSLVAASAVYTVRLTVKRAPSGPTPSSTTLLCTRCSEERPTKGSGSWSSPVGLVPSGGQPG

SEQ ID NO: 6427 - protein, 1266 aa, Zea mays
  VARIANT 223..1266: note = Derived polymorphism lacks residues 223 to 1266
  VARIANT 27..1266: note = Derived polymorphism lacks residues 27 to 1266
MVETRRSSAAAKRPSPSPSSSSVPPPKRPKARPPSPGGSKNIASRPADLTCRLTDLNCGHDQAESPGSPTASAPARAEEDSVAGAAPARSDGSADDAAAAVAQKDQGADKPSSAAAESSKRRKEPEQQQPAAPWAKLLSQCSQTPHYPIIAAQFSVGQSKNCNLWLKDQPVSKVLCKLRRLEHGGPCELEVLGKKGMVQLNGRSISSGTKVPLTGGDEVIFNSCGKHAYIFQHPLSDKAPKTVPSSAVSLIEPPVASVKRIRTDKRTGDTSAIAGTEMLPSTSNQAKDVAAAPPAFAGENSQRVMLPMASSASDKSKGHTVSPDKEFENGENANEVNSNIEDSPMDAAAAPISPDAAANDACQQNGFLPDAHLGAEIGKIATYKIRPVLRMITGSTISEFDLTGDLFKALEDQRDLIRDLNASASVPPSRCQAFKDGMKQGIINPSDIDVTFEDFPYYVSENTKNVLLSCAFIHLEKKEFIKQFAEISSINQRILLSGPAGSEIYQETLVKALAKHFGARLLVVDSLLLPGAPLKDAESQKDVGKGDKSGDKGTAEKFAIYQKHRSSLADTVQFRRPAAPTSSVNADIVGTSTLQSASLPKQESSTATSKSYTFREGDRVRYVGPAQLSSLSQRGPSYGYRGRVMLAFEDNGSSKIGVRFDKQIPDGNDLGGLCEEDHGFFCSAESLRPDFSAGEEVERLAMTELIEVISEENKSGPLIVLLKDVEKSFTGVTESLSSLRSKFESLPSGVLIIGSHTQMDSRKEKAHPGGFLFTKFASSSQTLFDLFPDSFGSRWLHERSKESPKAMKHLNKLFPNKISIQLPQDEALLTDWKQQLDRDVETLKAKSNIGSIRTFLSRNGIECNDIEELFIKDQSLSNENVDKIVGYAVSYHLKHNKIETSNSKDNKLVLTSESLKHGLNMLQSMQSDNKSSKKSLKDVVTENEFEKRLLVDVIPPNDIGVTFDDIGALENVKDTLKELVMLPLQRPELFCKGQLTKPCKGILLFGPPGTGKTMLAKAVATEAGANFINISMSSITSKWFGEGEKYVKAVFSLASKIAPSVIFIDEVDSMLGRRENPGEHEAMRKMKNEFMVNWDGLRTKDKERVLVLGATNRPFDLDEAVIRRFPRRLMVNLPDASNREKILKVILAKEELGSDVDLDSLANMTDGYSGSDLKNLCVTAAHYPIREILEKEKKEKSLAKTEGRPEPALYGSEHIRPLSIDDFKSAHEQVCASVSSDSANMNELLQWNDLYGEGGSRKRKALSYFM

SEQ ID NO: 6428 - protein, 261 aa, Zea mays
  VARIANT 11: note = Ancestral polymorphism is V, Derived polymorphism is D
MAKLFGKVAIVTGAASKLGEAIARKFVDNGAKVILADINRHSCENIVAALNKTNHGPAVAHAMRIDVSEPDSILATVEEAKKVYKQDVDIFYNNAGVSNVSSPASSIDMMSFRNTMAVNVESVIASINHAGAVMRSNKIGGGCILCTGSPVGSLGDVVPSAYSISKAAVVGVVRAAAAELGGHGVRVNAISPYGVAARFDKGVLRHIFPHATDQQLDTMISSYGTYTVTEDDVANAAVYLASDAGKNINGQNIVLNGKFGL

SEQ ID NO: 6429 - protein, 70 aa, Zea mays
  VARIANT 22: note = Ancestral polymorphism is G, Derived polymorphism is S
  VARIANT 25: note = Ancestral polymorphism is T, Derived polymorphism is M
  VARIANT 39: note = Ancestral polymorphism is R, Derived polymorphism is H
  VARIANT 63: note = Ancestral polymorphism is A, Derived polymorphism is T
MLPALNLAGDVVVVDRVSVRFGQVTPRDIVLMISPEDPRKWLVKRVVGMQGTPSPTLSTPATATPPPEPS

SEQ ID NO: 6430 - protein, 151 aa, Zea mays
  VARIANT 58: note = Ancestral polymorphism is S, Derived polymorphism is N
MSPFSRNVDAGDKLKLWVLCFLKWTLTQGKAVVTAVKVFSGMDLGDFLTLVASAEASNENPLAKAILDYALHFHFFGKLPSSKDGIEQRKDKVLSQWLLEAEDFSAVSGKGVQCSINGKHVLELLDNKVQTLEKEWSVVEEESLKKPTPGY

SEQ ID NO: 6431 - protein, 339 aa, Zea mays
  VARIANT 236..339: note = Derived polymorphism lacks residues 236 to 339
  VARIANT 181: note = Ancestral polymorphism is R, Derived polymorphism is T
  VARIANT 38: note = Ancestral polymorphism is N, Derived polymorphism is K
MAGERRGLAIGIDLGTTYSCVGVWQNGGVEVIANDQGNRTTPSYVAFTGSRLLVGDAAKNQAEMNPSNTIFGGTFDVSVLAIEQGIFEVRATAGAAHLGGEDFDNRMVNHFVEEFKRKKKKDISGNPRALRRLRTACERAKRTLSSYLEASIEIDCLYEDIDFYSAITRARFEELNMDLFRKCMAIVEDCLSDASYVRSIHDVVLVGGSSRIPKIQQLLQELFDGKELCNSINPDEAVAYGATMQAAILSREGGYEIQNYLLLDATPLSLVYEGEGSITRDNHLLGEFEFSLLPAPSGVPQITVCFDVDINGILNVSAEDKTTGQKMKKVITKRFRLKR

SEQ ID NO: 6432 - protein, 295 aa, Zea mays
  VARIANT 203: note = Ancestral polymorphism is G, Derived polymorphism is A
  VARIANT 43: note = Ancestral polymorphism is G, Derived polymorphism is D
  VARIANT 32: note = Ancestral polymorphism is C, Derived polymorphism is F
MDIAKLAGVDAVKLVVMIVRAAQTVRRNKKTCRQLVHHVQIIGDLLEKLQTPAMMQHPETRNGLNDLEEILREVYMFVTSCQNNKYLYHLFTGKKQADQLRILQKRMNSCLQVFPLISHIDTIDRLDKILEIIQPPRSQAVKDVPRLLTGCSSCDTRTEVYSEVKRCSLQVNCADAFKFSLSQLVGATNNFSDRNLIGKGSFGCIYKGQLHDGLEIAVKRCFDLSSSPNLLDVQDYQFQNEIRSLPNLQHTNIIKLLGDCVQGREKILVYEYMSNGSLDSFIRGMCSLFSSSSQF

SEQ ID NO: 6433 - protein, 1029 aa, Zea mays
  VARIANT 839: note = Ancestral polymorphism is F, Derived polymorphism is C
MASCGGGVCLKRDRREEEENDDDKGETSGRNKRPSSGAYYTGAGVDAQRTDDDDSAAADYMYEYDDGYEEEESAAEQPKGDDASARDTEQRYAVLTEDDVRARQEADTARVAEVLSIPAGFARALLRHFKWRVGRAQEEWFSDAQHQQRVRGAVGLVPAACPDGDALVPAARSPRPRVCGICFDAFPAGGTRSAGCAAHYYCDGCWCGYVAAAVGDGARCLALRCPDPSCAAAVVRELVDEVARDDDRARYARFWLRSYVEESGGRIRWCGGAGCTRSVELLGGCDAEAVASAVDVVCGCRHAFCWRCGEEAHRPVSCGTVRAWLAKNASDSETANWVVANTKRCPMCRRPIEKNHGCNHMTCGAPCHHQFCWLCLDPWDHHRGCTRYDSRRRRRHGPVDEVEDEEEQAQRTLAKASLDRYLYHYERWEGNGKSLRKALADADELERSELQRMARLLDLPAMDLGFVTEAYRQIADGRRVLRWAHAYDYFLSLDPERDAAKRGLFDDLQSQANRWLECLHGCAELERKHLFGAADADAEDEPTVAAAAFMAYKERLANLTGVTRRFIGNLVRAFKTNLPEVVVTLTPPASDLQHIVKSGPTTERQTTVGIGGILSTEATVTLPVSNVSSLQGTSALRPSSSSLVVSQETDIANDSVQERHSPTRNLAQAQHPVRPGGHGGFLSNPYPSFFGEATSTAGPLQLYMPNMVVSGGTTSTPSLAFSLSALGQPITSTALGGSFGSNTRTAWGNSDMAAASSSQPDRMGMDQQAGTGSAMNLTIGLHPNAQQPPPKYVKIWEGDLYGQRQGQPVFISKLESWGGTVSRKYSESQYVGNTDFLIFRALNQHGFLGQLQERKLCGVIQLPSQTLLLSMYDKTSRMVGMLFPKNMLMFRPEALTQPSPVQQEELIHHQQQQLQQQQRNIHRLQRQLIQKQQQQHMQKLLPQRLQYQEQLHLQQQMTQQIQQQQQSLYQQHQQMQHQQQLWQQIQQQKHQLQHMDPQQQQLLSQMVGTELGSDDDTREDWVTGAGPHA

SEQ ID NO: 6434 - protein, 525 aa, Zea mays
  VARIANT 252: note = Ancestral polymorphism is A, Derived polymorphism is T
  VARIANT 271: note = Ancestral polymorphism is P, Derived polymorphism is A
MAKKRLLLLAHKIFSAMLSLLLHGRRSRPSTTTTDSSSPAVHRGAPPPPTTAAAAGALVVDVDTALLRSGDLFPYFMLVALEAGGFLRGLLLLLLCPLVRLMPRAAAVRAMAAVSFCGLRAARFRAGRAVLPKWLMEDVAAEGFQAVRAAGSRAVCVTAMPRVMVDGFLREYLGVHAVVAREMKVVWGFYTGIMEDARPAEGAEMVKKAAEEQTVVVGYSASMEFLNHPLSRCCKEIFVVSSDEKSRWRPLARDKYPKPMVFHDGRLAFRPTGAGTAAMFAWLPLGVTLGAARLAVALVLPYRYSTPILAATGMSWRLKGSRPALAPPCSGGRGQLFVCNHRTLIDPVYVSVALDRQVRAVSYSLSRLSELISPIGRTVRLTRDRDSDGAVMARLLDRGNLVVVCPEGTTCREPYLLRFSPLFAELSDDVVPVGIAVETSMFYATTAGGLKCFDPLYYMANPRMCYTVQFLDKVDTSAVRSRAAPSTQMANLVQRKMGDALGYGCTMLTRKDKYLMLAGNDGIVR

SEQ ID NO: 6435 - protein, 395 aa, Zea mays
  VARIANT 292..395: note = Derived polymorphism lacks residues 292 to 395
MEAAEVEMEAAEVEMEMEVEAERKSDGDGEYEARKKTPMRWLRGNVEHSDAEVAERQKRMKQTHGHLDDKEGEEARKGDIKREGQSESAKSRSESNDQKNKLMYERYLEWKRRNEEKEEEERRRYPDKVNDPEAYQAMLFRQSWDNCYLKKYGSFDKKTNIPCKRFTHNLPPRGGTAKQTVQVFYVKVGGITGGLQWPLENPYLELTGPVRAVLLSGRVIFEASLYVKGATRSDDKELSLLAITSLGVFNDAHSYLIEHSYTSRLSTLELMLGYLTYSVEATIEVRVICGTWPADGFRFIFEANAGIGQWIVLLETAETADVGDKISLARQVVSVDYHRDRELKVVATITNGSATYTDEKGFKPLKMGASSKELSIGGLGLQVTVYWSCFPFAPV

SEQ ID NO: 6436 - protein, 703 aa, Zea mays
  VARIANT 296: note = Ancestral polymorphism is I, Derived polymorphism is N
MLPATPIHPSLPHAHNKRSQSHTASASERRAVAEMPLPAFLAAAARLAVLLAAAVTAANAVSFARYRRRHLRRIPNPIDESADPVADFRALRPASAEDAAEDDSFFFGLATAPAHVEDRLEDAWLQFAVEHSCDDKEAMRDPTTADAVMASAAGDGGAQLASRRSSRGDDDRDGDGELRKPLKIAMEAMLRGFEMFAEGGESGSAAAAGDSCSHNVAAWHNVPCPQERLKFWSDPDTELKLAKETGISVFRMGIDWTRVMPKEPIEDLESSVSTDIKVLFGSRNVNFAALERYRWIVQRVRDYGMKVMLTLFHHSLPPWAGEYGGWRMEKTVKYFLDFVRLVVDRVSDLVDYWVVFNEPHVFVMLTYCAGAWPGGDPNAIEVATSALPTGVYNQALHWMAIAHAEAYDYIHSKGESKRKPVVGVAHHVSFTRPYGLFDVAAVTLANSLTLFPYIDSICDKLDFIGINYYGQEVISGPGLKLVDNDEYSESGRGVYPDGLFRILIRFNERYKSLNIPFVVTENGVSDETDLIRKPYILEHLLAIYAAILMGVPVLGYLFWTTSDNWEWADGYGPKFGLVAVDRANNLARKPRPSYYLFSKIVTTGKITRHDRLAAWRELQQAAFQKKTRPFFRAVDKHGRMYAGGLDRPIQRSFILRDWRFGHYEMEGLQDPFSRFITSIISTILWKKKISYIEDEDISYSLSC

SEQ ID NO: 6437 - protein, 348 aa, Zea mays
  VARIANT 137: note = Ancestral polymorphism is P, Derived polymorphism is T
MTSPLLMGNQIIATRPAVVRCSDRRRELRADGPATVLAIGTANPPNCVRQEDYADYYFRITKSEHLTGLKDKLKRICHKSAIKKRYFHHTEELLLGHPAFIDRSMPSLDERQAIMATAVPELAAAAAADAIAEWGRPATEITHLVVTTYSGAHMPGVDWLVASLLGLRPTVRRTMLYMNGCSSGCAALRLAKDMAENNRGARVLVACAELTLMVFRAPHEAQVDTLITQSLFGDGAGAVVVGADPVSVEEPEFEMVSASQTMIPESKQVASGQLSEDGLRFHPSREIPSLVRENVEQCMVDALSRRSTSAAAGTTSSGRSIRVAALSWTASRRGSGWNRTSWQRAAGC

SEQ ID NO: 6438 - protein, 388 aa, Zea mays
  VARIANT 249: note = Ancestral polymorphism is L, Derived polymorphism is M
  VARIANT 235: note = Ancestral polymorphism is G, Derived polymorphism is C
  VARIANT 215: note = Ancestral polymorphism is Q, Derived polymorphism is P
  VARIANT 185..388: note = Derived polymorphism lacks residues 185 to 388
MAPTAAKDSGSADRWREVQAFEDSKLGVKGLVDSGVKSIPAMFHHPPESLKDVISPPALPSSDDAPAIPVVDLSVARREDLVAQVKHAAGTVGFFWVVNHGVPEELMASMLSGVRQFNEGSLEAKQALYSRDPARNVRFASNFDLFESAAADWRDTLYCKIAPDPAPRELVPEPLRNVMMEYGEELTKLARSMFELLSESLGMPSDHLHKMECMQQLHIVCQYYPPCPEPHLTIGVRKHSDTGFFTILLQDGMGGLQVLVDRGGGRQTWVDVTPRPGALMVNMGSFLQACMDLVTNDRYKSVDHRVPANKSSDTARVSVAAFFNPDEKRTERLYGPIPDPSKPPLYRSVTFPDFIAKFNSIGLDGRVLDHFRLEDDGPTRLAAPAHHV

SEQ ID NO: 6439 - protein, 139 aa, Zea mays
  VARIANT 22: note = Ancestral polymorphism is D, Derived polymorphism is G
  VARIANT 15: note = Ancestral polymorphism is P, Derived polymorphism is L
  VARIANT 10: note = Ancestral polymorphism is N, Derived polymorphism is D
  VARIANT 8: note = Ancestral polymorphism is W, Derived polymorphism is C
MMVNMLPWLNIPSGPVMEGPFDSCVLLDYHLHLTDHDKHLKTLAPVYVGTKFVKLDAENAPFFVAKLAIKILPCVILFKRKVTMETIQQPFTIWDDKCVDSPKKIIGIIDEKKKDDDDEESEAKNRRVRSSTAKDSDSD

SEQ ID NO: 6440 - protein, 555 aa, Zea mays
  VARIANT 367: note = Ancestral polymorphism is L, Derived polymorphism is R
  VARIANT 88: note = Ancestral polymorphism is E, Derived polymorphism is D
MWIYGSDDGTTSITNTCLHIAALCGHQNFCSEVLAQESRLHRPGPSSLLSTTNDDGETPLLVAVKSGRVSLALHLLDQHYSRHNLLVEHLLKQDTGKCNVLHHAIRNGYVDLALELIHRQPALSESCNARDESPMFIAVLKGFRSIYMELLRNERSEYGGARGYNALHAAVKYGNQDFVEQLVEQHPEKAKELARQADTQHDTPVQLAAHFNRDTILTLMLRGDRSLGYRVHTEHSTPLLYIAANRGHVAFARALLEHCPDAPYKNDRSRTCLHEAVEQDRTEFVRFILDDNSKLRKLVNMVDDVGDTALHLAVQKSNPRMVRALLRHPDIDLTVINNRVNTAIWNMYNDGDEVKTINWNKIYLLIRNADRRAKNDIYNFREEIRNKVNYATRKDAKSLIQTYTTNTSLVAILLATITFAAAFTLPGGYSSDAGSEGLPIMARKVAFQAFLIFDTSAMCASLAVAFICVIVRWMDFEFLLHYRSVTTKFMWFAYMATTLAFATGLYTVLEDRLPWLAIAICVLSVLLPILTMMVGGWPILKLRIQYGNSDFLDMV

SEQ ID NO: 6441 - protein, 245 aa, Zea mays
  VARIANT 205: note = Ancestral polymorphism is R, Derived polymorphism is W
  VARIANT 136: note = Ancestral polymorphism is R, Derived polymorphism is W
  VARIANT 131: note = Ancestral polymorphism is A, Derived polymorphism is T
  VARIANT 88..245: note = Derived polymorphism lacks residues 88 to 245
  VARIANT 59: note = Ancestral polymorphism is R, Derived polymorphism is G
  VARIANT 49: note = Ancestral polymorphism is G, Derived polymorphism is D
  VARIANT 24: note = Ancestral polymorphism is R, Derived polymorphism is W
  VARIANT 23: note = Ancestral polymorphism is S, Derived polymorphism is F
  VARIANT 1: note = Ancestral polymorphism is M, Derived polymorphism is I
MVFAMPETFLGHFPDVGASYFLSRLPGFYGEYVALTGARLDGAEMLACGLATHFVPSNRMLLLEESLKKVNTSNSFVVCSTIDQFSQQPSLKQKSSLNRLEIINKCFSKRTVEEIISSLEQVASNMADEWAAETIRYLKRASPTSLKITMRSMREGRTQTIGECLQREYRMVCHVIRGDFSRDLFEGCRAILVDKDKNPKWMPTRLEQVHDEAVEEYFSRIDDPRWEDLNLPVICSHGRIMDSKL

SEQ ID NO: 6442 - protein, 119 aa, Zea mays
  VARIANT 8: note = Ancestral polymorphism is I, Derived polymorphism is T
  VARIANT 16: note = Ancestral polymorphism is N, Derived polymorphism is I
  VARIANT 19: note = Ancestral polymorphism is V, Derived polymorphism is I
  VARIANT 29: note = Ancestral polymorphism is T, Derived polymorphism is P
  VARIANT 30: note = Ancestral polymorphism is D, Derived polymorphism is N
  VARIANT 37: note = Ancestral polymorphism is R, Derived polymorphism is H
  VARIANT 39..119: note = Derived polymorphism lacks residues 39 to 119
  VARIANT 41: note = Ancestral polymorphism is S, Derived polymorphism is L
  VARIANT 48: note = Ancestral polymorphism is E, Derived polymorphism is V
  VARIANT 63: note = Ancestral polymorphism is G, Derived polymorphism is D
  VARIANT 64: note = Ancestral polymorphism is D, Derived polymorphism is G
  VARIANT 67: note = Ancestral polymorphism is G, Derived polymorphism is A
MEESGFAITSINGRINRAVWGPLNRTIVTDREDATIRIWDLEEAQEDEERERVCQKQGHQGEGDHGGVVDAEDLKFELHFHPTDTIIGCYFELHCHQKKIPDHLGFGLIRSNSTQQYSS

SEQ ID NO: 6443 - protein, 142 aa, Zea mays
  VARIANT 75: note = Ancestral polymorphism is L, Derived polymorphism is P
  VARIANT 34: note = Ancestral polymorphism is I, Derived polymorphism is T
  VARIANT 22: note = Ancestral polymorphism is T, Derived polymorphism is A
  VARIANT 14: note = Ancestral polymorphism is I, Derived polymorphism is V
MDAGGAVGGNSEQIKRLLRCFTAYVKDDGVKLLIIKGSGRAFCAGGDVVACVQSINNGLLLWFHICSVGCVMCLLLKLDGWKWGDDFFRDQYFLNYIIATCIKPQISLLTGIVMGGGAGVSLHGRFRVATDNTVCAIETKLT

SEQ ID NO: 6444 - protein, 285 aa, Zea mays
  VARIANT 247: note = Ancestral polymorphism is R, Derived polymorphism is M
  VARIANT 240: note = Ancestral polymorphism is G, Derived polymorphism is C
  VARIANT 208: note = Ancestral polymorphism is Y, Derived polymorphism is H
  VARIANT 63: note = Ancestral polymorphism is E, Derived polymorphism is D
  VARIANT 55: note = Ancestral polymorphism is A, Derived polymorphism is G
  VARIANT 44: note = Ancestral polymorphism is L, Derived polymorphism is H
  VARIANT 41: note = Ancestral polymorphism is A, Derived polymorphism is S
  VARIANT 40: note = Ancestral polymorphism is T, Derived polymorphism is I
  VARIANT 28: note = Ancestral polymorphism is V, Derived polymorphism is D
  VARIANT 17: note = Ancestral polymorphism is G, Derived polymorphism is R
  VARIANT 11: note = Ancestral polymorphism is G, Derived polymorphism is R
  VARIANT 8: note = Ancestral polymorphism is L, Derived polymorphism is R
MFFIEVSLLTGIVMGGGAGVSLHGKFRVATNNTVFAMPETSLGLFPDVGASYFLARLPGFYGEYVALVGARLDGAEMLACGLATHFVPSNVRAFLINSKTYVWFTISLFFHSLVHLRLEIINKCFSKRTVEEIISSLEEVASNSASKWVAQTIKYLKKASPTSLKITLRSIREGRTQTVGECLQREYRMVCHVVRGDFSRDIFEVIKHGHHQHFALYFVVIVHQYDGGLFWGACSGCLQGWNKCMMMQLKSISLGLMIQSGKIWTYLSCIQMEELWSPSFEWSLY

SEQ ID NO: 6445 - protein, 52 aa, Zea mays
  VARIANT 33: note = Ancestral polymorphism is V, Derived polymorphism is A
  VARIANT 27: note = Ancestral polymorphism is Y, Derived polymorphism is F
  VARIANT 22: note = Ancestral polymorphism is S, Derived polymorphism is N
MDDVGGAAAGGGDSKQIKGLLNCFTAFVKDDGVKLLIMKVSRARTTDRLNCN

SEQ ID NO: 6446 - protein, 311 aa, Zea mays
  VARIANT 225..311: note = Derived polymorphism lacks residues 225 to 311
  VARIANT 188: note = Ancestral polymorphism is E, Derived polymorphism is K
  VARIANT 150: note = Ancestral polymorphism is G, Derived polymorphism is C
  VARIANT 107: note = Ancestral polymorphism is E, Derived polymorphism is K
  VARIANT 106: note = Ancestral polymorphism is A, Derived polymorphism is T
  VARIANT 77..311: note = Derived polymorphism lacks residues 77 to 311
MCPHVVLGQQSCGSRTTRTKNAITQAAATTALSTMRTASIRPSLNAQRNCVPMSSRDWRNWNAAQVMKTVEKQHDPQPIEAPINVPERADLDEARLAYVAAVRRGAEELARLVHGPAEAVEHVTAPEVLIDVVVVPLGGVRRLAVAAELGLGMNDVADGHDDAHKEGVLVVHGGVGGAARGGVDEALEDAVQLGRHVVVDVAEALGRETQVGSLAPDEKVQARVEQIGARVTLEDIDGGATAEEAAPEGVVAEQLLPDLACDAGLERVGEVSGGEAHLRIGEEERRICALARRRGTSARWRGGARGAPACS

SEQ ID NO: 6447 - protein, 377 aa, Zea mays
  VARIANT 336: note = Ancestral polymorphism is G, Derived polymorphism is C
  VARIANT 308..377: note = Derived polymorphism lacks residues 308 to 377
  VARIANT 281: note = Ancestral polymorphism is R, Derived polymorphism is W
  VARIANT 198..377: note = Derived polymorphism lacks residues 198 to 377
  VARIANT 193: note = Ancestral polymorphism is C, Derived polymorphism is F
  VARIANT 180: note = Ancestral polymorphism is S, Derived polymorphism is F
  VARIANT 173: note = Ancestral polymorphism is R, Derived polymorphism is I
  VARIANT 152: note = Ancestral polymorphism is A, Derived polymorphism is G
  VARIANT 129: note = Ancestral polymorphism is D, Derived polymorphism is Y
  VARIANT 128: note = Ancestral polymorphism is P, Derived polymorphism is S
  VARIANT 112: note = Ancestral polymorphism is T, Derived polymorphism is I
  VARIANT 110: note = Ancestral polymorphism is V, Derived polymorphism is D
  VARIANT 103: note = Ancestral polymorphism is S, Derived polymorphism is C
  VARIANT 101: note = Ancestral polymorphism is G, Derived polymorphism is S
  VARIANT 92: note = Ancestral polymorphism is T, Derived polymorphism is A
  VARIANT 87..377: note = Derived polymorphism lacks residues 87 to 377
  VARIANT 82: note = Ancestral polymorphism is T, Derived polymorphism is R
  VARIANT 79: note = Ancestral polymorphism is I, Derived polymorphism is T
  VARIANT 78..377: note = Derived polymorphism lacks residues 78 to 377
  VARIANT 68: note = Ancestral polymorphism is D, Derived polymorphism is N
  VARIANT 65: note = Ancestral polymorphism is W, Derived polymorphism is L
  VARIANT 54: note = Ancestral polymorphism is G, Derived polymorphism is A
  VARIANT 48: note = Ancestral polymorphism is G, Derived polymorphism is E
MDDVGGAAAGGGDSKQIKGLLSCFTAFVKDDGVKLLIMKGSGRAFCAGGDVVAGVQSINNEGWKWGADFFRDQYFLNYIIATCIKPQVSLLTGIVMGGGAGVSLHGKFRVATDNTVFAMPETSLGLFPDVGASYFLARLPGFYGEYVALVGARLDGAEMLACGLATHFVPSNRMLLLEESLKKVDTSNSFVVCSIIDQFCQQPSLKQKSSLNRLEIINKCFSNRTVEEIISSLEEVASNSASKWVAQTIQYLKKASPTSLKITLRSIREGRTQTVGECLQREYRMVCHVVRGDFSRDIFEVIKHGHHQHFALYFVVIVHQYDGGLFWGACSGCLQGWNKCMMMQLKSISLGLMIQSGKIWTYLSCVQMEELWSPSFE

SEQ ID NO: 6448 - protein, 572 aa, Zea mays
  VARIANT 78: note = Ancestral polymorphism is L, Derived polymorphism is P
MLLQAAIKGRAQELEQLVQDKPEVLYQTTEAGNTCLHIAALCGHGDFCSKVLALRLTQEPSLPSSLLSTANVDGETPLLVAVKSGRVSLALDLLEQHSRHELLDEHLLKRDRHGCNVLHHAIRNGYEGLALRLIGRQPALSESRNGRGESPMFIAVLKGFRSVYMALLSNERSQYSGANGSNALHAAVKYGDQDFVEQLVDKHPEKAKVLARQADSKRDTPMHLTAHFNRDRILTLMLRCDRSLGYELHEEHSTPLLSVAADRGHVAFARALLEHCPDAPYHDEQGRTCLHEAVDKDRAEFVEFILDDNSKLRKLVNMLDSVDDSALHLAVQKNNPRMVRALLDHPDIDITVVNQRNCTAIWNLYHDGDYVKTINWNKICCLILNADRRAETDIYNFQEEIRNKVIDTTRKDAKSLIQTYTSNTSLVAILIATITFAAAFTLPGGYSSDAGSEGLPIMARKVAFQAFLIFDTSAMCASLVVAFICVIARWMDFEFLLHYRSVTTKLMWFAYMATTLAFATGLYTVLEDRLPWLAIAICVLSVLLPVLTMLVGKWPILKLRIRYGRSDFLDMV

SEQ ID NO: 6449 - protein, 190 aa, Zea mays
  VARIANT 13: note = Ancestral polymorphism is L, Derived polymorphism is H
  VARIANT 15: note = Ancestral polymorphism is P, Derived polymorphism is L
  VARIANT 28: note = Ancestral polymorphism is G, Derived polymorphism is E
  VARIANT 30: note = Ancestral polymorphism is Y, Derived polymorphism is F
  VARIANT 36: note = Ancestral polymorphism is P, Derived polymorphism is S
  VARIANT 37: note = Ancestral polymorphism is F, Derived polymorphism is I
  VARIANT 40: note = Ancestral polymorphism is Q, Derived polymorphism is H
  VARIANT 55: note = Ancestral polymorphism is R, Derived polymorphism is I
  VARIANT 81..190: note = Derived polymorphism lacks residues 81 to 190
MQVFAMPETSLGLFPDVGASYFLSRLPGFYGSLIPPIFIQFKYMLEIINKCFSKRTVEEIISSLEEVASISASKWAAQTIQYMKKASPTSLKITSRSIREGRTQTIGECLQREYRMVCHVVRGDFSRDIFEGCRAILVDKDKNPKWMPPRLEQVHDDAVEEYFSRVDDPEWEDLDLPVMCSNGRIMESKL

SEQ ID NO: 6450 - protein, 93 aa, Zea mays
  VARIANT 72..93: note = Ancestral polymorphism lacks residues 72 to 93
  VARIANT 67..93: note = Derived polymorphism lacks residues 67 to 93
  VARIANT 17: note = Ancestral polymorphism is S, Derived polymorphism is N
  VARIANT 16: note = Ancestral polymorphism is L, Derived polymorphism is R
MVKLKESMRLTLELYLSVACQSMLAGQTSNTWKMLHSKSMSRLVGVTRFLSEPLHIMVYPLSLKSQQSSLAYMSHTPHQERTLHHPLLLLVSS

SEQ ID NO: 6451 - protein, 343 aa, Zea mays
  VARIANT 294..343: note = Derived polymorphism lacks residues 294 to 343
  VARIANT 194: note = Ancestral polymorphism is P, Derived polymorphism is L
  VARIANT 70..343: note = Derived polymorphism lacks residues 70 to 343
  VARIANT 68: note = Ancestral polymorphism is C, Derived polymorphism is Y
  VARIANT 57..343: note = Derived polymorphism lacks residues 57 to 343
MIVVEVVLALLLSYGAGHADCATTTIPQNSNSTADMLSLLDFRKTISSDPGGFLTSWNTNNSSAADYCGWNGVTCSRKHPGRVIELNLSSQSLQGRISSSLGNLTFLRILDLSSNMLAGPIPPNIGSLFHLKILYLDSNNFTGAIPSSLGNISKLEQLVLQDNQLIGTIPQDLGNLSNVNRLLLAHNMLSGSIPTIILNQRNLMILDLGANYLRMMLPSNIGHTLPQIGALSLYNNMFYGPIPASLGNASILVILDLTANSFTGHVPSSLGNLTYLYFLQLEQNNLEANDNEGWEFIDALGKWQPQPPPSDTTSLLLRTGQPQPPPSDTTSRATAVSPAPRAP

SEQ ID NO: 6452 - protein, 380 aa, Zea mays
  VARIANT 360: note = Ancestral polymorphism is R, Derived polymorphism is I
  VARIANT 247..380: note = Derived polymorphism lacks residues 247 to 380
  VARIANT 201..380: note = Derived polymorphism lacks residues 201 to 380
  VARIANT 100..380: note = Derived polymorphism lacks residues 100 to 380
  VARIANT 96..380: note = Derived polymorphism lacks residues 96 to 380
  VARIANT 93..380: note = Derived polymorphism lacks residues 93 to 380
  VARIANT 62: note = Ancestral polymorphism is C, Derived polymorphism is F
  VARIANT 46..380: note = Derived polymorphism lacks residues 46 to 380
MAAAGFNSSSSTRWFPAGVIPSSVASASVSNAAAPQAIINSDDVAWAHCFCPDANKKHWLKCKYCDKLCKAGITRIKWHLAGINLSNKVQTTLSTQKREERRDKACEYICQFFYEASIAHNTVTLPSFALMLEAIGQFGKAVNFFEPLANVLRRLDSDVPAMGFFHGLMLEAKKEISERFDNDESRYKVAWDIIDKRWDSKLKTPLHLAGYYLNPYFYYPKKSEIEHDGSFRAGVINCITKMIGDEETQDKIIEELYISSACERNWSVFEQVHTKRRNRLLHDRMRDLVFVKFNSKLRGKKERIDRDPLEREVDDVVGDDDNEFITGIVPLPNDVVEPAQDGRSQGEQTSQAQVQVQAKRKRSMKPRKKLRSLQSLMRDV

SEQ ID NO: 6453 - protein, 493 aa, Zea mays
  VARIANT 23: note = Ancestral polymorphism is A, Derived polymorphism is V
MMAAAAWLCGLLSLLALAGAASAADGAEGEWEPLIRMPTAKGSDAASAPAAEDDEVGTRWAVLVAGSFGYGNYRHQADVCHAYQILQKGGVKKENIVVFMYDDIAHNILNPRPGVIINHPKGANVYDGVPKDYTGDQVTTENFFAVLLGNRSATTGGSKKVIDSKPNDHIFIYYSDHGGPGVLGMPNLPYLYAGDFIKVLKKKHASNSYSKMVIYVEACESGSIFEGLMPEDLNIYVTTASNPVENSWGTYCPGMEPSPPPEYITCLGDLYSVSWMEDSETHNLKKETIKDQYEVVKTRTSNSNKYKEGSHVMEYGDKTFKDEKLSFYQGFDPANANIANMLLWPGPKGAVNQRDADLLFMWKRYEQLNGGTEEKLRALIEIKETVQHRKHLDSSIDFVGRLVFGFEKGPSMLEAVRTSGQPLVDDWDCLKRMVRIFESQCGSLTQYGMKYMRAFANICNSGISEMKMRESSISACSSYNSARWSPMARGHSA

SEQ ID NO: 6454 - protein, 472 aa, Zea mays
  VARIANT 208: note = Ancestral polymorphism is R, Derived polymorphism is Q
  VARIANT 80..472: note = Derived polymorphism lacks residues 80 to 472
  VARIANT 45..472: note = Derived polymorphism lacks residues 45 to 472
MLLRPFLRRGAAAAAAAVSSNGARAIALPDPPAALASLLLASRSYAKAKGGGKPASSTSNRGKVRAKDPRGVASADDAAGAEFSAGGGGDDIDTEFELPTDPLPPTYDPALDVGPGGRPLFAFTDTFGSFAHRDANIYVDFTLDEWNAMLPEGLPAGMMKEFQETRRCAVMVRKSFLDLRDNFRRIVDPAVTTNLKDTRKQIVLDGPRSCGKSIALAMLVHWARTEGWLVFYVPQGKDWTHGGFFYRNTYSDFFDTPVQAANILQNFLKYNETRLQQLPCQIFERIPLGEGAGVGMMKGVDTMEMPEGSTLYDLIQTGITQTHASVGVMVRLRKELSLVKDVPVLFAIDQYNSWFTFSDFQEPVTVRSCRSIHAKELTMVNAYRSMLHNDMMVGAFSHSTAVGKLRQELPDVPSDARLIFPRYTLDEAETACHYYMRQKIIRRENFSEEKWKKIYYLSNGNGAEMRWLAAFV

SEQ ID NO: 6455 - protein, 296 aa, Zea mays
  VARIANT 72: note = Ancestral polymorphism is N, Derived polymorphism is K
MHRPRSHRLCRSRVAAAVSAAIIIGLGAAGVGEAATGTFIYAGCSPSKYQPGTPFEANLESLLASMAGAAPKAGYSSFTAGAGGVGNGTTAYGLYQCRGDLAGADCAACVRDALGQLGQVCAAAYAASLQLEGCYVRYDGTDFLGTPDAAMVYRKCSTSSSSDGEFLRDRDAVLAGDLLQGGAANNGSSNGYKAGSSGSVQGVAQCLGDLAAPDCAACLAQAVGQLKGTCGTALAADVYLAQCYVRYWADGYYFRPTQDYSQDDVGRTVAIIVGILAGLAIFVVFISFLRKACMIR

SEQ ID NO: 6456 - protein, 152 aa, Zea mays
  VARIANT 34: note = Ancestral polymorphism is R, Derived polymorphism is L
  VARIANT 36: note = Ancestral polymorphism is R, Derived polymorphism is W
  VARIANT 69..152: note = Derived polymorphism lacks residues 69 to 152
  VARIANT 84..152: note = Derived polymorphism lacks residues 84 to 152
  VARIANT 93..152: note = Derived polymorphism lacks residues 93 to 152
MAELQDDHCPEGYDLDSRAGAVADAEPVDIEIRRSRAGLGAEEPVLAPTSALAPVEKPREVSKRERRQQEEMAVELRARKSTQWKGRRVVWDYRKAERALAQLENREVEPQAPEGEEKEKGAEEEEDVITEESAVNSETLEDTIQKGVNRRH

SEQ ID NO: 6457 - protein, 920 aa, Zea mays
  VARIANT 203: note = Ancestral polymorphism is L, Derived polymorphism is P
  VARIANT 185..920: note = Derived polymorphism lacks residues 185 to 920
MAQPLVVKKDDDLDEEEYYSPFLGIEKGAVLQEARVFHDPQLDARRCCQVITKLLYLLNQGDTFTKVEATEVFFATTKLFQSKDVGLRRMVYLMIKELSPSADEVIIVTSSLMKDMNSKTDMYRANAIRVLCRIIDSTLLTQIERYLKQAIVDKNPVVASAALVSGIYLLQTSPEVVKRWSNEVQEAVQSRAALVQFHALALLHQIRQNDRLAVSKLVTSLTRGSVRSPLAQCLLIRYTSQVIRESGVNQGGDRPFFDFLESCLRNKAEMVILEAARAITELNGVTSRELTPAITVLQLFLSSSKPVLRFAAVRTLNKVASTHPLAVTNCNIDMESLISDQNRSIATLAITTLLKTGNESSVDRLMKQMTNFMSDIADEFKIVVVEAIRSLCLKFPLKYRSLMNFLSNILREEGGFEYKKAIVDSIIILIRDIPDAKESGLFHLCEFIEDCEFTYLSTQILHFLGNEGPKTSDPSKYIRYIYNRVILENATVRASAVSTLAKFGALVDSLKVLACFFFTSMMSLLCNVPDLSNVHCTCNLFIQPRIFVLLRRCLFDGDDEVRDRATLYLKLLGGEATVGETEKDVNEFLFGSLDVPLVNMETSLRNYEPSDVPFDISSVPKETKSQPLAEKKSTGKKSAGPASAVSDPVSTVDASYEKLLSSIPEFADFGKLFKSSAPVELTEAETEYSVNVVKHIFDGHVVLQYNCTNTIPEQLLEQVIVFVDASEADEFLEVASKPLESLPYDSPGQTFVAFEKPEGVIATGKFSNILKFIVKEVDPSTGETEDDGVEDEYQLEDLEIVSADYMLKVGVSNFRNAWENMDPETERVDEYGLGVRESLAEAVSAVISILGMQPCEGTDVVPSNSRSHTCLLSGVFIGNVKVLVRLSFGISAPKEVAMKLAVRSDDPEISDKIHEIVANG

SEQ ID NO: 6458 - protein, 141 aa, Zea mays
  VARIANT 117: note = Ancestral polymorphism is T, Derived polymorphism is K
MSKLQRSSVSFRRQGSSGRIWDDPLRGLDLKGLSSSTTTTTTTPKAAPLHPDASLLAGDPSPRVVSRSLLMRHAGAGASSAGIIVESPDVVASASPSDAASVGVTRADGGERQERPKKLRRRISSAFCACMGHPPASHAQQ

SEQ ID NO: 6459 - protein, 230 aa, Zea mays
  VARIANT 41..230: note = Derived polymorphism lacks residues 41 to 230
  VARIANT 145: note = Ancestral polymorphism is E, Derived polymorphism is G
MSSSGSKAAARLNASADAATGSSNASAAAVLVAQSEESSSYAGADELEEAEVSGSSGCARSPPPPPPYDVFINHRGADTRHTVARLLHDRLLQASGGRVRTFLDSVSMRPGDRLVERINQGMGQCKVAVAIFSERYLDSEFCLHELAALVEARKAIVPIFYGVKPSALVLPQAVVDAHAPRDVERLRAALRQAKYTVGLAYDPATGDLAELVSAAAKTVMERIEQIDSMR

SEQ ID NO: 6460 - protein, 178 aa, Zea mays
  VARIANT 128: note = Ancestral polymorphism is F, Derived polymorphism is L
  VARIANT 99: note = Ancestral polymorphism is S, Derived polymorphism is C
  VARIANT 40: note = Ancestral polymorphism is Q, Derived polymorphism is K
  VARIANT 15: note = Ancestral polymorphism is N, Derived polymorphism is T
MLRRSRHGGVRLGRNLLGLWRRALCGRRRRRGGYCRLQQQQQPTCAGSGCTPGRGATARKLAPVLRWGRSLARRLRLGWRAAGGGHRMLPDGDGEPAVSTPKGQVAVYVGGEGEASQSLRYVVPVVYFNHPTFGELLREAEEEFGFQHPGVISIPCPAARFERAAALAAAAKKGFGRW

SEQ ID NO: 6461 - protein, 649 aa, Zea mays
  VARIANT 203..649: note = Derived polymorphism lacks residues 203 to 649
  VARIANT 249..649: note = Derived polymorphism lacks residues 249 to 649
  VARIANT 319: note = Ancestral polymorphism is R, Derived polymorphism is T
MRKAASTAMAGAGATFRRRAMEGLATVLLLYALLVLALESPLVSTSPFGGAAGGTARKLHLSFGAGERAAPVPGASAHGQDHRLSRFASGLDVRLLDSARSGALRRSIADAVAAGARAFSDLEALDPAAVAAPSGESDAARCPHSIALTAEELGARGRVVELPCGLALGSHITVAATPRAPHEERNPAIAVLRDGERHAMVSQFMVELQGLRAVDGEDPPRVLHFNPRLRGDWSGHPVIEQNTCYRMSWGAAQRCDGWRSRPDEETVDGLVKCEKWIRDDDDRLEKSKTTSKTAWWLNRLIGQKEEVNFGWPFPFVEGRLFVLTLSAGLEGYHVSVDGRHVTSFPYRTGFVLEDATGLSLNGDLDVHSVIAGSLPTTHPSFAPHNYLEFSNVWQAPLLPDEPVEIFIGILSAANHFAERMGVRKTWMSAVHKSPNMVARFFVALHGRMEVNAELKKEAEFFRDIVFVPFLDNYDLVVMKTLAICEYGVHVVSAKYVMKCDDDTFVRLDSVVTEIKKVPGGRSLYMGSMNIQHKPLRHGKWAVTYEEWPQEVYPLYANGPGYVISSDIADFIMSEFMKQKLMLFKMEDVSLGVWVEQFNKTRPVEYVHSDKFCPNGCVPDYYTAHYQSPRLMLCMWQKLLEGRPDCCNAR

SEQ ID NO: 6462 - protein, 251 aa, Zea mays
  VARIANT 11: note = Ancestral polymorphism is L, Derived polymorphism is F
MDPASSVAAEFWRPPYHHLRASSVVTAAARSGGGSSSRRRPRRDAAASSEEEPSKLVSTSGTAASSSAGCQDSADPEAKRLKQIAPSEKNDRRTEAETNSGNASKSADKKPAPKEPPKDYIHVRARRGQATDSHSLAERARREKISERMKVLQDIVPGCNKVIGKASVLDEIINYIQSLQRQVEFLSMKLEAINAHVSNATVAFPTKDFGVAPYNTAPSLTLDPQTPREYAQGSMSDWLHMQVGNAYERVT

SEQ ID NO: 6463 - protein, 579 aa, Zea mays
  VARIANT 129..579: note = Derived polymorphism lacks residues 129 to 579
  VARIANT 161..579: note = Derived polymorphism lacks residues 161 to 579
  VARIANT 242..579: note = Derived polymorphism lacks residues 242 to 579
  VARIANT 355: note = Ancestral polymorphism is A, Derived polymorphism is D
  VARIANT 389: note = Ancestral polymorphism is R, Derived polymorphism is C
  VARIANT 472..579: note = Derived polymorphism lacks residues 472 to 579
MALVSPAPAPSAPDAPSPPQHQQAPVPIPGPAANSQAAVAAASSSPGASASIPSLSPPVSHATKGRSKSVRWGDLSPASSDGATSFDSRPSFKDVLVRTANPSPPGRVAAQGSVPAAGKSSALGKVYRQPHPLSTKRRSPKQATQPTPAIRPAPGLSDHGWTTVESKKGRSRRLKASWLPGRVPADLVGRCFNCLGCDHRAADCGSEPRCFLCSALGHKSSSCPKASVWRRLGCPRPVKSVWERLSPAVEGRVQRPARRRPVWQRIAPPEVIPVVPSVPVGNMLGVSAAQGNGGPASSRRKRWRKKKRKEREDKPALEISAPPPPEQMLPASDETACVIDWSVQMSIAEDNLKTAGVITVVSSRDVSADEIALVLAPRLEMEVGGLVLRQFSQSSFLAVLPNQVQLDTLVDRFHIIREENFMLSSRRWTRFRGAVGNSLKHLVELEIRGLSLHAWETSVVQHLINLHACISQVLPDTLEIRNLEVFRCLAWCCDPEHIPSKKDLWITEPDQASVAEGKKALVYPVQIRWGPADLNLIPGAPQPPVGAGDQDKPDTPLHGEDVVTTLHPLNMLQPLKTPT

SEQ ID NO: 6464 - protein, 449 aa, Zea mays
  VARIANT 155: note = Ancestral polymorphism is Y, Derived polymorphism is F
MEAADHGKLFVGGISWETSEDRLREYFGRFGEVTEAVIMRDRSTGRARGFGFVVFADAAVAERVTTEKHMIDGRMVEAKKAVPRDDHSIVTKSNASSIGSPGPGRTRKIFVGGLPSNVTEADFRRYFEQFGVITDVVVMYDHNTQRPRGFGFITYDSEDAVDKALHKSFHELNGKMVEVKRAVPKEQSPGPAARSPVGVGQNYAMNRVHSFLNGFNQGYNPNPIGGYGIRVDGRYGLISGARNGFSSFGPGYGMGMNVEGGLGGTFGASSGFISNSNGRQMGSYFNASSNRLGSPIGYLGLNDVPGSMLSSMSRNVWGNGSLNYPSNPTNMSAFASPRNGGQVSLPSDNWGGLPSAHGMDNISSLGSGNLGRGTGDNNFGLPSGSYGRNNSTGTIGEPFSAAGNTYEVNNRDTYGSSSIYGGTAWRFASSEVDMPSFVHDIGNVDPTIK

SEQ ID NO: 6465 - protein, 548 aa, Zea mays
  VARIANT 132..548: note = Derived polymorphism lacks residues 132 to 548
MPPLPAPASSIPSAPPRGAATDAARSSVNLLRSLARARRADLSHRALLLFRTLHASPSPPPPRYSLPAALSAAAFLAALPEGRQLHALAAKLALAPAHTVVANSLVHFYASCGRPGAALAVFRRVPDRSLVSWNTAVDALAGNGDHLAALDLFREMQRDRPDLAPDAYTVQSVLGACAATGALSLGLYAHALLLRELGGASAVSRDVLINNSLVDLYGKCGAVELARQVFDRMSERDLASWNAMVLALANHGRVQDSLDLFDRMTRVEGLVPNAITFVAVLSACNHGGLVDEGRRYFAAMVSEHGIRPRIEHYGCMVDILARAGFIEEALDVVAGMNCRPDSIIWRSLLDACCKRNAGLELSEAMAKLALDVPDDAVSGVYVLLSRVYASAQRWNDVGMIRQLMSQEGFKKEPGFSSIEMDGSVHQFVAGDTSHPQSEEIYVKLDEIQQRLTSAGYKPDLSEAPMVADIDRTKGATLRLHSERLAISFGLLNATPGAPIRILKNLRVCKDCHTISKLISKLYNVEIIVRDRIRFHHFKDGSCSCKDYW

SEQ ID NO: 6466 - protein, 662 aa, Zea mays
  VARIANT 227: note = Ancestral polymorphism is V, Derived polymorphism is A
MGTTEDKASNLDAVLKEAVDLENIAIQEVFESLRCSPQGLSTEQAEQRLAIFGPNKLEEKQESKFLKFLGFMWNPLSWVMEAAAIMAIALANGGNKPPDWQDFVGIITLLIINSTISFIEENNAGNAAAALMARLAPKAKLLTVEVEQILHLAHNKTDIETRVRAVIDNFAERGLRALGVAYQEVPDGRKESPGGPWEFMGLLPLFDPPRKDSADTISKALDLGVNVKMITGDQLAIGKETARRLGMGTNMYPSSALLEQNKDESIASLPIDELIETADGFAGVFPEHKYEIVKRLQARKHICGMTGDGVNDAPALKKADIGIAVADSTDAARSASDIVLTEVGLSVIISAVLTSRAIFQRMKNYTIYAVSITIRIVLGFMLLALIWKFDFPPFMVLIIAILNDGTIMTISKDRVKPSPQPDSWKLAEIFATGVVLGTYLAMMTVIFFWAAYKTDFFPRLFHVESLAHDDFQMLASAVYLQVSTISQALIFVTRSRSWSFVERPGFLLVSAFLVAQLIATLIAVYANWAFAAIKGIGWGWAGVIWLYNIVCYLPLDIIKFLIRYALSGRAWNLVLEQRIAFTSKKNFGAEERERRWAHAQRSLHGLELQPPEAASMFENKTSFSEVNQLAEEARRRAEMARSDCCLSSISTERGDQTLHCPV

SEQ ID NO: 6467 - protein, 1569 aa, Zea mays
  VARIANT 61..1569: note = Derived polymorphism lacks residues 61 to 1569
  VARIANT 34..1569: note = Derived polymorphism lacks residues 34 to 1569
MDNMLGDLYKPDDGDDFYSKKYRDELENVSFQLLEEITDGFSESRELGRGSFGVVYRGLTKNGDYVAVKKLHANVTDLNHKQFQNELYNLAKLKHENIVRIYGYCYEIKKTFMEHDRRKILVEEPRIALCLEYLHNGSLQDHISDEFSGLDWDTRYRIMEGVCRGLYHIHRNLKKPLYHLDLKPANILLSKTMQPKLADFGLSRIFRNEELTRTTKSPLGTLGYQPPEYIERGEVSEKFDIFSLGVVMIHLVSGRGGFERYACMHSEEFINQVKTNWRKRFKQLQRNSLRKVKVYCHEVETCTRIALNCVEKDTQKRPDIDMVINNLKDRKTHRFKSTWTSSFRQDGRMYGSYMPYSNRYLNKLMSGSICTETKFYRREKLPNVGEEFIIGRKEEKQKIVASLLQSMTQHITILPIYGIGGIGKTTIAKLIYYDTNFNSYSRVWVYVSPKFDLKKVGNTVISQLSSEESQINETQMIHSCLMKLLSGKKVLIVLDDLWEDSLFQLNNLKDMLSYGDSINVIVIVTTRSKHVAENVSTNVEPHKIEPLTDSMCWDIMKQRSNFEAKNHKEHLAHIGMEIAVKCGGVALAAQSLGFMLKPMELCDEWIEVRDSDIWNKSISKDANSPNHVLASLMLSCTKMDRCLILCFIYCAIFPKGHHIVKEELIQQWISLGFIQPTKLHSNMQICEKYILQLIGLSFIQDTMSPKYSQAYKKGLTLFTMHDLVHDLARLLTAGEILDASNIGTMDARHVAREPATRSLFHGYMHAKSNFRSFIRTNSNIYTYRRRREPEGSGQQYKYALLTNCHKPLEVLTDSPNMIRALHFRDCHGSKGLKDYAFLPAKLSLKVLDLSGCNIAYLPASIGELAVLRYLNAPEIKNEMLPDSLSKLSKLIYLNLSGSNISALPDSIGDIEGLMHLDISNCVLLCELPESFVDLKNLVYLDLSHCQIKITARVFSGLTNIQHLNLSKSLIHGGDGLEGLQEAVGGLTELRYLNLSGCFENLRPDEVLSFVDRICRLTNLVHLDLSFNLGLVSVPESIGSLRKLHTLDLLCCRNLVTLPKCMFNMDSMKMLNVTCCPHLDQSTLPRYRYFTLPYFEVHADDGESTSNIGLLRYVNPTHELYISGLDNTISAEEVDSINLSQKQGIQSLSLSWTRDAQRSVEDMEVLGKLVPPDTLKCFELRGYDSMSFPTWVMGITLYLPRLTKVVLWELRKCNSLPPLGQLPTLQKLVIGGMDSTLTVDEGFCCAGPGAFPLLQELQLCQMENLEVWNTTYSCGQSNEDVQEFMFPNLRELLIRDCPKLRLKPCPPKTVGWKIENSDNVLSSWDEEGEIDLAALFPSRKEFKKLWEGKTKVPAACSAQFEKCRKPGASYNACPERVEVKSSKLPLGKWRLFRHLLPTYDLRISCCTYATSGSSQEIIQGLAFIESLCLEDDAQSELPNWLGELTSLETLEISKYPGLEAPLDGMKQLAHLRKLSLINCRSMSALPQWLGELISLKELIISEWPNLSDFPESMQLLTSLKMLRLERCPRITALPGWLGDLASLKILVISNCKGIVSLPDSIQKITRLVRV

SEQ ID NO: 6468 - protein, 547 aa, Zea mays
  VARIANT 117..547: note = Derived polymorphism lacks residues 117 to 547
  VARIANT 177: note = Ancestral polymorphism is W, Derived polymorphism is R
MDKMAVGTKAMFAPYISDVLRLQVMSVLYVGIPVETIMQRHTGMVEKQGGPSNRDDLLTHRYVRILMERKIRRSVYELDDDDAISIDLWVENNQDCVFFYEDFSDTDTFVLGIQTDWQLQQMIQFGSHTLMASDSKFGTNKLKYPVHSILVFDQHKNAIPVAWIITPSFAHGEIYKWMGALYDRAHTKDPTWQLDGFIIVIDDPLAKVRTIRGSLPLPCADQFMAYPARLAGSGGVGLFEAFLQDFVDCAGFLEYFKAIWLPRFNPLLLTVKYLPGAWITVLNTTPLASAQVASAIESYHHLLKLRLLNEADESVYWRADWLVDKLGTKVHSYYWLDEFSGKNSFSRYWRSEWSSGPNPWSQGTQIPDSDVVIEGNHASVVSQTTKEKSHAVLDPCSEFALCDCGWSMEGNLCKHVLKSAKIAVLHAVNGSSSITPAFQDPQPTSRPREAGIEEADSENGVCASQSQPGAGDDEDHDVATGKRRKSGNAPTGKRRCFRISGQSGSQEMQVRRRKLPGTMERPPRKRAVGLVKVGGQEKLLLTMKRFV

SEQ ID NO: 6469 - protein, 420 aa, Zea mays
  VARIANT 149: note = Ancestral polymorphism is V, Derived polymorphism is E
MADLTDIGCCCCFSFLRKPSVPVCEHQDADGMLTEDLLKRQSAEDHDGSFYTGDDPGDDLDRSFYNGDDHDRSFYDRDDSDYLDGSDDGPSRKSSEDIIQLRAQNGFACREVPVKETKKVFRSEDENGNKMVNQYVHLGKIGSGSYGKVVLYRNIKDGKLYAVKVLNKPYMMKVHVVHTKTAMTDVLREVSIMKMLNHPNIVNLVEVIDDPNMDKFYMVLEYVEGKMVCDNGLEEATARFFLRDIISGLLYLHSHNVIHGDIKPDNLLVTSTGNVKIGDFSVSQVFEDDDDMLWRSPGTPVFTAPECCQGSAYHGRASDTWAVGVTLYCMVSGHYPFLGDTLQETYDKIANDPVELPGDVNPQLADLLLRLLCKDPGDRITLRAAAEHPWVAGDEGPVPEFICRCGFGRRKRNDVREEVQ

SEQ ID NO: 6470 - protein, 455 aa, Zea mays
  VARIANT 232: note = Ancestral polymorphism is P, Derived polymorphism is R
  VARIANT 248: note = Ancestral polymorphism is A, Derived polymorphism is V
  VARIANT 286: note = Ancestral polymorphism is E, Derived polymorphism is V
  VARIANT 340: note = Ancestral polymorphism is D, Derived polymorphism is Y
MTLDFTVRRREPELVGPARPTPRETKRLSDIEDQVGLRWHVPFVLFYRGRGGGASADDGDPAAVVRRALGEALVPYYPLAGRLREVEGRKLVVDCTGEGVLFVEAEADARLAELEAAGLRPPFPCMDQLLFDVDGSGGVLNSPLLLIQVTRLRCGGFVFALRLNHTMCDAAGIVQFMRAVGELARGLTEPTATVATPVWCREILDARSPPRPSFPHREYDPVPPPPPSFPPPGDMVMRTFTFGPGHVAAIKKSLSAQRGSGGGGGKATTFEALAAFVWRARTAALEIPADEDARLVIAASVRGVRDLGLPAGYYGNACVYPAAVAAAGALRGGGGGTLGDAVELVREAKRSAVSAEYVRSTADLMALRERPSLATANMLIVSDNRHAGFRHVDFGWGEPVYGGPAAALFVLTFIVTITNGDGEDAIAVPIVLPRSAMDRFASEVKMLCACVEEEL

SEQ ID NO: 6471 - protein, 828 aa, Zea mays
  VARIANT 328..828: note = Derived polymorphism lacks residues 328 to 828
  VARIANT 279..828: note = Derived polymorphism lacks residues 279 to 828
  VARIANT 63..828: note = Derived polymorphism lacks residues 63 to 828
MTRWDEILTLPVQNPPSLEFSAADISWSMVEGWRDSMDRLALIPYSRVNDFVRGESNNKDCPSRFHVEARRRRPPTMNCKPKVDGILEYILYWCSFGPDDYRKGGNVRPSRPIAEKRKTPAGRPNTKRGCVCHFIVKRLIVEPSVALVIYNHNKHVDKKGMPCHGSMDKMAVGTKAMFAPYISDELRLQVMSLLYVGIPVETIMQRHTEMVEKQGGPSNRDDLLTHRYVRRLERKIRRSVYELDDDDAISIGLWVENNQDCVFFYEDFSDTDTFVLGIQTDWQLQQMIQFGSHSLMASDSKFGTNKLKYPVHSILVFDQHKNAIPVAWIITPNFAHGEIYKWVGALYDRAHTKDPTWQLGGFIIDGPLTDVRTIREVFHCPVLISLWRIRHAWHKNLVNKCSDIEKRSTMAKRLGDAISIICRGTGDVELFEAFLQDFVECAGFLDYFKAVWLPRLGAWITVLKATALASAQVASAIESYHHLLKLRLLNEADESVYWRADWLVDKLGTKVHSYYWLDEFSGKNSFSRYWRSEWSSGPNPWCQGMQIPDSDVVIEGNYASVVSQKNKEKSHVVLNPGSEFALCDCSWSMKGNLCKHVIKSAKVCRDRGLALPSLAMFHYYQALANLVHCPPSDTLISDHAMALAVSVKTQLDAVLCAVNGSSSIRPGFQDPQSTSKTREAEIEEANSENGVCTSQPQPGAGDDEDQAIRTGKRRKLGDASGDTEDGSIYQDSLARKKCKSGEASGDDEEASTEEGSRACESRKPGEASTNNEEVSIGQGSRDHEKRKSGEPPGNEGTSATQATEPSETETSQATNGLVRSLLPSSECT

SEQ ID NO: 6472 - protein, 696 aa, Zea mays
  VARIANT 352..696: note = Derived polymorphism lacks residues 352 to 696
MLRALNPSPSQLRARPACRAAPRRRPRGAWARPRAAAVPQQPPVRRPSGDRLRAPSRGAAAADQLPAPDVGAAAPGARGELEAFLEIVPARMRRGLARHQELRDLVEVIMDLGRRPIARFPSGDWAISDQPVTADDLRQAVAKVGDFSEDNRSGINHSLHRISAIRNRKAQIIGLTCRVGRAISGSAEMIRDLVVSGGSILVIGPPGVGKTTLIREIARILADEGKKRVIIVDTSNEIGGDGDVPHSGIGRARRMQVPKVTMQHNVMIEAVENHMPEVIVIDEIGTELEAMAATTIAQRGVQLVGTAHGVTIESIIKNPCLQMLVGGIESVTLGDEEAKKRKVQKTILERKGPPTFLCAVEMISKTECRVHHRLDATVDAILAGKPPKFEARKMHNKSTEFEMPLVIPDREYEIESLPLYQEVMVTRSLSSDGNFSDDFAASRQTKSKSMPSEDNFGDNFVYTRKAKGNKPVHGKSLVQVYTYQISEADILQVATMMGFDDELDVTDDIGAADVILASSSEMKQNPWIHNVAKYHKLPIFVVKTNTMAQIVKAIRMIVGRDNTSSSKQPEVMEGEIEIEDDAPKRKPSLEEIDALEEARLAIEYIVIPGGEPVELLPRCSEIVARQLELVESYQLLAETFGSDSNSRLQILPMKITKRGSSKDNGASKPTKQTGSDLIVSENGGGSSFSRLPFLPK

SEQ ID NO: 6473 - protein, 299 aa, Zea mays
  VARIANT 156..299: note = Derived polymorphism lacks residues 156 to 299
MAEHLASIFGTEKDRVNCPFYFKIGACRHGDRCSRLHNRPTISPTLVLANMYQRPDMITPGVDAQGQPIDPEKMQEHFEDFYEDIYEELGKFGEIENLNVCDNLADHMIGNVYVQFREEEQAAAAYNALQGRFYSGRPIIVEYSPVTDFREATCRQFEENSCNRGGYCNFMHVKQIGRDLRRKLYGRSASRRYHGRSRSRSPPPQRRGHRDRDDYRGGGGGGRGRGSRYDRYDDGAGRGGRHDRYDDGAGRGGRHDRYDDGGRRRHGSPPRRARSPVRESSEERRAKIEQWNREREGKQ

SEQ ID NO: 6474 - protein, 493 aa, Zea mays
  VARIANT 14: note = Ancestral polymorphism is L, Derived polymorphism is V
MESKNAESIRNLLLKIVFPLAFPLAGAFICDLITNRASSHSSHTGSSDSSFQLEQSSGSICGEEEEEMEPKPTRGAQQKLARTESACSAAGRLLMSELARQASNAEEIMVVEAATEGPREAAAKKQVQDDQGIMEADEIASLKLTVSALEDRATAIEAQFHEYCDVKEQESAYQKMQIMCLGMKLELLESHNQRLEAAAAEIRAAAGEFAAMRGRLDRLQGKLKKVSKRSERGSDAVVGEKIAALDAKQAQMARRCEEFERAMGEMKQLTLQLVEQKGANNENVEVAVERSLRNLSSGRDLVDGLEALRDRWAAGMEEMIYLGWITAWLQHDLMLVDDDDGYGGAVLGPGSTTYGGGHGDDDEDVRDGVAPEEEEEEGEKKKKKKEKKKGDTMVASVPPSNQVELCKAESVSSSSGSGSAPRRSVEMEPPSAPCMGFAAAAAGGRGRDCGGGWSIGRPRLLRKLRGWAAGGGTKAGGSKTTRCRIAGPCCQKE

SEQ ID NO: 6475 - protein, 399 aa, Zea mays
  VARIANT 138: note = Ancestral polymorphism is V, Derived polymorphism is D
  VARIANT 259: note = Ancestral polymorphism is I, Derived polymorphism is N
  VARIANT 264: note = Ancestral polymorphism is V, Derived polymorphism is A
MEDRSSKQAGAGLVAHLHDDLLVEILSRVPAKSVCRFKCVSKAWLDLIAGPDHRKKLRQPMQGLIYMNPEKDRHSFSFLDLPLTVGSVPLDVADPAGFISYLTEQPGIHRLVLLDSCNGLILFQHLMELPHYNSLGYVVCNPTTKQWRAVPEPDCSSHVPMNYTYLAFDPTVSSHFHLVRFKKNREYMEPMSTHAYSSKTGIWTYSQTVKEEEEWQNQVYLSISNRCAFVNGFLHLLVWGSNKMQILIVDVQGRPRRMIRLPDAAAGNCEGCYCVYFGQSQGHMHCITKQLFDFNEEKYELSIWALQDYDAQEWVLKDTVSSLQLFGGNCPTSVALELYSEVASMHLDRNVVFFFSHCERRFIAYDMDSKEVSVFSSSKAIHRWKVGCYVPCFSLAPLK

SEQ ID NO: 6476 - protein, 143 aa, Zea mays
  VARIANT 54..143: note = Derived polymorphism lacks residues 54 to 143
  VARIANT 62: note = Ancestral polymorphism is P, Derived polymorphism is L
  VARIANT 67..143: note = Derived polymorphism lacks residues 67 to 143
  VARIANT 74..143: note = Derived polymorphism lacks residues 74 to 143
  VARIANT 75: note = Ancestral polymorphism is A, Derived polymorphism is V
  VARIANT 80: note = Ancestral polymorphism is Y, Derived polymorphism is S
  VARIANT 83: note = Ancestral polymorphism is D, Derived polymorphism is Y
  VARIANT 86: note = Ancestral polymorphism is D, Derived polymorphism is N
  VARIANT 95: note = Ancestral polymorphism is R, Derived polymorphism is W
  VARIANT 97: note = Ancestral polymorphism is H, Derived polymorphism is Y
  VARIANT 104: note = Ancestral polymorphism is A, Derived polymorphism is V
  VARIANT 114: note = Ancestral polymorphism is N, Derived polymorphism is K
  VARIANT 116..143: note = Derived polymorphism lacks residues 116 to 143
  VARIANT 117: note = Ancestral polymorphism is V, Derived polymorphism is A
  VARIANT 120: note = Ancestral polymorphism is I, Derived polymorphism is T
  VARIANT 141: note = Ancestral polymorphism is C, Derived polymorphism is Y
MAAATRSPSRAGFHPWLSARPAPPFLARREMEILHYPQITSMAANHRSIHLIKERRNSGIVPIGSLQLGVCRHRADLMKYLCDRADPPIPCELVRGHLDYTPHAWNIVPVKKRNGWVRMIVDACYPTSINEETDPEYFCRYRR

SEQ ID NO: 6477 - protein, 264 aa, Zea mays
  VARIANT 251..264: note = Derived polymorphism lacks residues 251 to 264
  VARIANT 214: note = Ancestral polymorphism is A, Derived polymorphism is V
  VARIANT 206: note = Ancestral polymorphism is V, Derived polymorphism is F
  VARIANT 141: note = Ancestral polymorphism is A, Derived polymorphism is T
  VARIANT 113: note = Ancestral polymorphism is R, Derived polymorphism is M
  VARIANT 76..264: note = Derived polymorphism lacks residues 76 to 264
  VARIANT 63: note = Ancestral polymorphism is T, Derived polymorphism is I
  VARIANT 23..264: note = Derived polymorphism lacks residues 23 to 264
  VARIANT 12: note = Ancestral polymorphism is V, Derived polymorphism is D
  VARIANT 1: note = Ancestral polymorphism is T, Derived polymorphism is M
MSSFMDSPIVHDIDLVSLVTTHRELSFLALKTYRVCHTGVMVGMGQKDAYVGDEAQSKRGILILKYPIEHGIVGNWDGMEKIWHHIFYNELRVEPEEHPIPLTEAPLNPKENREKMTQIMFETFNCPAMYVAIQAVLSLYASGRTTGIVLDSGDGVSHTVPIYEGYTLPHAILRLDLAGHDLTDNLMKILTERGYSFTMTVDREIVSDIKEKLVYVALDYEQELETARTSSSVEKSYEMPDGQMWISKEGYDESGPGIVHMKCF

SEQ ID NO: 6478 - protein, 132 aa, Zea mays
  VARIANT 27: note = Ancestral polymorphism is C, Derived polymorphism is Y
  VARIANT 62: note = Ancestral polymorphism is A, Derived polymorphism is V
MPADVHREAREGVLEFERAFRERFSAYTLAAKRHIDSTTIFDVQGVIWILSSTSFLFLLMQALKRIKLYELKHKDISKVEKDIVLSSMSIVMLGIFVLHTPFAKAISGAALHLFSFVEAISIGRPPRNSSRS

SEQ ID NO: 6479 - protein, 384 aa, Zea mays
  VARIANT 179: note = Ancestral polymorphism is R, Derived polymorphism is C
  VARIANT 88: note = Ancestral polymorphism is R, Derived polymorphism is G
  VARIANT 73: note = Ancestral polymorphism is A, Derived polymorphism is T
  VARIANT 57: note = Ancestral polymorphism is G, Derived polymorphism is D
  VARIANT 54: note = Ancestral polymorphism is R, Derived polymorphism is Q
  VARIANT 42: note = Ancestral polymorphism is K, Derived polymorphism is N
  VARIANT 41: note = Ancestral polymorphism is L, Derived polymorphism is F
  VARIANT 40: note = Ancestral polymorphism is T, Derived polymorphism is A
  VARIANT 32: note = Ancestral polymorphism is K, Derived polymorphism is N
MAEDKVRRIFVGGLSWKTTERTLERTFGQYGNVIEAQDYTLKIIICVRYGERRRFNGFLTVVAWSCNFNLTATADSERLQSLPFLYVRILTKLQEKKFTNQLSSLVVVKRETGRSRGFGFVTFSEPRAVDAAIRGMHNAELDGRNISVNKAHPRIADDDYGYGGGGGGGYSSGARGGYRSGGDVVPAVSDECFKCGHSGHDVVPAVSDECFKCGRSGHWARECPYSDGSGRTGRYSPASRYGGGAGGRGDRVGGSDRFARYDDDRYDGGRSVDSRDTYYGAGRDRYARDRHLPATDHHSGDRYSGADRYTSSGFAIERSYERDGGRSTGTYYRDDPRGTGGYGRGGSRGGGGGPARFGGSYRDRPAPYDRPSRGGAARAYDDRY

SEQ ID NO: 6480 - protein, 120 aa, Zea mays
  VARIANT 51: note = Ancestral polymorphism is V, Derived polymorphism is I
MASEEGVVIACHTKADFDAHMAKAKEAGKLVIIDFTASWCGPCRFIAPLFVEHAKKFTQAVFLKVDVDELKEVAAAYDVEAMPTFHFVKNGVTVETVVGARKENLLAQIEKHCAAAVPAA

SEQ ID NO: 6481 - protein, 429 aa, Zea mays
  VARIANT 168: note = Ancestral polymorphism is S, Derived polymorphism is L
  VARIANT 166: note = Ancestral polymorphism is P, Derived polymorphism is S
MSDLLPEDVLVNIIGRLAPRYLAISRCVCKTWCTTIDAHNLLRMDLLPHSVSGLFINFNELSMSEFLSRPSKGPAISGKFDYLPSAGQVIDHCNGLILLHECVVNPATRQWALLPPRPSPNMPEHFCHGMYLVFDPTLSSHYEVFLIPQVSYNSNLDPAIEELEWPPSPCIVQVLSSRTKLWEERLFVREGEAAGNVADIRLDFQAVQENAVYWRGVLYVNYQSKFIMRISLSNDKYQVIKPPVDFEWFEFENESRLSKNLYLGKSEKGVYCALRYPSTVSFSIYILDESDGKTEWIMKPHYYLGSQGIDGPGPWTLQDINYNWDTQYEDSMEEKFEWDSDSDNVVENRSNGGYPCLPRIELLGFHPYKDVVFLSDTLRRGLAYHLDSSKIQDLGNLHPTYYGTEQGIQPFLLTAFPYTPWRGWFPEDT

SEQ ID NO: 6482 - protein, 341 aa, Zea mays
  VARIANT 55: note = Ancestral polymorphism is N, Derived polymorphism is K
MGKEVVDMSTDEESDCVVMCPPNRNADHEEAVSGSHDEDSSGRQENPYAVNSHMNTRGQEDVSVNPDLLKLIHQQESSVSNSPSKPAGARQQGSSHTVPESCTIAPERRSSGAGTCAPISYPTSSGEKLSDISSSSPRSMTKSPSVTCRKPLQSDNTSHSQEEDSYSVTSSTVTSARAGKTKKTTVAVAPTFVCDNRAEKRGEFYTKLEEKRKALEEEKLQAEARKQEEEEEALRQLRKNLVVRAKPVPSFYQEPPPKVELKKVPPTRAKSPKLTRRKSCSDTPHTPEGGNGGGGAVCCRLHRHSIGNSKDIGSKAQCSPKTGPAAKSRAPPNPGKTRGLP

SEQ ID NO: 6483 - protein, 714 aa, Zea mays
  VARIANT 3: note = Ancestral polymorphism is E, Derived polymorphism is K
MVKEASSMSVRRPGLVCLADVMNMHQPCFLQYLLLILVPLLLSASAYDRSGEFIFDGFSGNDLITMDAASVTNGLLSLTSGQKELRGHAFYAFPLDFTSAAVPNSSAVLSFSTTFVFAIIGPYDDLSGHGLAFVLSSTNDLFTALPSQYLGLLNSWNDGNSSNHLLAIELDTIQSTQFNDINDNHIGIDINSLSSVASHTAGYYTSNGEFHPLKLISRKPMQVWVDYDSNHIMLNVTIAPYFMSSTKPSRPLLSTIFNLSSILPTATVYAGFSSATGTLNCKHYVLGWSFKLNGEAASLNYSALSVKTIQELAQQVPTSDHPGSYKVLICKILLPIVAIFVLVSAVLVKVHMKRRSQERAELDWQREYGPPSFTYKELLAATHGFKDKMLLGRGGFGSVYKGVMPISKQIAAIKRVSPESRQGMREFMAEITILGHLRHRNLVQLIGYCSHKQHLLLVYDYMPNGSLDCYLHTQDHGNTNLCWAQRFHIIKGIGIASGLFYLHEDWEQVVIHRDIKTSNVLLDSEMNARLGDFGLARSHDHGADAHTTHVAGTYGYIAPELARLGKATKATDIFAFGVLMMEVTCAIRPIWVNTTDGEPLALADWVLAAWQGGSITDAVDPRLDSYVDEEIELVLKLGLLCSHPSPNARPCMRLVMQYLQSDTPLPSDFQPNSLLSIGTTVFLAQPLKNCLSLLIFACHLSIGVWPPTLVIIHS

SEQ ID NO: 6484 - protein, 676 aa, Zea mays
  VARIANT 22..676: note = Derived polymorphism lacks residues 22 to 676
MDLDPEGIFRDDSDEDEDSVQEREANKEMVVYLVDASPKMFTPATTQDNEKQETHFHTIVNCITESLKTQIIGRSYDEVAICFFNTKEKKNLQDSAGVYVYNVGDREQLDRPTAKLIKDFSLIEDSFMSTIGSRYGITAGSRENTLYNALWVAQALLRKGSVKTVSKRILIFTNEDDPFGTITGAVKTDMIRTTLQRAKAILLFKTACCQHISKCFCPFFTITILFFLQDAQDLGLSIELLPLSPPDDQFNMSLFYADLIGLDGDEMTEYLPSAGDNGAVLSTTSQAGCQLGTITWLDSLSNLPLKVERSFICNDTGALLQDAQTRFQMYNDTIVKFSVRELSEVKRVASHHLRLIGFKPLDCLKDYHNLRPSTFIYPSDEVLCSSGIASASNCSFLLYCSYPLNSEAENRIFGSTCVFVALHSSMLRLGRLGTIIVTSAFFTNHVYGFRFALAFYGNPTRPQLIALVAQEEVTSSGRQFEPPGMHMIYLPYSDDIRYPEEVHVTSDDAPRATDEQIKKASNIFKRIDLINFSACQFANPALQRHYGILEALALGEDEMPDIKDETLPDEEGLSKPGVANAIEEFKTSVYGENYDQEEAEAAAGKASRGNASKKRKEVTDAAAQISAAYDWAELADNGKLKEMTTVELRSYLTAHDLPVSGKKDVLISRILTHLGK

SEQ ID NO: 6485 - protein, 344 aa, Zea mays
  VARIANT 90: note = Ancestral polymorphism is F, Derived polymorphism is V
  VARIANT 214: note = Ancestral polymorphism is L, Derived polymorphism is P
MDAFTHVPPGFRFHPTDEELVDYYLRKKVALKKIDLDVIKDVDLYKIEPWDLQEKCRIGSEEQNEWYFFSHKDKKYPTGTRTNRATTAGFWKATGRDKPIYVKNCLVGMRKTLVFYKGRAPNGQKSDWIMHEYRLETNNNGIPHEEGWVVCRVFRKRLATVQRMAGDSPYWFNDHAGFMAPELGSPRQAAHHQQNVMMYHRQQSSYSYPCKVELEYHHLLPQEHFLQQLPQLESPKLPDLIGQVDTTLQPACGLTQEHGAPRYTLQELQAEPLYLATGGDTDWRALDKFMASQLSHGDITPNKDSANNYSNPALQVIQQSEEKEEALDYVSTSASCGGDNDLWK

SEQ ID NO: 6486 - protein, 281 aa, Zea mays
  VARIANT 13: note = Ancestral polymorphism is R, Derived polymorphism is H
  VARIANT 161..281: note = Derived polymorphism lacks residues 161 to 281
MEERRVKARRAIRGSPPCAAIYKLRFRRAPLSKPYPTPPPLPLRPSASPAATAYRDLIYHLQLSIMADVDVEPEVAAGAPKKRTFRKYSYRGVDLDALLDMSTDDLVQLFPARARRRFQRGLKRKPMALIKKLRKAVSFQPLSFHYHFFLTMLAAVPSVLCQVDAVNARLCLSVIICGTLFTYTCYTISSRAISHCPEQKKDAPAGEKPEPVKTHLRNMIIVPEMIGSIVGVYNGKTFNQVEIKPEMIGHYLAEFSISYKPVKHGRPGIGATHSSRFIPLK

SEQ ID NO: 6487 - protein, 147 aa, Zea mays
  VARIANT 34: note = Ancestral polymorphism is R, Derived polymorphism is W
  VARIANT 38: note = Ancestral polymorphism is D, Derived polymorphism is N
  VARIANT 42: note = Ancestral polymorphism is E, Derived polymorphism is K
  VARIANT 44..147: note = Derived polymorphism lacks residues 44 to 147
  VARIANT 55: note = Ancestral polymorphism is R, Derived polymorphism is C
MTDLDGNIVVVPNPSGRGPGYRYFGAARKLPGVRELFDKPPEMWKRRTRYEIHKRINARGRQAPDVALLQLQGPGRAAGGGVAGGPRGPPRRHWYFFNRSASHPTLLHASAQATLGHHRRRPQTCARRPADPGASVASLLCPPVARP

SEQ ID NO: 6488 - protein, 133 aa, Zea mays
  VARIANT 108: note = Ancestral polymorphism is L, Derived polymorphism is R
  VARIANT 104..133: note = Derived polymorphism lacks residues 104 to 133
  VARIANT 91: note = Ancestral polymorphism is D, Derived polymorphism is Y
  VARIANT 86: note = Ancestral polymorphism is N, Derived polymorphism is Y
  VARIANT 77: note = Ancestral polymorphism is G, Derived polymorphism is R
  VARIANT 71: note = Ancestral polymorphism is V, Derived polymorphism is F
  VARIANT 67: note = Ancestral polymorphism is L, Derived polymorphism is I
  VARIANT 53: note = Ancestral polymorphism is T, Derived polymorphism is K
  VARIANT 52: note = Ancestral polymorphism is K, Derived polymorphism is N
  VARIANT 46: note = Ancestral polymorphism is E, Derived polymorphism is K
  VARIANT 32: note = Ancestral polymorphism is D, Derived polymorphism is N
  VARIANT 23: note = Ancestral polymorphism is S, Derived polymorphism is F
  VARIANT 1: note = Ancestral polymorphism is M, Derived polymorphism is I
MQTGSERNEVKDMSNRLEARELSTALSKNSSDAMYPIVSKESLLQEMFFNAKTTSGRLHLAKELLKLPTDVLKSFAGSKEGLSTLYSWILDSLGKNATQLLRHCVRLLVLVSTDLVAVRLSGLCSSMPPCPFK

SEQ ID NO: 6489 - protein, 287 aa, Zea mays
  VARIANT 106..287: note = Derived polymorphism lacks residues 106 to 287
  VARIANT 117..287: note = Derived polymorphism lacks residues 117 to 287
  VARIANT 192..287: note = Derived polymorphism lacks residues 192 to 287
MPARRPYARRETLAATTPRIPPRDAATAHPPAMPHRTRASAASLRAREPPAQPAATRTHSLCPLRHDRCRMEADGGELRLASFNDTCALVSVLGTLYDAATTAYGQIFSFHTSGFLLLARVIAATCCVTLSASMAAQLGSTPMAAFQICLQTWLAYSLLADGLAFAGQAILASAFARKDHPKATATASRILQLALVLGLLLSILLGVGLRIGSRLFTSDQGVLHHIYIGIPVRKASTAAKQIGLEVKFSRIVGQQFYGQHAHSHHAQHSRQPPPELKPRASCTPVSW

SEQ ID NO: 6490 - protein, 237 aa, Zea mays
  VARIANT 46: note = Ancestral polymorphism is P, Derived polymorphism is L
  VARIANT 117..237: note = Derived polymorphism lacks residues 117 to 237
  VARIANT 142: note = Ancestral polymorphism is Y, Derived polymorphism is S
MADVDVEPEVAAGAPKKRTFRKYSYRGVDLDALLDMSTDDLVQLFPARARRRFQRGLKRKPMALIKKLRKAVSFQPLSFHYHFLLACSDQDKCVDRYAVMIYPYDMSMLAAVPSVLCQVDAVNARLCLSVIICGSLFSYTCYSISSRAISHCPEQKKDAPAGEKPEPVKTHLRNMIIVPEMIGSIVGVYNGKTFNQVEIKPEMIGHYLAEFSISYKPVKHGRPGIGATHSSRFIPLK

SEQ ID NO: 6491 - protein, 228 aa, Zea mays
  VARIANT 149..228: note = Derived polymorphism lacks residues 149 to 228
  VARIANT 105..228: note = Derived polymorphism lacks residues 105 to 228
  VARIANT 79: note = Ancestral polymorphism is C, Derived polymorphism is R
  VARIANT 62: note = Ancestral polymorphism is Q, Derived polymorphism is L
MQSTGKAGQSSGDRQEKLPKCEQVDYGSEVEGCANYENPGKRAALVTLVGNEYCGDEDERVQVLTIVKKDEPADDIVDRINPGTVAGYSEAKGDVGASTATSTVRPVGSRSSSFHGVTRYELGRHPANTKLSSNKTVRRVCVRGGNVKWRALRLDTCNYSWGSEALTRKTRILDVVYNASNNELVRTQTLVKSAIVQVDAAPFKQWYLTHYGVDIGRKKKVGQSVRRA

SEQ ID NO: 6492 - protein, 190 aa, Zea mays
  VARIANT 73: note = Ancestral polymorphism is D, Derived polymorphism is H
  VARIANT 81..190: note = Ancestral polymorphism lacks residues 81 to 190
  VARIANT 90: note = Ancestral polymorphism is F, Derived polymorphism is Y
  VARIANT 100..190: note = Derived polymorphism lacks residues 100 to 190
MADVDVEPEVAAGAPKKRTFRKYSYRGVDLDALLDMSTDDLVQLFPARARRRFQRGLKRKPMALIKKLRKAVDAVNARLCLPVIICGSLFTYTCYTISSRAISHCPQQKKDAPAGEKPEPVKTHLRNMIIVPEMIGSIVGVYNGKTFNQVEIKPEMIGHYLAEFSISYKPVKHGRPGIGATHSSRFIPLK

SEQ ID NO: 6493 - protein, 140 aa, Zea mays
  VARIANT 10: note = Ancestral polymorphism is R, Derived polymorphism is C
  VARIANT 21: note = Ancestral polymorphism is A, Derived polymorphism is V
  VARIANT 22: note = Ancestral polymorphism is A, Derived polymorphism is V
  VARIANT 24: note = Ancestral polymorphism is V, Derived polymorphism is A
  VARIANT 27: note = Ancestral polymorphism is G, Derived polymorphism is D
  VARIANT 46: note = Ancestral polymorphism is G, Derived polymorphism is D
  VARIANT 80: note = Ancestral polymorphism is A, Derived polymorphism is P
  VARIANT 82: note = Ancestral polymorphism is T, Derived polymorphism is I
  VARIANT 85: note = Ancestral polymorphism is S, Derived polymorphism is I
  VARIANT 90: note = Ancestral polymorphism is E, Derived polymorphism is D
  VARIANT 98: note = Ancestral polymorphism is S, Derived polymorphism is F
  VARIANT 112..140: note = Derived polymorphism lacks residues 112 to 140
MDLTRDANFRIAQGGLQALSVAAVVADDHFKIHLNALVPAAVERLDDGKQPVRDAARQLLITLMEVSSPTIIVERAGSYAWTHKIWRVRDEFVRTVASAVGLFASTEISLQRVLLSPVLQLMNDSNQSVRDAAISCIEVS

SEQ ID NO: 6494 - protein, 129 aa, Zea mays
  VARIANT 39: note = Ancestral polymorphism is K, Derived polymorphism is N
MSSLGTSKGILEIAKFGVYVSVPVALTYLVATDSKTLKKLMGLMLRYVSLRSSMSISRTRTYPLAIFSLPVYVLIYSGSYRFTSRFKLPVYVPPLQRPYVVYPPEGPRPPPPEELRERAREIARKRQQS

SEQ ID NO: 6495 - protein, 404 aa, Zea mays
  VARIANT 37: note = Ancestral polymorphism is P, Derived polymorphism is L
  VARIANT 27..404: note = Derived polymorphism lacks residues 27 to 404
MAASSRPLVSVKALEGDMVTDAPGIALPPVFGAPIRPDVVRFTHKLLSCNKRQPYAVSRRAGHQTSAESWGTGRAVSRIPRVPGGGTHRAGQGAFGNMCRGGRMFAPTKIWRKWHRRVNVNLRRVAVASALAATAVPALVQARGHRIETVPEMPLVISDSAESIEKTSQALKILKQVGAYADAEKAKDSVGIRPGKGKMRNRRYINRKGPLVVYGTEGSKVVKAFRNLPGVDVANVERLNLLDLAPGGHLGRFVIWTESAFKKLEEVYGSFDAPSQKKKGFVLPRPKMANADLGRIINSDEVQSVVKPLNKEVKRREKRKNPLKNMAAVLKLNPYLGTARKMATLAEAARVKARKEKLDSKRTKLTSEETAKVKAAGKAWYKTMISDSDYTEFENFTKWLGVTQ

SEQ ID NO: 6496 - protein, 670 aa, Zea mays
  VARIANT 520..670: note = Derived polymorphism lacks residues 520 to 670
MARLRDVAKDFLVCHTCRSSQVGAATMPKVKNPHVFMDISISGGSAERITFELLANVVPKTAENFRALCTGESGLGASTQKPLYYKGTHIHRIVKGFVVQGGDFSRGDGKGGESIYGGKFPDENFRLLHNQPGVLSMANSGPDTNGSQFFITFKALPHLDGKHVVFGKVVSGIALLKKLEAVGSETGNPSYQVKIVDCGEVSNTNSPDLLKGEKEKKLRTADGNSTAEGRAKLKKTSGDHKQRKKRKHYSSDSYSSDTSDSLSYSSDSGSDSESDSSMDTSSSSDHRRKRRKGSKKDKRKPTKRKGKHTRSKRKSRGSKRRSRRSHGSSSDDSVSSKTDNSSSDSEKGGHHTKRSLPKDKESTKMTISEQGRTFQEADKDEQTVTTINRSQSHDGSKPSNKDGNRADERSGNYNSEDRNGPGGSSRNNPIQVDVNLTKPVNVDGNTGGDNAEAGMSRTGEGRHLPSNDSVSTNGKDLGVGSADNGQPQRIRKGRGFTQKYGYARRYRTPSPERPPVRPRYDGGRDDRWNNFNRYERNGPYSRRSPVRRYHGSPRANSPSRYPRRERMRSRSRSPVRRHDRGGYHRPSPRRSRSPAEPRQNVNDRPRSGHGGGDPDHSPPANRSRSKSRDPLGPRSPDAAPAKRESSRYNRRRSSSSRSSSPDGNKGLVSY

SEQ ID NO: 6497 - protein, 504 aa, Zea mays
  VARIANT 293: note = Ancestral polymorphism is P, Derived polymorphism is L
MEKKRVVIVGAGVSGLAACKHLLELGCRPTVFEADTVLGGVWARAPACTELQTPRPLYQYADFPWPESVTETFPSHRQVSAYLDAYARRFGVLGCVRFGRRVVGMEYRGVGERDTHAADFVVLCVGRFSGVPNVPTTFPEGEGPEVFDGQVMHSMDYAKMGSSKAKETIRGKRVTVVGYLKSALDIAAECAQVNGTAHPCTMVVRTKHWVLPDYFAWGFHISRLYLNRFSELLIHKPGEGLLLSALATLLSPLRWAFSKFAESYYSIPMRKHDMVPDHSLFQALAAATIAITPKDHYKRLDEGSIVLKKSKTFSFCKDGVVVVEGEPSSSASAPAAAAVVKSDVVIFATGFKGDDKIRDMFTSEYFRGVAVGSASTTVPLYRECIHPRIPQLAVLGYSESISNMYTSDVRAKWLARFLDGGFRLPSVAAMHQDVLAWEKCIKRYSGRYFRRSSILLLHTWYNDQLCRDMGHNPRRNKGFFSELFDVYGPGDYAGLTSCASSKEH

SEQ ID NO: 6498 - protein, 380 aa, Zea mays
  VARIANT 10: note = Ancestral polymorphism is A, Derived polymorphism is E
  VARIANT 292..380: note = Derived polymorphism lacks residues 292 to 380
MKKEEVASPAAATVVLLLLSSSLAAVSGQPQPQPQPGGSKQTAANNPRLQKAYVALQALKRAVTEDPKNLTRSWCGPDVCGYFGVYCAAAPDEPREQTVAGVDLNHGDLAGTLPEELGLLADLALLHLNSNRFAGTLPESLPKMRLLHELDVSNNRLSGGFPQHILCLPNVKYVDLRFNELRGPVPPALFDKPLDAVFLNDNAFDFELPDSLGNSPASVLVLANLRLRGCIPRSVGRMAGTLAELVALNSGLRSCLPQELGWLRELTVLDLSSNQLQGMLPESMAGMHSLQQLHVARNELWGHVPEGVCALPALRNFTYSYNYFCSEPSRCLDVRHVDDRQNCIAARPDQRPADQCLAFLHRPPVRCDDSGCFAPPPPHY

SEQ ID NO: 6499 - protein, 181 aa, Zea mays
  VARIANT 45: note = Ancestral polymorphism is V, Derived polymorphism is A
MAAIAAATQAAATVLLLAALVLAAGPGGARAQSASPSSQCTSALVSLSPCLSYISGNVSAAPPSCCAQLGKVVQSDPQCLCVALSADPASLGLTVNRTRALGLPDACKVTTPDVSSCKGGAAAAGGAPVATPAGQTAPATGSKTTPATSSVPGAAASPPGSAARLVAGFFVAAAVVAGFAA

SEQ ID NO: 6500 - protein, 195 aa, Zea mays
  VARIANT 93: note = Ancestral polymorphism is P, Derived polymorphism is S
MDRSMGLMTTIRLLAAAALLVLASGQQQPPAAASCTASLLTSFTPCFSFLTSSNGSSGSPPTRECCRSLAALVDAGTGCACLVLTGAVPLGVPVNRTLAVSLPRACDSMSVPLQCRDTSAQSPATGPVAADTPPATPASPAAATTPDAPTATPPVTQGREAVLPTSGSARRASARVAATPALVLLLLLAVAAALV

SEQ ID NO: 6501 - protein, 578 aa, Zea mays
  VARIANT 232..578: note = Derived polymorphism lacks residues 232 to 578
  VARIANT 281: note = Ancestral polymorphism is R, Derived polymorphism is L
MASAAAAAVAPAAEEKKGAGGPVTGDMVSAGFAELERQQRLLATCTRLYQHLSDHIGSLERGLAARSDALRVRRRAFDARTHRALDSLHRREASIDASVSRALDHLHSISAKGSPPAPDPAHAAGAGAAEGLRALCARMDSAAFLGFVVARRKEADALRAEMPAALKLCVDPAKFVMDAVADVFPVDRREARSPADLAWACVLILEAAVPALADPDPDIGPARPLVPRAARERARGMAREWKDAAEKKGGVEGAKPPDAHAFLQHVATFAVAEKEDMPLYRRIVVSFSWRRQMPRLALTLGLEEEMADIIEELIAKRQQLDAVNFAYEAGLQEKFPPVPLLKSYLEDSKKTSTAASDNSSTSSSGQSGSNANKKEQSALRAVIKCVEDRNLEAEFPLEGLRKQLEELEKAKTEKKKAASSATSGGSSSGPATKRIRASNGGPMPPAKAGRLATNACASSFPGPTTFTQSPSHAPHANTSSPSHASHAATASPSHTSYATPPPYPVGHGLYCSRSPPVIRGEPYAYPPAEEVVGFNVGITMPYSTPPMSYPPAPYGGYGSGMAAYANGMAPAFHQAYYR

SEQ ID NO: 6502 - protein, 170 aa, Zea mays
  VARIANT 91: note = Ancestral polymorphism is R, Derived polymorphism is C
MRVHPAPRKRTIAVQRCASAAAGALGGKKLRRLPHIFDKVLELPFAADADVSVEEDAAALRFVAAADEFSLAGARAHAVEIHPGVTKVVVRGLSSSSLGGDGDDDDDGAAAAAFELDRWRFRLPPCTRPAMATATYAAGELVVTVPKGAGPGDGGAAAVLGGTERVLVLV

SEQ ID NO: 6503 - protein, 360 aa, Zea mays
  VARIANT 262: note = Ancestral polymorphism is K, Derived polymorphism is N
MDQNFGNLGTGAGSSGGCGGSNSNSKAVAAVSSSSFLQLPLSTAAAASPAYYGAPLALLHHGTTAGPSSSQQQQHQSPYAKHGAEMSAAEADAIKAKIVAHPQYSALLAAYLDCQKVGAPPDLLERLTAMAAKLDARPPGRHGPRDPELDQFMEAYCNMLVKYREELTRPIDEAMEFLKRVEAQLDSIAGGGSSSSARLSLADGKSSEGAGSSEDDDMDPSGRENEPPEIDPRAEDKELKYQLLKKYSGYLSSLRQEFSKKKKKGKLPKEARQKLLHWWELHYKWPYPSETEKIALAEATGLDQKQINNWFINQRKRHWKPSEDMPFVMMEGFHPQTAAALYLDGGAFMADGMTTYRLGS

SEQ ID NO: 6504 - protein, 701 aa, Zea mays
  VARIANT 21: note = Ancestral polymorphism is P, Derived polymorphism is L
MPSFLVVAFFVLLCLGLNNLPALGDAGGGNEYSFVYSGFGGATGASLVLDGTATVTREGVLKLTNDEQANLKGHAFHPTPVQFRDSSSSSSPNNGTAAVRSFSATFVFAIISASTYWSSDGMAFVVSPGKDLSGASSAQYLGLLNSTSDGPGAAASNHVLAVELDTVMNVEFQDIDNNHVGVDVNTLSSVHSRAAAFYDDDTEGGGGGAWKNLTLSSGDAMQVWIDYDGEAKQLNVTLAPIATRGVKPSRPLLSNVTDLSAVLAAQASYVGFSAATGPIPSQHCVLAWSFAVDGPAPPIDFSKVPKLPDDTAGRREALVRELEIALPVAAFVLVLATCVTVVLLVRRHLTYAELREDWEVEFGPHRFAYRELFRATDGFKSKHLLGAGGFGKVFKGVLSKSGTEVAVKRVSHDSTQGLREFISEVVSIGHLRHRNLVQLLGYCRRKGELLLVYDYMPNGSLDKHLHGEDGKPLLEWAQRFQIVKDVASGLFYLHEKWEQVVVHRDVKASNVLLDGGMVAHLGDFGLARLYDHGADLQTTHVVGTTGYMAPELSRTGKASPLTDVFAFGTFLLEVTCGRRPVVDTVRHGRKMLVDRVLEYWRRGSIEETVDSRLRGDYNLDEARMVLTLGLMCSHPFPAERPTMRQVMQYLDGDAPLPELTPAGISLLSLMQSQTSFDQSALQYPWSGTSMGTMTSGISVGR

SEQ ID NO: 6505 - protein, 473 aa, Zea mays
  VARIANT 219..473: note = Derived polymorphism lacks residues 219 to 473
  VARIANT 239..473: note = Derived polymorphism lacks residues 239 to 473
  VARIANT 268: note = Ancestral polymorphism is R, Derived polymorphism is W
MASNRSSSTVVGEMQSRLDRVRRQLSSTSTRHLLQGPLLKRSDTLRKWNERWVILDPATGKIEYKVNRSDKDVRGVVVFDSTSTVTLSPTNFHGLAKYDGCCFYIGTPQKKEYFLCAETPSAARAWVSTLHATQLVLQAHKEAVNSLGENGPAKLGTVATVVAVANATAIEATKEVEAAMKISLRAALGSTTHKLTKGQLDDLTIMMETLRVKDDELHQLLQDIRARDSTINEIADKLQETAEAAETAASAARSIDEERRFFTLELERLKQDHEKQVEASLLRLRESEEKAKLLVEERDRLLTERDSALQEAQMWRSELGKARGNAVILEAAVVRAEEKARVSAADADIRIKEAMNRLESATKEKEDLLALVDALQSQIQRQETSTIQVCEESSELCSTASKHMEDDNVDKACVSDPDSVPVTENVVELDDEGVDIPTVGDTEWDDPRSSEVSDVREVTTEPEENSLDIPVDT

SEQ ID NO: 6506 - protein, 251 aa, Zea mays
  VARIANT 22: note = Ancestral polymorphism is E, Derived polymorphism is D
MMAGGDHEEGEEVVLVVGDEEEEEEEDVLPGFRFHPTDEELVTFYLRRKVAGKRLSIEIIRDFDIYKHDPWDLPKSSSISGEKEWYFFCLRGRKYRNSIRPNRVTGTGSGFWKATGIDRPVHSSGRAGGGPVVVVGLKKSLVFYRGSAGKGTKTEWMMHEFRLPPRADDTAHATPASEREAEVWTVCRVFRRNFTYKKHPQQQQQQQQMAAGGSEVSAGAGAATVAQPGESSSVTGGVESDTGDEYTNTIR

SEQ ID NO: 6507 - protein, 976 aa, Zea mays
  VARIANT 652..976: note = Derived polymorphism lacks residues 652 to 976
MDLVSGAIGKLAPKLLQLLQDEYNLQKGVRHQIQFLSEELESIHGALRKVAAVPPDQLDEQVKIWARQVREASYDMEDILDSFLVRVEGRPEPSDAKARRDIASAIEAIKGQLQQVSERRDRCKVDDIVAKLAASSTIDPRLEAMYREVTQLVGIDGAMGELIPMLSLTGDDVSNKELKVVSVLGIGGLGKTTLAKVVYDKLKSQFDCGAFVPVGRNPDLKKVFRDILMDLDEHRYTDLNMYIIVIDDVWEAKSWETLRLAFIDNNKGSRIISTTRKSEVTSGNKVYKPKPLSDDNSKRLFYTRIFGGEDKCPDNEVDEVSNKILRKCGGIPLAIITMASLLVGKSWGQWFEVCNSIGFGDKDIEQVDKTMSILSLSYYDLPCHLRTCLLYLSSFPEDYIIDKNSLIWKWIAENFVHKKPGVWLFEVGEGYFNDLVNRSMIQAVASKDSSIIDGCRVHDMVLDLLRSLAREENFVTVLYNDEDMLSEISSTRRLAHQKSTMDAHLHNYKQGMQHLRSLTVYRCGADKELSFLLSFKLLRVLDLENVYTTSWHNARHIGNLIHLRYLGLKHTYMPELPEEIGALKFLQTLDLVENFFMEELPSSIGQLTQLVCLRASGLITSMPRGVIKTLTALEELAVQCQFNERFCRYQGQFKELGSLSELRVLKIKVISTMEQSILPDLMQSLGNLHKIQSLKLESHPGCGRADNAMFDAMALPGHLRHLLVSEYFVHLYRLPSCINPLCLVKLSHLELYVIDMDEHSMQILGELAELRHLVLSTRSTVRVNNVAADGFFHKLRSCKFYTSMVLFVLNEDSSVSFTLWNGTDDLVLSYGKKDGECPSAPAVMPNLEELLFSAQPKWSLMKCQGSHGNLGLEHLRSLQKVTAVISCELYMFEAEKMEAELGISCDRYFVEAWVMDAEDGLRDAIGVHPNHPTLVLGRKNEGVLASDVPQEEHEGEGSSVHLNACKQPTTRVQTLN

SEQ ID NO: 6508 - protein, 177 aa, Zea mays
  VARIANT 136: note = Ancestral polymorphism is S, Derived polymorphism is R
  VARIANT 131: note = Ancestral polymorphism is D, Derived polymorphism is Y
  VARIANT 107: note = Ancestral polymorphism is V, Derived polymorphism is D
  VARIANT 81: note = Ancestral polymorphism is A, Derived polymorphism is V
  VARIANT 70: note = Ancestral polymorphism is T, Derived polymorphism is I
  VARIANT 49..177: note = Derived polymorphism lacks residues 49 to 177
  VARIANT 45: note = Ancestral polymorphism is S, Derived polymorphism is P
  VARIANT 28..177: note = Derived polymorphism lacks residues 28 to 177
MPLAQFVVAFNGASWVDPDSVALMVMQSMLGSWNKSAGGGKHMGSELVQKAAINDIAASVMSFNMNYKDTGLFGVYAVAKANCLDDLAFAIMHEMSKLSYRVTEEDVIRARNQLLTYGRRIPTPELFARIDVVDASTVKRVANRFIFDQDVAIVAMGPIQGLPDYNWFRRRTYMLRY

SEQ ID NO: 6509 - protein, 272 aa, Zea mays
  VARIANT 10: note = Ancestral polymorphism is R, Derived polymorphism is Q
  VARIANT 20: note = Ancestral polymorphism is R, Derived polymorphism is C
  VARIANT 21: note = Ancestral polymorphism is S, Derived polymorphism is L
  VARIANT 28: note = Ancestral polymorphism is T, Derived polymorphism is I
  VARIANT 30: note = Ancestral polymorphism is A, Derived polymorphism is V
  VARIANT 33: note = Ancestral polymorphism is R, Derived polymorphism is H
  VARIANT 73: note = Ancestral polymorphism is R, Derived polymorphism is C
  VARIANT 225: note = Ancestral polymorphism is G, Derived polymorphism is R
MCLECSGKHQGLGVHISFVRSVTMDSWTEAQLRKMEAGGNDRLNAFLTAWGVPKETSHVAKYNFNAATAYRDCIASLIEGKPWTDPPVVKETPGSGAPAPARKPPLHASRGGGGWDDWDDDFRPDMRRNQSVGSFAVAGAQSGRQPPRSKSTQDIYTRQQLEASVANKDDFFARRMAENESKPEGIPPSQGGKYVVFGSSPAPSANRNGGAAQGDVLQVVSQGFGCLSLVAASAAQSAASVVQVGTKEIQSKLKVIGDGGDPNGHYDKDDHQ

SEQ ID NO: 6510 - protein, 258 aa, Zea mays
  VARIANT 226: note = Ancestral polymorphism is G, Derived polymorphism is A
MASTSCFLHQSTARVAAPSPRLAAPPRSAQLFVCKAQKQQAAAAESDVSRRAALALLAGVAAVGAKASPAAAAYGEAANVFGKTKKNTDFISYVGDGFKLLIPSKWNPSKEREFPGQVLRYEDNFDANSNVSVIIQPTSKKAITEYGSPEEFLSQVDYLLGKQAYGGKTDSEGGFETDAVATANVLESSTPVVDGKQYYSITVLTRTADGDEGGKHQLITATVSDGKLYICKAQAGDKRWFKGARKGVEKAAASFSVA

SEQ ID NO: 6511 - protein, 1103 aa, Zea mays
  VARIANT 4: note = Ancestral polymorphism is R, Derived polymorphism is S
MGLRAGFLLLPPPPLLLLLLLLLLLISPARGQLPSQDILALLAFKKGITHDPAGYVTDSWNEESIDFNGCPASWNGVVCNGASVAGVVLDGHGISGVADLSVFANLTMLVKLSLAGNNLSGGLPGNVASLKSLKFMDVSRNRFSGPVPDGIGNLRSLQNLSLAGNNFSGPLPESVGGLMSLQSLDVSGNSLSGPLPAGLKGMKSLVALNASYNAFTKGIPSGLGLLVNLQSLDLSWNQLDGGVDWKFLIESAVAHVDFSGNLLTSTTPKELKFLADISETVLYLNLSNNKLTGSLIDGVELSTFGRLKVLDLSNNQLSGDLPGFNYVYDLEVLRLANNAFTGFVPSGLLKGDSLVLSELDLSANNLTGHINMITSTTLQVLNLSSNALFGDLPLLAGSCTVLDLSNNKFRGNLSVIAKWASDLEYVDLSQNNLTGPVPDASSQFLRLNYLNLSRNSLSETIPEAIAQYPKLTVLDLSSNQLRGPMPANLLTSSMLQELYIRDNMLFGGLSFPGSSSKNLSLQVLDISGNRFNGSLPDDIASLSGLRVLDISTNNFSGPLPAAVSKLGALTDIDISTNQFTGPLPEDLPDNLQSFNASYNDLSGVVPENLRKFPESSFHPGNSKLEYPASSSGSGSSPSGSAGGKSLSTGAKAAIVAASIVLLVILILIAIVCHYKRISRQFSSSEKVSDKSLHRTTKDSAVMQGKDNKGGLVSADELATPRKGSTSEALSQEEKSAAGGFSPSKGSRFSWSPDSGEAYGQEGLARLDVRSPDRLAGELHFLDETITLTPEELSRAPAEVLGRSSHGTSYRATLENGVFLTVKWLREGVARPKKEFAKEAKKFANIRHPNVVGLRGYYWGPTPHEKLILSDYVAPGSLCHHHLLLLLLLLISCFCRCLDVTSGSDCADRPGRRGPPLTWAQRLKIAVDVARGLNYLHFDRAMPHGNLKATNVLLDGLDLNARVADYCLHRLMTQSGVAEQILDLGVLGYRAPELAASKKPAPSFKADVYAFGVALLELLTGRCAGDVVSGPEGAAGVDLTDWVRLRVAEGRGSDCFDAAMASDSESNPQAVKGMKEALGIALRCIRPVSERPGIKSVYEDLSSI

SEQ ID NO: 6512 - protein, 177 aa, Zea mays
  VARIANT 102: note = Ancestral polymorphism is T, Derived polymorphism is I
  VARIANT 24: note = Ancestral polymorphism is A, Derived polymorphism is V
MKRKELVIMHGGVLVLGWFIASAAAGRLAPQEKAESVTPIPTLSPPEGNTTFIDGVTWCVARPGATQEDLQSALDWACGPGGADCSQLQPGGRCYQPDTLLTHASYAFNIFYQQNGNSDVACNFGGAGALVKRDPSFGSCKFLASETSAAAASSAMLDRRAWIAMVAASLIALWRRL

SEQ ID NO: 6513 - protein, 732 aa, Zea mays
  VARIANT 309..732: note = Derived polymorphism lacks residues 309 to 732
MDLTSFITSVLTSFVIFVALVLLFTWLSRRPGNAPVYYPNLLLRGLDPWAGRGRGTRSPVGWLRDAISASEPDVVAAGGVDAAVYLVFLSSVLSILVYSGIVLLPVLLPVAATGGALSTIPIPTNKSAQSAQNFSSIERLGMGNVPEKSMRLWAFLLSVYWVSFVTYFVLWKSYKHVSNLRATARSAPDVKPEEFAVLVRDIPRPSPDETIKDSVDSYFRALHPNTFYRSMVVTDHTKADKIYQEIEGHKQKIARAEVVYANSKTESNTEGTRPTHRTGFLGLIGTKVDTIEYCSEQIKELLPKLEAEQKTTLHEKQQRAAIVVFNSRSAAAFASQTLHAQVYDKWTVMEAPEPRQIIWSNLPRKLYDRQIRQCVVYGIVFLIVVFYIVPLTAIAAVTTLENLEAKLPFLKPVVEQPAIKTVLEAYLPQIALIVFLALLPTLLMFLSKQEGIPSQGHAVRAASGKYFYFIVFNVFLCYTLGSTLFKSLTTIINHPAEIVNMLAKSLPGSATFFLTFVALKFLVGYGLELSRLVPLIIFHLKRKYLCKTEEEVRAAWAPVDLGYNTRIPNDMLIATVVLCYSVIAPLIIPFGVAYFALGWLIARNQILRVYVPSYESYGRMWPHMHTRIIAALMVYQTTMIGFISLKKFAYASVLVPLLPASIIFAYVCHMRFYPAFAKTPLEVVVRHDLKETPNMEAIYTAYIPPCLKPDKLEDLDAFEDAQSRATSRVPSI

SEQ ID NO: 6514 - protein, 440 aa, Zea mays
  VARIANT 46..440: note = Derived polymorphism lacks residues 46 to 440
MEVEAMGGAGGKRGRAKGAGAGAGAEPEPKRRAMAVAVQPPAAAPWAQQHPASRIYRVSRASGGKDRHSKVYTAKGIRDRRVRLSVATAIQFYDLQDRLGYDQPSKAIEWLIRAAAEAIDKLPSLDAAAGFPAHPASAKDHAPPVGDDDDHHHQQQQQLTRSGCSSTSETSKGSVLSLSRSESRVKARERARERNTVARDKDPAANDTTATTSAQAASFTELLTGMAAASAAPAQHKHQLRQSSVSWQPTIVSATTDYIGFAQPRKGGGHAMAHAFASPAPHLGNIASIAMAPAQHFGLASGAVTVASGGGGEPHAEMTHFSFLQDHFMPVHAAPAPAPASAPAGEYNLDFSMSSGLMGVNTRGALQSNSQPHISGHHHQQQQLQRLSTPLDAPNIPFLYSSAAAAAAAVTTPTTADGQFAAFQLWNGFQHADMKEKGKH

SEQ ID NO: 6515 - protein, 479 aa, Zea mays
  VARIANT 269: note = Ancestral polymorphism is W, Derived polymorphism is L
  VARIANT 69: note = Ancestral polymorphism is L, Derived polymorphism is V
MATPTVVLLPVWGAGHLMPMLEAGKRLLGSVGGGRALSVTVLVMRPPTEHEARGLESVIRRAEEAAAGLDVRFHRLPGVEAPAGCAGPVEFISRVVELHAPHVRAAVAGLACPVAALLLDLFCTPLLDVARDLVAPAVPPPAYVYFTCSAAALSFFLRLPAMCDEVAGEFGDMDGAADIPGLPPVPPLALPTPIMRRELPECKWYAYHGRRFADADGILVNTAAELEPGVLSAIARRGAGCPAAPALYPVGPVVSFAPPTEPPHPCVRWLETQPAASVVLLCFGSRGFFGAAQAREVARGLERSGHRFLWVLRGPPAPGTWSPVDADLAELLPEGFVERTRGRGLVWPAAVPQKEVLAHAAVGGFVTHCGWNSVLESLWFGVPMVPWPLYAEQHLNAFTLVAAMGVAVAMDVDRRRGNFVEAAELERAVRALMGGDNEEGRKAREKAAEMQAGCRKAVEDGGSSTATLTKLSNALCRND

SEQ ID NO: 6516 - protein, 474 aa, Zea mays
  VARIANT 72..474: note = Derived polymorphism lacks residues 72 to 474
  VARIANT 88..474: note = Derived polymorphism lacks residues 88 to 474
  VARIANT 118: note = Ancestral polymorphism is C, Derived polymorphism is Y
MQRPNAPSACATITFAEALRREMEYRKWVERTHPHLLVGICGAPEMQRDFSAGPVPDAIKRKLAAETSVPPQQSSFSCVTGQKQPQNWYPTKKKVKVPHLPSQILQCPRPNVVPSFWCKICKVDCVTEFNFSAHVGGKKHKAKKLEILGKRNAGGPASRCAGNRSAGQNGLAVSGSRSSEQNVAGSVAAGPNCDMSSESRTNGTEGSPPPKPWERSGTEGTSGPAPFKPPSGGSTSDVVEASGTAKPSENVTAMEGNAAPNVNSTVSRPMPQRPWQQTGYGNTYGGYGGSNMYSSYGGFGNTYGTGGLGNSMYSSYGGGYGGGMYGGGMYGGGMYGGMGGYGGYGMGGMGGMGMGPYGNQDPNSMGPPASPPGFWVSFLRVMHGVVNFFGRISFLVEQNTQASYFFMTAMLQLFDRSGMLYGELARFVLRLLGVRRKPKKGGSIQGPEALAFEGPSRQSTEAPKTNNWDNVWGN

SEQ ID NO: 6517 - protein, 1539 aa, Zea mays
  VARIANT 533..1539: note = Ancestral polymorphism lacks residues 533 to 1539
  VARIANT 856..1539: note = Derived polymorphism lacks residues 856 to 1539
MVFLQRSRPVNPRKRPAPPPELEPEPEPPRPGPDASSAVDAAAALLADAGCTLLVPPHQPPSLPSPHSFAARLSRKLSAGGDASSPSAPARRLLEGLAAFAASSPARLRQLLLPTAPHEPSLARALLSVPALQPGLLALLLEKLPEHFGGDGALDGSPLQDDVGRLIVSQFRWLDFLADADAFVDKLVEVLSVAPHRLKKEIIGSLPEIVGDKSHAAVVAALEKLLQEDSEIVVAVLDVLSDLNLNEELQEQAVTVAISCIRTIAPDQTPHLLRFLLLSATPVNAGRIISQIREQLKFVGVVDPRAARSKKLKGKASANSTDGAILDTLRSGLRFKNMLCEAFLKELKSVDHPRDHKVIDVWLIMLIYANGGALEKAAKKILKSKILHECIRETLFDQCIHGNTELVKEHFMSYLSVSDYLLACKEEKAREFAAYLFTALFEEFTDTYSRQELVGSLVTHIGSGVSYEVSSALDIMISLTSNNSEELIPISSHITGILDYLESFGEDNLRKVYDIFCRLALAAGFNTGSGGSSVANEVLMVVRKQVSNPDMKYRRMGIIGVLRIVSTIASTDVNAAVNCSSSQQPNCEEALELLKMSVNSCKFVTLLLIFLYDELAALLDSKVIHSSIHDWVGEHVAELFETPFLADLENGELPEKYLCDGIEGELWMKLDGNISPVCVNIMRLAPTSPQKSQSCLQILMSQFSLLTTIERLGNEGSLGGIDALLGCPLHLPSTKHLDGANWGNLSGLQKKTVCYSLYYAINWIRELLNAFGTQVESRVDNVSQKARNETAVKLLKRLRNLILLEGLLNAFLKDYPLSLPELRYLGDCSGSASTSKFNIPKNMGEESINGASSKRQKGCKGKVSEKVNPDDKLKQPTILDAFKRAGVTVSQATNKASSQPSSSGMMSKDIEQDATDPGELGLIDLMAAPVKLDMQRYKFRTIRATCLSLLNYSECQGSSSYLQTELPTYLYLLRDLHNKLDNLNPSIKPFLSTSKAKYTPTHCHKSTQDFLDKIQPLFLVLRKHLDGAVSMIKDGNRLFHNFCFLLLLQSYYSSESESCSDDWSSHSSSAGNPDIPYVVVSKSSIVTAVCKEILGCYRKLLGIPDLLNQPNMSILKQLLQTLQPTENFDDVLSEFQPSLAPCNVDYLYCGACKILEDIMDSVSSFSYLLSSNVLITIQSIVNSVVVLLDKSGEPNGKNIHMGCSKAIIPFLRKRLGYSAHKLLSADFPSEDAGKGWQSKGDLIQKILQIYLRNSDSTSDLLAEIGRELPKEPSLKTKDNQDVSYGFPTLCSSTITSWYRVLHEENTGSLNKTIKQALKARGSVDTILQEIQKSVDAFVSLIGMCKSHEKVSMHAMAVKHGGKFIDTFLKAFNFLERHFEQHNDTIVKMVRVSHVPFGITDELQWLVSVADEIMLIQLKQLQKGTRIIQSICSDAKGNKRTMITSKVPPAKRSMERFLFQVKALLHSCSAEKEFQMGNLKHKDLQGHVVSSQAYGNVDEEDEEQTEVDSDLPADEHDNGNAMEEDAVEGSNETPMEEEEE

SEQ ID NO: 6518 - protein, 113 aa, Zea mays
  VARIANT 7: note = Ancestral polymorphism is V, Derived polymorphism is D
  VARIANT 24: note = Ancestral polymorphism is Q, Derived polymorphism is H
  VARIANT 25: note = Ancestral polymorphism is Y, Derived polymorphism is C
  VARIANT 52: note = Ancestral polymorphism is R, Derived polymorphism is H
  VARIANT 75: note = Ancestral polymorphism is V, Derived polymorphism is A
  VARIANT 80: note = Ancestral polymorphism is S, Derived polymorphism is R
MPSFDEVRVYPIPVMLYLVKNLLHYYIFEYVDAPAYQILKNLNIISTGVLYRIILKKKSDHVLQTPIQGWVMAIVMALLSGFAGVYTEVCDYTSNLFIICILVFLENTFDTKY

SEQ ID NO: 6519 - protein, 667 aa, Zea mays
  VARIANT 286: note = Ancestral polymorphism is D, Derived polymorphism is Y
  VARIANT 47: note = Ancestral polymorphism is P, Derived polymorphism is T
  VARIANT 36..667: note = Derived polymorphism lacks residues 36 to 667
  VARIANT 35: note = Ancestral polymorphism is G, Derived polymorphism is E
MIPAVADPTTLDGGGARRPLLPETDPRGRAAAGAGQKRPPATPTVLPAVVSAVLLLVVVAVTVLASQHVDGQGGGVPAGEDAVVVEVAASRGVAEGVSEKSTAQLLGAGALQDFSWTNAMLAWQRTAFHFQPPKNWMNGPLYHKGWYHLFYQWNPDSAVWGNITWGHAVSRDLLHWLHLPLAMVPDHPYDANGVWSGSATRLPDGRIVMLYTGSTAESSAQVQNLAEPADASDPLLREWVKSDANPVLVPPPGIGPTDFRDPTTAWRTPGNDTPAWRVAIGSKDRDHAGLALVYRTEDFVRYDPAPALMHAVPGTGMWECVDFYPVAAGSGAAADSGDGLETSAAPGPGVKHVLKASLDDDKHDYYAIGTYDPATDTWTPDSAEDDVGIGLRYDYGKYYASKTFYDPVLRRRVLWGWVGETDSERADILKGWASVQSIPRTVLLDTKTGSNLLQWPVVEVENLRMSGKSFDGVALDRGSVVPLDVGKATQLDIEAVFEVDASDAAAVTEADVTFNCSTSAGAAGRGLLGPFGLLVLADDDLSEQTAVYFYLLKGTDGSLQTFFCQDELRASKANDLVKRVYGSLVPVLDGENLSVRILVDHSIVESFAQGGRTCITSRVYPTRAIYDSARVFLFNNATHAHVKAKSVKIWQLNSAYIRPYPATTTSL

SEQ ID NO: 6520 - protein, 346 aa, Zea mays
  VARIANT 164..346: note = Derived polymorphism lacks residues 164 to 346
  VARIANT 11: note = Ancestral polymorphism is A, Derived polymorphism is E
MAAARARVLRELPARCWTKCLRRASPFPSTSPAASSLSSLSRASTSPFPLASRSRRLLHSLPSAAVRVRVRAQLQTRFLASEAARGGVGGRGPAADSEEEAQEWAVEWEDSEDDGYEPEIGDGGDGGGVALRGVGWGERALVAAEEVLAGHFGDDIAMFAFKCQTFSLPSFMGIYRYGCPDIEEIEKFNRLYKQKLDEIVERGEISLDLALEARLPKPKCKPRTHLQLNTCSQKSFGRLQVSSPGAERLLKVPEDLDRFKDMAMRVQYLAEGNSDLASKQSLLKDGIFLLESVNAEAGHCVWRLADVKENRAEAGKGRPLNRKQRDWRLQTCFTAVKKVTLYLDAN

SEQ ID NO: 6521 - protein, 466 aa, Zea mays
  VARIANT 278..466: note = Derived polymorphism lacks residues 278 to 466
MHYFRPVNSQPKTGQRISIVEMQLGPLGFALFFQTRIGPPSLCSAGNGVHRRQAHRQVPPLPLPPHRPVSSPLYPGLTLCLHLALHPPPSPSAAVASTPPDIAVNFTGNSNTLRFALFLVLTYLVTGCLLLVPLSLSLSPSSRVACAAVRAVCCYCLEDGMFKGIYHGKQCHAADIPAVLARAWAAGVDRIIVTGGSLKESREALQIAETDGRLFCTVGVHPTRCGEFEESGDPEGHFQALLALAKEGLDKGKVVAVGECGLDYDRLQFCPADMQKKYFEKQFELAEAVKLPMFLHMRAAGEDFCEIMTRNLHRFPGGVTHSFTDSAEDRDMLLSFEKMFIGVNGCSLKTNENLEVLRGIPVERLMIETDSPYCDIRNTHAGSQYVKSVWPSKKKEKYEPDSTVKGRNEPCLVRQVLEVVAGSKGISDIEGLSRTLYHNTCRLFFPQDLDASANAQLESGTAVQDC

SEQ ID NO: 6522 - protein, 170 aa, Zea mays
  VARIANT 13: note = Ancestral polymorphism is T, Derived polymorphism is R
  VARIANT 28: note = Ancestral polymorphism is K, Derived polymorphism is N
  VARIANT 42: note = Ancestral polymorphism is T, Derived polymorphism is I
  VARIANT 141: note = Ancestral polymorphism is Y, Derived polymorphism is F
  VARIANT 142: note = Ancestral polymorphism is T, Derived polymorphism is M
  VARIANT 159: note = Ancestral polymorphism is S, Derived polymorphism is L
MSPLVRVLAPHATSTQAAQPRAVAMASKHLVLAACLLLLLPTASVATDVDYCSKKDYPVKVSGVQILPDPVEPGKPATFKISASTDKTIEKGKLVIDVKYFFFYVHSETRDICGETSCPATGDFVLSHQQTLPGFTPPGSYTIYMKIVGDDNEELSCISFGFSIGFVASS

SEQ ID NO: 6523 - protein, 224 aa, Zea mays
  VARIANT 1: note = Ancestral polymorphism is M, Derived polymorphism is V
  VARIANT 2: note = Ancestral polymorphism is I, Derived polymorphism is V
  VARIANT 4: note = Ancestral polymorphism is K, Derived polymorphism is E
  VARIANT 9: note = Ancestral polymorphism is R, Derived polymorphism is P
  VARIANT 13: note = Ancestral polymorphism is A, Derived polymorphism is V
  VARIANT 48: note = Ancestral polymorphism is E, Derived polymorphism is D
  VARIANT 104: note = Ancestral polymorphism is A, Derived polymorphism is V
  VARIANT 111: note = Ancestral polymorphism is A, Derived polymorphism is T
  VARIANT 119: note = Ancestral polymorphism is S, Derived polymorphism is F
  VARIANT 138: note = Ancestral polymorphism is P, Derived polymorphism is L
  VARIANT 144: note = Ancestral polymorphism is R, Derived polymorphism is C
  VARIANT 145: note = Ancestral polymorphism is G, Derived polymorphism is D
  VARIANT 147: note = Ancestral polymorphism is D, Derived polymorphism is N
  VARIANT 150: note = Ancestral polymorphism is G, Derived polymorphism is S
  VARIANT 153..224: note = Derived polymorphism lacks residues 153 to 224
  VARIANT 154: note = Ancestral polymorphism is V, Derived polymorphism is A
  VARIANT 156: note = Ancestral polymorphism is A, Derived polymorphism is V
  VARIANT 188: note = Ancestral polymorphism is V, Derived polymorphism is L
MIIETLKARILRALKPSSLSAAGDGARSPTKPAHQCHGGDASFFDAREPLDAWELVDDGRAASPGDPLLGFPAAGGEGGAGVVLYTTTLRGVRRTFEDCNGVRALLESLGAPFQERDVSMDRGLRDQLWAAAGEKAVPPRLFVRGRDLGGAGQVLALHEQGRLAPLLPCGEAGARSRCGACAGVGFVVCGACDGSRKAGGDGGGRCRGGCNENGLVMCPLCLSI

SEQ ID NO: 6524 - protein, 430 aa, Zea mays
  VARIANT 377: note = Ancestral polymorphism is Y, Derived polymorphism is H
  VARIANT 56: note = Ancestral polymorphism is H, Derived polymorphism is N
MAIPPRTPSPPPSWSRSVTETVRGSHQFTVRGYSLAKGMGPGRYLASDVFAVGGYHWAVYLYPDGKNAEDNSNYVSVFVALASDGIDVRALFELTLLDQSGRGCHKVHSHFDRSLKFGPYTLKYRGSMWGYKRFYKRTLLEESDFLKNDCLVMNCTVGVVKNRIETPKDIQIHVPRSDMGRCFKELLSRCIGCDITFEVRDEKVRAHKWILAARSPVFKAQFFGPIGKPDLHTVVVEDVEPVVFKAMVNFIYADELPSIPELAGSASTWTSTVVVQHLLAAADRYGLVRLRILCESKLCDELTPETVATTLALAEQHHCAELKSACLKFIALRGNLGGTSFCLECEIYYMLVFFYRTHRITVHLYIKREGDKPKGPYKAEILPKEQKGKEKQHKKKEQDQGSRCLRTQPHSYTICLLYAALCVLLKVLRN

SEQ ID NO: 6525 - protein, 704 aa, Zea mays
  VARIANT 506: note = Ancestral polymorphism is S, Derived polymorphism is I
  VARIANT 470: note = Ancestral polymorphism is S, Derived polymorphism is L
  VARIANT 395..704: note = Derived polymorphism lacks residues 395 to 704
MPELRSNTRQARLRSKKLDDLQPGEPLAKPVSPALPSARKRAPTRAARGRKGAAGRGVPPAPKPRRKGVDIVVLEADPACETPLKAFKGLEVAAAAPKNLPLKQVAEVGVPKMNGESGEKIVGAEDESTATPVPERVQVGNSPEYITDRKLGKGGFGQVYVGRRVSGGAARTGPDAYEVALKFEHRNSKGCNYGPPYEWQVYNTLNGCYGIPSVHYKGRQGEYYILVMDMLGPSLWDVWNSMGQAMTPNMAACIAVESISILEKLHSKGFVHGDVKPENFLLGQPGSPEDKKLYLIDLGLASKWRENNGHHVDYDQRPDIFRGTIRYASVHAHLGRTGSRRDDLESLAYTLIFLIRGRLPWQGYQGDTKSFLVCKKKMATSPEMLCCYCPAPFKQFLEIVTNMKFDEEPNYAKLISLFDGLIEAPASRQIRIDGALKVGQKRGRLVADLEEDEQPKKKVRLGSPAAQWISVYNARRPMKQRYHYNVADSRLSQHIEKGNDDGLYISSVASSANLWALIMDAGTGFCSQVYELSPVFLHKDWIMEQWEKSYYITAIAGSSNGSSLVVMSKGTPYTQQSYKVSESFPYKWINKKWKEGFHVTSMATAGNRWGVVMSRNSGFSTQVVELDFLYPSEGIHRRWESGYRITSTAATNDQAAFILSMPKRKPMDETQETLRTSAFPSSHVKEKWAKNLYIASICFGRTVC

SEQ ID NO: 6526 - protein, 363 aa, Zea mays
  VARIANT 214..363: note = Derived polymorphism lacks residues 214 to 363
MAAKGLREVGRRRAAEVGRRCLSGGSAGPPAPAAKRKEGGKAVNLFTAVNQALHIALDTDPRAYVFGEDVGFGGVFRCTTGLADRFGKSRVFNTPLCEQGIAGFAIGLAAMGNRAIAEIQFADYIFPAFDQIVNEAAKFRYRSGNEFNCGGLTIRTPYGAVGHGGHYHSQSPEAFFCHVPGLKVVIPRSPREAKGLLLASIRDPNPVVFFEPKWLYRLAVEEVPEEDYMLPLSEAEVIREGSDITLVGWGAQLAVLKEACEDAAKDGVSCELIDLKTLVPWDKETVEASVKKTGKLLVSHEAPVTGGFGAEIAASIAERCFQRLEAPVARVCGLDTPFPLVYEPFYMPTKNKVLDAIKATVDF

SEQ ID NO: 6527 - protein, 499 aa, Zea mays
  VARIANT 246: note = Ancestral polymorphism is E, Derived polymorphism is V
  VARIANT 281..499: note = Derived polymorphism lacks residues 281 to 499
  VARIANT 295..499: note = Derived polymorphism lacks residues 295 to 499
  VARIANT 337: note = Ancestral polymorphism is S, Derived polymorphism is F
MSGSSSLWETGAPSLDTLAESAATYAVMMSSQQQQQQQTAGPSRQAVYGAPVLPEIPTRFVYRPQVATDVMSGSSSLWKTGAPPHDTLAESAAMYAATLSSHQQQQQMARPDRQAMYGAPVLPEIPTRFVYRPQTATDVMSSFSSLWETGAPPPAAYAAMLSSQQQQMPTTRPGWQAAPRGAPVPPPMNMRFVPNTMPAADAMDVGSSAPMAPSDSSSERTPSPLQRVEVRQVWAHNFDSEAKLIESLLPKFRYVAVDTEFPGTVYRPAGPAYKLEPAERYRLLRCNVDALHPVQLGLTLFDAGCVLPGGHGGATRYVWQFNFSDFDVRRHRHVVESVAALRSRGVDLDRTRQYGVAAAAVFGPRLRKWTRAGLGRAGVVTSHGGYDLAYLVKMMFGTGFRMSGSAAEFNAVVKSVLHRRRVFDIGEMARLCPHEHLHRGLDSIAGQLNAARFAADAARQAGYDSLRTCYTFMKLREIYFDDDGKLAGVDGILAEVTAF

SEQ ID NO: 6528 - protein, 394 aa, Zea mays
  VARIANT 240: note = Ancestral polymorphism is P, Derived polymorphism is L
MAAAAVVFDAEALSREEHIPAQFVWPTEERAPAGGVEEVAIPVVDLGEFLRRGVLPRGVAEACERHGVFQVVNHGVGAALLAEAYRCCDAFYALPLADKQRAQRRHGENHGYASSFTGRFHCCLPWKETLSFNCPAGAGTARAVVGYFVDVLGEDYRHMGSLLLYPIFLRACACHAARTETGKKCREVYQEYCDAMTRLALDVTEVLAAALGLDRGALRGFFEGGDSVMRLNHYPACRQPHLTLGTGPHRDPTSLTLLHQDDVGGLQVRAGGGPWRAVRPRADAFVVNIGDTFAALTDGRHTSCLHRAVVTGGGSRRSLAFFLNPPLDRVVRPPGALLQENKQAGRPRAFPDFTWREFLEFTQKHYRSDAGTMDAFVSWIAGGRRHHGGQEEGN

SEQ ID NO: 6529 - protein, 486 aa, Zea mays
  VARIANT 93: note = Ancestral polymorphism is W, Derived polymorphism is C
  VARIANT 424..486: note = Derived polymorphism lacks residues 424 to 486
MAARLAAAVLLCACAVGPATALGVNWGTQATHPLPPKAVVQVLRDNGIKKVKLFDADPAAMRALAGTGIEVMVAIPNAMLAGLAADAGQARNWVKHNVRRYDFDGGVTIKYVAVGNEPFLESYNGSFINVTLPALKNVQNALNDAGIGDRIKATVPLNADVYNSPRSNPVPSAGRFRADIAGLMADMVRFLARNGAPFTVNIYPFLSLYLNEHFPLDYAFFDGGAAPVDDHGVLYTNVFDANFDTLVAALGAVGHGDMPVVVGEVGWPTDGDRHAKASYAQRFYAGLLRRLAANTGTPARPGQRPAEVYLFGLVDEDAKSVAPGNFERHWGVLRYDGQPKFAMDLTGQGRDTTLVPARGVAYLSRTWCALNPRAKDLGRLGANVDYACTFADCTPLGYGSTCGGMDVAGNASYAFNAYYQAQNQKDEACDFQGLALPTETDPSTATCNFTIQIQTGAAAMASLGRSASAAALVLASASLQLLALLW

SEQ ID NO: 6530 - protein, 214 aa, Zea mays
  VARIANT 56: note = Ancestral polymorphism is V, Derived polymorphism is A
  VARIANT 58: note = Ancestral polymorphism is G, Derived polymorphism is V
  VARIANT 73: note = Ancestral polymorphism is R, Derived polymorphism is W
  VARIANT 89: note = Ancestral polymorphism is S, Derived polymorphism is N
  VARIANT 110: note = Ancestral polymorphism is K, Derived polymorphism is R
MSTPARKRLMRDFRRLQQDPPAGISGAPHDNNIMLWNAVIFGRYPRNTWGTRYLVATGTKTHLAPHDCFSMFRPFNLSCPYWGAFGSFSYRLKFVFGAYVSAEHRVIITKLKGTFKLTLQFTEDYPNKPPTVRFVSRMFHPNIYADGSICLDILQNQWSPIYDVAAILTSIQSLLCDPNPNSPANSEAARLFSENKREYNRKVREIVEQSWTAD

SEQ ID NO: 6531 - protein, 164 aa, Zea mays
  VARIANT 20: note = Ancestral polymorphism is L, Derived polymorphism is F
  VARIANT 8: note = Ancestral polymorphism is L, Derived polymorphism is I
  VARIANT 2: note = Ancestral polymorphism is A, Derived polymorphism is S
MAYRQVLLLAVAVAVAVACLAPLASAKQWVVGDEGGWRAKFNETGWANGKTFLVGDSLLFVYPKESHTVVKVGKDAFAACDLGANLQLGNWTGGNDVVQLDKPGKAWFICNKPNHCLNGMKLAVDVAVAVAPAPPPSAAPLTGYTVGGAVVAVACAVFAAALAL

SEQ ID NO: 6532 - protein, 326 aa, Zea mays
  VARIANT 171: note = Ancestral polymorphism is R, Derived polymorphism is P
MRPILMKGHERPLTFLRYNRDGDLLFSCAKDHTPTVWYADNGDRLGTYRGHNGAVWTCDVSRDSARLITGSADQTAKLWEVSTGKELFSFRFDAPARSVEFAIGDALAVVTTDNFMDHVPTVQVKRIAEDIDDQTEESALVITGIKGRINRAVWGPLNRTIITAGEDATIRIWDSETGQLLKESDKESGHQKTISSLSKSLDWSHFITGSLDKSAKLWDTRTLTLIKTYVTERPVNAVDISPTHDTVVLGGGQDAMNVTMTDRRAGKFEAKFYHKILQEEIGGVKGHFGPINALAFNPDGRSFSSGGEDGYVRLHHFDSDYFSIKM

SEQ ID NO: 6533 - protein, 1161 aa, Zea mays
  VARIANT 712: note = Ancestral polymorphism is P, Derived polymorphism is L
MTTSPPPAEQEQQEEEEVLVPHGPHQELPNGAQPMEVVPAEPAATVENQQIEDPPISRFTWTIENLSRVSTKKLYSEIFVVGGYKWRILIFPRGNNVEFLSMYLDVADSGVLPYGWTRYAQFSLSVVNQIHNKFTIRKETQHQFSARESDWGFTSFMPLGELYNPSRGYLVNDTCIVEAEVAVCKVVEYWSYDSKKETGYVGLKNQGATCYMNSLLQTLYHIPYFRKAVYHMPTTENDMPSGSIPLALQSLFYKLQYNDSSVSTKELTKSFGWDMHDSFMQHDVQELNRVLSEKLEDKMKGTVVEGTIQQLFEGHHMNYIEYLQLDVKGCQDVYASFDKYVEVERLEGDNKYHADKHGLQDAKKGVLFIDFPPVLQLQLKRFEYDFMRDTMVKINDRYEFPLQLDLDRDNGKYLSPDADRNVRNLYTLHSVLVHSGGVHGGHYYAFIRPTLSDQWFKFDDERVTKEDAKRALEEQYGGEEELPQTNPGLNNTPFKFTKYSNAYMLVYIRESDKDKIICNVDEKDIAEHLRIRLENDREEKERRKKEKAEAHLYTIIKVARDDDLKAQIGKDIYFDLVDHDKVPSFRIQKQMTFAQFKEEVAKEFGIPTQFQRFWLWAKRQNHTYRPNRPLCPQDEAHTVGQLKELVNKAHNAELKLFLEVELGLDLKPLPLPDKTREDIFLFFKLYEPEKEQLRYVGRLFVKASGRPQDILLKLRMLAGFSQDDDIELYEEIKFEPNVMCEYIDNRLLFRSCQLEDGDIICFQKPSKPDSADRYRFPDVPSFLTYIRNRQVVHFRSLEKPKDDEFCLEMSKIFTYDQVVEKVAEKLGVDDPSKIRLTSHNCYSQQPKPQPIKYRGVERLLDMLIHYNQTSDILYYEVLDIPLPELQALKTLKVTYHHATKDEVSVHSIRLPKNSTVGDVLNDIKTKVELSHTNAELRLLEVFYHKIYKVFAPNEKIENINDQYWTLRAEEVPEEEKNLGPFDRLIHVYHFTKDTQNQTQVQNFGEPFFMVIREDETLSSIKERIQKKLKVPDEDFSKVILYIMLTIKRSGRTKETSTEKSSTFSAWCRLSKLMRLVLVNICLVTFSSNQTLLFGQWKFAYISLGRPDYFEDSDTVALKFQRNMYGAWEQYLGLEHPDTAPRKAHTANQNRHSFERPVKIYN

SEQ ID NO: 6534 - protein, 966 aa, Zea mays
  VARIANT 570: note = Ancestral polymorphism is E, Derived polymorphism is K
MALARPSSALLSCSSSACLRRLNPLLLSAAACRRPAWAPRRVARRFSAAIASETDVFNSPEVAKSFDFTNEEKIYKWWESQGFFKPNFDRGGDPFVIPMPPPNVTGSLHMGHAMFVTLEDIMVRYFRMKGRPALWIPGTDHAGIATQLVVEKMLAAEGVKRTDMTREEFTKKVWEWKEKYGGTITNQIKRLGASCDWSRERFTLDEQLSRAVAEAFVRLHDKGLIYQGSYLVNWSPNLQTAVSDLEVEYSEEPGNLYFIKYRVAGGTRDDFMTIATTRPETIFGDVAIAVNPEDKRYAQYVGKLAIVPLTCGRHVPIIADRYVDPEFGTGVLKISPGHDHNDYHIARKLGLPILNVMNKDGTLNDVAGIYSGMDRFEAREKLWSDLVETNLAVKKEPYTLRVPRSQRGGEVIEPLISKQWFVTMEPLAEKALHAVEKGQLTILPERFEKIYNHWLTNIKDWCISRQLWWGHRIPVWYIVGKKCEEDYIVARTEEEAIAEAHEKYGKSVEIYQDPDVLDTWFSSALWPFSTLGWPDLSKEDYKHFYPSTVLETGHDILFFWVARMVMMGIEFTGSVPFSYVYLHGLIRDAEGRKMSKTLGNVIDPLDTIKEYGTDALRFTLSLGTAGQDLNLSTERLTSNKAFTNKLWNAGKFLLQNLPDKNDVSAWDVLLSNKFDSEASLQKLPLPECWVVTGLHELIDKVSRSYDKFFFGDAAREIYDYFWGDFADWYIEASKTRLYHSSDKIAAATAQSVLVYVFENILKLLHPFMPFVTEELWQAFPYRKQALMVTPWPTTDLPKDLRSIKRFQNLQSLIRGIRNVRAEYSVEPAKRISASVVATADVLEYVSREKQVLALLSKLDVQNVHFTESAPGDANQSVHIVADEGLEAYLPLADMVDVSEEVKRLSKRLSKMQSEYDALVARLNSPSFVEKAPEDIVRGVREKASEADEKISLTKNRLTFLQSTITT

SEQ ID NO: 6535 - protein, 615 aa, Zea mays
  VARIANT 581..615: note = Derived polymorphism lacks residues 581 to 615
MATSLLRLSRHRRALLAISSVRLALSTQPHVPSPSPSPTPSSARRLPHFLSFLAAAAAAAAGGATVALCDSGLDHRVGGKDSADLVVRGERKFVPQEFIDELASFLGDNITLDYEERSFHGTPQNSFHKAVNLPDVVVFPSSQDEVQRIVMACNKHKVPIVPYGGATSIEGHTLAPHGGVCIDMTLMKKIKSLNVEDMDVVVEPGVGWIELNEYLKPYGLFFPLDPGKNLVIVSNSIFTCFDGFKRMPLSFSGNINRAFIIFRRWAWGHHWRNVCYSLFWFISCEVITNLSLYFQVCRYGTMRDNVINLRAVLPNGDVVKTGSRARKSAAGYDLARLIIGSEGTLGVITEVTLRLQKLPSHSVVAMCNFKTIKDAADVAIATMLSGIQVSRVELLDEVQIKAINMANGKNLPEVPTLMFEFIGTEAYALEQTLLVQKIATEHHGSDFVFVEEPDAKAELWKIRKEALWAGFAMKPDHEAMITIVQKDVCVPLSRLAECISTSKRLLDASPLTCLVIAHAGDGNFHTIILFDPSQEDQRKEAERLNHFMVHTALSMEGTCTGEHGVGTGKMKAIPGEGVGHRVTQDDEKNKGGAGSQQHHESGKADPASRLHMTVT

SEQ ID NO: 6536 - protein, 342 aa, Zea mays
  VARIANT 50: note = Ancestral polymorphism is D, Derived polymorphism is Y
  VARIANT 90: note = Ancestral polymorphism is H, Derived polymorphism is Y
MSSPAAGTAAEPHVVEDCLGFVQLLSDGTVRRSTDYSMLRPIGRVPSDTDLPVQWKDVVYEDTRGLRLRMYRPTGAAAGETKLPVLVYFHGGGFCLLSFEVASFHAGALRLAAELPALVLSADYRLAPEHRLPAALDDAESAFAWLRAQAAPPSAAGAESDPWLAESADFARVFVAGDSAGGNISHHVAVRHASSGGGLSLAPLRLAGCVMLWPYFGGEEPTPSEAAFPADQPMGTALFDQMWRLALPAGATKDHPFANPFAPGSVPLRDLGAAFPPLLVVDPDQDPLHDRVVDYVARLKAAGKAVELVVFAGQGHGFFAMEPCGEAADDLIRVIRRFVYGA

SEQ ID NO: 6537 - protein, 343 aa, Zea mays
  VARIANT 274: note = Ancestral polymorphism is L, Derived polymorphism is Q
MSSTTTTSPASGVSGEAPPPRIVEDCLGLVQLMSDGTVKRAPASHVLLPDEEPAPPCLASADDAASVRCKDVVYDEARNLSLRMYVPSSSRAGNGGAEKLPVLVYFHGGGFIVGSFASPEFHAACARLAAALPAVVLSADYRLAPEHRLPAALQDADAIFSWLGAQEQQAAAGGGADPWLADAADLGRVFVSGDSAGANIAHHAAAAPGRRLAGCVLLWPFFGGERRTRSEAACLGDAFLTLPLYDQMWRLALPAGATRDHPAANPEVGELPPLLVAAGDRDMLIDRIREYVARARARAAAAGNRRVDLVEFPGAGHGFAILEPDGEAAGELVRVVRRFVHGG

SEQ ID NO: 6538 - protein, 283 aa, Zea mays
  VARIANT 182: note = Ancestral polymorphism is G, Derived polymorphism is D
  VARIANT 154: note = Ancestral polymorphism is Q, Derived polymorphism is H
  VARIANT 152: note = Ancestral polymorphism is Y, Derived polymorphism is C
  VARIANT 126: note = Ancestral polymorphism is R, Derived polymorphism is Q
  VARIANT 106: note = Ancestral polymorphism is L, Derived polymorphism is H
  VARIANT 105: note = Ancestral polymorphism is V, Derived polymorphism is A
  VARIANT 87: note = Ancestral polymorphism is A, Derived polymorphism is V
  VARIANT 84: note = Ancestral polymorphism is A, Derived polymorphism is T
  VARIANT 78: note = Ancestral polymorphism is L, Derived polymorphism is V
MAWPAPPFLHAPSPLEAWASAAGAVAMAFLAVSEFRGDHLAYSKFSRGGGGGGGGGQQGTKQQQQRQRVRVPSRIGMVLLYFPALAAAVASFAVPGAVDGARAHVLSAAIAVHFLKRVLEALFLHRYSGSMPLATSLLIAGHYLFAGGGMIYAQRLRRRGLPEPRVDLLLPGVLAFAVGLAGNFYHHYLLSRLRARHGGDAGGEGAYRIPSGGLFGLVACPHYLFETLAFFGLAMVSQTLFALTVAVGTAAYLAGRSRATRKWYAAKFDDFPSRVKALVPYVW

SEQ ID NO: 6539 - protein, 597 aa, Zea mays
  VARIANT 355..597: note = Derived polymorphism lacks residues 355 to 597
  VARIANT 359..597: note = Derived polymorphism lacks residues 359 to 597
MGNTCIGPSAPSDRHSFFNTVSLAVLWRPPAAADRAEPSPTAEPSSSTPCSPPSRAPNPVTISDSEHPPHSTSTALGPAAPPNPNGKPKPKPKVKRVQSAGLLAGSVLKRDSERLKDVYTLGKKLGQGQFGTTYQCVEKATGKHFACKSIAKRKLVTDEDVEDVRREIQIMHHLAGHPNVVSIVGAYEDAVAVHLVMELCAGGELFDRIIQRGHYSEKAAAQLARVIIGVVEACHSLGVMHRDLKPENFLFVNQKEDAPLKAIDFGLSIFFKPALICFAGRGEDLLGQSCEIFSDVVGSPYYVAPEVLKKRYGCEVDVWSAGVIIYILLSGVPPFWAESEQGIFKQVLKGGLDFSSDPWPSISESAKDLVRKMLNRDPRKRLTAHDALCHPWVCVDGVAPDKPLDSAVLTRLKQFSAMNKLKKMALRVIAENLSEDEIAGLKEMFKMLDTDNSGQITLEELKIGLKRVGANLKDSEITTLMEAADIDNSGSIDYGEFLAATLHLNKVEREDNLFAAFSYFDKDGSGYITHDELQKACEEFGIEDAHLEDIIHDVDQDNDGRIDYNEFVTMMQKGNNPLGKKGHCQMSFGLREALKLG

SEQ ID NO: 6540 - protein, 305 aa, Zea mays
  VARIANT 16: note = Ancestral polymorphism is Q, Derived polymorphism is L
  VARIANT 166: note = Ancestral polymorphism is T, Derived polymorphism is M
MRLLCCLAALVVLALQHQCHGLLLPLTNTMLSSLRGTNGTTTPVHHLLRASSLRSAARHGRHRARRSPPSPPSPGRHRQLSLPLSPGSDYTLPDDAAAAAETDGFVYTPLLHNPKHPYFYSVALEAVSVGAARIQARPELARVDRAGNGGMVVDSGTTFTMLPNEMYARVAEAFARAMAAAGFARAERAEEQTGLTPCYRYAASDRGVPPLALHFRGNATVALPRRNYFMGFKSEDAGAGTRKDDVGCLMLMNGGDASGEEGDGPAGTLGNFQQQGFEVVYDVDAGRVGFARRRCTDLWDSLSRR

SEQ ID NO: 6541 - protein, 227 aa, Zea mays
  VARIANT 197: note = Ancestral polymorphism is T, Derived polymorphism is I
  VARIANT 85: note = Ancestral polymorphism is E, Derived polymorphism is D
  VARIANT 44: note = Ancestral polymorphism is E, Derived polymorphism is G
MSNGDTLDKLVVFLAKRDGIDKLVKTFQYVSKLAHWGAESSLPELAQRAKSWETASGLSRKAFRSGRFLAGFNALRRGPVPVPGELGALAVLANAGEMVYFFFDHFTWLSRAGVLEPWLARRASFVSAFGEAVGYVFFIAMDFIMIRRGLRQERELLREGAKDAAEKEVRRIRVDRVMRLMATAANAADLIIAVAETDPNPFCNHAVTLGISGLVSAWAGWYRNWPS

SEQ ID NO: 6542 - protein, 675 aa, Zea mays
  VARIANT 16: note = Ancestral polymorphism is S, Derived polymorphism is L
MTVSLLLSPVPCVLASAILLGGDKLVAADRCVLALRFPVSALLAFKRAIYEDPLSKLSDWNSKDEDPCAWSGVGCSGLNNRVVALDLSNSSLQGFLAPEIGSLRSLQTLVLDRNTFMGSIPKGIGMLQNLIELNLSSNQLAGPIPSEIGDMAKITKIDLHANRLDGTIPPELGKLGSLLELRLSNNCLTGIVPASNDSDVESASTSDQTGLCQLSQLTNIDLSYNFLVGDVPACLQQIQRYTFAVCGLKCFTCLPELTCFTVFEQIKLGRELLPEQHIKPPTSTIEQVYYIITGETNQDRGKDNDADENVQKGLPEPLWLLILEVIAAVSLLCFLTLCTMTGLRRCRARSSGSETSVPWTRAVSWKENTVISIDDDLLVNVPKISRQELAEACEDFSNIIGSSQETVVYKGTLKDGREIAVVSLSVPVIEMSRPSHENVAKMVGYCKESDPFSRMLVFQYPPNGTLYEHLHDGDGWQLSWPRRMKLALAISRALRYLHTELQPPFAVAALTSSSVYLTEDFSPKIIDFERWRYLATKPGFGSLNGGSVNSVTDSRHKRFMDVQANTYAFGVILLELVSGRASVSKDTGGLVDWARKHLEHPEEFGKLVDPRLQSVNQESLGIVCNVVNLCIDLEPSRRPSMSMIAAILEEGIEASAATLLRNSSLAWAEAELAIS

SEQ ID NO: 6543 - protein, 97 aa, Zea mays
  VARIANT 81: note = Ancestral polymorphism is A, Derived polymorphism is V
  VARIANT 77: note = Ancestral polymorphism is R, Derived polymorphism is C
  VARIANT 54: note = Ancestral polymorphism is E, Derived polymorphism is K
  VARIANT 51: note = Ancestral polymorphism is P, Derived polymorphism is L
  VARIANT 42: note = Ancestral polymorphism is R, Derived polymorphism is Q
  VARIANT 41: note = Ancestral polymorphism is R, Derived polymorphism is C
  VARIANT 32: note = Ancestral polymorphism is P, Derived polymorphism is S
  VARIANT 13: note = Ancestral polymorphism is G, Derived polymorphism is E
MEKARRRHVLAFGEWNYYYSSSSSTSRTPRPSRPSPAGGTRRSRRVVVVRPVDEDLYRVPPPDDNDGAAAVSRLPRRRKRAARRSLWMGCLGLNCVA

SEQ ID NO: 6544 - protein, 160 aa, Zea mays
  VARIANT 153: note = Ancestral polymorphism is S, Derived polymorphism is L
  VARIANT 85: note = Ancestral polymorphism is D, Derived polymorphism is V
  VARIANT 74..160: note = Derived polymorphism lacks residues 74 to 160
  VARIANT 41..160: note = Derived polymorphism lacks residues 41 to 160
  VARIANT 16: note = Ancestral polymorphism is R, Derived polymorphism is H
  VARIANT 1: note = Ancestral polymorphism is M, Derived polymorphism is I
MEQLAKIEPVLEDLRHRRDGRVKEFKAIQSKIVRLQAEISGAIDHGDPAAPVVDENDLSSKRLGELKEHLNDLQTEKNGRLQKIDIQTNSIHEMCNIMSIDLKMALKDVHSSYAELGGSKPMSISNNSLDKLSKKVHVLNHEKKQRLRKVRISLKLVISL

SEQ ID NO: 6545 - protein, 169 aa, Zea mays
  VARIANT 17: note = Ancestral polymorphism is A, Derived polymorphism is V
  VARIANT 24: note = Ancestral polymorphism is A, Derived polymorphism is T
  VARIANT 29: note = Ancestral polymorphism is D, Derived polymorphism is E
  VARIANT 70: note = Ancestral polymorphism is A, Derived polymorphism is G
  VARIANT 74: note = Ancestral polymorphism is A, Derived polymorphism is T
  VARIANT 81: note = Ancestral polymorphism is Q, Derived polymorphism is P
  VARIANT 117: note = Ancestral polymorphism is G, Derived polymorphism is A
MDAAGARPSTPSAAAAAVVGASVADEPRDARVVRELLRSMGLGEGEYEPRVVHQFLDLAYRYVGDVLGDAQVYADHAGKAQIDADDVRLAIQAKVNFSFSQPPSRESNIVASGGLGGEVFIWDLDAALAPVAKSVDAKEDEVPNGNSGPALTTLCSINSSSYYVDKRFL

SEQ ID NO: 6546 - protein, 681 aa, Zea mays
  VARIANT 459..681: note = Derived polymorphism lacks residues 459 to 681
MADTVQYRLERMTDELDDLERRGLFTRGELADVVRKRRDFEYRLRRHSPLRQDFLDYIAYELRLDSLRNLRKRAIIRAAAEDDDDEPQHDARSSDDEGGRRKRKKDKSKKKWKKSVSDVAGVLRVLDIYRMATVRFKGDLDLWFRYLEFCRDKRHGRMKQVLAQAIRFHPKVPGLWIYAAAWEFDQNLNVAAARALMQSGLRSCPQSEDMWIEYLRMELTYLNKLKARKVALGEDVKTLQKKDNDASQWKEENKELFMPLNEQVKDPKEPGSAGDALEEKEDLFWRQGLLIIQTIYHGAVEALPSSLTLRKKFLEILNSVDLAHSDELKLEVLDDLKRDFSHSEDYWDWFARLQLSNLNSSSNSNRKDAISNKLNRSIQVYDEAIRKLPNSKMYSLYAKFWMDVIYTDREDSVTLFQDSEFDASEFTSSILKVYENAESCGCLTEDLACQYISLYLKLERLEEAKTLAEKLCDGPLSNAANLWSLRFTMEINSIATAPGSSSLSKENLSSLLDLFSTVLSKLSVTEAERLWHMAMKLFSHDKVCFEKLVKCAMLSLSLAGGSDSGASVSSAIVGWYLQRDGVKHARKMYKRLLALPRPSLKFMQYCIALEANLASLGDNGALKDARRLYDSALDLYPQEREVWRSYYDLELKMGTSESANAVYSRSRKVLGDSTALTAPRG

SEQ ID NO: 6547 - protein, 221 aa, Zea mays
  VARIANT 154: note = Ancestral polymorphism is V, Derived polymorphism is A
MMASSLLFVVVLLAALSSPPPSAVLAADDDGTTHLHFFMHDVVTGSNPTAVQVIKGAGSSVVPGLAFGDTTVIDDALTETSSPTSAAVGRAQGFYMMSSQSGIVLMVCANLLLTAGDHNGSTLAVVGRDDVAADVRELSVVGGTGRFRMATGYVLWKTSSMNGPDATVELDVHVRTATTAATGSGTTGAFSGAAAKRVGAGWVIACAVAVVGAVVGSGVWW

SEQ ID NO: 6548 - protein, 479 aa, Zea mays
  VARIANT 408: note = Ancestral polymorphism is R, Derived polymorphism is S
MARRRPMDYEELNEKVKKAQYAVRGELYLRASQLQKEGKKIIFTNVGNPHALGQKPLTFPRQVVALCQAPFLLDDPNVGLMFPPDAIVRAKRYLAMAPGGLGAYSDARGIPGIRKEVADFIHKRDGYPSDPELIYLTDGASKGVMQMLNAIIRNERDGILVPVPQYPLYSAIISLFGGSLVPYYLEEEANWNLDFANIRQAVAEARSKGITVRATVIINPGNPTGQCLSEANIRELVRYCYHENLVLLADEVYQQNVYQDERPFISARKVMFDMGPPISREVQLVSFHTVSKGYWGECGQRGGYFEMTNLPPKTVDEIYKVASIVLSPNVPGQIFMGVMVNPPKPGDISYPKFTAESKSILESLRRRARMMTDGFNSCRNVVCNFTEGAMYSFPQIQLPARAIEAAKRAGKAADVFYCLKLLEATGISTVPGSGFGQKEGVFHLRTTILPAEEDFPTIMSSFKKFNDSFMEQYEGYSRM

SEQ ID NO: 6549 - protein, 160 aa, Zea mays
  VARIANT 30: note = Ancestral polymorphism is N, Derived polymorphism is I
MSDEEHQFESKADAGASKTYPQQAGTIRKNGYIVIKGRPCKVVEVSTSKTGKHGHAKCHFVGIDVFTGKKLEDIVPSSHNCDVPHVDRTEYQLIDITEDGFVSLLTDSGNTKDDLRLPTDEALEGQIKSGYDDGKDLLLTVMSSMGEEQICAVKEIGGKN

SEQ ID NO: 6550 - protein, 717 aa, Zea mays
  VARIANT 405..717: note = Derived polymorphism lacks residues 405 to 717
  VARIANT 362: note = Ancestral polymorphism is L, Derived polymorphism is W
  VARIANT 186: note = Ancestral polymorphism is R, Derived polymorphism is Q
MEEHQVKPSDLPPTSLHNQDSAATPVTSADPARPAASNDSPSQVASAAPAAVSAPTAAPAEDAAGREASASVFSASGLSSWAKNLKIPQPSPGQESPTGKNTFARLTSGLGLRLSPKAAQQDEGAEGSTSPTTGQPGVFGSLTKGIVDSSKNAVKAVQVKARHMVSQNKRRYQDTITSVFIHHLQRWFNMMEKCNDLILLLTQEGGFDLDMTYITENIIAMGFPAGDLSSGLFGYFEGNNTPFQGFYRNHMEEVIRFFEMHHKSSNLIILLQGKYKVYNLCSERLYDASLFEGKHDEFVGALYWKIKFVSVFQVACFPFDDHNCPPIQLVISFCHSAYSWLKEDIENVVVVHCKAGKARTGLMISSLLLFLKFFPTAEESIEYYNQKRCVDGKGLILPSQIRYVKYFERILTYFNGENQPPRRCMLRGFRLHRCPYWIRPSITVSNHNGVLFSTKKHPRTKELMPEDFWFSAPKKGIMVFALPGEPGLAEVAGDFKIQFHDRQGDFYCWLNTTMMENRVTLNPTDLDDFDKRKLPSPGFQIEVVLVDYDGSQPAKPKPGAGPAADKSHADSSASTVAKENSAAPEESNKGTGSNNDRDEVFSDSDGEDGSSNGRKEKTAGGGQSSVNAAKPSQTGNMEEAAASAAASRLDKVAISSEQGTTKAPDGTSLKTEVSSKASSTTAPPPPAADSSSMSEFKAIAADASVFSFGDEDDYESE

SEQ ID NO: 6551 - protein, 1771 aa, Zea mays
  VARIANT 1637..1771: note = Derived polymorphism lacks residues 1637 to 1771
MDPDAGGAGAGGRAGFERACRLPNTVHSEVLPSLPLPTLPRELGFDALRDDEPLAAPDRPDMIMQAANIARILADTDVSHLGFTAADNVEVDPSRCSWLWREVLKHNPDAFKVKAPGPSSQGPFGGPGYHNQEREKHFEHLTPNMSKTRNGSAFSQDEINSHREHFRNELTPDSVASKKPKVRKKEINNSVSTSPHSIPNNQEVIATFCEAVEDFCGKAEIPDDGDGGDWLSIPLDDVKVLVNEITSVRSKRILHEVPMDTVTRLLDVIDRQIRCSQGLSIDVKENSDAFDAEPLVFSALESSHAALAIMTHHDMPKQLYREELIERIIDFSRHQITDCMAASNPTFRALYKPAGNVANDGDDDEGDLENGQVSKRRRTATNLSMRKSSNRVSASVYSAVQKLCLILGFLKELLTTVRLSDSCILQLAKTCFTTFLVDNMQLLQLKAIGVICTVFSSYTQHRSYLVDETLHLLRKLQFSKNAVRTYHLADEDQKQIQMITALLVHLVQFSAIVPDSLKGTVDWTTIVDASSDADYYPIQCHEAATEACCRFWTDVLQRFTAAKSQDMSETKGIIDNLVQDFLTILNLPEYPAAASILEVLCVLLLQNAGLKSKDINARCFAIDLLGGIASRLKRDSVVCSEEKLWILQDFTDKGSDGSIFLKNKCCVCLGGRGINIACNECGRCFHSDCMGAGSQDNLQRDSVCPLCFCKQQLNVLQSYCQSQIKENGKKTAASASKKSAKPTEVSAVEIVQQILLSYLQEAGSQDDGNLFTRWFYLCIWNKDDQHSQEKIIYYLARLKSKEILRDSGNGLAISRDSAKKICLALGQKNSFCRGFDKILALLLASLRENSPVIRAKALRAVSCIVEADPEVLGDKRVQYAVEGRFCDSAISVREAALELVGRHIASHPDVGLKYIEKVAERIKDTGVSVRKRAIKIIRDLCASNPNTDTTHAFVEIISRVNDEESSVQDLVCKTFYELWFEEPTGSHKHLVADGSSVPMEIAKKTEQIVDMLRKMPNHQPLITIIKRNLTLDFLPQSTKAAGINSSMVASIRKRCELICKRLLERILQVEEGAANEMEIHTLPYIVALQAFCIVDPTLCIPVTDPSKFVVTLQPYLNIQVDNKSSAQLLESIIFVIDAVLPLIRKPPQNVVEELEKDLKHMIVRHSYLTVVHACIKCLCALSKSAGRGPGLVENLVNIFYKHLCGANSDSQLLGRSLFCLGLLLRYGYQLMLTSENQLDFPKIINLLQRKYLLKDDFSLKVRALQTLGYILIAKPEFMLQKDMLNLIETALSSEVDYRFKIQGLQNLYEYLRDAESQLTAESTAKPPGQCEINGRSEVPVAAGAGDTNICGGIIQLYWSSILERCLDTNDQVRQSALKIVEVVLRQGLVHPITCVPHLIALEMDPLEGNSKLAHHLLMNMNEKYPSFFESRLGDGLQLSFKFFESIVSNHKMSANIKSNPIAFVKPGISRIYRLIRSNRNSRNKFVHSIVRKFESDSRSRSTVSFLVYCAEVLASLPFTCSDEPLYLIYDINRAIHLRAGGVEGNLKRWTSMSQSQEMAGMPTLPGESHVVMQEEPGGYYDNMGDATERVNDNPCSTSDVDIAKVQGDCHDAIALQLLLKLKRHLKVVYGLDDARCQAFSLKEPPKSGETFSRQNVSFNIGNTNLSLPSCLQDAASVYQDFKTVLREDSMDFAVFVPSVQTRKRPTPRNTTSPTPRSMTRVRRTAAPSVTKARGGARGDDSDDTDDDDWTGGPRVLDFSGGGRVTRQRVQV

SEQ ID NO: 6552 - protein, 846 aa, Zea mays
  VARIANT 141: note = Ancestral polymorphism is S, Derived polymorphism is C
  VARIANT 509..846: note = Derived polymorphism lacks residues 509 to 846
MRLLPREADKLALHNAGFLAQKRLARGLRLNYTEAVALIAAQILELIRDGDKTVTDLMDLGKQLLGRRQVLPAVPYLLHTVQVEGTFVDGTKLVTVHDPISLDDGNLELALHGSFLPVPSPEKFSSDDVEEYPGEIHYSSSRIVLNLHRRALSLKVVNKADRPIQVSTPGYFCLDPENICPVPPCYVELVRVFQTTCRCKRFFLNYKPLVTLMKISKYCLILQIGSHYHFIETNPYLVFDRKRAYGMRLNILAGTAVRFEPGDAKSVILVSIGGHKVIKGGNGIADGPIDSSSLNVVMQKVNANSFGHEDYPDAREGIIGDGSFDCTVDHEKYASIYGPTTGDKIRLGDTNLYAEIEKDFAFYGDECIFGGGKVLRDGMGQASGYPESFCLDTVITNAVVIDYTGIYKADIGIKGGLIVAIGKAGNPDVMDGVHNNMIVGVNTEVIASEGMIVTAGGIDCHVHFICPQLAEEAIASGITTLVGGGTGPAHGTCATTCTPAPSQLKLMLQSTDQLPINMGFTGKGNTSKPEGLAEIIKAGAMGLKLHEDWGTTPSAIDNCLSVAEDFDIQVNIHTDTLNESGCVEHTIAAFKGRAIHTYHSEGAGGGHAPDIIKVCGVKNVLPSSTNPTRPFTSNTVDEHLDMLVITRTWQTANKMKVQRGSLPGSGDANAAPDSDNLRIRRYIAKYTINPAIVNGFSDFVGSVEVGKLADLVLWKPSFFGAKPELVVKGGAIAWANMGDPNASIPTPEPVVMRPMFGAFGKAGSSNSIAFVSKAAKEAGVATEYRLEKRVEAVGRVRGLTKLDMKLNDALPKIEVDPETYTVTADGEVLTCQPAPTLPLSRNYFLF

SEQ ID NO: 6553 - protein, 678 aa, Zea mays
  VARIANT 27..678: note = Derived polymorphism lacks residues 27 to 678
  VARIANT 62..678: note = Derived polymorphism lacks residues 62 to 678
MAGGDRERDADEETRNQMMQNLFGDQSEDEDDADDDDVAEMVDEDDGHQPQSPPQSPPQRHQELDDDAYDDEEEDARSHAPARASGYHSEEVDGEAENGGEGEGESEGQVVIEEESEGEAHGADLDQGESDGDKVQSSPERELDDQRMEPDARGMDSEDEGYQQRTVSGRRRGVIASESEGSEDSYYAAGAQEDEEPRQTRKQSSPLEEERDHEVVRDVFGDSDEDEPAPYRVRHEIDEDSHRSHMEDEGHYEKDMQPDDVVADEDMRYESDDNRELKPKEKPVGPPLDLVVPFKQPPARPDKMNVIKVSNIMGIDPKPFDPKTYVEEDVFVTDESGTKKRIRLEDNIVRWRTIRNADGTTSCESNARFVKWKDGTMQLLIGNEVLDISVHEAHHDQSHLFLRHGKGILQSQGRLLHKMRFMPSSLSSKSHRLLTALVDSQNKKTVKMQKWFETKDPEKAKMEKERVLGQNIRAHSILQRKREKVNRKYTQPARPRRQLSPGFLEDALDEDDEPGYDSRRMPGRRRFEDELEAEALAERRIINAKKSNMSRNVPHKPPYPPARPPRRQADEYSGSEREESEYETDGEDIEHSLPRGRREDELDEEEEYEEDVEEEEAPLSDEEMEAPKRKRESGGGGQRREELVSEEDDEDHDDSPPRKQPAVSHRRKAVVFDDSDED

SEQ ID NO: 6554 - protein, 332 aa, Zea mays
  VARIANT 212: note = Ancestral polymorphism is S, Derived polymorphism is N
  VARIANT 136: note = Ancestral polymorphism is L, Derived polymorphism is F
MSKARVYADVNVLRPKEYWDYEALTVQWGEQDDYEVVRKVGRGKYSEVFEGINVNNNEKCIIKILKPVKKKKIKREIKILQNLCGGPNIVKLLDIVRDQHSKTPSLIFEYVNNTDFKVLYPTLTDYDIRYYIYELLKALDYCHSQGIMHRDVKPHNVMIDHELRKLRLIDWGLAEFYHPGKEYNVRVASRYFKGPELLVDLQDYDYSLDMWSLGCMFAGMIFRKEPFFYGHDNHDQLVKIAKVLGTDGLNVYLNKYRIELDPQLEALVGRHSRKPWLKFMNADNQHLVSPEAIDFLDKLLRYDHQERLTALEAMTHPYFQQVRAAENSRTRA

SEQ ID NO: 6555 - protein, 336 aa, Zea mays
  VARIANT 185: note = Ancestral polymorphism is S, Derived polymorphism is R
MGGGGGVHRRAAALLFVVVLAAVDQAGKSVCEAQLRRGYYAGVCPDVESIVRGVVARKVQQTAATVGATVRLFFHDCFVEGCDASVMVASTANNTAEKDHVINQSLAGDGFDTVIRARAAVDAVPGCRGKVSCADVLAMATRDAIALAGGPSYAVELGRLDGLRSTASSVNGRLPAPFFNLDQLSQMFAANGLSQADMIALSAGHTVGLAHCGTFSGRLRGPSAPDRTLDSGYAAQLAAWCPAGVDPRVAVAMDPVTPVAFDNQFFRNLQAGKGLLASDQVLHADPRSRPTVDALAQSSVAFERAFVEAMTKMGRVGVKTARDRQGNVRRDCAVLG

SEQ ID NO: 6556 - protein, 89 aa, Zea mays
  VARIANT 18: note = Ancestral polymorphism is N, Derived polymorphism is D
  VARIANT 35: note = Ancestral polymorphism is S, Derived polymorphism is N
  VARIANT 43: note = Ancestral polymorphism is A, Derived polymorphism is E
  VARIANT 84: note = Ancestral polymorphism is R, Derived polymorphism is H
MEIFLSALLGDLASRSINLLISTRSRPTALDVGDSLQSAILRAQVIVDEATGRHITNQAMLQQLDMLRDAMHQACYVLDTFGIRIFGTK

SEQ ID NO: 6557 - protein, 143 aa, Zea mays
  VARIANT 22: note = Ancestral polymorphism is E, Derived polymorphism is D
  VARIANT 48: note = Ancestral polymorphism is N, Derived polymorphism is K
  VARIANT 51: note = Ancestral polymorphism is D, Derived polymorphism is N
  VARIANT 66: note = Ancestral polymorphism is S, Derived polymorphism is G
  VARIANT 80: note = Ancestral polymorphism is I, Derived polymorphism is T
MPDSNEDRRLLVVVDLVGDLGEAAWNVLYSTCKQLMASRSRSKIILTNRSDRIVKFGTTRPALRLSYVSSEAFWYFFKTITFGSTDPKMHPRLLHLAMDIAKTLNRSLIAANINACLLRENFDVRYWSKVRAFLRGNVQKHII

SEQ ID NO: 6558 - protein, 491 aa, Zea mays
  VARIANT 141: note = Ancestral polymorphism is L, Derived polymorphism is S
  VARIANT 154..491: note = Derived polymorphism lacks residues 154 to 491
  VARIANT 173: note = Ancestral polymorphism is A, Derived polymorphism is S
MEAFLSAVLGELTSRSINFIINKCSKPPAMAVEESLQRALLQARAIIEEAVGRRITNQAMIQQLGMLRDTMHRGYYALDAFRYQPRYGEDGNVPAVRRFISLSKVHSVKDPYFSCRTAQFREQLQDALDRLSSMIVDLNELVVFLASYPRLYRQPYNMHILLGNCMFGRQVEAELVTEFLLHTQPHSLQELEVLPIVGPLRVGKSTLVAHVCKDERVREYFSEILWLYDHDFTDDELAFKQGCAMENQISNLNKDKRVLVVVELSGDLYEDAWNRLYLASKQSICSGSKIIVTSRSDKIVRFGTTRALTLKLLSHEAYWYFFKVLTFGSNDPNTHPRLAQLAMEIARKLNCSINGAYVTSYLLRDNFNVHFWCKVLSFLSWCIQKHISKFGVHPSVLFSQNVPVELGRMAAPSEDFMLCDQYHRSSQEEVPEIRIQDVMYGSIKRHGKFDVLVWRSQIPPYYSYVNACVIQERKNTGGKRKRCINDGATVS

SEQ ID NO: 6559 - protein, 619 aa, Zea mays
  VARIANT 379: note = Ancestral polymorphism is T, Derived polymorphism is I
  VARIANT 328..619: note = Derived polymorphism lacks residues 328 to 619
  VARIANT 77..619: note = Derived polymorphism lacks residues 77 to 619
MWRSCVSRGLSRAKASASRLLSTASSSYTVVDHTYDAVVVGAGGAGLRAAIGLSEHGFNTACITKLFPTRSHTVAAQGGINAALGNMSEDDWRWHMYDTVKGSDWLGDQDSIQYMCREAPKAVIELENYGLPFSRTEEGKIYQRAFGGQSLDFGKGGQAYRCACAADRTGHAMLHTLYGQAMKHNTQFFVEYFALDLLMDNDGKCQGVIALNMEDGTLHRFRASNTILATGGYGRAYFSATSAHTCTGDGNAMVARAGLPLQDLEFVQFHPTGIYGAGCLITEGSRGEGGILRNSEGERFMERYAPTAKDLASRDVVSRSMTMEIREGRGVGPLKDHIYLHLNHLPPEVLKERLPGISETAAIFAGVDVTKEPIPVLPTVHYNMGGIPTNYHGEVVDIKGNNPDAVIPGLMAAGEAACASVHGANRLGANSLLDIVVFGRACANRVADISKPGEKQKPLEKDAGEKTIAWLDKLRNANGSLPTSKIRLNMQRVMQNNAAVFRTQETLEEGCELISKTWESFHDVKLSDRSLIWNSDLIETLELENLLINACITMYSAEARKESRGAHAREDFTTRDDEKWMKHSLGYWENEKVRLAYRPVHMKTLDDEVESFPPKARVY

SEQ ID NO: 6560 - protein, 526 aa, Zea mays
  VARIANT 202: note = Ancestral polymorphism is W, Derived polymorphism is R
  VARIANT 299..526: note = Derived polymorphism lacks residues 299 to 526
  VARIANT 312: note = Ancestral polymorphism is P, Derived polymorphism is L
  VARIANT 341: note = Ancestral polymorphism is S, Derived polymorphism is L
  VARIANT 424: note = Ancestral polymorphism is D, Derived polymorphism is G
  VARIANT 446: note = Ancestral polymorphism is A, Derived polymorphism is V
MAEAVGSALVQGAVSQILSNLIDGHEEERGEKSKDDTETNLERLEMAHIRLGAALETSERWRGVTADNASLLRWRRNLKRAARECDAMLHECKRRVLEDEATEREASRGRLAFPRRAARAARALVSSALGLNNLQPSRAAVRRFEWYADGAGEFLRFVELGCCAPRCRVPSAADAFVRNLAAGRKLQHVVELGDRCTFFLLWLPFFISDPPAEERGVEVVLFFIQKDGLAPQNSFYFSVTLQLSESTDVLGVAVECLDLYTPLFGSRVETVRNMLTRLPAQDLSCSWAPFLDSRQKRHWENLHSCVSQWHRPDPSCCRQHELHCGSSSNTSTPPDVSLLASVIGVHLQCQVALQDEGSLQYLTAGLLFAPHAGSSQDLRPAADDDSASSAVVVSHHSSDDEHRRAHAGVTLAQVEEVTLPMAVDYFRRYADAPVYRMLWKARHGAAYIQVAKAASGTETQSARRGGSRARSAAMRRRQEEEEPYVIPHFLSLWAAHAPSRLQGSIARWMRKEKENRLAPSQMRLEF

SEQ ID NO: 6561 - protein, 516 aa, Zea mays
  VARIANT 80: note = Ancestral polymorphism is P, Derived polymorphism is S
  VARIANT 314: note = Ancestral polymorphism is R, Derived polymorphism is S
MASSSENAAVPPEEEPQAPPPPDTEPTEAAPGEAEDEPQTLERAQELFDRGSKAIEDEDFVDAVDCLSRALEIRLGFPFPFPFPPSTSATLAVKRLRVSAEFGPIGGWASHYGELAPECASTYFKYGCALLYKAQEESDVLGNVPKSLPNEDSVKSTATKDDSGTSKVSGTDAEDAASSEKVDAEEGHNSNGKNQENGNGEVEKDDDDVDDDEKMGDEEDNDLDLSWKMLDIARAIVEKSQDNTMEKVKIYSALAEVATEREDMDNSLSDYMKALSMLEHLVEPDHRRVVELYPLCHSYTILSAKERYYNLHLRNFRICLVYELVSKIGEAISYCAKAISLCKSRIQSLKSSKDALLAGIDGDASAAEAEGGSEKSAIEKELEQLTSILPDLEKKLEDLSEANPSADMDEMVKAIVSRVTDVMPKAASFTSSQMATSSNGFDSSVMSTAATTGSSGSTVTDLGVVGRGVKRASIKPISAEPAAKKPALDSPSQQGDSSINSEVVPATQTGDESVSK

SEQ ID NO: 6562 - protein, 571 aa, Zea mays
  VARIANT 391: note = Ancestral polymorphism is S, Derived polymorphism is L
MEMASGAARMVSKPVDDDLKAAAAAPEPWLGREKAGCSRGALLVGGLLLACFVLGRESASSMPWLQIDVAKAKLTDTTNGTAAPGLTTDAPRGRDELFGGLLPAGMDRRACRSRYEAWRYYKHFPYAASAHLQSKLRAYEARHRRCAPGTPLYAKAVEQLRSGRSAEGLECTYVVWLPFDGLGNRMLSMVSGFLYALLTGRVFLAALPAAGSGDLFCEPFPGTTWRLPVEDFPVPDLVPRGQSIERSYTRLLDAKAVGPAANATALGVPPYVYLSLGWQLKDPLFFCGEHQQVLRDVNWLLLYSDLYFAPSLYGVAEFQDELRRLFPSKESVSHLLSRYLLHPTNPVWRLATTYYRSYLAPAKRRIGVQIRMFGFGSIPVDDMYSQILACSRQEHVLPETDDDATGGNEAAAAASSEDGSNSTAILVASLYADYYERLRRRYYEHPAKGGERVAVFQPSHEERQATDNMAHNQRALAEIYLLSFCEELLTSGRSTFGYVSSSLAGVRPTILLTADGHKVPEPPCRRAVSMEPCNLTPPLRVHCQGKPVDKEDLARHLRVCEDSKVSVKLFD

SEQ ID NO: 6563 - protein, 58 aa, Zea mays
  VARIANT 52: note = Ancestral polymorphism is S, Derived polymorphism is P
  VARIANT 36: note = Ancestral polymorphism is L, Derived polymorphism is P
  VARIANT 33: note = Ancestral polymorphism is T, Derived polymorphism is A
  VARIANT 32: note = Ancestral polymorphism is V, Derived polymorphism is A
  VARIANT 28: note = Ancestral polymorphism is G, Derived polymorphism is R
  VARIANT 25: note = Ancestral polymorphism is N, Derived polymorphism is K
  VARIANT 13: note = Ancestral polymorphism is E, Derived polymorphism is G
  VARIANT 12: note = Ancestral polymorphism is T, Derived polymorphism is K
MERLQWLVQHSTESYEEARECLKINYFGTKYVTEALLPILISSSDGRLINVSSNYGLL

SEQ ID NO: 6564 - protein, 193 aa, Zea mays
  VARIANT 29: note = Ancestral polymorphism is P, Derived polymorphism is S
  VARIANT 34: note = Ancestral polymorphism is R, Derived polymorphism is Q
  VARIANT 58..193: note = Derived polymorphism lacks residues 58 to 193
  VARIANT 64: note = Ancestral polymorphism is D, Derived polymorphism is N
  VARIANT 65: note = Ancestral polymorphism is R, Derived polymorphism is K
  VARIANT 68: note = Ancestral polymorphism is F, Derived polymorphism is S
  VARIANT 69: note = Ancestral polymorphism is E, Derived polymorphism is V
MGLCMSRGETTPTRAAPPPSKDTALVLMPSGEMREYPPHTATAARVLQDASASASADWFLCDADRVGFEGPVPALGGAEALRAGQIYFVLPAAARRRGLRREDVAALAVRASAALSARHSCARGKRSRRCGAVAPLVFAPPPPPEDEEEEHGRWETFVAARKAPPVRRHSRPTSRRSRSARWRVSSEGSDWRG

SEQ ID NO: 6565 - protein, 545 aa, Zea mays
  VARIANT 480: note = Ancestral polymorphism is A, Derived polymorphism is V
  VARIANT 453: note = Ancestral polymorphism is P, Derived polymorphism is L
  VARIANT 451: note = Ancestral polymorphism is L, Derived polymorphism is Q
  VARIANT 450..545: note = Derived polymorphism lacks residues 450 to 545
  VARIANT 430: note = Ancestral polymorphism is A, Derived polymorphism is V
  VARIANT 406: note = Ancestral polymorphism is A, Derived polymorphism is T
  VARIANT 398..545: note = Derived polymorphism lacks residues 398 to 545
  VARIANT 395: note = Ancestral polymorphism is T, Derived polymorphism is A
  VARIANT 392: note = Ancestral polymorphism is D, Derived polymorphism is H
  VARIANT 385: note = Ancestral polymorphism is L, Derived polymorphism is V
  VARIANT 380..545: note = Derived polymorphism lacks residues 380 to 545
  VARIANT 375: note = Ancestral polymorphism is A, Derived polymorphism is V
  VARIANT 338: note = Ancestral polymorphism is S, Derived polymorphism is F
  VARIANT 333..545: note = Derived polymorphism lacks residues 333 to 545
  VARIANT 330: note = Ancestral polymorphism is G, Derived polymorphism is E
MAEFKIGRLDGQPPRVRNVPIAVTPEGFWCCPSQAALQKTAKSPNQQGRPRGGASPAPSKASSVQRVPTISSEKRAQSTPTRSRTHSDEQVCPPANAVAAPDPPKVVPAPAPEKRPKQHKISVGFGQLGTSDLKVVLHGMEGVAVKMIVHKSILAENSTFFADRISRQSPVSCIEVPDCEDVEIYVETVGLMYCKDVKQRLIKQNVPRVLRILKVAESLGFRACITSCLDYLEAVPWVGDEEENVVSSIRQLHGEDHRANPLLRRVTSDTLTNPPNDTLAHIIELVLKSSEDRGRREMKSLVLKLFKESSNGSSANGSSADSSCITTLYGCFQNCLDSLLALSRQAAGADELAGEEESSSAGSKEQAFRKIGLEADNLLWLAEILSERHAADELTAIWASQTELAAELHPRIPVMHRHLVSCVTARLLVAVGKGEALPSRETRRRLLDVWLPPLMDDYRWLQHGCRWFDRAAVEDGIGQAVLTLPLEEQQAVLLAWLGRFLRAGGDGCPNLQRAFEVWWRRTFVRPYAEQPGSGSSSWSSSSRRH

SEQ ID NO: 6566 - protein, 123 aa, Zea mays
  VARIANT 46: note = Ancestral polymorphism is V, Derived polymorphism is M
  VARIANT 15: note = Ancestral polymorphism is N, Derived polymorphism is Y
  VARIANT 3: note = Ancestral polymorphism is Q, Derived polymorphism is E
MNQEPTLFASTILENILDGKPDATISLKEKIQLHSTSLLFMEQIGVDELMWSWDLTQPRAGEFSFTMVQGNDALQDHNQVETVVATTFIGVYDNLGGVEASCFISNHLCVHTVCMCLSCYSLA

SEQ ID NO: 6567 - protein, 314 aa, Zea mays
  VARIANT 149: note = Ancestral polymorphism is G, Derived polymorphism is V
  VARIANT 88: note = Ancestral polymorphism is R, Derived polymorphism is S
MMEGDLPTPANARVVAVVTGGNKGIGLEVCRQLACSGVTVVLTARDDARGAAAVENLRGLGLSDVLFHRLDVTDAPSIARLAGFLETRFGKLDILVNNAAIGGVEYVHDQDCGSVTSEEKAKLSGMDMDQRLGWLWENCRETYDDAKTGLRTNYYGTKQVIETLLPLLQASSDGRIVNVSSHFGQLRLFRNEELKRELNDIDNLTPERLDGLLDMFLNDLEAGEVESSNGWPMYFSAYKVAKAAMNAYSRILARRHPELRVNCVHPGYVRTDMTIHSGLLTPEEGGSRVAMVALLPGGGPTGAFFEDFQQSSFV

SEQ ID NO: 6568 - protein, 319 aa, Zea mays
  VARIANT 190: note = Ancestral polymorphism is L, Derived polymorphism is S
MSTSSQCTLMEGAISLPRNTRIAVVTGANRGIGLEVCRQLAGNGVTVVLTAVDEELGAKAVGNLQGLALSDVLSHQLDITDASSIARLANFLKARFGKLDILVNNAAVAGVVYSQDHLDDLEPREEKFNLMDRDQRLEWLWRNCRETYHAAKECLQTNYYGTKHVIEALLPLLKASDDGRIVNISSDFGLLRHFRNEDLKQVLNDVGNLTEERLDELLDQFLRDFKVGTAEARGWPVAFAAYKVSKAAVNAYSRMLAAKQPALRVNCAHPGYVKTDITLHSGLLAPEEGASNVVKVALLPDGGVTGAFFEEGNELASFV

SEQ ID NO: 6569 - protein, 142 aa, Zea mays
  VARIANT 35: note = Ancestral polymorphism is M, Derived polymorphism is T
MRQAEILEGVTNIDLVINLKLREEVVVARCLGRRMCSQCGGNFNVASIDIEGENGGAPMHLPPLLPPPQCESKLITRADDTEEVVKNRLRVYHDLTEPVEGFYKARQKLLEFNIPGGIPESWRKLLEALNIEDSNNMRSAVA

SEQ ID NO: 6570 - protein, 129 aa, Zea mays
  VARIANT 105: note = Ancestral polymorphism is N, Derived polymorphism is I
  VARIANT 95: note = Ancestral polymorphism is T, Derived polymorphism is M
  VARIANT 62: note = Ancestral polymorphism is D, Derived polymorphism is N
  VARIANT 55: note = Ancestral polymorphism is T, Derived polymorphism is S
  VARIANT 33: note = Ancestral polymorphism is C, Derived polymorphism is F
  VARIANT 17: note = Ancestral polymorphism is E, Derived polymorphism is D
MAQGTLEVLLVGARGLENTDYLSNMDPYALLQCRSHEQKSSVASGKGCEPEWNETFVFTVSDGAAELFIKLLDSDGGTDDDFVGEATIPLEAVYTEGNIPPTVYNVVKDEEYRGEIKVGLTFTPEDQGF

SEQ ID NO: 6571 - protein, 198 aa, Zea mays
  VARIANT 35: note = Ancestral polymorphism is A, Derived polymorphism is P
  VARIANT 116: note = Ancestral polymorphism is Y, Derived polymorphism is H
  VARIANT 118: note = Ancestral polymorphism is P, Derived polymorphism is H
  VARIANT 166: note = Ancestral polymorphism is L, Derived polymorphism is F
  VARIANT 172: note = Ancestral polymorphism is G, Derived polymorphism is S
MAGISRAIRACAATSQRTLAAASAVTLPKEAGVKPATVGRRGRGPEDGRRVQWAFLGCPGEILEGVTNIDLVINLKLREEVVVARCLGRRMCSQCGGNFNVASIDIEGENGGAPMHLPPLLPPPQCESKLITRADDTEEVVKNRLRVYHDLTEPVEGFYRARQKLLEFNIPGGIPESWRKLLEALNIEDSDNMRSAAA

SEQ ID NO: 6572 - protein, 182 aa, Zea mays
  VARIANT 44: note = Ancestral polymorphism is P, Derived polymorphism is L
  VARIANT 58: note = Ancestral polymorphism is T, Derived polymorphism is M
  VARIANT 61: note = Ancestral polymorphism is G, Derived polymorphism is R
MAAGLAFPVASFPLACVSSPPHPGHRICCAIPSSSSRRTVKSSPLRATTVLSRERRGTGRGASVVCAVQGQDTTIQVPDVTKSTWQSLVIESELPVLVEFSAAWCGPCKMIEPVVGKLSKDYEGKLKCYKLNTDESPDIASQYGVRSIPTTMIFKDGEKKDSVIGAVPESTLVTCIEKFVER

SEQ ID NO: 6573 - protein, 317 aa, Zea mays
  VARIANT 1: note = Ancestral polymorphism is M, Derived polymorphism is I
  VARIANT 20: note = Ancestral polymorphism is L, Derived polymorphism is S
  VARIANT 131: note = Ancestral polymorphism is G, Derived polymorphism is W
MWLVIRFVASSLLELCSGMLLYQLYVFLLTSFAFSVFCSTVITELKQFLRGSIAIAMEAGRMDQPFMAAINSQPFVEDIEPVKKASGDMPATTGSGCFECNICLDFASEPVVTFCGHLYCWPCIYEWLRPGVESAASDNSSSARRQCPVCKATLSTDTLVPLYGRGGNSKKSLDGMAIPRRPMVHRETVEEQQNAQSNVNDQHYHQSMEDNSQRQPLLQAHHHPIPTGFDFIYPPAPVGRGLIHSTAGGVLGGMAEIVLPLALRGQMPASLYYTNPYHAATQNVNPRLRRHQMEIERSLHQIWFFLCVFVVLCLLLF

SEQ ID NO: 6574 - protein, 344 aa, Zea mays
  VARIANT 190..344: note = Derived polymorphism lacks residues 190 to 344
MPASGSPRDGRGAEEDEAARSGSKSLDAECNDRSKGSRNRDHRGKSKRREEEESESSGEDSSERRKRRRKEKERRHRRRRRSNSESSGSSSESESESSYSGSSVESESESELDSEEERRRRRRKRRKEREDEERRRRKKEKERRKRKEKEKERERRKKRKEGKKNLGKKGAVTNSWGKYGIIRELDMWSKRPEFTAWLSEVKQVYSFCYSVNLEALSNWEEKQMFKEFMEDHNTATFPSKKYYNLDAYHHKAMEKEKKKGLKMIVTERTVFNDEEQRRLELLKERERRKEEEVEALKRSMQAGLAQDMKEQARLREEMNYQYRLGNFQAAAAIQKRLDPDAPLQ

SEQ ID NO: 6575 - protein, 325 aa, Zea mays
  VARIANT 48: note = Ancestral polymorphism is W, Derived polymorphism is R
  VARIANT 44: note = Ancestral polymorphism is G, Derived polymorphism is R
  VARIANT 34: note = Ancestral polymorphism is A, Derived polymorphism is T
MVAGMEAEEGVMATDFFWSYTDEPHASRRREILAKYPQIKELFGPDPWAFLKIGLVVSLQLWTATFLRDASWLKLLTVSYFFGSFLNHNLFLAIHELSHNLAFATPSLNRWLGIFANLPIGVPMSITFQKYHLEHHRFQGVDGVDMDIPSQAEARAVRSAAGKSAWVVLQLFFYALRPLFLKPKPPGLWELTNLAAQVGLDAGLVYLCGWRSLAYLVLSTFVGGGMHPMAGHFISEHYVFSPEQETYSYYGPLNLVAWHVGYHNEHHDFPRIPGTRLHRVKEMAPEYYDGLESYRSWSQVIYMYIMDRTVGPFSRMKRKAQKKDS

SEQ ID NO: 6576 - protein, 305 aa, Zea mays
  VARIANT 155: note = Ancestral polymorphism is R, Derived polymorphism is W
  VARIANT 28: note = Ancestral polymorphism is L, Derived polymorphism is P
MASSRALALALFLLCALLPAPPVSATLLFGGGESAKKAGVDAEWRPATATWYGEAEGDGSDGGACGYGTLVDVVPMKARVGSVSPVLFKDGEGCGACYKVRCLDRGVCSRRAVTVVVTDECPGGLCAFGRTHFDLSGAAFSRMAVAGAGGRLRDRGQLSVVYRRTACKYGGKNIAFRVNEGSTNFWLSLLVEFEDGEGDIGSMQIKQLESVCFNLLFGTKKVRTDIQFRAEWHAAKRSANSVEWLDMRHVWGATWCLVRGPLVGPFSVRLTTLSARKTLTARDVIPRNWTPKATYTSRLNFQPSL

SEQ ID NO: 6577 - protein, 785 aa, Zea mays
  VARIANT 324: note = Ancestral polymorphism is S, Derived polymorphism is T
MRAGGGEEEEEEEVFYESRDRVLSSSCSSTSASDDDDNDHPRRRRDGAASAAAAALDVWTSEPAPVQERRRKLLQMMGLAGDPALARLEMGRSVSYDGPVRPAPASPIPRSRSDGAVPVSSTKPPLGGRSRQASSGSSEATPEGEDAGPRCLIRNLDDGTEFVVKEEFQLREVGTGRHFTMEEFVDLCVGCSPIVQELMRRDNVGSSGSNNGASTPIQRSNSDSSNGATRHRRHSSWLRSLRNVAGSMAVTSRDRRSSDEKDTSSEKGGRRSSSATDDSQDSAGASVHHGRVRVKVRQSGKSYKELSGLFMNQEIQAHNGSIWSIRFSPDGRYLASAGEDCVIHVWEVSEFERKREENGLCNPLVAMACNGSPETTLALASSLDGSNREKKRRARFLEGRRSVSSDRLMVPEHVFALSEKPIRTFVGHSEDVLDLCWSKSQYLLSSSMDKTVKLWHISSASCLKTFSHSDYVTCIQFNPVDDRYFISGSLDEKVRIWSIQNREIVDWKDLHEMVTAACYTPDGQSALIGSHKGSCHIYDTSDNKLLQKKQIDLQNKKKKSSQKKITGFQFLPGSTSRVLITSADSRIRVFDGLNLVHKYKGFRNTNSQISACLAANGRYVISASEDSHVYIWRNDGSLEKGRSKANVTVTSSYEHFHCQDVTVAVAPPSNGSAVVSRSNSTKHDERDSVLEHPLLHAVPEKLQDSSDLQPQSGNILSTSSNHSGDRATWPEELMTPTKQSPQSSASLLSGADQAPCWSAWGTVIVTAGRGGQIRAFQNFGFPARV

SEQ ID NO: 6578 - protein, 461 aa, Zea mays
  VARIANT 225: note = Ancestral polymorphism is R, Derived polymorphism is L
MAGDPPTAAEKETLVSSFLEIAAGQTPETATQFLLMTSWHLEEALQLFYIDGESALTPAHPVAPPPTSAAASALAAAAGAEEAMRFAPPPAAALGDAMLHGFGVGEDDDVRAPLPVKRETLYGEGIVSVMRPNASAAFRNFEQEARQSAVWDSDQNATSSSGDNLASLYRPPFSLMFNGPFDKAKLEASSLDKWLLINLQSTAEFSSHMLNRDTWGNDAVAQLIRSNFIFWQVYYDTSEGRKVCTYYHLVSMPAILLIDPVTGQKMHAWNGMVHPDRLLEDLLPYLDKGPKEHHAAQPQKRPRKVDPEASTGKQGKIAVEDEDEELARAVAASLEESKEVIEASDASDDMVEAEPEEENEPTLNTKPDYPPLPEEPTGSRDLLCRVAIRLPNNRRIQRNFLHTDPIKLLWSFCAPQVEDGERRAFHFVQAIPGASQKLELGSDLTFKEAGLANSMINLLLD

SEQ ID NO: 6579 - protein, 161 aa, Zea mays
  VARIANT 89: note = Ancestral polymorphism is A, Derived polymorphism is V
  VARIANT 126: note = Ancestral polymorphism is N, Derived polymorphism is I
MAIMAATATAVASPSSSTSPGPLQPSPRFLPPVSTPARCHLLPKPRRWCARLHIERRVAVGSDVSSSHDVAAEEAAAAPKVGKRVRVTVPVRVHHVAKAPGLDLRGMEGVVKQYIGVWKGKRITANLPFKVEFELKLDGQDKPVRFITHLREQEFEILGEE

SEQ ID NO: 6580 - protein, 68 aa, Zea mays
  VARIANT 17: note = Ancestral polymorphism is L, Derived polymorphism is Q
  VARIANT 37: note = Ancestral polymorphism is M, Derived polymorphism is T
  VARIANT 48: note = Ancestral polymorphism is A, Derived polymorphism is V
MRDWAPSIIATALFALLCPGGVLQMPDRHRPVDLMNMKTSFPSMLVHVVIYSLLLMLFLVILQPHLYI

SEQ ID NO: 6581 - protein, 132 aa, Zea mays
  VARIANT 98: note = Ancestral polymorphism is I, Derived polymorphism is F
  VARIANT 17: note = Ancestral polymorphism is A, Derived polymorphism is T
MTRSRAVVTLVLLLAVATASCRLSLAADETIAAILGRDLRGFIARAGNLFRSDGGAWRAANLTAAEAKNLRAATARKSSSGGRAGCVSAAACGKRRVICGKRCSDVASSRAASLSHVPSRCVVKCRECVPTC

SEQ ID NO: 6582 - protein, 146 aa, Zea mays
  VARIANT 71: note = Ancestral polymorphism is C, Derived polymorphism is F
  VARIANT 70: note = Ancestral polymorphism is L, Derived polymorphism is P
MATSTAAATALLRPRPAVPAKLAQRRCLHAVAGWTTMRRRGAAGVVRAFFNPLGDERILREAIKFEFQYPFSRVYDCMLAKFILEKEPVAFMGGVFAGLLRLDLNEDPLKEWISRTVEASGIAEENSSEESSEADQNDAPQQIEIE

SEQ ID NO: 6583 - protein, 275 aa, Zea mays
  VARIANT 93..275: note = Derived polymorphism lacks residues 93 to 275
  VARIANT 121..275: note = Derived polymorphism lacks residues 121 to 275
  VARIANT 127..275: note = Derived polymorphism lacks residues 127 to 275
  VARIANT 200..275: note = Derived polymorphism lacks residues 200 to 275
  VARIANT 209: note = Ancestral polymorphism is R, Derived polymorphism is W
  VARIANT 218..275: note = Ancestral polymorphism lacks residues 218 to 275
MGLLGMAAKGPSPTRRLMPQPHLAVSSLAASVALIHCFLNTRRWLTSPSSSPRQWPPPAPQSKTKPRHESTQLAETKTRSMEEEVIKLQKCLQDKDGQLCSSTSSTEQYHHELDDLRTHLSFTQATGEAGEQLDLLQKDVQAREVTQMQLKDIVIRIETNIMDEVAKAFEIAMLRGEIRILSTHWTNKTKNLESQLKKHQRTDQELKKRVLKLEFCLWSCHPLVRSPPHLPLLLAPLLFSCCDWDIASWILNLGQNLGRSRTTMMPGTYSYFIHV

SEQ ID NO: 6584 - protein, 1087 aa, Zea mays
  VARIANT 76..1087: note = Derived polymorphism lacks residues 76 to 1087
MPGTARRTAQPRVRWSPSNPRLERPACRLPRLVGECVSPEALVALKKGTQLLKYGRKGKPKFIPFRLSNDESTLVWVSNNKDKSLKLASVSRILSGQRTLVFQRFLLPEKDHLSFSLIYNDGKRSLDLICKNKVEAEAWFTGLSALICRGQHGSQVQHIDGIRIAGLPFDGARESSLSGSSTFTSDSFENKLSSVNSSKDRSSGEYTYSERTDVSDMQVKSVSSSDIRISVSSALSTSSHGSGGEDSESFGDIYVWGEVICDTISRSGSDRSAYSPGTTTDVLVPKPLESNVMLDVSYVACGVKHAALVTRQAEVFTWGEECSGRLGHGIGTNVFQPRLVESLSTCNVELIACGEFHTCAVTATGDLYTWGDGTHNAGLLGHGSNVSHWIPKRVSGPLDGLPVSAVSCGTWHTALITSSGQLYTFGDGTFGVLGHGNRASCSYPKEVESLKGLRTISVSCGVWHTAAVVEVIISQSNASSGKLFTWGDGDKYRLGHGDRSSKLKPTCVPSLIDYNFHKAACGHTLTIGLTTSGHIFTVGSPVYGQLGNPNNDGRYPRLVEEQLGGGGVVEVACGSYHVAVLTNAGEVYTWGKGTNGRLGHGDIADRKVPTLVEALKDRSVKRVACGSSFTAAICQHKWVSGMEQSQCSACRQPFGFTRKRHNCYNCGLVHCHSCSSKKALRAALSPNPGKPYRVCDSCYVKLSKVLDSGVSYSRNTIPRLPGDTKAERIDTKATRVAQSNSSDMIRNLDVKAAKQTKKSEYSSQVPATLQLKDIPFISAPDLQNLSTVANQYPYDPRSTLPSLRMPYLNYSSSMSSESSESLKDANELLKQEVQKLQAEVNSLRQEREQQDAELQKADAKAREAMNLATEEASKLKTAKDVINSLTAQLKEMSERLPPGACDVKNNGRVMGDLAPEMGREKQMRYGDRFSGLPAQVYQTSNYSETAMVPPQGSSRSEHVDGVREFFSPVQQMANGGGSTTIGYRYRSDDHDRRETDRFQINLQSLNTRSSNSPSNQVDAEWIEQYEPGVYLTLVSLRDGTKELKRVRFSRRRFGEHQAESWWKDNCEKVYDKYNVCGTDRLSSVTTA

SEQ ID NO: 6585 - protein, 94 aa, Zea mays
  VARIANT 46: note = Ancestral polymorphism is R, Derived polymorphism is C
  VARIANT 18: note = Ancestral polymorphism is A, Derived polymorphism is V
  VARIANT 1: note = Ancestral polymorphism is M, Derived polymorphism is I
MRKLVKGLARPEPRWLRAMEESVLSLFRSLAAVCLDSVNIALRENRIVATGHGLILLLAYHLEILDLQPRKRFLSKLIKMYFACFRIFCLQLAL

SEQ ID NO: 6586 - protein, 407 aa, Zea mays
  VARIANT 77: note = Ancestral polymorphism is R, Derived polymorphism is W
MAAALQATPLKTLSISRRRVGGAGARPRPMAASFRCSAAARSYNITLLPGDGIGPEVVAVAKDVLSLAGALEGVELRFQEKLVGGSALDATGVPLPDETLDAAKGSDAVLLGAIGGYKWDNNEKHLKPETGLLQLRAGLGVFANLRPAAVLPQLVDASTLKKEVAEGVDIMVVRELTGGIYFGKPRGFGTNDNGDDIGFNTEVYSASEIDRIARVAFEVARKRRGRLCSVDKANVLEASMLWRKRVTALASEFPDIELSHMYVDNAAMQLVRNPKQFDTIVTNNIFGDILSDEASMITGSIGMLPSASVGESGPGLFEPIHGSAPDIAGQDKANPLATILSAAMLLRYGLGEENAANRIEAAVTETLNHGFRTGDIYSPGTTLVGCKRMGEEVLKTVNSLKEVAAVN

SEQ ID NO: 6587 - protein, 695 aa, Zea mays
  VARIANT 588: note = Ancestral polymorphism is M, Derived polymorphism is R
  VARIANT 584: note = Ancestral polymorphism is V, Derived polymorphism is D
MERQKMIAGLLRASARSSSLRGGVQLHGAITKMGFGSDTMLGNNLIDMYVKCGELDLACEVFGGMRDRNVVSWTALMVGFLRHGDATGCLRLLGEMRTASEAAPNEYTLSASLKACCVVGDTAAGVGIHGLCVRAGYQEHDVVASSLVLVYSKGGRIGDARRVFDGAGLGSGIATWNAMVSGYAHAGHGRDALLVFREMRRHEGQHQPDEFTFASLLKACSGLGATREGAQVHAAMTASGFSTASNAILAGALVDMYVKCRRLPVAMQVFERLERKNVIQWTAVVVGHAQEGQVTEALELFRRFWRSGARPDSHVLSSVVGVLADFALVEQGRQVHCYGIKDPTGTDVSAGNSIVDMYLKCGLPDEAERMFREMRAPNVVSWTTMVNGLGKHGLGREAVALFEEMRAGGVEPDEVTYLALLSACSHAGLVDECRRYFSCIRRDRTVRPKAEHYACMVDLLGRAGELREARDLIRTMPMEPTVGVWQTLLSACRVHKDVAVGREAGDVLLAMDGDNPVNYVTLSNVLAEAGEWRECHKVRDAMRRRGLKKQGGCSWVEVGKEVHFFYGGGGEEETHPQAGDIRRVLRDMETRMREQLGYNADDARFALHDVDEESRAESLRAHSERLAVGLWLLRNGVDGGGHGEPIRVYKNLRVCGDCHEFFKGLSAVVRRALVVRDANRFHRFEHGSCSCKDYW

SEQ ID NO: 6588 - protein, 409 aa, Zea mays
  VARIANT 102..409: note = Derived polymorphism lacks residues 102 to 409
  VARIANT 100: note = Ancestral polymorphism is P, Derived polymorphism is L
  VARIANT 56..409: note = Derived polymorphism lacks residues 56 to 409
  VARIANT 39: note = Ancestral polymorphism is A, Derived polymorphism is T
  VARIANT 23: note = Ancestral polymorphism is P, Derived polymorphism is S
MPGGSCPDPAAEAQLPPPIHHLPPDALHNVLLRLQLRDAVVCRLVSRLFHETLSPQLLALLPTLRLLLLRHPRPDGGGCLHAFDPARRTWLRLPFAHFLPYQSFSPVASSTSLLYLWVETSSSTSPLALQSTTTSSSAASPAHPLKSLAVCNPFAGTYRLLPQLGSAWARHGTVLAGPGGMVLVLTELAALSYTPSESGKWMKHPLSLPSKPRSPILASAAVFALCDVGTPWRSQWKLFSCPLDRLTGGWAPVERAAWGDVFEVLKRPRLLAGAGGRRVLMVGGLRSSFAMDAPCSTVLILRLDLATMEWDEAGRMPPNMYRCFTGLCEAASQGNAMPATAGGGNNKVKVFGGDGKVWFAGKRVRGKLAMWEEDETGSSGKWDWVDGVPGYDDGVYRGFVFDSGFTAIP

SEQ ID NO: 6589 - protein, 555 aa, Zea mays
  VARIANT 40..555: note = Derived polymorphism lacks residues 40 to 555
  VARIANT 19..555: note = Derived polymorphism lacks residues 19 to 555
MSLKLPIPQGLSFLRSVGWFEDRKVDSAAKQQLSPTLKLQTDKETYRPGDSVTVTIEICSPASLKDDVGQAVSGEDAPSLLLDVLSFELKGIEKLDTQWFSVPKPLPGSKQRRGEHMFLDCSAPSLVSKVIIGAGRTKTYIARVELPKTLPPSYRGISIRYFYYVRTTLFGRPVMLGNGDQYKGLVNNAIHLEARVPLQIRVSQKSSSLLNEEDVLGNLPFSVDQPSIFWKGKDEDSEWSKANDNVDLEEGYDSSKDEVSSVSSYNPSKAHPEFSLRSSLSMHSLSSRLSTSELFYNQVERPNFPSYNPIPRLSVSEISDDHDGGLVASQRKLNILLPDHTSNGQRVSPDSDHSKDDAGLPLTPKNVDPAGSEGFTTGRSYNIRIDDQVLLRFSPKNSDSTYYFGDMIGGALTFFHGTGKRRCLEVSIALETSETINPRALHPSRRGSPTITKLHSEHHEVVADLHQTSFLFSIPIDGPMSFCTSKVTVQWSLRFEFFTTPEGTDPARYEHPLLVDKREKGEWVLPVTVYTPPLRRRATHERNGRSVSPGNIFNS

SEQ ID NO: 6590 - protein, 113 aa, Zea mays
  VARIANT 15: note = Ancestral polymorphism is N, Derived polymorphism is K
  VARIANT 47: note = Ancestral polymorphism is S, Derived polymorphism is I
MKFVAAYLLAVLAGNSSPSAEDLTAILESVGCEVDNEKMELLLSQLSGKDITELIAAGREKFASVPCGGGGGMAVAAAGPAAGGAAPAAEAKKEEKVEEKEESDDDMGFSLFD

SEQ ID NO: 6591 - protein, 465 aa, Zea mays
  VARIANT 50: note = Ancestral polymorphism is A, Derived polymorphism is T
MAALGLLLLLLLAVVGAANAAAPGGRMSIISYNEEHAARGLERTEPEARTLYELWLAEHGRAYNALGERDRRFRVFWDNLRFVDAHNERAAEHGFRLGMNQFADLTNDEFRAAYLGARIPASRRRGTAVGERYRHGGGAEELPESVDWREKGAVAPVKNQGQCGSCWAFSAVSSVESVNQIVTGEMVTLSEQELVECSTDGGNSGCNGGLMDAAFDFIIKNGGIDTEGDYPYKAVDGKCDINRENAKVVSIDGFEDVPENDEKSLQKAVAHQPVSVAIEAGGREFQLYKAGVFTGTCTTNLDHGVVAVGYGTENGKDYWIVRNSWGAKWGEDGYIRMERNVNATTGKCGIAMMASYPTKKGANPPKPSPTPPTPPPPPVAPDNVCDENFSCAAGSTCCCAFGFRNVCLVWGCCPMEGATCCKDHASCCPPGYPVCNVRAGTCSVSKNSPLSVKALKRTLAKLNSA

SEQ ID NO: 6592 - protein, 319 aa, Zea mays
  VARIANT 85: note = Ancestral polymorphism is P, Derived polymorphism is H
MFSYAAPPITYSPVPPPPPYAAGLLYPPPYYGGPVVPTPAVHVVQLRSVTATNFAAELDLIGSLLQNYPYIVVDTEYPGTVHRPPAGRRDDDLSPDEWYAMLKANVDELPPVQLGITLCDSHGNLPVVLDYGYGYTEGCWEVELSDFDIRRHRHAAQSVAFLRSQGVDFDAVRARGVGSAAFGAKLAEILLASRGAGVGLTWVAFGGAYDLAYLVKMIGGIGQPLPETRQGFLERVRVLLGGRVFDARFMAENCGRADLRDVGLRSVAINLGAVMPAADLPWLAGPKSLIVSRIHTIMKLHVLSDDDTTAFQGIIDRLY

SEQ ID NO: 6593 - protein, 253 aa, Zea mays
  VARIANT 69: note = Ancestral polymorphism is W, Derived polymorphism is R
MSEEDKTAASAEQPKRAPKLNERILSSLSRRSVAAHPWHDLEIGPDAPAVFNVVSTSITLEPFDVLYVRCCGDLGCLEPSTGSDCIIYIFMQVVEITKGSKVKYELDKKTGLIKVDRVLYSSVVYPHNYGFVPRTLCEDNDPMDVLVLMQEPVVPGSFLRARAIGLMPMIDQGEKDDKIIAVCADDPEYRHYNDISELSPHRLQEIKRFFEDYKKNENKEVAVDAFLPATTAREAIQYSMDLYAQYILQSLRQ

SEQ ID NO: 6594 - protein, 369 aa, Zea mays
  VARIANT 128: note = Ancestral polymorphism is G, Derived polymorphism is R
  VARIANT 248: note = Ancestral polymorphism is K, Derived polymorphism is N
  VARIANT 249: note = Ancestral polymorphism is A, Derived polymorphism is E
  VARIANT 316: note = Ancestral polymorphism is A, Derived polymorphism is T
  VARIANT 332: note = Ancestral polymorphism is L, Derived polymorphism is V
MESKMQGGIVMAGGGKPSWSASAIVATVASGYHILRIDGYSHTMGTPTGEYIASLPFTVGGHRWHIRYYPNGRSSETKEYVSLSLYLHDWVAETVKARFKFRFVGDVAEQPLILGGLHSFDNIDNNWGRPEFIKRKDLEESKHLLDDSFSIRCDVVVPTNEVRVVATAAAAMVSVPPSDLHQHLGILLLTEKGADVVFDVAGETFAAHRCVLAARSPVFSADLFGAMEEGGHTGGVVRIEDMEPLVFKALLYFLYTDLLETETMKQGEDGDDEDVLCQHLLVAADKYNLERLKLLCEKKLCECIHVGTIATILALAEQHRCHALKKVCFHFLSSPANLRAVAATDGFEHLSRSCPSVMEELVVMLSNLV

SEQ ID NO: 6595 - protein, 440 aa, Zea mays
  VARIANT 196: note = Ancestral polymorphism is F, Derived polymorphism is I
  VARIANT 250..440: note = Derived polymorphism lacks residues 250 to 440
  VARIANT 369..440: note = Derived polymorphism lacks residues 369 to 440
MSFRSMVRDIRESFGNISRRNFEVRIHHRGKSLGSSGDLQDRPAEVQQSRWASLPPELLCDVMKRLEEDDSSWPDRKDVVSCASVCTTWRDMCKDIVRSPEHCAKLTFPVSLKQPGPRDGVIQCFIKRDKSKLTYRLYLSLSSGVLDENGKFLLAAKRSRRMAHTEYAIFMDSRNFSRSSTGYIGKLRSNFLGTKFIIYDTQAPYNGGRVCTQERAPSRRLSSRKVSPRVPSGSYPVAQVNYELNVLGTRGPRRMQCAMHSIPASAVEPGGVVPGQPKELLPRLFDESFRSTATSSFSKYSVADSSMDLGSCPFSEVEVGGGSLREGDESEKERPLVLRNKAPRWHEQLQCWCLNFRGRVTVASVKNFQLIAPAKTQPQPQASGPPPPPPPSSSSYHDPVILQFGKVGRDMFTMDYRYPLSAFQAFAICLTSFDTKLACE

SEQ ID NO: 6596 - protein, 364 aa, Zea mays
  VARIANT 47: note = Ancestral polymorphism is S, Derived polymorphism is R
MQSQASRMARSSGSRPVALVLLALCAAALSSATVTVNEPIANGLSWSFYDVSCPSVEGIVRWHVAEALRRDIGIAAGLIRIFFHDCFPQGCDASVLLSGSNSEQIEVPNQTLRPEALKLIDDIRAAVHAVCGPTVSCADITTLATRDAVVASGGPFFEVPLGRRDGLAPASSDLVGTLPAPFFDVPTLIESFKNRSLDKADLVALSGAHTVGRGHCVSFSDRLPPNADDGTMDPAFRQRLTAKCASDPSGNVVTQVLDVRTPNAFDNKYYFDLIAKQGLFKSDQGLINHPDTKRAATRFALNQAAFFDQFARSMVKMSQMDILTGSAGEIRRNCSVRNTALGDVSSSAHQLETTAGDEGLAADA

SEQ ID NO: 6597 - protein, 75 aa, Zea mays
  VARIANT 55: note = Ancestral polymorphism is V, Derived polymorphism is L
MAASMASSWGRSIRETVLETVASYHQQQPHLHQQRALPWWYKLPNIIFVDIMNMVCGCVDKTFSDSREHGRWVSQ

SEQ ID NO: 6598 - protein, 344 aa, Zea mays
  VARIANT 312..344: note = Derived polymorphism lacks residues 312 to 344
  VARIANT 179: note = Ancestral polymorphism is L, Derived polymorphism is Q
MARSSSPARMAMLLLLLSALAVLFPPAVADDLLSVDFHAASCPQLDRIVRTAVQAALRREIALAAGLLRIFFHDCFPQGCDASVLLKGNATEQTMGPNTTLQPRALQLIDDIRAKVHAACGPTVSCADVTALATRAAVVASGGPSYPVPLGQRDSLAPAPEDDVNALPSPTTASVPELLAAFRGRGIRDVADLVALSGAHTVGRAICPFFQDRADSQEDDFARQLKADCARDPNRLQQLDVVTPDAFDNVYYKNLNASRGVFTSDMALIRDPTTAPIVRCFAGSKDAFFAQFATSMVKLSKVPRKPPGNVGEIRRRSCFRTNNAKMSILDVDDAVGSLAAASAR

SEQ ID NO: 6599 - protein, 270 aa, Zea mays
  VARIANT 86: note = Ancestral polymorphism is G, Derived polymorphism is R
  VARIANT 15: note = Ancestral polymorphism is G, Derived polymorphism is S
MAAPRVYCSGVLTISLLLAAVVGAVVPSLVLVTDDRTGGLSLDFHAASCPQLEGIVRGAVQAERGQDVQVTAGLLRIFFHDCLPQGCDASILLDGEKTFGPNASLQPRALQLIESIRAKVHAVCGATVSCADIIALATRDAASCGFIRRGNDDFARRIAAICSGKQSLDVITPDAFDNRYFVALRSTQGVLLSDQGLNGDQRTSRFVAAFASNQGAFFDQFAKSMVKLGSIRAAAPGEIRRNCFRPNGGRAAADISALVGGDDEGYAASA

SEQ ID NO: 6600 - protein, 424 aa, Zea mays
  VARIANT 8: note = Ancestral polymorphism is R, Derived polymorphism is H
  VARIANT 150: note = Ancestral polymorphism is F, Derived polymorphism is C
  VARIANT 324: note = Ancestral polymorphism is C, Derived polymorphism is F
  VARIANT 339: note = Ancestral polymorphism is D, Derived polymorphism is Y
MAVVATIRQRRCFVLVLGTAIVVAFSALFGTTSGAALVGDSCRASSSTSDGGGCGKGLRCTTCVPPPGTGPAACARTTPVDPKTHGTGLPFNRYSWLTTHNSFAVVGTKSPLGSAIISPPNQEDSVTDQLKNGVRGLMLDAYDFNDAVWFCHSFHGRCLTFTAYVPALSVLTEVRVFLDANPSEVVTVFLEDYAAPGSLSNTFNAAGLSKYWFPEAQMPSPSKGGGDWPLLRDMIADNHRLIVFTSKKGKQGTEGLAYQWDYVVETQYGSEGMADGSCPKRTESKPMDSKAQSLVLLNFFTSNPSQSWACSNNSAPLISRLNACYHASAKRWPNYIAVDFYMRSNGGGAPLATDIANGRLQCGHDNIAHCKISSASAPAPASASSPAPASASSPSPAPAPDFAATSPAISSSPGPAPGPLNSYY

SEQ ID NO: 6601 - protein, 244 aa, Zea mays
  VARIANT 8: note = Ancestral polymorphism is P, Derived polymorphism is L
  VARIANT 69: note = Ancestral polymorphism is G, Derived polymorphism is S
  VARIANT 109: note = Ancestral polymorphism is D, Derived polymorphism is N
MAATAESPSTGGFVLWLHGSGGSGDESRAQVAPYFSDPGVASSVRLSFPTAPTSFIPCYGDVVITAWFGISEVPITAKTVRDEKEVLKAVEYVHELIDKEVAAGTSPSNIFVCGMSQGGALAIASALLYPKTLGGCAVFSGSVPPNKSFADKVSPEARKTPVLWFHGMADGVVLFEAGHAGCAFLEELGMSCEFKAYPTLGHSLVDEELQYFQQWILIRLGMAASGAAETARPSSSSNHNDHLQ

SEQ ID NO: 6602 - protein, 215 aa, Zea mays
  VARIANT 8: note = Ancestral polymorphism is R, Derived polymorphism is Q
  VARIANT 12..215: note = Derived polymorphism lacks residues 12 to 215
  VARIANT 42..215: note = Derived polymorphism lacks residues 42 to 215
  VARIANT 52: note = Ancestral polymorphism is R, Derived polymorphism is C
  VARIANT 83: note = Ancestral polymorphism is R, Derived polymorphism is H
  VARIANT 175: note = Ancestral polymorphism is R, Derived polymorphism is W
MDEEDHTRIVPCKCYCFLAFLLGFVALFSFFALVLWGASRSQKPRIVMGTIRFDNFIIQAGTDASLVPTDMATTNSTVRFTYRNRGTFFGIHVTADPFQLSYSQLTLASGDLHNFYQPRSSSRTVSVAVVGNKVPLYGGGPTLTAAPAAGGKGQQQASAKVASVPMVLRTTLHSRAYVLGALVKPKFTLAVECRVLMNPNKQNKPISLRNACHYS

SEQ ID NO: 6603 - protein, 95 aa, Zea mays
  VARIANT 3: note = Ancestral polymorphism is I, Derived polymorphism is R
  VARIANT 4..95: note = Derived polymorphism lacks residues 4 to 95
  VARIANT 83..95: note = Derived polymorphism lacks residues 83 to 95
  VARIANT 93: note = Ancestral polymorphism is A, Derived polymorphism is V
MKIQKANAGVLTNFEVLDFLRSRGAKIDPMGCLGAVAVSECKVYEYILKTPACNQTRESIYEFVKRSEGFRLAEADKLNVINWRPSSTADAYAVL

SEQ ID NO: 6604 - protein, 303 aa, Zea mays
  VARIANT 17: note = Ancestral polymorphism is A, Derived polymorphism is V
  VARIANT 27: note = Ancestral polymorphism is R, Derived polymorphism is C
  VARIANT 75: note = Ancestral polymorphism is P, Derived polymorphism is L
  VARIANT 83: note = Ancestral polymorphism is S, Derived polymorphism is L
  VARIANT 108: note = Ancestral polymorphism is C, Derived polymorphism is R
  VARIANT 115..303: note = Derived polymorphism lacks residues 115 to 303
  VARIANT 128: note = Ancestral polymorphism is D, Derived polymorphism is Y
  VARIANT 129: note = Ancestral polymorphism is G, Derived polymorphism is V
  VARIANT 134: note = Ancestral polymorphism is S, Derived polymorphism is L
  VARIANT 135: note = Ancestral polymorphism is W, Derived polymorphism is R
  VARIANT 139: note = Ancestral polymorphism is H, Derived polymorphism is L
  VARIANT 226: note = Ancestral polymorphism is R, Derived polymorphism is S
MSSLIRLLFTLAAAIGAASLLVASLRRRAPPPGLPAKLVPSSHMAGRNRSFVLWLHGLGDSGPANEPIRNLFSAPEFRLAKWSFPSAPRAPVSCNSELPPPYTLLNPCMYNCFKSTFADKESLSPRTDGFVMPSWFDIHELPMSAGSPQDETGVLKAVEKVHAMIDREVADGIHPENIFVCGFSQGGALTLASVLLYPKKLGGGAVFSGWVPFSSSVTERISPEARKVINIFIHLDFTLEMFLHSYHKLRQRYVLLHQLLHQEKPIPIGMAYPDLGHSLSQEELLYLESWIKSRLNASQEKDG

SEQ ID NO: 6605 - protein, 242 aa, Zea mays
  VARIANT 34..242: note = Derived polymorphism lacks residues 34 to 242
  VARIANT 52..242: note = Derived polymorphism lacks residues 52 to 242
  VARIANT 120: note = Ancestral polymorphism is S, Derived polymorphism is F
MGDMVLLPNGAEVAIINGAADGTAGWESAKTPAYAPVVYRPDHSPGDRFEEQNAAGVARLYHSSAVLLCDGRLLVGGSNPHTYYNFSNVQFPSDLSLEAFSPEYLDTSNDMLRPRILDPSPTGAPATVGYGATMVIRFLVPALARRRRGGRAGCLGDVSVTMVAPSFTTHSFAMNQRLLFLDVTKNVAVRGRAGTFSASVTMPATAVLAPPGYYMLFVVRDHIWSTATAATSTGRTGTTYGA

SEQ ID NO: 6606 - protein, 239 aa, Zea mays
  VARIANT 208: note = Ancestral polymorphism is P, Derived polymorphism is L
  VARIANT 200: note = Ancestral polymorphism is P, Derived polymorphism is L
  VARIANT 179: note = Ancestral polymorphism is D, Derived polymorphism is N
  VARIANT 178: note = Ancestral polymorphism is L, Derived polymorphism is V
  VARIANT 170: note = Ancestral polymorphism is A, Derived polymorphism is V
  VARIANT 138: note = Ancestral polymorphism is P, Derived polymorphism is L
  VARIANT 134: note = Ancestral polymorphism is R, Derived polymorphism is W
  VARIANT 132: note = Ancestral polymorphism is A, Derived polymorphism is V
  VARIANT 128: note = Ancestral polymorphism is G, Derived polymorphism is R
  VARIANT 51: note = Ancestral polymorphism is A, Derived polymorphism is T
  VARIANT 49..239: note = Derived polymorphism lacks residues 49 to 239
  VARIANT 31..239: note = Derived polymorphism lacks residues 31 to 239
MVLLPNDAEVAIINGAADGTAGWESAKTPAYAPVVYRPDHSPGDRFEEQNAAGVARLYHSSAVLLRDGRLLVGGSNPHTYYNFSNVQFPSDLSLEAFSPEYLDASNDMLRPRILDPSPTGAPATVGYGATMVIRFLVPALARRRRGGRAGCLGDVSVTMVAPSFTTHSFAMNQRLLFLDVTKNVAVRGRAGTFSASVTMPATAVLAPPGYYMLFVVRDHIWSTATAATSTGRTGTTYGA

SEQ ID NO: 6607 - protein, 125 aa, Zea mays
  VARIANT 1: note = Ancestral polymorphism is M, Derived polymorphism is I
MGHCPSLLLLGAEQRREKRKGGARATMPAKPKRVVLGLAFSLQCTLACRFRRPRTCTPRSCFLSADSQNTLQSWSLTSLRSLGQWALALASQQVEVQGRSSTELMGTHPMLGTTTPRLLPPPSCS

SEQ ID NO: 6608 - protein, 202 aa, Zea mays
  VARIANT 1: note = Ancestral polymorphism is M, Derived polymorphism is I
  VARIANT 80: note = Ancestral polymorphism is A, Derived polymorphism is D
  VARIANT 88: note = Ancestral polymorphism is P, Derived polymorphism is L
  VARIANT 112: note = Ancestral polymorphism is P, Derived polymorphism is L
  VARIANT 134: note = Ancestral polymorphism is M, Derived polymorphism is T
  VARIANT 166..202: note = Derived polymorphism lacks residues 166 to 202
  VARIANT 167..202: note = Derived polymorphism lacks residues 167 to 202
METSKEQASKDYADFEKKVKRTIYIDHLSPQVKESAIKAALAQCANVVHVEFIVNYTIPYKDIASAALVELDDDVQAKAAVELMNDFPFIIGGMPRPVKAIHAKAEMFRDRPPCPGLRKGFCWVKQGDKDYEAMQKLKNLAKRQESENMALIQKILKDEKELATRQQEVLDGNCKKYDMLETLVQKGDITNLAQQYGVNLND

SEQ ID NO: 6609 - protein, 222 aa, Zea mays
  VARIANT 60: note = Ancestral polymorphism is P, Derived polymorphism is H
MKKLYQGGKGRRVHPAPADASAAVALPAAVLALASALTAEEQEVLAYLLSCGGGGGRHHHGRRRGAHPPEMGCACFGCYKSFWARWDASPNRHLIHRIIDAVEEEGGAGGPRRPPRRRRRGGGGGGGRRGGGDAADEDAAETGPGVDHDNLPACDGGSGMDMDHRCHGEYDGDGDGDEEEEETSSVDGDDASVDSEGGGSAEKSTVGRLVRFIGEKVWGAWN

SEQ ID NO: 6610 - protein, 479 aa, Zea mays
  VARIANT 86..479: note = Derived polymorphism lacks residues 86 to 479
  VARIANT 116..479: note = Derived polymorphism lacks residues 116 to 479
MGNMTRSNSPVSRRIVLSFLDFLNSVELAPGVDPEALEVAKDCLESIFSVNSTATGDAIQPGLLFELFASLEANERDQARAALLSQSVSNKPSQTAGTSNVEEDSNKCTTSNSDSQVEDTFELDHSGDELFAKFYAALDEINFFKTSPAGAEDPGLLSKATQYFDDALLAMQKLGKKRASLVDIAESFKSRGNEFMRSNQHLKAVELYTCAIALNQQNAIYYCNRAAAYTLLNMNNKAIEDCLKSIEIDPHYSKAYSRLGSAYFAMGNYHDALYKGYLKAAELDPSNENVRQNIEVTKKKLAEQRVPPEEQNTHAGQAQGPHPIFTSGGVPFNLFPPGSSPVQEFFAGWSSDVGAPPPGHSISINLNDIFGQANVNASGQGSSQTGNSNNHTPSASFSTGAAVPPPFAFSGSGNEGTQARQASNGLEGEHGEPGIHRDDDVHINLAGPEQAAEALRAVMQMLGPQMGQHEGAPRGLILI

SEQ ID NO: 6611 - protein, 328 aa, Zea mays
  VARIANT 307..328: note = Derived polymorphism lacks residues 307 to 328
  VARIANT 259: note = Ancestral polymorphism is R, Derived polymorphism is W
  VARIANT 246: note = Ancestral polymorphism is S, Derived polymorphism is F
  VARIANT 242..328: note = Derived polymorphism lacks residues 242 to 328
  VARIANT 231: note = Ancestral polymorphism is A, Derived polymorphism is T
  VARIANT 216: note = Ancestral polymorphism is T, Derived polymorphism is M
MVLAVVVLLGAVAVLVVVLLLQPRAPYVAVRAASLYALVYGQTRALDDVQVTVRVEARNGNAHSAAYFSRLECRLAFVGATLAVLRAYPFHVPARGVLPLAYMACAQGAPLGDAGSAAMEAALRDGMVPFRVEGEARTRWKAGDRGEHEVAFYEAFSAHAAVPTRIRDTFFPRFHGTRLLPTEAQPGEPHPHLVLDDLLAGFEVPCVADIKIGAITWPPSSPEPYIAKCLAKDRGTTSVLLGFRVSGVRVVGPEGAVWRTERPEVKAMDTVGVRRVLRRYVSSVADEGIDCALAAAVYGGKGGVLSQLRELKAWFEEQTLFHFYLDLI

SEQ ID NO: 6612 - protein, 1404 aa, Zea mays
  VARIANT 480..1404: note = Derived polymorphism lacks residues 480 to 1404
MHSPRSRIRVRDPHPNPHRPSGGGRGGGGGCLRRRSPPAPPSPRYRRRPQRHTPPPRRGSDPHPDISAIARHRILLEAGRFAAHYLVAQGVLPDHVLRDREDPPASRGRNLDGGGDPRSSWNDGDWARAWEDDDRQARKSTRWDRRSQSFDDRGKKYHDAGRDVDRGARRTRDYDEPRRPPMSRSYSHNDRRPSGSADGGRVDPRSRSRSRSRARIRRDLDHTKVTDSGIIPADAADDGDCDVHYGHVDEMPRQQRRVPSSVVVADSADQAMATEDGEAEFDIHGLNRTRDVSEDEDGEFAAARLNGEDDVHPLKSVKEPALHRGSQLSNAVEDREAANAPTMVMDACTRETSGEDNAYSEATNEMVAPHPHSEGKPELPASCRPFDLNVVETPDACEMAGDPQADHVSDLVGWIHQQTNCHASEFQGQDERHMLKNGHDLIRYDLNSEAVEDAQDIHLLEDEKLPVGLGIDAHDTTRIQCWRGSHLRLNQNAGELEHENDCVIGEQLLLSDGMDGHLVRDYQMASEPKMGVYDLHSYNLESEKMLLDDGAEKHAHDNCHLHDGQVLFNQSANLQAHNRANERTIPVINLEDDDYEEQSDIREFLESNFHAGAYVCVQAIFSVMHGHNIQLHLLVVVICCRGDAWPQYSLMENPACVTDGRSGPMNTITATPTHHARLRACDPTDTHSREARGRRGKAARPAAQDICACDPEEASARWDDIAVLRSVAARRPHRLPRLITLENRLDIQHNNVDGVNYIHVKVAGLFFVVTTMVNVSPSLLLELLQRIARVTKDYLGVLNEDSLRKNFILVYELLDEVIDFGYPQTTSTEVLKSYIFNEPIMVDAGRLPPLGPAAMFMQGTKRMPGTAVTKSVVATEPGGKKREEIFVDIIERISVTFSSSGYILTSEIDGTIQMKSYLTGNPEIRLALNEDLSIGRTGSSSYASRRWRQVAAREARRLWPYAGVKNPYDHVVRGCLQIAHGRLGLEVRRMAHGLGREASIQRGHGSRSAPEQELHVRQELGHGLRLRRWDYERRTGAGCLAGRDAGSRGGRGGRRRREAVVRLAHALAAERHRSEAAAGLQQHHSVLDEAEVEASLAEDQVPVRGRGHQPSGNRSVGFSFSPNQGTNSCNAQGPVPPLGTGARVLGEAGKDATLELGDVEAAEGADGASVRFRVVGAVAVGREELGAGDRAEITGASGQEGRRRGRGDYRSSSGGGTVILDDCNFHESVHLDSFDIDRTLTLIPPDGEFPVMNYRMTQEFKPPFRVTALIEEAGPARAEVLLKIRADFSASATANTIVVQMPVPAYTMRASFELEAGAVGQTTDFKEGSRRLEWNLKKARNITKEAGPVNMNFTIPMYNASKLQARPYTFCMVRYLQIAKKSKAYNPYRWVRYVTQANSYVARL

SEQ ID NO: 6613 - protein, 417 aa, Zea mays
  VARIANT 201: note = Ancestral polymorphism is R, Derived polymorphism is K
  VARIANT 259: note = Ancestral polymorphism is R, Derived polymorphism is L
MVVRRLGGTGRALLTLPNIRRRASNSWAAVCDTFFSTKQVFESHRIVFTVGTSIASVLTAWAGYSLRHVQQLKIERRLESIESSVRVRLARRCLVRSKGLQKRAAKADDGSHEVVTEQVALAALQQAQEQQHCRAEPEAELGSCPPRRRLRVEAIRTQRTEVPVEESAPARDAAAAAPLDGNGAGADGSVVPSSDDSWVVKLEQSFNIFATDSVIMVLKGVYGDRYYARFFALETIARVPYFAFISVLHLYATFGWWRRADYIKVHFAQSWNEFHHLLIMEELGGDSLWFDCFLARFMAFFYYFMTVAMYMLSPRMAYHFSECVERHAYSTYDEFLKLHEDEFQASRTPGSRRPKIDNLYDVFVNIREDEAEHCKTMKTCQTHGNLRSPHSTPNCLEDDTECVIPENDCEGVVVYKV

SEQ ID NO: 6614 - protein, 207 aa, Zea mays
  VARIANT 27: note = Ancestral polymorphism is R, Derived polymorphism is C
  VARIANT 43: note = Ancestral polymorphism is M, Derived polymorphism is I
  VARIANT 49: note = Ancestral polymorphism is P, Derived polymorphism is L
  VARIANT 55: note = Ancestral polymorphism is D, Derived polymorphism is N
  VARIANT 60: note = Ancestral polymorphism is E, Derived polymorphism is K
  VARIANT 62..207: note = Derived polymorphism lacks residues 62 to 207
  VARIANT 74: note = Ancestral polymorphism is T, Derived polymorphism is M
  VARIANT 87: note = Ancestral polymorphism is R, Derived polymorphism is W
  VARIANT 115: note = Ancestral polymorphism is T, Derived polymorphism is M
  VARIANT 120..207: note = Derived polymorphism lacks residues 120 to 207
MVLDGGLLGDEIIIEPPLSEGSGDLVRVVPDPSIWGGPTLAWMSTEGGPYFILDDLEEREFWDELRAVTQELMMRSMFKSIFVRRERDVWATLQRHRAMLLCSNEQLTWRSAEVTDLTSQCEELKEEGAANRKEVCRLRDEVHDLKVNRHEEELRQVKESLQVVTVEQDKASLHVDSLSKSLEDERSKGLALNARIGALEKDLEAIA

SEQ ID NO: 6615 - protein, 1902 aa, Zea mays
  VARIANT 937..1902: note = Derived polymorphism lacks residues 937 to 1902
  VARIANT 987..1902: note = Derived polymorphism lacks residues 987 to 1902
  VARIANT 1500: note = Ancestral polymorphism is G, Derived polymorphism is C
MAESEDATAAEPGSGPPHEDEDALLARAHTVISRIIDRELDPNPRLLHTLATMCELHEARYLELRSADTMFNSTNTRTAFTIGKLANLLRDNDEFYELVFCKFLSDTSYSVAVRAATARLLLSCHPAWTPPYPHVFEDSIIDNIKKWVTEDPEASNECKWKYLGNNKPTDAEMLRTYGIGLLAMALCSSGQLIEDVLTLGVSAKLMRYLRIRVLGDASSSQRDANHPQDTKHPWGGDDSRGKSRLSQDGSRLDGTRVGYGMLTNPTAEKNNEPCVGMMQAYGARSLDDSFASLDDSDVPEADWTNDRSYSTRVCDTKSKHGERNSVTRLLKDEEVSENGELLKRKLNRAPSRLRVKGKAGDSLPECEMTPLSPTSGLRIGGQATRDRNVARVDDPKEATDVNNRLFNTISKEEYEDRFRDCIIGLKDISDIVLKAVRAAEAEARSANAPDEAVKAAGDAAAELVKFAALEVWKSENNSDAVVVVAEKAASAVVEAALSISVSRSANQVGEERAMEEAVQTSEDQDLENFVISDKAQLLQLRENYSIQCLQILGEYVEALGPVLHEKGVDVCLTLLQRSMKNQEGCDHFAQLLDVLKLVCALAAHRKFAALFVDRGGIQKIVSMPRVTQTYMGLSACLFTFGSLQSTIERVCALSSDTLDSVVELALLLLECPQDLARKNVAIFFAAAFVFKAVLDLFDARNGMQKLLDILCGCASGRSGSNSGGAGSSNVNQGNDRSPAEVLTASEKQVAYHTCVALRQYFRAHLLQLVDSIRPSKSIRSIARNTSSARAGCKPFDISNEAMDAIFCQIQRDRKLGLALVRACWLALDKFVASNGHMTMLELCKFQAHGDRYLRDLTQYAIGVLHIITLMPQPHVRKSIVQGTLSNNRAGMAVLLDTVKSLDYIDHEVICPALNVLVNLVCPPPSISNKPLSSSNQQPAAAQALASESREKNFEKTISDRNLLTNLGESRERSGDGNPAEKNNTLHQGTPSTPVVPSGVVGDRRIMLGVGGGGPGLAAQLEQGYRQAREVVRANNGIKILLQLLGSRMVTHPVAIDSIRALACRVLLGLARDDTIAHILTKLQVGKKLSELIRDISAQTSGGDSGRWQTELTQVAIELIGVLTNSGKETTLAATDAAAPALRRIERAGIAAAAPISYHSRELMQLIHEHLLGSGFAATAAMLQKEAGLAPLPLTAAVLPAHQVAALEASSVQQQWPSGHVQGFLSDKINTSTYQSAQRSDPKLPSSKKKALAFSSSFSRRARSPHPSNILKSPVPIAADTGDAEMLNKAPLSLPLKRNFVDVKDISFASASKRLAITDQIYQSSAFQTPAPTRKGLSVSVDSPTSSHCGWTNFNNAFTENLDNSQGTPGALTTTALPGVNDQQSGNLERMTLDSLVVQYLKHQHRQCPAPVTTLPPLSLLHPHVCPEPSRSLSAPANIAARVGSREISRQFSGIQIPRRDRHFIYSRFKQCRVCRDEASLLTCLTFLGDAARVVAGNHTGELRIFDCNTANLLETQTCHQHLVTMMESTYTGGIEMILTSSLNEVKIWDAFSVSAGPLHTFDDCKSARFNHYGTSFAALSTDTAQREVQLYDVQTYTLATRLPDNTSSSGSGRGYVQPIIHFSPSDTMLLWNGVLWDTRQPNPVHQFDQFTDYCGGGFHPAGNEVILNSEVWDLRKFKLLRSVPSLDQTVIKFNGTGDVIYATLRRNLDDVTSCINARRVRHPLFPAFSTIDAVTYSDIATVQMDRCVLDLATESNDSLIGVVAMDDHQELFSSARLFEVGRKRITDDDSDPEDAGETDDDSDDDDDDSDDGVLAPVLEGGTDSEDISSSSSDDGDEDGGDDDIPSSDGIEDDRFIDERRREFMMDLFGDGWDDDEAYMMGSFSSGDEEGWIICSWRGRGRS

SEQ ID NO: 6616 - protein, 891 aa, Zea mays
  VARIANT 199: note = Ancestral polymorphism is L, Derived polymorphism is S
  VARIANT 223: note = Ancestral polymorphism is G, Derived polymorphism is V
MAAPAIWQPQEQGLHEICTLLEAHISPNSDQARIWQQLQHYSQFPDFNNYLTFILARGEGKSIEVRQAAGLLLKNNLRTTFISMQPSSQHYVKSELLPCIGATNRAIRSTVGTVISVLFQIVRVAGWIELFQALHKCLESNDLDHMEGAMDAIYKICEDVPEELDVDVPGLSERPINVFMPKILQFFQSPHASLRKLSLGCINQYIVVMPSALYMSMDQYIQGLFNLAKDPSADVRKLVCSAWVQLIEVRPSILESHLKNVTELILQANKDPDDEVALEACEFWSAYCDVSMPPEGLREFLPRLIPTLLSNMVYADDDESLDDAEEDESFPDRDQDLKPRFHASRLHGSQTGDDDDDDDAVNVWNLRKCSAAGLDVLSNVFGDSILPTLMPLIEQNLARTDDNSWKERETAVLCLGAIAEGCIGGLYPHLPQIVAFLIPLLDDKFPLIRSITCWTLSRYSKFIVQSLDHPNGREQFDKILMGLLRRILDTNKRVQEAACSAFATLEEEASEELVPHLEVILQHLMCAYGKYQRRNLRILYDALGTLADAVGAELNQAKYLDIFMPPLITKWQQLSNSDKDLFPLLECFTSIAQALGPGFAQFAEPVFQRCINLIQSQQLAKIDPTAAGAVYDREFIVCSLDLLSGLAEGLGAGIESLVAQSSLRDLLLQCCMDEAADVRQSALALLGDLSRVCPIHLHPRLQEFLTVAAKQLNPQSVKDAVSVANNACWAIGELAIKIGKEIAPVVITVVSCLITILKSPEGLNKSLVENSAITLGRLSWVCPDIVAPHMEHFMQAWCSALCTIRDDFEKEDAFHGLCAMVAANPTGAAGSLAYICQACASWTEIKSEGLHNEVCQILNGYKQLLGNNGGWEQCMAALKPDVVQKLARYGV

SEQ ID NO: 6617 - protein, 716 aa, Zea mays
  VARIANT 546: note = Ancestral polymorphism is G, Derived polymorphism is C
  VARIANT 491..716: note = Derived polymorphism lacks residues 491 to 716
  VARIANT 483..716: note = Derived polymorphism lacks residues 483 to 716
  VARIANT 459: note = Ancestral polymorphism is S, Derived polymorphism is F
  VARIANT 402..716: note = Derived polymorphism lacks residues 402 to 716
  VARIANT 393: note = Ancestral polymorphism is G, Derived polymorphism is S
  VARIANT 363..716: note = Derived polymorphism lacks residues 363 to 716
  VARIANT 330..716: note = Derived polymorphism lacks residues 330 to 716
  VARIANT 247: note = Ancestral polymorphism is T, Derived polymorphism is M
  VARIANT 215: note = Ancestral polymorphism is N, Derived polymorphism is I
  VARIANT 199..716: note = Derived polymorphism lacks residues 199 to 716
  VARIANT 195..716: note = Derived polymorphism lacks residues 195 to 716
  VARIANT 187..716: note = Derived polymorphism lacks residues 187 to 716
  VARIANT 181..716: note = Derived polymorphism lacks residues 181 to 716
  VARIANT 116: note = Ancestral polymorphism is P, Derived polymorphism is L
  VARIANT 27: note = Ancestral polymorphism is P, Derived polymorphism is L
MHRLVLEHGRTSMSWFGPSPKVTIVDPDLAKDVLSNKFGHFEKLKVPALSKMLGSGVASHEGEKWVKHRRILNHAFHLEKLKRMLPAFSTCCEELVSRWAAESLGSDGSCELDVWPELQNLTGDIISRTVFSSSYSEGRRIFQLQVEQASLVMTNIRKIMIPGYMYLPTANNRKMRRNNREVESILREIIGKRIQAMEQGEGTKDDLVGLLLETNMRDDMGMTIEDVIEECKVFYFVGMETTLVLLMWTMVVLSMHPEWQDRAREEVTALFGRDDKPEYDGLSRLKVVSTVDYFFRPFIQITLVPFVSSSVTMVLYEVLRLYPPATSVVRQTYKEMEVGGVTYPAGVILELPVLLIHHDPDIWGGDAREFRPDRFSEGVSRASKDPGAFLPFGWSPRICIGQNFALLEAKMALCMILQRFEFGLAPSYAHAPHTMITLHPMHDCKNGTAKQAKISMAYSFIHRPLSDEARRVSTPLVVTCNDQRREVSVAQNIANKEIDRTVAFDKVLGPKSQQQDVFNHAVVPLVSEVLDGYNCTIFAYGQTGTGKTYIMEGGGGKALNADLPTDASVIPSAVKRIFDILEAQSAEYSMKMIAIRYHEARRGEQGPPLRLLLRQAAAAEGGGEEGQGRGGGTGRKQWAMKAGNLGGTCDREKSKRSRKHSCSLGLLLGGLTDGFGLGMNMLLGGDKEDDGGSRKSHGKSGNRKKHMKNSKKRTRH

SEQ ID NO: 6618 - protein, 1368 aa, Zea mays
  VARIANT 586..1368: note = Derived polymorphism lacks residues 586 to 1368
  VARIANT 594..1368: note = Derived polymorphism lacks residues 594 to 1368
MILLHTRDDDAKQDEVRMMATAESDDDAIWVPPDEAAAAADSMMQDDDDDDDDYHAGTGEEDDESEDDDDATSSICRWRHDSDHQSAAHREERQKAMLRAMNGQLRMLAARFLESAGIDTSSWLDIVISLSWEAALAIKPDVGTAVGNQMDPSSYIKVKCLASGTPRQCEVVKGLVFRKNVAHKHMPTKCHNPRLLLLSGLLGHSHVGFSSFSSIEQEKDHLDKSVCEMMEICRPDVVLVERTVSRDIQELLLKEGVTLVLDMKLNRLQRVARCSGAPIVSFSEVLSKPKLKQCDYFHIEKVTEEHSLITCSAGVGSRPSKTLMFLEGFHKPLGCTILLRGANTQELKKIKQVMNYTVFAAYRLVLETSFFEDQRLILNNKDSSKEEVSVARKAGPSSLGSVQETTDSNALNPLDKGFPNQALLPSEGLVVSAVPESPRRFIDILRYHNIYLPVTSSQEATDHQIQDSIHISPNVGVPIGSVESVDHLSDPQEQASSETNQQMALDGPSVSEKHEQSLENIKTSDTDEVDDVLESQSILILLSSQCITKQVICEQSRLSRIRYYGNFDVSLGRYLQDILQKQNLSCSSCGEPPEAHMYSYTHRNGNLTVLVRHLLPKYRLPGESEGKIWMWTRCLRCERESGISRSSRRVIMSAEAHYLSFGKFLELSFSNHSTARRLSICGHSLNTDCLRFFGLGSKVAMFQYSSVEIYNACKPQPTLEFHNPDMHEWYGQEVRNVLATGVTLFSEVTSALQKLKDQFPVKDLSQLEEMLIKEKAEFMDSLAKTVDRNRESSSVDDILNVNWLYQDLLLELYVWDCRLHQLVDCTLAENAIVANGQTAAAAEADGIGERMSSIAPFENRCIKEPEKFIEAGTASALLDDAWNDKHCNDQHNTNCECDGGEEKWIWNPVNESRLAFRQEVEVGCLERFEVVNHYCPSHLSPLHKHRESGEEMGGSPQFTVGPGGSILCVSEDEISSIISRALAVSEERRHLLMDAVAETEPADTTRSKTMDKSYSSLSESSSASLWSSDSEASISSDDLSSYDTSLLLSSSLHPEIAVNGITALKGRYSVICVHSNQFYNLRRKCCPSELAYVASLSRCKRWDAQGGKSKAFFARTMDGRLIIKQIKKTEFESFIKFAPDYFRHVNHSLDTGSQTCLAKILGIYQVKQTRHGKEIKMDLMVMENILFGHNVSRTYDLKGAIFSRYVSDPNDHAGTVYLDQNFVDDMRVSPIYIGGRAKHLLERAIWNDTSFLTSINVMDYSLLVGVDRQKRELVFGIIDYLRQYTWDKQLETMVKASLVVPKNESPTVISPRDYKKRFRKFMSKHFLTVPDEWSTESRPPVAWESCAHAGELPGVKPQHPSPILLACA

SEQ ID NO: 6619 - protein, 246 aa, Zea mays
  VARIANT 59..246: note = Derived polymorphism lacks residues 59 to 246
  VARIANT 38: note = Ancestral polymorphism is V, Derived polymorphism is M
MASSKLQLPADDSVLLLITHSNLTTFAADIRVSQQTTVEALKDKLWRKTGTAVASMRLQLRDDSGTKIADLDDDAAPLAAYAPYNGYRIHVVDLDPSSLTSGGWLEDTSLVDKYTMSDETYDKLDTNFRKFKEKMVPKNSPSEDKEESEKHMEELCSKIKVGDRCEVEPGAKRGTVKFVGRAEALGRGFWVGVQYDEPLGKHDGMVKGIRFFECPQGHGAIVRPEKVKVGDFPERDPFEDEDDDEI

SEQ ID NO: 6620 - protein, 671 aa, Zea mays
  VARIANT 210..671: note = Derived polymorphism lacks residues 210 to 671
MPFGHTRLDVRRPPQSSYLCCSTTTVAVFVALCLVAVWMASSMLVTPAEFPPFQSKVRPLRPHDSPPATGSLTSADQGDGITTHDDPPPATQQLPPVTDSMDGENQQQELFTTERGPWSTKAEQSNKDAKEQTLTSSSPLSFRWALCNVDAGADYIPCLDNVAAIKKLRSTKHYEHRERHCPEKSPTCLVPLPEGYRNPIRWPKSRDQIWYNNVPHTKLVEYKGHQNWVKVSGEYLTFPGGGTQFKHGALRYIDFIQEAKKDVAWGKRSRVVLDVGCGVASFGGYLFDRDVITMSFAPKDEHEAQVQFALERGIPAISAVMGTKRLPFPSRVFDVVHCARCRVPWHIEGGKLLLELDRLLRPGGYFVWSATPVYQKLPEDVEIWQAMSALTSSMCWKMVNKVKDRVNRVGIAIYRKPTDNSCYEARSETNPPLCGEYDDPDAAWNISLGACMHKLPVDPTVRGSQWPELWPLRLEKPPYWLRGSEAGVYGKPAPEDFQADYEHWKRVVSNSYMNGLGIDWSTVRNVMDMKAVYAGFAAALRDLKVWVMNVVPIDSPDTLPIIYERGLFGLYHDWCESFSTYPRTYDLVHANHLFSKVKKRCELLPVIVEVDRVLRPQGRLIVRDNIETTSEVENILKSLHWEVRMSYFQEKEGLLLVQKTTWRPNETEAKL

SEQ ID NO: 6621 - protein, 481 aa, Zea mays
  VARIANT 16: note = Ancestral polymorphism is L, Derived polymorphism is I
MTDHRDVMLPLSLQYIATRALLLLVIASAVSCSSLPPEDGIRVVSAEKRIDLTGPIVKVFLTLKVENAPTASEASRVLLAFTPTEFQHLSIVKATRAEGKRKKKAFVPLSVQASELATTAPDAPRLYSVLLSTPLKPGDATTLEVLYMLTHSLEPFPAEISQSESQLVYYRDSAVLLSPYHVLEQVTYIKMPSNRIESFTRVDPTTRAGSEVKYGTYSNQMPNSYLPVLVHYENNRPFAVVEELVRKVEISHWGNIQITEQYKLKHGGARHKGVFSRLEYQSRPSISGASSFKNLLARLPPRVHSVYYRDEIGNISSSHLRTDSHKSDLEIEPRYPLFGGWHCTFTIGYGLPLQDFVFESVDGRRYINLTFGCPLLDTVVDDLTVKVVLPEGSKNPEHVVPFVTEKHLETSYSYLDVVGRTTVVLKKKNVVGEHNVPFQVYYEFNPIFMLAEPLMLISAVLLFFVAFIAYLHMDLSIRKSS

SEQ ID NO: 6622 - protein, 353 aa, Zea mays
  VARIANT 187: note = Ancestral polymorphism is R, Derived polymorphism is C
MAVASTSPLSATAPSPPAPVSGFLALPARRGCATRLGSAAAWRRLRVEAIWKQQEKQRAEVSVEEPAPVREAAAPLDGVGADDPMVPSSDESWVVRLEQSVNIFLTESVIILLNTVYRDRNYARFFVLETIARVPYFAFISVLHMYETFGWWRRADYLKVHFAQSLNEFHHLLIMEELGGNAIWIDCFLARFMAFFYYFMTVAMYMLSPRMAYHFSECVERHAYSTYDKFLKLHEEELKTLPAPEAALNYYLNEDLYLFDEFQTTRIPCSRRPKIGKLAVLSFVPSIDNLYDVFVNIRDDEAEHCKTMKACQTHGTLRSPHSMPNCLEAATECVIPENDCEGIVDCVKKSLTK

SEQ ID NO: 6623 - protein, 207 aa, Zea mays
  VARIANT 177: note = Ancestral polymorphism is C, Derived polymorphism is R
  VARIANT 165: note = Ancestral polymorphism is V, Derived polymorphism is M
  VARIANT 93: note = Ancestral polymorphism is C, Derived polymorphism is Y
  VARIANT 61..207: note = Derived polymorphism lacks residues 61 to 207
MASSLARLGAALPRAAARALPPGRWAAAVLGIGASRRAERRMLRSELVGTDFWCCYAFRCQVHSDIKVAPTSDVKDDSKSETRRIKMLYDGDCPLCMREVNMLRERNKSYGAIKFVDISSKDYSPDDNQGLDYETVMGKIHAILSDGTVITDVEVATMANAIYGVWAKYRMQITVLCLVISYIDEYIIQVICIWESVSTYNSLMAEK

SEQ ID NO: 6624 - protein, 229 aa, Zea mays
  VARIANT 76: note = Ancestral polymorphism is R, Derived polymorphism is C
  VARIANT 52: note = Ancestral polymorphism is G, Derived polymorphism is D
  VARIANT 47: note = Ancestral polymorphism is D, Derived polymorphism is N
  VARIANT 25: note = Ancestral polymorphism is C, Derived polymorphism is W
  VARIANT 3..229: note = Derived polymorphism lacks residues 3 to 229
MFQAGHLKMLDGYIDFFMDPSLSECYLQLKEELDKLIQQKLEDPNFDIHKEGKYILFAVQELAAGDLCEGRFVFGRETSRARLRSPEDDGKSNLIKDGMNPKSLLHTLLMRAGHTPPRYKTKHLKTNEFRAVVEFKGMQFVGKPKRNKQLAERDAAIEALGWLTQTSGVNAIEALERDATDQGILLCEEGVDFVERSARLGHARIAERGRRGHPVHWIWAWMLAWIWCA

SEQ ID NO: 6625 - protein, 229 aa, Zea mays
  VARIANT 90..229: note = Derived polymorphism lacks residues 90 to 229
  VARIANT 94: note = Ancestral polymorphism is V, Derived polymorphism is I
  VARIANT 109: note = Ancestral polymorphism is R, Derived polymorphism is H
  VARIANT 112: note = Ancestral polymorphism is A, Derived polymorphism is T
  VARIANT 129..229: note = Derived polymorphism lacks residues 129 to 229
  VARIANT 146: note = Ancestral polymorphism is R, Derived polymorphism is Q
  VARIANT 157: note = Ancestral polymorphism is G, Derived polymorphism is A
  VARIANT 214..229: note = Derived polymorphism lacks residues 214 to 229
  VARIANT 220..229: note = Ancestral polymorphism lacks residues 220 to 229
MASLGCPRDPLPSIASIGCPRDPLPSIAWCPNVVAPTPATSAAARGQPPPASGVGGILTSSSKEDLGGDAFGSAAAVAAAAAAAAGEQSRLVFVGKGAGYSFNLEDLLRASAEVLGKGSVGTSYKVVLEEGTTVVVKRLKDVAVQRREFDAHMEALGRVEHRNMLPIRAYYFSKDEKLLVYDYLPNGSLSAMLHVLISGGGIAHGIIFDIMQERCKYKIRDATTISYRL

SEQ ID NO: 6626 - protein, 1084 aa, Zea mays
  VARIANT 109..1084: note = Derived polymorphism lacks residues 109 to 1084
  VARIANT 147..1084: note = Derived polymorphism lacks residues 147 to 1084
  VARIANT 266..1084: note = Derived polymorphism lacks residues 266 to 1084
  VARIANT 345..1084: note = Derived polymorphism lacks residues 345 to 1084
  VARIANT 353..1084: note = Derived polymorphism lacks residues 353 to 1084
MASPPPFDLCGDLDDDDIDEPVTAVPKDRHLPAAAPTPNGLNDHLLRFTRSLQRPTQNPNPSPNPPPPPPPAAAEEQVEKVKLAGRRRLCKLATTTTATQRVDEEEAEWDNQDDGESILDILDDLTTRFDSLSVQKPSTAARSRTQQLTPLPCAITVDDDLDDHSPDDVDAHAGASSPLQISSSDEARAPTRRSEVKIETDLVSSACTHYACDDVRGKGKNKGTTKDVGRLNRVSKASSFVDSYSDSDYDDCEEDQGTRTDYAVKQLRSKGFTRRPPNTPTFRNHGVSDDELGQEKENLGAVENNAEDVGWEKTEDFKMDPTGTAATSKPYKLPGKIFKMLFAHQREGLRWLWVLHCRGTGGILGDDMGLGKTMQVAAFLAGLFHSRLVKRVLIVAPKTLLAHWTKELSIVGLKEKIRDYSGPSTNIRNYELQYAFKEGGILITTYDIVRNNYKLIRGNSYNNSNDDDDEEGTLWNYVILDEGHLIKNNKTQRAQSLYEIPCAHRIVISGTPIQNNLKVSIIPFLNSCNFVFYVLYYMFCMHCKPYYHCRKCGLCSISVAQMSWVINSSNTIQFKIRYETAILRGNDKNATAREKHVGSNVAKELRERIKPYFLRRLKSEVVFDTGASEEKTLAKKNELIVWLKLTPCQRKLYEAFLNSELVHLALQPKASPLAAITILKKICDHPLLLTKKGAEGVLEGMGEMLNDQDIGMVEKMAMNLADMAHDDNALEVGQDVSCKLSFIMSLLRNLVGEGHHVLIFSQTRKMLNLIQEAIILEGYAFLRIDGTTKVSDRERIVKDFQEGCGAPVFLLTTQVGGLGLTLTKATRVIVVDPAWNPSTDNQSVDRAYRIGQTKNVIVYRLMTSATIEEKIYKLQVLKGALFRTATEQKEQTRYFSKSEIQELFSLPQQGFDVSLTHKQLQEEHGQQVVLDESLRKHIQFLEQQGIAGVSHHSLLFSKTATLPTLSENDALDSKPRGMPMMPQQYYKGSSSDYVANGASFALKPKDESFTVRNYIPSNRSAESPEEIKARINRLSQTLSNAVLLSKLPDGGEKIRRQINELDEKLTSAEKGLKEGGTEVISLDD

SEQ ID NO: 6627 - protein, 149 aa, Zea mays
  VARIANT 50..149: note = Derived polymorphism lacks residues 50 to 149
  VARIANT 51: note = Ancestral polymorphism is A, Derived polymorphism is V
  VARIANT 60..149: note = Derived polymorphism lacks residues 60 to 149
  VARIANT 62: note = Ancestral polymorphism is L, Derived polymorphism is I
  VARIANT 66: note = Ancestral polymorphism is G, Derived polymorphism is D
  VARIANT 80: note = Ancestral polymorphism is C, Derived polymorphism is Y
  VARIANT 85..149: note = Derived polymorphism lacks residues 85 to 149
  VARIANT 87: note = Ancestral polymorphism is G, Derived polymorphism is D
  VARIANT 105: note = Ancestral polymorphism is E, Derived polymorphism is K
  VARIANT 123: note = Ancestral polymorphism is R, Derived polymorphism is C
  VARIANT 145..149: note = Derived polymorphism lacks residues 145 to 149
MCACRWGEQSDDVFDALAGDFMKPRIQEVDQLLKLGVNVTVYSGQVDLIWATKGTMDWVQKLKLDGLNSFLSSPRTPIYCNKEGQSGTQAFVKSYKNLNFYWILEAGHMVINEWYLWTTLALRSRCWLTLRDLLPSNRRKQTRRWNGTT

SEQ ID NO: 6628 - protein, 344 aa, Zea mays
  VARIANT 216: note = Ancestral polymorphism is F, Derived polymorphism is S
MATTSFFHPLAAPMDRGSVCFRRCPFSLTIPARTAPRRPAPLLVVRAKRAGSQPPAAAASRQPANPSAVPKRDVEEEEEEVEEEMPWIQDKALDLVEFTGTVTQAIPGPRVGSSPVPWLLAVPLAYVGVSFVLAVVRTVRKFTSPHTKKKRRVSKNIFLLKSLDDLFQKGREAINYPALQDLMQKTHKYFMCAQTGFDMDDVVRKYIRYTLNEKQFSPDVVVDLIHLRKASMLEDAEVAEILNEISRRIVREKGPVVMDLSGFTEQGFKRKLAVQALFGKILYLSELPEFCSRDSSLVVKEIFGVTDEDADSLRIHTLSATGDIESIQKMVDDLDLEQGPPSSS

SEQ ID NO: 6629 - protein, 390 aa, Zea mays
  VARIANT 289: note = Ancestral polymorphism is M, Derived polymorphism is T
MAMLLRKVWGSVLARAAAPGADPRARRAQAHRAEQYQLYYDSSPQLSFKQIYGLRALVPGTLIVDGGSGYCKYGWSKYAAPSGRCATFLEFGNIEAPMMQIKPSTQPVIVVLPLCHSDDTESARASRKQYKETLYSVLFDMNVPAVCAVDQAVLSLYASKRTSGIVVHIGFNTTSVVPIFQGRVMYEIGVETVGQGALKLTGFLKELMQRRNISCESLYTVRTIKEKLCYVAADYEAELRKDTQASCEIDGEGCFTLSEERFKTPEILFQPHMGGMRAMGLHKAVSLCMDHCYVSGTVGDDSWYKTVILAGGSSCLPGLPERLEKELHQLLPPYMSEGIRVLPPSFGTDSAWFGAKMISNVSTFTEAWCAKKKQFRQKTGRSGTLFANSW

SEQ ID NO: 6630 - protein, 113 aa, Zea mays
  VARIANT 12: note = Ancestral polymorphism is G, Derived polymorphism is V
  VARIANT 30: note = Ancestral polymorphism is E, Derived polymorphism is D
  VARIANT 31: note = Ancestral polymorphism is A, Derived polymorphism is S
  VARIANT 35: note = Ancestral polymorphism is G, Derived polymorphism is S
  VARIANT 42: note = Ancestral polymorphism is E, Derived polymorphism is D
  VARIANT 48: note = Ancestral polymorphism is P, Derived polymorphism is Q
  VARIANT 52: note = Ancestral polymorphism is F, Derived polymorphism is S
  VARIANT 57: note = Ancestral polymorphism is L, Derived polymorphism is V
  VARIANT 88: note = Ancestral polymorphism is P, Derived polymorphism is L
MGKLPGLGAHFVTYELLTDGREDNYVYYSEAMLAGIVAGAVETVFCTPFELFKLRKLVSFVIPSKAMGPANVVKDHFQWFSTVAGYVLDITVWNNTAGLLSDLSPSIPTCWVL

SEQ ID NO: 6631 - protein, 413 aa, Zea mays
  VARIANT 278: note = Ancestral polymorphism is K, Derived polymorphism is E
  VARIANT 267: note = Ancestral polymorphism is P, Derived polymorphism is Q
  VARIANT 204: note = Ancestral polymorphism is E, Derived polymorphism is K
  VARIANT 198: note = Ancestral polymorphism is L, Derived polymorphism is H
  VARIANT 169: note = Ancestral polymorphism is P, Derived polymorphism is L
  VARIANT 145..413: note = Derived polymorphism lacks residues 145 to 413
  VARIANT 134: note = Ancestral polymorphism is D, Derived polymorphism is G
  VARIANT 133: note = Ancestral polymorphism is S, Derived polymorphism is L
MGCGASSHKDAGARRRRPGSVGDVVVFLPGLRVPRAVDFAQALGGCLARAIVERLSALRSRVVEMAMQESAAALKPRRKAAARHGSSTANLLQALEDYLPVLLGLAQQGSVLRHKVQFTWSNQEDNAEETAISDVWYEVLSVLHLMAMVCLLQANTLLLPRSYGDGYAPRVSEESRRATVDVFLKAAGYLDCAIRHVLPKMPLELRRQLPVDLAEGNLKALSLQALGQGVDMQLGLAIDSPKATLAVKRRLACEMVKYWQQVQESIPELPVSDGWGKKHRLFVKWKYVEAKAAAYYFHGLILDEGNTEKSHGMAIAALQASEEFLKESKMVSEAFHATPPTSRSPNAFGTAKYLFDKIPRDASSKVRIKQDLYTQEKVIGAPPPLPDFALALTPEDYDLPPLDPLWNKEDTHH

SEQ ID NO: 6632 - protein, 216 aa, Zea mays
  VARIANT 37: note = Ancestral polymorphism is A, Derived polymorphism is D
  VARIANT 131: note = Ancestral polymorphism is A, Derived polymorphism is V
  VARIANT 154: note = Ancestral polymorphism is P, Derived polymorphism is L
  VARIANT 182..216: note = Derived polymorphism lacks residues 182 to 216
  VARIANT 190: note = Ancestral polymorphism is E, Derived polymorphism is V
MEKKAGREHVIGIPVNNRAFGIEEPDFSSKGAARNAAAAGRAAKSGWTTGDRVAQGLKEHVALGPNLYETVRGKLSLGARILRAGGVEKAFRRWFSVVGKGERLLRASQCYLSTTAGPIAGTLFVSTERIAFRSDRSLALTSPKRGTVVLVRVPYKVSIPLGRVKTATPGGNKDRPEQKYVQVVTDDGFVFWFMGFVRYQVSLHELEKAIKQAQAQ

SEQ ID NO: 6633 - protein, 150 aa, Zea mays
  VARIANT 69: note = Ancestral polymorphism is R, Derived polymorphism is H
MAGAEAGAQAGPARRQGQAEGAQGGLHPPRYRLHLRGHEGLESDGGRPGGPRRRRGQAAQGRRRRNRLRRASQGGQEGGRQEGGGQEEEGRREEAAGPVVPAPVARRRRSAAVPPPPVPAPVRRPQRRGGPQLLRHLLIRIPGPVFFLYI

SEQ ID NO: 6634 - protein, 343 aa, Zea mays
  VARIANT 268: note = Ancestral polymorphism is Y, Derived polymorphism is C
  VARIANT 115: note = Ancestral polymorphism is L, Derived polymorphism is S
  VARIANT 114..343: note = Derived polymorphism lacks residues 114 to 343
  VARIANT 81: note = Ancestral polymorphism is A, Derived polymorphism is V
MNVAVPPQSPHLRLYDFAKSAIIKIFAFPYATVCDLYCDGGMDTDKWCDAQVGHYIGIDASASGVNYARELWENRRKPFTAEFIELDPSDDGFEAQVQEKGIQADMVCCMQHLQLCFENEEQAKKLLNNVSSLLKPGGYFFGITPDSSTIWTKYQKNVEASHNKGLKTVPNSIRSENYTITFEVEEEKFPFFGKKYQLKFASDAVFENQCLVHFPTLMRLSREAGLEYVEIQNLTEFYDDNRTQFAPMLGGYGASFLDARGKLVARSYDILGLYSAFVFQKPDPEAIPPIVTPDLPDPDKGHEEEWLQPQQASVEDGRRSHADVLPIDPEKGILGPGPADMRL

SEQ ID NO: 6635 - protein, 199 aa, Zea mays
  VARIANT 11: note = Ancestral polymorphism is Y, Derived polymorphism is H
  VARIANT 21: note = Ancestral polymorphism is R, Derived polymorphism is G
MPPLATTYTKYETRRRDPDPRAAVLLVIDVQGHFASLAAPIMPAIASTVALCRAAGVPVVYTRHVDPVPRLPPLGEWWPGDRIDAGTPAAELLPGAGRAQGDLVVEKGTYSAFVGTGLEATLRRMGAGEVIVAGVMTNLCCETTARDAFVRGFRVFFSADATATASQDLQDATLANMAYGFAYLVDCKRLEAALGKAAQ

SEQ ID NO: 6636 - protein, 588 aa, Zea mays
  VARIANT 20: note = Ancestral polymorphism is C, Derived polymorphism is G
MAARSLWQLEDAIIARLRTCATFRDLLRAHGLAVRLCLSQSSYVATQIVHICNAHGRAAHAARVFAQIPAPNLHLHNAMIKAYAQNHLHRDAVEVYVRMLRCLPHPSTAGFSVGDRFTYPFLLKACGALAASRLGRQVHAHVARSGCESHAVVQNSLIEMYTRCGDLSTARKAFDGMREKDVVSWNTLISAHARMGQMRRARELFYSMPDKTVVSWTALVSGYTAVGDFTGAVEVFRLMQMEGFEPDDVSIVAVLPACAQLGALELGRWIYAYCSKHGMLGKVYICNALMEMYAKCGCIEEALQLFHGMSEKDVISWSTAIGGLAAHGRAREAVRLFEVMDREGRVMPNGITFVGLLSACSHAGLVDEGLRYLDQMKEDYGVEPGVEHYGCVVDLLGRSGRIQRALDTIRGMPVPPDGKIWGSLLSACRSHGDVETAVVAAERLVELEPGDVGNLVMLANVYGAAGRWGEVASTRKEIRSRSTRKTPGCSMIEVDNVVREFVAGQDLGPELGGIATVLDILASKLADDEELVDSDCGDAIVFVRVDGYGPVSLLSLLPMLQWRGFTSMVDGGVGTGKMMLIDLSYEQL

SEQ ID NO: 6637 - protein, 259 aa, Zea mays
  VARIANT 120: note = Ancestral polymorphism is P, Derived polymorphism is A
MLRRLAAVAQRTFSSSSPHAPPLAASGYTPRREYGLVPMVIEHTSRGERAYDIFSRLLKERIVCIHGPITDDTASLVVAQLLFLESENPAKPVHLYINSPGGVVTAGLAIYDTMQYIRSPVTTLCIGQAASMASLLLAAGASGERRALPNARVMIHQPSGGASGQASDIAIHAKEILKVRDRLNKIYAKHTGQAIDRIEQCMERDMFMDPEEAHDWGLIDEVIEHRPVSLVSDAVGSDSQNLGGGGAGVNKGADEPSSA

SEQ ID NO: 6638 - protein, 511 aa, Zea mays
  VARIANT 52: note = Ancestral polymorphism is A, Derived polymorphism is V
  VARIANT 192: note = Ancestral polymorphism is D, Derived polymorphism is H
  VARIANT 236: note = Ancestral polymorphism is L, Derived polymorphism is F
MGAEAVAYPAVLLVPFPAQGHITPMLQLAGVLAAHGVAPTVALPDFIHRRIVAACGGGGVVGVTLASIPSGIDIVQQDAAAGDDDDTPGFRDIVHSMEHHMPLHLERMLTSPRRPPVACVVVDVLASWAVPVAARCGVPAAGFWPAMLACYRVVAAIPELLEKGLISESGTPISSSSTDSDEQDARTVRGLHILPAQVELRVEELPWLVGDSATRRSRFAFWLQTLHRARGLRWVLVNSFPAEAGCPAAAAAAAGDEDEDDGAHRQQGPRVIPVGAALLPAGGIGERTKQQQQCVNINKSPSMWRADSTCIGWLDAQRARSVVYVSFGSWVGSIGPGKVRELALGLEATGRPFLWALKRDPSWRAGLPDGFAGRVAGRGKLVDWAPQQDVLRHAAVGCYLTHCGWNSTLEAIQHGVRLLCYPVSGDQFINCAYITGLWKIGLRLGGMMRDDVRAGVERVMDDGGHLQEKVWALRERVVTPEARRGADRNVRSFVDEITRDHPLVVQLYSVL

SEQ ID NO: 6639 - protein, 368 aa, Zea mays
  VARIANT 32: note = Ancestral polymorphism is P, Derived polymorphism is L
MLGTKLVGPVVKLLLLIAATAVLIIWLIIGIPGSIFAGLVYGFLAPIMATFDAVGEGKEKPFVHCFVDGTWSTITGSCTVVRDVKDLLFHSYFSLMDDLRLQKPPDGEPYEIRLLDIPGALIAAAFEFLLDGIMFTLTAFYKCPVTLFKGWKRLIQDMIGREGPFLETAGVPFAGLAILLWPFAIVGAVLASVLSSVPLGAYAAVVAYQESSLILGIAYVFSSVSIFDEYTNNVLDMAPGSCFPRPASFNREKQEGKRPPSRVTSFKNNIDDFNPFKLLDHLFAECRNQGEDLVNRGVITMKDIEEMKSSKVGSSVLNVGLPAYVILNALWSAKADSVELILSDGSEIASDNRPKTPSLIGSLTHLWL

SEQ ID NO: 6640 - protein, 65 aa, Zea mays
  VARIANT 58..65: note = Derived polymorphism lacks residues 58 to 65
  VARIANT 42: note = Ancestral polymorphism is S, Derived polymorphism is L
  VARIANT 36: note = Ancestral polymorphism is S, Derived polymorphism is N
  VARIANT 4..65: note = Derived polymorphism lacks residues 4 to 65
MPLWGTAASTQPAAKGDAACAPLGSGGGGVKMNPVSKSGALSGSRTSASLMWLSSSKRLHQRVAS

SEQ ID NO: 6641 - protein, 98 aa, Zea mays
  VARIANT 64: note = Ancestral polymorphism is K, Derived polymorphism is N
  VARIANT 58: note = Ancestral polymorphism is R, Derived polymorphism is P
  VARIANT 57: note = Ancestral polymorphism is M, Derived polymorphism is T
  VARIANT 18: note = Ancestral polymorphism is A, Derived polymorphism is T
  VARIANT 11: note = Ancestral polymorphism is A, Derived polymorphism is V
  VARIANT 7: note = Ancestral polymorphism is S, Derived polymorphism is N
MVAYTFSGDKATPFFGTATALVFPVSTLQISPPSLLCMGVAYETAKSGVGVASMGVMRLKLVMKSIVLVVMARVLGIYDLIIAAIISAGSTPRPSPTS

SEQ ID NO: 6642 - protein, 77 aa, Zea mays
  VARIANT 2: note = Ancestral polymorphism is A, Derived polymorphism is V
  VARIANT 3: note = Ancestral polymorphism is S, Derived polymorphism is Y
  VARIANT 21: note = Ancestral polymorphism is A, Derived polymorphism is T
  VARIANT 35: note = Ancestral polymorphism is E, Derived polymorphism is K
MASTKRLRLRTGGTYSVNRAAEKATAISSCSILDERTPPGSSSPFPFAPAMRANPIRSRRLGIGRMEAAVRWEGQTP

SEQ ID NO: 6643 - protein, 810 aa, Zea mays
  VARIANT 28: note = Ancestral polymorphism is G, Derived polymorphism is D
  VARIANT 16: note = Ancestral polymorphism is A, Derived polymorphism is V
MASLLPLVVLFLAVAATAAGGLCPASCGMIDISYPFGVGPACSLPGFNLTSYSVSWEGPGRPFAISGSSNMSLFVVGCGVLAALLDGGTGAVVGNCSVICAGEEVVMERLPDGLCGGVGCCRIDVRVPLRAFVLNLSRTGEGVTRDRVTFLVTGPDGYTFRASDLEQGIVAGEAAPALLDWAIPDPADCALAAADGASYACVSNNSECQNSSIGGYVCHCSPGFVGNAYVVGGCVPNQVYGSRQPKADCPTTCGNVDIPFPFGMELGCFARIHLYLACNPGPTPPILQMTEHSAVTDISIDQGILRIQRLSDPGGFLDGGDSAFYLYVLSGESGVAKWAVDNSTCRDAMANKHQYMCVSTHSDCLEVTDNRTSGHVGYRCRCSSGFQGNPYLEDGCTGITVGISSGGGLLFLAAIAVLLNRRWKRGVQKQLRRRYFRKNKGILLEQLISSDQNASDGTKIFSLAELEKATNNFDQARVVGRGGHGTVYKGILTDQRVVAIKRSKQVATVEIEEFINEVAILSRINHRNVVKLHGCCLESEVPLLVYEFISNGTLYDLLHSGRRRDGGGLLSSPLPWEERLRIASEVAGALTYLHSAASMSVLHRDVKSMNVLLNDSYTAKVSDFGASRLIPIDQTHLVTAVQGTFGYLDPEYYHTGQLTDKSDVYSFGVILAELLTRNKPIIEKGNGEKENLSNYLWEANEKPLEEIVDGQVWEEASKEAVVCFARLALECLDLRREARPTMKDVEVRLQLLKAKARAYASGPRADGEFRPPGETGRRARRYGVVPVTAQDGTRRYSLEQEIASSLRIPR

SEQ ID NO: 6644 - protein, 400 aa, Zea mays
  VARIANT 145: note = Ancestral polymorphism is G, Derived polymorphism is E
MAFAASPSLSALASSSSSTAAAPTPSSNPLHEPRPLHLSLKPVLPLPKPHALSCSAPHIPRAAAGDGSGVGNGGKDGGGGGGGEDEDDCDDADFGPLLGFNEVLHLAAARGVALPGDMLEAAKDAGIREVLLLRYFDLQVLEFQGICMEDSNVAVFSHSFDIDLQAAPWPLGVLIRAFSMLRNRMLADPSFLFKVSTEVDAIEVQKRGKDFWAEFELYAADLLVGVAVDIALVGLLAPYVRIGKPSASTGLFGRFSRMAGSLPSSVFEAERPGCRFTAQQRIGTYFYKGVLYGSVGFVCGIIGQGIANMIMTAKRSVKKSDEDIPVPPLVKSAALWGVFLAVSSNTRYQIINGLERVVEASPVARRVPPVAMAFTVGVRFANNIYGGMQFVDWARWSGVQ

SEQ ID NO: 6645 - protein, 233 aa, Zea mays
  VARIANT 142: note = Ancestral polymorphism is D, Derived polymorphism is E
MDRAAKPHFALIPFTGTISHVIPMADLGCLLAAHGAEVTIITTPVNAAIAQSRVDRAQSHGATTTITVTAVPFPAADAGLPEGCERMDLLRSQAEVPRFFVANKGFGEAVSRHCLGEALRRPSCVVSGACQTWTLGLARQLEVPCYVFHGFGAFALLCIEHLYRHRPQEAAALADDELFDVPALPPPFRLRLSRPKGEERRRKAHELKLKAKSALEKGGSSYTNLDNLILSFL

SEQ ID NO: 6646 - protein, 382 aa, Zea mays
  VARIANT 124: note = Ancestral polymorphism is L, Derived polymorphism is M
MLWAKAPQSTATYDEIHRRDTCCDKQGCFTLCNVADHFHLFINPGYKAIQFPGFLHICISLLPHSCARDAKLYGNMISKLSKLEDTEDNGQMSQTVNKKRGLLWPLSEMVRRFFSADGSKGSTLWPALRLLIPVIALVAVCVGYYMHNSVEEIDCTNCECLSLYRSDEYYTYLLAVWVEDLRAKYSRYKAIQFPGFLHICISLLPHSCARDAKLYGNMISKLSKLEDTEDNGQMSQTVNKKRGLLWPLSEMVRRFFTADGSKGSTLWPALRLLIPDEWRTGLKALRADSISKLKKAFPELVQEVSRPSNFQDFYIYAFRYCLTVLGLQFHPQVDKLNNYLMYQNDYKVITMDQWMGFICLCNEIDFSVKWETTIYACKQNRK

SEQ ID NO: 6647 - protein, 528 aa, Zea mays
  VARIANT 222: note = Ancestral polymorphism is Q, Derived polymorphism is L
  VARIANT 156: note = Ancestral polymorphism is R, Derived polymorphism is L
  VARIANT 136: note = Ancestral polymorphism is G, Derived polymorphism is D
  VARIANT 32: note = Ancestral polymorphism is G, Derived polymorphism is D
  VARIANT 23: note = Ancestral polymorphism is F, Derived polymorphism is Y
MEGKVLCTYAGIVALLLCSSVNFIQSPSDVFGPVALLEPTASAARDFGGVVSEAAIAVMQPGSPADIARLLGALSSTGPGPGPKAAVAARGAGHSLHGQAQARGGIVVETRALPRLVEVVRRGDGDGGGAAYADVGGGALWVEVLEECLRAGLAPRSWTDYLYLTVGGTLSNGGISGQAFKHGPQISNVLQLEVVTGTGEVVTCSPTQSPELFFAVLGGLGQFGIITRARIPLQVAPPKVRWVRAFYDSFETFTKDQELLVSMPELVDYVEGFMVLNEQSLRSSSVAFPAQVNFRPDFGSDDGTNKKVCYYYCIEFAVHDFQRQDSAADHVVDLVSGKLSYLRPHAYSVEVAYWDFLNRVRMEEESLRRRGLWDVPHPWLNLFVPRHGVARFMDLLMATIAQGDFEGPVLVYPLLTHRWDGNMSAVVPAAPDGVMYVFSVLRSTDPARCGRACMERILEQHRRVADEACRRLGAKQYLARQPSLAHWRDHFGASWDRFVARKARFDPMNVLGPGQGIFPWTDSSSSPM

SEQ ID NO: 6648 - protein, 105 aa, Zea mays
  VARIANT 17: note = Ancestral polymorphism is K, Derived polymorphism is T
  VARIANT 56: note = Ancestral polymorphism is I, Derived polymorphism is M
  VARIANT 84: note = Ancestral polymorphism is R, Derived polymorphism is Q
MVMKIFRAKRDWKTGWKNEDCIEDIAVCVGSDDEEGSTEEGAEQQNAAELEEKQNMKRKILGYNERKEPPQYRSMNVFASGVVRRENGLHQELARDVRMLMARMI

SEQ ID NO: 6649 - protein, 398 aa, Zea mays
  VARIANT 371..398: note = Derived polymorphism lacks residues 371 to 398
  VARIANT 268..398: note = Derived polymorphism lacks residues 268 to 398
  VARIANT 189..398: note = Derived polymorphism lacks residues 189 to 398
  VARIANT 102..398: note = Derived polymorphism lacks residues 102 to 398
  VARIANT 78: note = Ancestral polymorphism is I, Derived polymorphism is T
  VARIANT 72..398: note = Derived polymorphism lacks residues 72 to 398
MFGRGSPRMNLIQAAAMQRVSPRSTTNKRKKRTSPKVGRLRANWNSGLEKGLVEILQDHNNDCYKGQNGWSSEAWNRIVKLFHEKFPYVTFTKCQIQDKEKELKRDYKALKEARQQSGVSWDERLCRIEAEEPIWNNLTISNERLKKFRTKSFPLFEALGELHDGNIAEGTMNFTSIEPYRPPVTQPCQGAATHPSQAAFMLTQPSQPSFTQPSQPAFTQPSRIAYTQPSQAAFAQPSQAAFAQPSQAAFTQPSQAAFAHPSQATITQAISNEDDDLRVLDPIAPTSVSKRAKNVGAGSSRTRIDKRGQDGKVVEMMERFLEMKEKQDEVEKRATTNANEDDFPITTCIAIVDGMEELSDDEKVDAYDVFKDAQNRAIFMIAKDATRIKWLRKKIART

SEQ ID NO: 6650 - protein, 291 aa, Zea mays
  VARIANT 114: note = Ancestral polymorphism is A, Derived polymorphism is T
  VARIANT 169: note = Ancestral polymorphism is P, Derived polymorphism is R
MADDPNMNFGAFSQSLCNQHVVSFQTSVATSGSGGMPTYLDCSTGMDASVGMLTTPSVVVSTGSSNMPADSGQSLKYGGPLAADWTQVELEILRDGMEKYVHEQGIMKYIKIAASLPNKTVRDVAMRCQWVGKKVNTRRRKPQEHHTGRNTKERKDKFVEPALWGTNHPLQTGMTASSFVPHNGQNAMFISGASEIDRPVLHLLEENNRLLNQIETNIQRFQPHNNIDLFHRARRNINDLVQITTQLPGLRTKMPPLTVAIDENLASFVLPGITMDQVLGSNDLKEEPRGW

SEQ ID NO: 6651 - protein, 275 aa, Zea mays
  VARIANT 109..275: note = Derived polymorphism lacks residues 109 to 275
MAPIVGGRVGEVARVSPVVVVSFGPTVGRYCFHPPTLTSLLHLIPSPPPARLPAVHRSPPSAAIQPPVQGSSSRSQPCPVPSRREARRLGSWSEDKETRERMQQLQPKQMHWVRTDSSDFGGDRPAPRSGHTAVIYRHMHPPPRLLLRCLPLTPRLLHATSSMQHSSPPMWPPSHQRHDASCEEDDLYGYGGIVNEWGTIGLLLLEAAAERIVGDGALETWGVGDKATRVKLCMLARGRSHAPRRAARNVFEERQLHSHLHRVVVAALSIQPFRV

SEQ ID NO: 6652 - protein, 343 aa, Zea mays
  VARIANT 52: note = Ancestral polymorphism is N, Derived polymorphism is S
  VARIANT 40: note = Ancestral polymorphism is G, Derived polymorphism is D
MEEDLDTDDEGSWDLVGRDIRLKAAFLCIDLGRVIALCGGEERKKALTALANKLFYSMDELGDAVESRSLPLTQARYSDTADALREVVAVLALSLDLEFGPDDPDGKRIAEYINRRRKTKYRDYWPARDQLQPIQEKIRYMISSNIGEVASIFLTSALGIPEGLIPVQLLWVNLVTDGPPATALGFNPPDKDIMKKPPRRSDDSLITPWILFRYMVIGLYVGVATVGIFIIWYTHDSFMGIDLASDGHTLVSYSQLSNWDQCSSWEGFKVSPFTAGARTFSFDANPCDYFQGGKIKATTLSLSVLVAIEMFKFQIIKVHFLQSNNLQDHGLCKHYYMYPDQYE

SEQ ID NO: 6653 - protein, 566 aa, Zea mays
  VARIANT 91: note = Ancestral polymorphism is S, Derived polymorphism is P
MDVTASHLSPSRGSVAPRRWSRAAARPTVLVIMVSVVAALLMMAAVCGRLMPFTGGNTWVPPGVRAAVNAGAGPMATVPDPRDRLLGGLLSPDFDDSSCLSRYRAALYRRPSLHAISSYLVSALRRYESLHRRCGPGTPAYARAVERLRTPPNASSTTTNSSAGGCSYVVWNPTEGLGNRILSITSAFLYALLTDRVLLLHRGGNDLDDLLCEPFPGSTWILPADKDFPIRDIERLTDRNHHESLGSVLRRGEDPGVAPWLYLHLRHDYSGAYHDQLFFCDDVQAQLRRVPWLVFLSDNYIVPGLFLIPRYVGELARMFPRRDVVFHHLGRYLFSPSNTVWDMVMRYHGSYFAKADERVGIQVRKFPWWAPISTDELYGQILNCSQREDILPGVGVRVPADDKTTGAANSSGQPAKQKAVLVASLHGEYSEKLRGLYHEHGPSGGEVVSVYQPTQLGWQQSGEQQHNQMALAEMVLLSFSDAVVTTAVSTFGYVGQGLAGLRPWVLMSPADGKAPEPPCRRAATIEPCFHAPPNYNCRAKANGDAGRIVRHIRHCEDFPQGVQLME

SEQ ID NO: 6654 - protein, 362 aa, Zea mays
  VARIANT 170: note = Ancestral polymorphism is M, Derived polymorphism is V
MRYVAATPTMPSLVAESAAEPPLVDSYLELLRRGGGGGGIAAATEGCVQERELPLIDLTCLQGSAGEAARTTCADAMARAASEWGFFQVTGHGVSRALLERLRAEQARLFRLPFETKAKAGLLNGSYRWGAPTATSLRHLSWSEAFHVPLASISGTACDFGELSSLRDVVQEVADAMSRVAKTVAVALAGSLLGHDEAAAFPAGCGETTCYLRLNRYPACPFAANTFGLVPHTDSDFLTVLSQDQVGGLQLMTDAGWVAVKPRPDALIVNIGDLFQAWSNNLYKSVEHKVVANAAAERFSAAYFLCPSYDSLVGTCGEPSPYRDFTFGEYRRKVQEDVKRTGRKIGLPNFLKHRPPPQSRPA

SEQ ID NO: 6655 - protein, 200 aa, Zea mays
  VARIANT 32: note = Ancestral polymorphism is G, Derived polymorphism is S
  VARIANT 33..200: note = Derived polymorphism lacks residues 33 to 200
  VARIANT 36: note = Ancestral polymorphism is R, Derived polymorphism is H
  VARIANT 45: note = Ancestral polymorphism is A, Derived polymorphism is T
  VARIANT 46..200: note = Derived polymorphism lacks residues 46 to 200
  VARIANT 98..200: note = Derived polymorphism lacks residues 98 to 200
  VARIANT 107: note = Ancestral polymorphism is T, Derived polymorphism is M
  VARIANT 109: note = Ancestral polymorphism is W, Derived polymorphism is R
  VARIANT 147..200: note = Derived polymorphism lacks residues 147 to 200
  VARIANT 169: note = Ancestral polymorphism is S, Derived polymorphism is R
MESSPATAMAPASSSRAARDPLLFARFDLPAGWGCRKPLAFCREAWDTDDAPIASEPAAIAATTEGVKDSDETQSPTRATATVQQAPAAGEVTQEAPWKQWNLREWTSWRDYSNRADDLRARQARKLESTDAGGSRRLSLSVKLTRQEIDADFAKITGSKAPRRPTKRSKTVQRKIEVRGLTAQAAMPVISIDLLTAVAG

SEQ ID NO: 6656 - protein, 195 aa, Zea mays
  VARIANT 144: note = Ancestral polymorphism is G, Derived polymorphism is R
  VARIANT 143: note = Ancestral polymorphism is P, Derived polymorphism is R
  VARIANT 62: note = Ancestral polymorphism is A, Derived polymorphism is V
MSEASKDSMEVDLVQKTEKVKVIGELSSEEVETARQTSQVEVADDTFVSEVDRLEKAGNIDAELIVHVNQIGEGAEAASVSEESSQQVGDMEQAYTQKEASVSDLPTEIETLHSDAIIKELPQKAPDNMQTDIATAPKQSHSRGDNVVFEAVTEVPSTAQDHSEDDVGDEVPEGHTVSPVLQSQTPGEKLVRSRF

SEQ ID NO: 6657 - protein, 221 aa, Zea mays
  VARIANT 34: note = Ancestral polymorphism is Y, Derived polymorphism is H
  VARIANT 2: note = Ancestral polymorphism is G, Derived polymorphism is D
  VARIANT 1: note = Ancestral polymorphism is M, Derived polymorphism is L
MGLYFTLILDGKPAFHSTQALLELGSGAVLHFGYFWSFQRLATWILAPVLSSPLPPSFLRSVPRVAMELDLPPQPTPPLTDLAASIHRAAAAAAVLSAPAPSSHAAAAVAALRDAHAAIGSFLSRLNVSYGDDHQPMADSGEELVEDGEGAQMVGEAEERLRNCGLQGSKRRKRPVPPSWPLGRRSSSSSEAAAAAAAPVPVLDVEERRRATMDLLMQFHA

SEQ ID NO: 6658 - protein, 114 aa, Zea mays
  VARIANT 62: note = Ancestral polymorphism is R, Derived polymorphism is C
MHLWPSLRIRDSFKHGYLQKLELNLGNMKRAQRQRQGRQGESQEDQDGQPGGNGKAPLLEDRSPSGSVLAGALELAWDAVLLLTCCCCCFCCGGMHLFVVYSMKKSLSYNLFRI

SEQ ID NO: 6659 - protein, 468 aa, Zea mays
  VARIANT 164..468: note = Derived polymorphism lacks residues 164 to 468
  VARIANT 151: note = Ancestral polymorphism is G, Derived polymorphism is D
  VARIANT 81: note = Ancestral polymorphism is S, Derived polymorphism is L
  VARIANT 68: note = Ancestral polymorphism is S, Derived polymorphism is F
MITAEEKSPEREEEEEEANPRAEAFLEIICRVPAGEVEAALSACGIGPTAEVEELVLKSRECYKRPKSAVRFFRWAGQSVSHTAYAWNLLVDILGKAAMFEPMWDAIRSMKQEGGGGLVSVATFASVFASYCAAGNIKDAIAALDVMDRYGLKHDAVALNSLLSAICRVEGRAQDAQDVFERTKATIPPDGDTFAILLEAWEKEGNAVRAKSVFGEMVVRIGWDAANVSAYDSFLSTLVRGGLLDEAFKFLQVMRSKGCLPGINFFSTAVDLVVRKGDYLNAVAIWHMMVSEAGLVPNFSMYSAMIGLHCNAGSIDDALGLLDEMPLNGVFANSVTYNTILEGFIKHRKAREAESFLTEMSKNEQLPTASNCAAAISLFFKEFNPSAAIDVWRCIVEHNITPAEDSAKELIAGLLEFGRFTEVTKRADEMIDMRVELSRSTMENMKRGFAKAGRHQSYDNIARRLKRY

SEQ ID NO: 6660 - protein, 201 aa, Zea mays
  VARIANT 190: note = Ancestral polymorphism is S, Derived polymorphism is F
  VARIANT 168: note = Ancestral polymorphism is E, Derived polymorphism is D
  VARIANT 166: note = Ancestral polymorphism is R, Derived polymorphism is W
  VARIANT 158: note = Ancestral polymorphism is A, Derived polymorphism is E
  VARIANT 151: note = Ancestral polymorphism is A, Derived polymorphism is T
  VARIANT 147: note = Ancestral polymorphism is G, Derived polymorphism is R
  VARIANT 134: note = Ancestral polymorphism is G, Derived polymorphism is R
  VARIANT 125: note = Ancestral polymorphism is R, Derived polymorphism is G
  VARIANT 103: note = Ancestral polymorphism is G, Derived polymorphism is S
  VARIANT 89: note = Ancestral polymorphism is A, Derived polymorphism is V
  VARIANT 72..201: note = Derived polymorphism lacks residues 72 to 201
  VARIANT 69: note = Ancestral polymorphism is G, Derived polymorphism is D
  VARIANT 60..201: note = Derived polymorphism lacks residues 60 to 201
  VARIANT 57: note = Ancestral polymorphism is T, Derived polymorphism is M
  VARIANT 56: note = Ancestral polymorphism is D, Derived polymorphism is G
  VARIANT 49: note = Ancestral polymorphism is P, Derived polymorphism is S
  VARIANT 46: note = Ancestral polymorphism is A, Derived polymorphism is V
  VARIANT 44: note = Ancestral polymorphism is A, Derived polymorphism is T
  VARIANT 39: note = Ancestral polymorphism is V, Derived polymorphism is M
  VARIANT 37: note = Ancestral polymorphism is F, Derived polymorphism is L
  VARIANT 27: note = Ancestral polymorphism is T, Derived polymorphism is M
MSEGSRSARDGQQHQQPRPVSFTKVLTASDANNGDVFSVLANCAKAVFPELDYSLGTPKQFVCVRDVHGVEWMFCHIWRGSPKRHLLTAGWNNFVNTKKLRFGDSVVFMREEDSKIHVGLRRTNRLFGAMQGNGGGPAGAVVGPSDGKVSTEDVVAAARLAGAGLWFEVVYYPHVASSEFCVSVAAVKESMQVPWFPGLQL

SEQ ID NO: 6661 - protein, 273 aa, Zea mays
  VARIANT 100..273: note = Derived polymorphism lacks residues 100 to 273
MSAGFQLGVIGSLALSVASSVAIVICNKALISTLGFPFATTLTSWHLMVTFCTLHVAHRLHFFEPKAIDGQTVILFGLLNGTSIGLLNLSLGFNSIGFYQLTNTIQKRLKVSSTQLLYQSAPYQAGILFATGPFVDQLLTDRSVFAHKYSAPVLGFIVLSCLIAVSVNFSTFLVIGTTSPVTYQVLGHLKTCLVLSFGYTLLHDPFTLRNILGILIAIFGMALYSYFSVREGKKKSANDALPVSQMADKEAEPLLATKDNNDTKKANGLSHDC

SEQ ID NO: 6662 - protein, 249 aa, Zea mays
  VARIANT 202: note = Ancestral polymorphism is S, Derived polymorphism is F
  VARIANT 117: note = Ancestral polymorphism is A, Derived polymorphism is T
  VARIANT 41: note = Ancestral polymorphism is Q, Derived polymorphism is H
  VARIANT 26: note = Ancestral polymorphism is I, Derived polymorphism is V
MEIKEVAAAEAMTMGMPTVPSRFRRICVFCGSSQGRKKSYQDAAVELGEELVSRNIDLVYGGGSVGLMGLVSRAVYNGGRHVIGVIPKTLMPREITGETVGEVKAVADMHQRKAEMARQSDAFIALPGGYGTLEELLEVIAWAQLGIHDKPVGLLNVDGYYNSLLSFIDKAVEEEFISPTARHIIVLAPTPNELLDKLEEYSPRHEEVVPKTKWETEQLSCCKSCEIPPGLKEGTPIVQAQRGTMHALN

SEQ ID NO: 6663 - protein, 344 aa, Zea mays
  VARIANT 175: note = Ancestral polymorphism is P, Derived polymorphism is L
  VARIANT 280: note = Ancestral polymorphism is T, Derived polymorphism is I
MASSGYEGILLGMGNPLLDISAVVDEGFLAKYDVKPGNAILAEDKHLPMYDELASKSNVEYIAGGATQNSIRVAQWMLQIPGASSYIGCIGKDKFGEEMKKNAQAAGINAHYHEDENAPTGTCAVCVVGGERSLIANLSAANCYKSEHLKKPENWALVEKAKYIYIAGFFLTVSPDSIQLVAEHAAATNKVFMMNLSAPFICEVFRDAQEKALPYVDYIFGNETEARTFAKVRGWETENVEEIALKISQLPKASGTHKKITVITQGCDPVVVADDGKVKTFPVILLPKEKLVDTNGAGDAFVGGFLSQLVQEKNIDECVRAACYAANVVIQRSGCTYPEKPDFN

SEQ ID NO: 6664 - protein, 127 aa, Zea mays
  VARIANT 85: note = Ancestral polymorphism is R, Derived polymorphism is Q
  VARIANT 83: note = Ancestral polymorphism is L, Derived polymorphism is V
  VARIANT 82: note = Ancestral polymorphism is L, Derived polymorphism is P
  VARIANT 18: note = Ancestral polymorphism is L, Derived polymorphism is P
MKAGSKQRRRFLNLKAFLHAWKRLAAAETAGGAGWAQLDGGEGEAAIPRDVPRGHTVVYVGEALRRYVVRVSSLDHPLFRDLLDRARDEYGFAAADTRLCLPCDEDMFLAVLCHVDAQREWSPALCS

SEQ ID NO: 6665 - protein, 111 aa, Zea mays
  VARIANT 27: note = Ancestral polymorphism is P, Derived polymorphism is L
  VARIANT 69: note = Ancestral polymorphism is A, Derived polymorphism is V
MGTASTSSDTMEAARLPGLSITVEKNPPEARLLQLGVKSWPKWGCPPGRFPLKFDAALTCYLVKGRVRAAVKGSRECVEFGAGDLVVFPKGLSCTWDVVVGVDKHYNFDPS

SEQ ID NO: 6666 - protein, 118 aa, Zea mays
  VARIANT 8: note = Ancestral polymorphism is P, Derived polymorphism is S
  VARIANT 19: note = Ancestral polymorphism is L, Derived polymorphism is V
  VARIANT 40..118: note = Derived polymorphism lacks residues 40 to 118
  VARIANT 88: note = Ancestral polymorphism is G, Derived polymorphism is C
MGTASTSPDTMEAARLPGLSITVEKNPPEARLLQLGVKSWPKYIYYMRRWGCPPGRFPLKFDAALTCYLVKGRVRAAVKGSRECVEFGAGDLVVFPKGLSCTWDVVVGVDKHYNFDPS

SEQ ID NO: 6667 - protein, 98 aa, Zea mays
  VARIANT 12: note = Ancestral polymorphism is S, Derived polymorphism is F
  VARIANT 39: note = Ancestral polymorphism is P, Derived polymorphism is S
  VARIANT 44: note = Ancestral polymorphism is A, Derived polymorphism is S
  VARIANT 66: note = Ancestral polymorphism is D, Derived polymorphism is G
MVNQKPLFPGDSEIDELFKIFRVLGTPNEQSWPGVSCLPDFKTAFPRWQSQDLATIVPNLEPAGLDLLSKMLRYEPSKRITAKQALEHEYFKDLEMVQ

SEQ ID NO: 6668 - protein, 278 aa, Zea mays
  VARIANT 186: note = Ancestral polymorphism is S, Derived polymorphism is L
MLLRSSSTPFPLPFLSSSLHLRRAFSDAHLPSLHPPSSTPNDAGRTSNPGRGGLHTELSFSVYNTFGKGEAVLAPLASPPRSQGQEGGRQPPPTVVVQPEHPEVPLFLARGLGIDRIASGFFTAGADLKGCGASMEEQQDEAVAALDAQYKTMVDEQPGNALFLRNYAQFLHEAKGDTARAEEYYSRAMLADPSDGEIMSQYARLVWEVHHDPERCLGYFQQSVQAAPLDSHVLAAYASFLWEQDDDDCGDQGTAGGAAAQERAAGTGQAMELASAAV

SEQ ID NO: 6669 - protein, 411 aa, Zea mays
  VARIANT 256: note = Ancestral polymorphism is R, Derived polymorphism is W
  VARIANT 196: note = Ancestral polymorphism is L, Derived polymorphism is R
  VARIANT 112: note = Ancestral polymorphism is G, Derived polymorphism is V
MAFFSSGSRVLVEILTRMQSAERPMPVDHTFFESGSIRYHVEASASDPENVFLSISTPSLSYDYEEAAAAPSSSRLPELTLQEARKTYHRFAEMVEPPREGYVLTLKLNFSGLTRPKDRVKAINQVSLLQSVVLSSQLKHMLGSLGSSGTMRLVYNNQREPFFVSKTAEKINAIFPMRFRDDTDLAIATSFFQVCLHAFASHPRIRHAAADEPFVVVAGAAGGRELVREGAQVQLVADPTAGAARGERAPPHHQRRIRLLRRPVAAREGEAAAKTAWILLNFQSYVKYHIKCTRSHVQSRMRERLEALTEAVQNARLRGNSGDDDKKRSSQVVKKRSKRRLASLAKASDRVRKGFRAVLDKMKRLRLRVRVKGLDRLRRQFRCRCFAVPRLPAPSRTGRRKEHYRYHKLAE

SEQ ID NO: 6670 - protein, 130 aa, Zea mays
  VARIANT 14: note = Ancestral polymorphism is G, Derived polymorphism is R
  VARIANT 26: note = Ancestral polymorphism is S, Derived polymorphism is L
  VARIANT 32: note = Ancestral polymorphism is R, Derived polymorphism is I
  VARIANT 37: note = Ancestral polymorphism is E, Derived polymorphism is K
  VARIANT 49: note = Ancestral polymorphism is G, Derived polymorphism is S
  VARIANT 52: note = Ancestral polymorphism is E, Derived polymorphism is K
  VARIANT 61: note = Ancestral polymorphism is I, Derived polymorphism is N
  VARIANT 86..130: note = Derived polymorphism lacks residues 86 to 130
MVDIRVGVIIGKAGETIRYIQLQSGSKIQVTRDHEAEPGALTRQVELSGKPEQISKAEQLIKEVLAEADVGSSGVGSGGRKYNATQQGAETFQMKIANNKVGLIIGKGGETIKSMQTNSGARIQVCYLVI

SEQ ID NO: 6671 - protein, 506 aa, Zea mays
  VARIANT 428: note = Ancestral polymorphism is T, Derived polymorphism is A
  VARIANT 352: note = Ancestral polymorphism is I, Derived polymorphism is M
  VARIANT 121: note = Ancestral polymorphism is P, Derived polymorphism is H
  VARIANT 9: note = Ancestral polymorphism is A, Derived polymorphism is E
MLRLPAVMARLFFLLLLFPLLYSSVTGLNRSDFPPSFLFGASTSSYQVEGAYLDDSKGLSNWDVFSHVPVLAINHKSGNIDDGSNGDVAADHYHRYKLPARQHARDPSLVPVFNLNYMLVPFKYPWPEGRFGGVNQAGVKFYNSLINGLLEKGIQPFVTINHYDIPEELQERYNSWLNPEIQEDFTYFVELCFKMFGDRVKHWVTFNEPNLIVKLAYSIGAFPPNRCSEPYGKCDSGNSSTEPYIAAHNMILAHAKTVNIYRKNYKSKQGGFVGISLHLRWILDPLFFGDYPHQMRQILGPNLPKFTEGEKKLLKNQIDFIGVNHYQTFYVKDCIYSLCDMDAYPSEALVSISTERNGIPIGKPTPVANTYVVPSSMEKLVMYLKQRYKSIPLYITENGYAQIANISTTAEEIINDIERSTYIRDYLTYLSFAIRKGADVRGYFVWSLMDNFEWISGYTVKYGLCHVNFKSLKRTPKLSAKWYSKFIKGYEQIEMASEELPKHMVS

SEQ ID NO: 6672 - protein, 451 aa, Zea mays
  VARIANT 205: note = Ancestral polymorphism is N, Derived polymorphism is K
  VARIANT 3: note = Ancestral polymorphism is R, Derived polymorphism is H
MARLFFLLLLFPLLYSSVTGLNRSDFPPSFLFGAGTSSYQVDTDDIEMMHSIGLGSYRFSLSWSRILPKGRFGGVNQAGIKFYNSLINGLLEKGIQPLVTINHFDIPEELQERYNSWLSPEIQEDFTYFAELCFKMFGDRVKHWVTFNEPNLVVKLAYSIGAFPPNHCSEPYGKCDSGNSSTEPYIAAHNMILAHAKTVNIYRKNYKSKQGGFVGISLHLRWYEPLRNITEDHLAMRQILGPNLPKFTEGEKKLLKNQIDFIGVNHYQTFYVKDCIYSPCDMDAYPSEALVSISTERNGIPIGKPTPVANTYAVPSSMEKLVMYLNQRYKNIPLYITENGGLLGYAQIANISTTTEEIINDTERSTYIRDYLTYLSFAIRKGADVRGYFVWSLMDNFEWISGYTVKYGLCHVNFKSLKRTPKLSAKWYSKFIKGYEQIEMASEDLPKYMVS

SEQ ID NO: 6673 - protein, 513 aa, Zea mays
  VARIANT 388..513: note = Derived polymorphism lacks residues 388 to 513
MARLFLLLLFSLLHSSVTGLRRSDFPPSFLFGAGSSSYQIEGAYLEDNKGLSNWDVFTHIKGNIDDGSNGDMATDHYHRYKDDIEMMHSIGLTSYKFSLSWSRILPKGRFGGINQAGIKFYNNLINGLLEKGIQPLVTINHYDIPEELQERYNSWLNPEIQEDFTYFAELCFKMFGDRVKHWVTFNEPNLLAKLEYFIGGFPPNRCSEPNGKCDYGNSSTEPYIAAHNMILAHAKTNNIYRKNYKSKQGGSVGITIHMRWYEPLRNITEDHLAVSRALSFEAPWFLDPLFFGDYPHQMRQILGPNLPKFTAGEEKLLKNQIDFIGVNHYQTFYVKDCIYSLCDIDPYTSEALVSESTERNGIPIGKLTQDANTYVVPSSMEKLVMYLKERYNNIPLYITENGGLLGYAQIPNISTTVEEIINDTERINYIRDYLTYLSFAIRKGADVRGYFVWSLMDSFEWISGYTIKYGLFHVNFKSLKRTPKLSAKWYNKFIKGYEQIEIASEESLEHMVS

SEQ ID NO: 6674 - protein, 483 aa, Zea mays
  VARIANT 209..483: note = Derived polymorphism lacks residues 209 to 483
  VARIANT 32: note = Ancestral polymorphism is G, Derived polymorphism is D
  VARIANT 12: note = Ancestral polymorphism is G, Derived polymorphism is R
MEHVVGGKFKLGKKIGSGSFGELYLAVNVQNGEEVAVKLESVTSRHPQLHYESKLYMLLQGGTGIPHLKWFGVEGQYNVMVIDLLGPSLEDLFNYCSRKFSLKTVLMLADQMISRVEYMHTRGFLHRDIKPDNFLMGLGRKANQVCATSANLIKSQFSYWKHCVIVSTNLSNVEHTPQVFVIDYGLAKKYRDLQTHKHIPYRENKNLTGTARYASVNTHLGVEQSRRDDLESLGYVLMYFLRGSLPWQGLKAGTKKQKYDRISEKKMLTPVEVLCKSYPSEFTAYFHYCRSLRFEDKPDYSYLKRLFRDLFIREGYQLDYVFDWTIMKYPQFRDKSKIQSSGKMSGLAGPSAERTDRTAAEALFRRTGSGSGHNREHTKHRSLLESLMPSKVAVDSDKARPQSSSRNGSTSRRAVISSSKPSSSGDLSDPNRLGGRLAPSSSSRPPTAQREIRSSSLSKIGRSSHDDAIRNLELLSLGADKRK

SEQ ID NO: 6675 - protein, 643 aa, Zea mays
  VARIANT 601..643: note = Derived polymorphism lacks residues 601 to 643
  VARIANT 572..643: note = Derived polymorphism lacks residues 572 to 643
  VARIANT 540: note = Ancestral polymorphism is L, Derived polymorphism is P
  VARIANT 158: note = Ancestral polymorphism is V, Derived polymorphism is D
  VARIANT 62: note = Ancestral polymorphism is A, Derived polymorphism is V
MSVSEAAYPPPPPSSWAQQIRAAAAEGHFCDAVSLFLRMRASAAPRSSVPASLPAALKSCAALGLSALGASLHALAIRSGAFADRFTANALLNLYCKVPCSYLDSTGVAIVDVPGSSTAFESVRKVFDEMIERDVVSWNTLVLGCAEEGRHHEALGFVRKMCREGFRPDSFTLSTVLPIFAECADVKRGLEVHGFAFRNGFDSDVFVGSSLIDMYANCTRTDYSVKVFDNLPVRDHILWNSLLAGCAQNGSVEEALGIFRRMLQAGVRPVPVTFSSLIPVCGNLASLRFGKQLHAYVICGGFEDNVFISSSLIDMYCKCGEISIAHCIFDKMSSPDVVSWTAMIMGYALHGPAREALVLFERMELGNAKPNHITFLAVLTACSHAGLVDKGWKYFKSMSNHYGIVPTLEHFAALADTLGRAGELDEAYNFISKMQIKPTASVWSTLLRACRVHKNTMLAEEVAKKIMELEPRSIGSHVVLSNMYSASGRWNEAAHLRESMRKKGMKKDPACSWIEVKSKLHVFVAHDRSHPWYDRIIDALNAFSEQMAREGHVPNTEDVFQDIEEEHKSYVLCGHSEKLAIVFGIISTPAGTKIRVMKNLRVCIDCHTVTKFISKLADREIVVRDANRFHHFKDGNCSCGDFW

SEQ ID NO: 6676 - protein, 137 aa, Zea mays
  VARIANT 105: note = Ancestral polymorphism is G, Derived polymorphism is S
MEGEKKAAAVAEDEVVVVAAGDVSLKDLSKKLNDFARERDWEQFHSPRNLLLAMIAEVGELSELFMWRGEVRKGLVGWDEAEKEHLGEELSDVLLYLVQLSDMCGVDLGDAAVRKIAKNAVKYPAPRPSKKEEEEGA

SEQ ID NO: 6677 - protein, 69 aa, Zea mays
  VARIANT 22: note = Ancestral polymorphism is Y, Derived polymorphism is F
  VARIANT 31: note = Ancestral polymorphism is V, Derived polymorphism is D
  VARIANT 33..69: note = Derived polymorphism lacks residues 33 to 69
MAAEGETVALEFIPIAERCLQYLGKLKKKAVKEGAPFLLIFALTLITGGQEDCMPLGIMVYGYEKHLNN

SEQ ID NO: 6678 - protein, 297 aa, Zea mays
  VARIANT 98: note = Ancestral polymorphism is R, Derived polymorphism is C
  VARIANT 115: note = Ancestral polymorphism is L, Derived polymorphism is R
MGLREIESTLPPGFRFYPSDEELVCHYLYKKVANERAAQGTLVEVDLHAREPWELPDAAKLTASEWYFFSFRDRKYATGSRTNRATKTGYWKATGKDREVRSPATRAVVAMRKTLVFYQGRAPNGVKSCWVMHEFRLDSPHTPPKEDWVLCRVFQKRKDSEQDNGGGSSSPPTFAGASSQGVVLDLPDDQQPSMTMAGAYVAVDHHQPGSSAVGFALPPHAQDNGLGDGGLDALLMNGATMWQYSSSALADHFPPEEVTAAPMMGLGSRGGGDGCSFFYDSGFDDMANMGFPQGWMG

SEQ ID NO: 6679 - protein, 265 aa, Zea mays
  VARIANT 102: note = Ancestral polymorphism is P, Derived polymorphism is L
MLCRCSGAGAQYCGWVALSRAGRMATKVVDLWSSDRRGQQALRGHACRRRRRRPWLARTRTARRFQEEMAAIMGRRPRSSSRRGPRATLSPSSCTVTSGGHPWLRLSHIQKNADGTTDMDRIFAAIRPPGGGAVLPGQQAHLPRECTRSRGKCLSVQYSDMVQGWPKLPRGKSHGQLRTDGSRIFNAFEEQATMEEQATALLMKRSGTIPDHAEPNEQDHARFRAQFVDHLNVEAAAGYQSLFSLGEEDSIDSDPLAPLAVLGTV

SEQ ID NO: 6680 - protein, 327 aa, Zea mays
  VARIANT 164: note = Ancestral polymorphism is G, Derived polymorphism is E
  VARIANT 130..327: note = Derived polymorphism lacks residues 130 to 327
MSDLSRTVPQEQLVSQDLLHLSPTPVINLGHLSLDDSVTRSGVINQIARACHDLGYFQVTNHGISQSVMDCAVEAASDFFQLPSEAKEQFASQDLRKPVRYDTSSKDSISMSRAFLKHYAHPPRDWIQYWPDKPPIYREYMGKYAVEVRRVALHLMQAILEGLGLGKEYMNEKFQQGSQLLSVNCYPKASQDAMTIGLAPHSDYGFLTILLTSCQGLEVVDRSSNNWKTVQQLPHALHVHVGDHMEVLSNGQIKTVVHRAVLNPEEARISIASIHGFELHEKVACAKELVDEQNPPKYKESSFTDFLDHLTANMDNKNRNFLESLRM

SEQ ID NO: 6681 - protein, 200 aa, Zea mays
  VARIANT 62: note = Ancestral polymorphism is L, Derived polymorphism is Q
  VARIANT 156: note = Ancestral polymorphism is R, Derived polymorphism is S
MDMSPNPDSPSSGGGNGIGPSSGGASPSVGSMTPQSPSRYEAQKRRDWNTFGQYLRNHRPPLSLAQCSGAHVLEFLRYLDQFGKTKVHGPACPFFGHPNPPAPCPCPLRQAWGSLDALVGRLRAAFEENGGRPESNPFAARAVRLYLREVREHQARARGVSYEKKKRKKPQQLQGDSSGGLHGHAHQPPPPPPPPAGAAC

SEQ ID NO: 6682 - protein, 370 aa, Zea mays
  VARIANT 310: note = Ancestral polymorphism is H, Derived polymorphism is D
  VARIANT 213..370: note = Derived polymorphism lacks residues 213 to 370
  VARIANT 152..370: note = Derived polymorphism lacks residues 152 to 370
MASKVVDLRSDTVTKPSEAMRAAMAAADVDDDVLGADPTAHRFEAEMAAVMGKEAALFVPSGTMGNLISVLVHCDVRGSEAILGDNSHIHVYENGGISTIGGVHPRTVKNNPDGTMDIDKIVAAIRHPDLHYPTTRLICLENTHGNTGGKCLSVEYTDKVGEIAKSHGLKLHIDGARIFNASVALGVPVDRLVKAADSVSVCLSKGLGAPVGSVIVGSKAFIDKARILRKTLGGGMRQVGVLCAAAHVAVRDTVGKLADDHRKAKALAEGLKKIEQITVDSASVETNMVFFEVMDPRISPDKLCQVLEQDNVLALPANSKSIRFVIHYQISDADVGYALACVEKAIKELLEGSTELGHSINGATKSSYGH

SEQ ID NO: 6683 - protein, 372 aa, Zea mays
  VARIANT 271..372: note = Derived polymorphism lacks residues 271 to 372
  VARIANT 188..372: note = Derived polymorphism lacks residues 188 to 372
MVTNVVDLRSDTVTKPSDAMRAAMAAADVDDDVLGADPTARRFEAEMAALLGKEAALFVPSGTMANLVSVLAHCDVRGSEVILGDASHIHVYENGGISTLGGVHPRTVPNNPDGTMDLARIVDAIRNPDGALLYPTTRLICLENTHANSGGKCLSVEYTDKVGEIAVNHGLKLHIDGARIFNASVALGVPVHRLVKAADSVSVCLSKGLGAPIGSVVVGSEAFIDKARILRKTLGGGMRQVGVLCAAAYVAVRDTVGKLADDHRKAKALAEGLKKIKQLTVDSSSVETNMVFFDIVDPRISPSKLCQVLEQRNVLAMPASSKSVRFVIHYQISDSDVQYALTCVEKAVEELLKGGTKLEHLTNGTAKNSYWH

SEQ ID NO: 6684 - protein, 1272 aa, Zea mays
  VARIANT 663..1272: note = Derived polymorphism lacks residues 663 to 1272
MAAGGAGPAQHQAPNGASVSISNGGGAAAATPPQGSAASTANGAAADGYDSDGYSFAPPTPSTLSMSIPPELAGAIPLIDRFQVEGFLKAMQKQIHSAGKRGFFSKKSVGPQTREKFTLEDMLCFQKDSIPTSLLKISNDLVSRSIKLFHVILKYMGIDSPAIISLEERIEFVEKLYKHTLKRSELRDELFAQISKQTRNNPDRGWSIRAWELMYLCASSMPPSKDIGAYLSEYIHFVAHGATTDADVRVLALNTLNALKRSVKAGPRITIPAWEEIEALLTSRKLTTIVFFLDETFEEITYDMATTVADAVEELAGIIKLSVYSSFSLFECRKVVNGSKSSEIGNEEYIGLDDNKYIGDLLSEFKSAKDRNKGEILHCKLVFKKRLFRESDEAVTDPMFVQLSYVQLQHDYILGNYPVGRDDASQLSALQILVEIGFIDNPESCVEWISLLERFLPRQVAITRAKRDWELDIISRFQLMEHLSKDDARQQFLRILRTLPYGNSVFFSVRKIDDPIGLLPGKIILGINKRGVHFFRPVPKEYLHSAELRDIMQFGSSNTAVFFKMRVAGVLHIFQFETKQGEEICVALQTHINDVMLRRYSKARSGNSVTSQNDVNQAYKPPNIEMFEKRVQELTKTAEDSQKKADQLREDLQLKTKQETEMQEELEGLRDTLQSERQSSKDIKNELDKLKSLCDEKESALQAALMEKSRLETRLTSGQGRERDTLTTVGSINNDIEMLAKLEEELKSYQKELDASKEVSKKLMLEKNILDQKVQRLERMKNEEKSAMEKVYADECCKLKSQIAELEQKLEVATRSLNVAESNLAVRNAEVDSLQNSLKELDELREFKADVDRKNQQTVEILKRQGAQLVELENLYKQEQVLRKRYYNTIEDMKGKIRVFCRLRPLSDKELSFEEKNIVCSPDEFTISHPWKDEKSKQHIYDRVFDANTSQEEVFEDTKYLVQSAVDGYNVCIFAYGQTGSGKTFTIYGSENNPGLTPRATSELFRVIKRDGNKYSFSLKAYMVELYQDNLVDLLLPRNAKQLKLEIKKDSKGVVTVENVTVVSISSIEELRAIISRGSERRHTAGTNMNDESSRSHLILSIIIESTNLQTQSYARGKLSFVDLAGSERVKKSGSAGKQLKEAQSINKSLSALADVIGALSSDGQHIPYRNHKLTMLMSDSLGGNAKTLMFVNVSPAESNLEETYNSLMYASRVRCIVNDTSKHVAPKEIMRLKKLIAYWKEQAGKRSDEDELEEIQEERISKERSDNRMTS

SEQ ID NO: 6685 - protein, 114 aa, Zea mays
  VARIANT 55: note = Ancestral polymorphism is V, Derived polymorphism is M
  VARIANT 16: note = Ancestral polymorphism is R, Derived polymorphism is Q
MDDCGGGGKRPFQLARSLTYHHHPGHRPAAASRWRRQHQQHQLADEPRAPRPQAVVLYTTSLRGVRRTFADCAAVRAILRGFRVAARRSRRQMEDDGECWWGRGRSDDDGAEEL

SEQ ID NO: 6686 - protein, 123 aa, Zea mays
  VARIANT 76: note = Ancestral polymorphism is A, Derived polymorphism is T
  VARIANT 61: note = Ancestral polymorphism is N, Derived polymorphism is D
  VARIANT 51: note = Ancestral polymorphism is S, Derived polymorphism is C
MDLYVERMHFEAMKCMSRSYRPTVPVGYVAQILGFLRTDTGCAKSNVLQNSTQLHSQELFNSSVPSFVKRRRRLKASSSTLYMPEPENVVAHGDASLAVDDFLARTDGQLKRGSSDGPTVDTP

SEQ ID NO: 6687 - protein, 312 aa, Zea mays
  VARIANT 145: note = Ancestral polymorphism is T, Derived polymorphism is M
MAAVVALAPASPALLPVPFRGRRDGRVALSPRRTRCSAGRCRATAQTFQGGAAASYAREMERLSAKESLLLAFKDAGGFEALVSGKTTEMQRIDVNERIVGLERLNPTPRPTTSPFLEGRWNFEWFGDSSPGAFAARLLFERSPTAVAHFMGLDVLIKDGYSKLSSNLKFVNTAVSVYIICKLNVSIQSKFLLTTQLSVEGPIRMKEEYVEGLIEIPRINEESLPEQLKGLLGQTAGALQQLPSPIRDAVSEGLKLPLSGSFQRLFMISYLDEEILIIRDAAGAPDVLTRLEGPQPNPGDGTADAVISEYES

SEQ ID NO: 6688 - protein, 182 aa, Zea mays
  VARIANT 28: note = Ancestral polymorphism is G, Derived polymorphism is E
MDSQAPLRPPLAFACFIFLCSSFCAANGMYDRVGAAASDGESRRMRLHTDGSRGDAHAWPGYLYTRAVGRCTPQFWSSGAEPWPNIVPQEAAVAKVFGSRSVERYGPRLTLLEATMRTDDAGGSAFVKLVKQGSAALLNAYARRGFPFDSWEVKALLLEALVSEDAAVVQAERFEQANESCV

SEQ ID NO: 6689 - protein, 294 aa, Zea mays
  VARIANT 124..294: note = Derived polymorphism lacks residues 124 to 294
  VARIANT 95: note = Ancestral polymorphism is R, Derived polymorphism is S
MGRAPCCEKMGLKKGPWTPEEDKVLVAHIQSFGHSNWRALPKQAGLLRCGKSCRLRWINYLRPDIKRGNFSKEEEDAIISLHEQLGNRWSAIAARLPGRTDNEIKNVWHTHLKKRLDPTKQEQQQQHGTTPAAGAGKKHRPAAAAKRGGGGARKATANADAVVVPAPAPATAAPASPERSAASSSVTESSMTEQEQEHGNTGSSPAFPKEESLTTSSSDAEEFQFDDSFWSETLSMPLDSLDDVVPMEPSDDDAFGDVDVAAASSSSVGADGDLDYWLRVFMESGDAHPELPQI

SEQ ID NO: 6690 - protein, 205 aa, Zea mays
  VARIANT 131..205: note = Derived polymorphism lacks residues 131 to 205
  VARIANT 110: note = Ancestral polymorphism is Y, Derived polymorphism is C
MEALLPRSGGVISPKISTILQSHVYPRFGRVLRALARVKSALLDALGKTKWGARRRKQHAPSIARGRRSKKRKSSKGEFSKKPPHLTWSGGLSPLRGAAVDALDVDYHVYPSCDYESVWNAVVVPAATGEYCGYLRWLEEEMPDEVGVVEEEEEEEVEEDDGVASGGGNEIDRLAEQFIARCRANFLLEKQESYDRRQEMIARSL

SEQ ID NO: 6691 - protein, 472 aa, Zea mays
  VARIANT 211: note = Ancestral polymorphism is P, Derived polymorphism is T
  VARIANT 87: note = Ancestral polymorphism is T, Derived polymorphism is I
MNILERIRGGGDRAAATERPPRPECWVEISESVSRLCSFDAAGSGSRSISVKVIQDSRPIHDKLVDSFLNKFFPSGYPYSVNEGYLTYTKFRVLQHFSSAMLHVLSTQAFKHLSSLTSAHFNYARQLTAQVGCGSVLAVCCRFATYPGASNCCKLGKHMMTEMLKSKQHAGKLICSSMGARMDSEPKSWRILADVLYDLGTALEVVSPLCPQLFLEVAGLGNFAKGMAVVAARATRLPIYSSFAKEGNLSDLFAKGEAISTLFNVMGIGAGIGLASTVCSTTQGKLIAGPLLSAVHIYGVIQEMRATPVNTLNPQRTAMIVADFIKSGKVSSPAELRYKEDLLFPNRVIEEAGSVKIGQPLRKVFSPRLVEQLRATFPGEKFLLSQKSNRTYMVLERSASGEDALRGWLVAAFASEMERSGAGSRDDAVLSEAYEKMERVFPTFVSEVRSRGWYTDQFLDGNCSRVSFAKFR

SEQ ID NO: 6692 - protein, 285 aa, Zea mays
  VARIANT 117..285: note = Derived polymorphism lacks residues 117 to 285
  VARIANT 247..285: note = Derived polymorphism lacks residues 247 to 285
MNILERIRGGGDRAAATERPPRPECWVEISESVSRLCSFDAAGSGSRSISVKVIQDSRPIHDKLVDSFLNKIFPSGYPYSVNEGYLTYTKFRVLQHFSSAMLHVLSTQSLLFAAGLRPTPAQATAILKDGMQHAGKLICSSMGARMDSEPKSWRILADVLYDLGTALEVVSPLCPQLFLEVAGLGNFAKGMAVVAARATRLPIYSSFAKEGNLSDLFAKGEAISTLFNVMGIGAGIGLASTVCSTTQGKLIAGPLLSAVHIWGHPRDESNSCKHTQPTKNSNDRG

SEQ ID NO: 6693 - protein, 1118 aa, Zea mays
  VARIANT 53..1118: note = Derived polymorphism lacks residues 53 to 1118
  VARIANT 192..1118: note = Derived polymorphism lacks residues 192 to 1118
MRKASCCLALAVKRGEEEEEEATAHTEKMSTNPDEPKSRARTDFLLNNELEVQKFWDENKVFQADPGNDSPSPGEKFFGNFPYPYMNGLLHLGHAFSLSKLEFGAAYHRLRGSNVLLPFAFHCTGMPIKASADKLAREIQQYGYPPVFPVAEGSSAAVADATQADQVDVVAPDKFKGKKSKATAKAGAQKYQWEIMKSFGLDDEEIARFQDPYHWLTHFPPLAKEVLKKFGLGCDWRRSFITTDMNPYYDAFVKWQMRKLKKLGKVVKDMRYTIYSPLDGQPCADHDRATGEGVQPQEYVLIKMEVISPFPPKLKSLEGRKVYLAAATLRPETMYGQTNCWVLPDGMYGAFEINDTDVFILTARSAFNLAYQHLSRVPEKPTCLCELSGSDLIGLPLKSPLAFNETIYALPMLTVLTDKGTGIVTSVPSDSPDDFMALQDLVTKPALRAKYGVKDEWVLPYEIIPIIHIPEFGDKSAEKVCHDLKIKSQNDKEKLAEAKRMTYLKGFTDGTMIVGEFSGRKVQEAKPLIKSKLLEEGTAVLYSEPEKKVMSRSGDECVVALTDQWYITYGEAEWKQKAVKCLDHMNTFSTETRNGFEHTLGWLNQWACSRSFGLGTRIPWDEQFLVESLSDSTLYMAYYTVAHLLQNGNMYGKEISSVRPEEMTDEVWDFVFCDGPAPKSEIPAALLNKMKHEFKYWYPFDIRVSGKDLIQNHLTFCIYNHTALLPEHHWPIGFRCNGHLMLNSEKMSKSTGNFLTLEDAIKKYSSDATRFALADAGDGMDDANFVTETANSAVMRLTKEISWMEEVTAAESKLRTGPPTTYADRVFSNEMNIAIKETEKSYNAFMFRDALKSGFYDLQLARDEYRLSCGAAGMNRDLLWRFMDVQTRLITPICPHYAEHVWQKIMKKEGFAIKAGWPAADTPDPTLRIANKYLQDSIVLMRKLLQKQESGSKKPKKGAAPAPPSEEKKMSIGLIYVNEHYSGWKEQCLKVLQSKFDSQSRSFSPDQEIAEALKECPIGQEMNLKQVQKLCMPFIKLKKDEAREVGPQALDLKLPFGEMDVLRENLELIKRQLGLEQVEVLSASDEAARAKAGEHASLLEKNPPSPGDPIAIFLSKQS

SEQ ID NO: 6694 - protein, 174 aa, Zea mays
  VARIANT 7: note = Ancestral polymorphism is V, Derived polymorphism is M
  VARIANT 9: note = Ancestral polymorphism is P, Derived polymorphism is L
  VARIANT 13: note = Ancestral polymorphism is D, Derived polymorphism is N
  VARIANT 15: note = Ancestral polymorphism is P, Derived polymorphism is S
  VARIANT 17: note = Ancestral polymorphism is R, Derived polymorphism is C
  VARIANT 28: note = Ancestral polymorphism is L, Derived polymorphism is M
  VARIANT 33: note = Ancestral polymorphism is D, Derived polymorphism is N
  VARIANT 34: note = Ancestral polymorphism is A, Derived polymorphism is V
  VARIANT 35: note = Ancestral polymorphism is L, Derived polymorphism is F
  VARIANT 45: note = Ancestral polymorphism is F, Derived polymorphism is C
  VARIANT 47..174: note = Derived polymorphism lacks residues 47 to 174
  VARIANT 50: note = Ancestral polymorphism is G, Derived polymorphism is S
  VARIANT 58: note = Ancestral polymorphism is G, Derived polymorphism is V
  VARIANT 76: note = Ancestral polymorphism is S, Derived polymorphism is F
MEDASTVALRFADVPVRLHASRHDLASLDLDADALRLSTHIFGIFYGHDGVEWPTTAGRGSRGWMMRCQGRQAGLFVASMSHGRWPPRTWAQMRLSPVCSSHAVVANCGDSHVVLRRGKETIESSIDRTSDIKDEQARIEALGLGARSSNGMAIESPVYLLDLGRMTLYVRWKA

SEQ ID NO: 6695 - protein, 424 aa, Zea mays
  VARIANT 1: note = Ancestral polymorphism is M, Derived polymorphism is I
  VARIANT 22: note = Ancestral polymorphism is P, Derived polymorphism is L
  VARIANT 31: note = Ancestral polymorphism is P, Derived polymorphism is L
MMDAKKIKLHDYHLYGSQQLFPAAGGLSFHPAAGLMSSLPQPPHAAWLHEDHHTTTPRSVLATHGSLQGSRCVGSDAAAFFAAEELMMGMPRFDDCPLGGTEMTAFAKRPTTEDEQLHYRRPGPVDPLPLRDSAAVRTYYVRPQQRDGATEAPPSLELPFQQGRRQQQQLFGNASTGRLLGGEPKAHSFTAHVATSTLLPAMEAPAGMQQSPTENPLSRSCSTIGAPATHVGSGNVAAAAAPGHGAPSKTRIRWTQDLHERFVDSVNQLGGADKATPKGILKLMNSDGLTIYHIKSHLQKYRIAKYMPASSTSEGKQEKRAVGNDVQNLDPSTGMKITEALRVQLDVQRRLHEQLEIQRNLQLRIEVQGKKLQKMFEEQMKASRTVMEPRQEEEDDDDDAFNDVHVQLLAAAARSDAGFQLNIS

SEQ ID NO: 6696 - protein, 161 aa, Zea mays
  VARIANT 88..161: note = Derived polymorphism lacks residues 88 to 161
MLRKINFGSDQCYSDCYDPIYQCGHVNAKQMWLLHMQGCSKSTILIHRLFPSSNNFFYLFMDHFGFSWLSTFSQSPVNTSRMTLHIRQSQNFNAAMPLPSPNIQDAHEDWHEVVVAIKSGCLGGCCFNEYMSAIAEEVSEKWRRSRGCVHTESKVQLSKFN

SEQ ID NO: 6697 - protein, 430 aa, Zea mays
  VARIANT 323..430: note = Derived polymorphism lacks residues 323 to 430
  VARIANT 270: note = Ancestral polymorphism is M, Derived polymorphism is T
  VARIANT 265: note = Ancestral polymorphism is T, Derived polymorphism is I
MVSDQEIASCVESVLRGSAGGPGEASLAAVLQQAEATLGVDLSHKAGFIRDQMDLFFGPRLQPQPPSKPQPAPSPPQAVVAPAAAVPQPHVLPQVQAHAQAQQMQPQQLAPLQPQLIFQTIPQLSAMAPVPAVSAPPAVPAMAFYPPPPLAFRYTTGLAGAATGGTVSFQQPTPGAGGTASPTAAPQVAGDNKESASKRKRGGPGGLNKICAISPELQTIVGETAMSRTQIVKQLWAYIRQNNLQDPDDKRKIICNDELRVVFETDTTDMFKMNKLLAKHITPLDPILEYAQVLPNDTAEDQLHEVKRMKAPTVVPQPPPINQPSVVISDALAKFIGTDGTFPQDDALKYLWDYIKANQLENNHTMCSGFLLQVCSEYHHLKCKFTVPFLEDVISGSILCDSKLQELFGCESIPMSGLSEMLGHHFIKKT

SEQ ID NO: 6698 - protein, 428 aa, Zea mays
  VARIANT 78: note = Ancestral polymorphism is R, Derived polymorphism is C
  VARIANT 83: note = Ancestral polymorphism is S, Derived polymorphism is Y
  VARIANT 107: note = Ancestral polymorphism is R, Derived polymorphism is G
  VARIANT 216: note = Ancestral polymorphism is G, Derived polymorphism is S
MYGVGGGFNAPSTAASRRRNPGDEEEDEEDEGGEGRVLEAWERAYADERSWESLQEDESGLLRPVDTKTLVHAQYRRRLLLRSAAAAAARIQKGLIRYLYIVIDLSRAASEMDYRPSRMAVVAKHAEAFIREFFDQNPLSHVGLVTIKDGIAHRLTEIGGSPESQIKALMGKLECSGDSSLQNALDLVHGYLDQVPSYGHKEVLILYSALNTFDPGDITETIAKCKKSKIRCSVIGLAAEIFICKHLCEETGGSYTVALDESHFKELLLEHAPPPPAIAEYAAANLIKMGFPQRGAEELISICSCHKKIKSGAEGYICPRCKVNVCELPTECRTCGLTLVSSPHLARSYHHLFPVPPFDEVTPVPNRIQRGGQICFSCQQSLYNPDGQSNLHVRCPKCNQHFCLDCDIYIHESLHNCPGCESQRSIAS

SEQ ID NO: 6699 - protein, 362 aa, Zea mays
  VARIANT 268: note = Ancestral polymorphism is E, Derived polymorphism is K
MSPKKPAAPGATDPAAYTSPRDEDTNDGWVLVTAGVGRPPRPPPRRGNSPDDLVGRYLPARRALRWSELPPQIHDADVYGAHPAFLAKVHPPANGGDRLEWFFFVCRGRGLGGKRRAGRGAYRLVGEAKPVAAWYCHSFRYYEDAAEASASRETGWRMDEYGDRSDVSGAGAFDMVVCKVYPARGGVLHRRLVQHSTTPAEKRAVVPVKPQVLVQLYLASRSVGDPLRCRMHHATDVCADHPAVLTAVLPPANDRFEWFFVVRRPRTKHGDDAIIGFPRRAGPGQYVPATRYWCVKDGEGRNMGYLLVFLYREDDEATRRLSRAEKWWMEEYGFGPDFPYDDNDNDVEELVVFKVHLRMTRR

SEQ ID NO: 6700 - protein, 131 aa, Zea mays
  VARIANT 15: note = Ancestral polymorphism is E, Derived polymorphism is G
MGITSSTSSPTSSPESRAMALAKAKEIVASAPLVVFSKTSCPFCVRVKQLFEKLGASYKAIELDKESDGAELQNALKEWTGQRTVPNVFINGKHIGGCDDTMALNNDGKLVPLLTEAGAIAGSASKTTITA

SEQ ID NO: 6701 - protein, 1441 aa, Zea mays
  VARIANT 60..1441: note = Derived polymorphism lacks residues 60 to 1441
  VARIANT 338..1441: note = Derived polymorphism lacks residues 338 to 1441
MEAALEAARAKDTKERLAGVERLHEALDAAARRGLTAAEVTALVDTCMDLTRDANFRIAQGGLQALSAAAVVAGDHFKIHLNALVPAAVERLGDGKQPVRDAARQLLITLMEVSSPTIIVERAGSYAWTHKSWRVREEFVRTVATAIGLFASTEISLQRVLLSPVLQLMNDSNQSVRDAAIYCIEEMYKHMGSQFHEELQRHNLPSYMLKEINSRLDKIEPKVRSSDTAMQYKAVESRSVSANPKRGSPRTKSTPRESTLYGGDTDVTENPVEPVKVHSEKELLREFEKIAATLSPEKDWSLRIAALQRIEALVYGGAIDYPSFLMLLKQLVPPLSNQLCDRRSSIVKQACHLLNILSKELLGDFEPCAELFIPMLFKLVVITVLVIAESADTCIKTILRNCKVARILPRIVDTAKNDRSAILRARCCEYALLILEYWADASEIQRSADLYEDMIKCCVADAMSEVRATARTCYRMFAKTWPERSRRLFMLFDPAIQRIINDEDGGVHKRYASPSLRDRVVQPSRASSHSSGTYVPGYGTSAIVAMDKSAAISSDSSFPSTNLRLSQSKTIGRSSERSLESVLSSSKEKVSAIESLLKGVSMSGQNFSAARSTSLDLGVDPPSSRDPPVLLAAPASNVLSLQNSALLDSSLPTIPPSSRNGGSRLLETMTTHLPTKERSRSPYLSNMSSESMSGLSLPYSRRSSERLQEGGRMDESYDIRSTRRMPQMHFDRNYVDMPYRDASHRDSHNNNVPNFQRPLLRKQVMSRASASGRHSFDDSHVPSGDVPSYTDSLASLNDALSEGLSPSSDWVARVSAFEFIRNLLKQGQKGIQEITQNFEKVMKLFFRHLDDPHHKVAQAAFSTLAEIIPASKKPFESYVERILPYVFSRLIDPKELVKKPCSITLEVVGRTYAIDMLLPALVRSLDEQRSPKAKLAVLEFANKSFSKYTVDSDGYSNSGFLKLWLSKLAPLVNEKNAKLKEASISGIISVYSHFDSTAVLNFILSLSVEDQNLLRRALKIKTPRIEVDLVNYLQSKKERPRPKSYDQVDFGTSEDGYALTSKKSYPFGRFSSSSLDAEGGKMISSMHEPVLHNVSIGRTTSDMSMDHAIQSLESSTGAEVHLTRSREPKNNINSVVEAARSWTNYTEKTDASLDGETATSTPRLDVSRFVTSDGHNTVGSTTEESVQEGDMIVNLSSIKTSLQMDNGLSVPQLLYQISNDTEVSSSEKREALQQLVDASLDNNSSIWAKYFNQILKVVLEVLDDSDSSMRELALSLITEMLNYQKDAIEDSMEIVFEKLLHVTKDAVAKISNEANQCLNVLLAKYNPFTCLAITVPLLVSDDEKMLVVCINCLTKLVGRLSQEELIVQLPTFLPALFDAFNNQSPDVRKTVVFCLVDIYIMLGKAFAPYLEGLSSTQLRLVTIYANRISQARSGKPIDSNQ

SEQ ID NO: 6702 - protein, 249 aa, Zea mays
  VARIANT 111: note = Ancestral polymorphism is A, Derived polymorphism is V
MFFYLAFMASGTLGGLIALTRLLPALSGSDPASAASTLKGLGIDVAAVSLFAFLYSRESKAKDAQVARLAREERLSRLRLRLRAGAAEGAGSSRPFTLGELRGTTRLVIVAGPAEFVAESFRRSQPFLRELAERAVLAVPFATDGSTPELRLDDGGDDEDGVDDDVARRSKRLWQLTPVFTTEWAQWLDDQKKLAGVPSDSPVYLSLRMDGRVRGSGVGYPPWQAFVAQLPPVKGMWSGLLDGMDGRVL

SEQ ID NO: 6703 - protein, 980 aa, Zea mays
  VARIANT 361: note = Ancestral polymorphism is K, Derived polymorphism is M
  VARIANT 398..980: note = Derived polymorphism lacks residues 398 to 980
MLRLSSPQALWISGTSLVGKVSFSSCPCTYILFCYIAMLRGRVYDQKKAMINLFDLSAGMSSTNMLTDRARIDGSPACRSRQDAKRTVDPAKVYTNDKVGASNWSSSRNKSNVSPLNVALEKEMSKELESKKKSPSVVARLMGLEEDLPGQEPALPSTKRNLKKRHLNGNLVKTNNLHRHQEQYHSSMTTCDKHIGPKETVEFKDVYEVSEEPLRTYHFQDQTFPREMSSRSKRDIRMEIVRQKFMEAKRLATDEKLLHSKEFQEALEVLSSNRDLFLKFLEEPNSTFSKQLAGLHRSPSPPQTKRITVLKPTKFVESDCRREIRTHRINEGNEHVMRRTHWRSHSAEDTLSQPTRIVVLKPSPGKPSRTMARLTTEAAPAQFAEQIGFYGGLEGHNYPSDALHRRDESLLSSVYSNGYGGDESSFGRSEVDYIDEEDSNLSDSEIVSPVPPLHSWDHFKRYSSPHSGSTFSRTSRSPESSVIREAKKRLSERWASVAYNEINQEKLQLPRSSSTLGEMLSLRGVKKEAGGMGSVSSSRPCDAEKEMTLRATCITVLRENEGDGQSSPTTLARSKSVPVSSSMFDDIAPNAPSSNCEGCKTPNSATRSDKAKSSFKGRVSSFFFPKNKRQSKEKIIPSASFDGKVEVTCFGSMKPQGGHNIGSMPFCEDTDDSSATQTICSSKDVVSIEVPISSACPSEHIDGSRSGGLNCSCDKPSPTSILDVSFEDSNLNGSESSRSIPCSNERIALRSDAIESVTRSLSWEEDMSSPSPLLDSTNLTPISSVDDDELECVAFVQKIVSSAGLGDLRLDMVFTGWYLPDCPVDPALCDKLLDRKEEAAKSRERRSNQKLLFDYVNMAVVEIGHDTLLCAYPWRQACSMAWEETLSQALAEEVPHHMRDWLHGSGKFAGNENDNAGTLLERVMRQEVEGRGWVKSMRWELDEITEQIAGNVLDEIVVEALDGLGICSPWPEMAMAIPNL

SEQ ID NO: 6704 - protein, 341 aa, Zea mays
  VARIANT 241: note = Ancestral polymorphism is A, Derived polymorphism is T
  VARIANT 232..341: note = Derived polymorphism lacks residues 232 to 341
  VARIANT 227..341: note = Derived polymorphism lacks residues 227 to 341
  VARIANT 185: note = Ancestral polymorphism is S, Derived polymorphism is F
MLRAAIPTEVRPAPRRGLHPLPREFLEKLIRLPDLTASAYDLMSESKGRDGEEGRRWSARRKQTRSGSGGKDATRREAVGSESGRWRRLRGSGGKRVEALRRAARCAWWTWLLHASAVACRVEAEAAAVFFRPPPVGVLPPAPAPAVEGKEKVNGSWIWRARDRTPSAARRCPDPFRFATLRRYSQVTSNLMSYYGMCGLAKECLHQRYFSKEYSEFLDEFMAAVRQNYGQKVLVQFEDFANHNAFTLLEKYMTNHLVFNDDIHVIKSDAILAGIIAALKSVGGTLADHTFLFFSVSASMIYWVQLYDQVTSDVICHGEKTSYKMGARAFLVAILAYTDLF

SEQ ID NO: 6705 - protein, 364 aa, Zea mays
  VARIANT 96: note = Ancestral polymorphism is L, Derived polymorphism is I
MKRRWSHPSSVLLLLLLVAVFLLLTLLRCPLRHAQQACADDDAGSYAVDATLAELAAADPAASAVLRAAERLLEGNLTRAPPERRDAAVRGLREWLGRQRFEPQVMAELVDLIKRPLDRWHYGVGAGATDSDDGRRPYASCAVVGNSGILLAREHGALIDGHDLVIRLNNAPAGAGRYARQVGARTGLAFLNSNVLSRCTTAGCRHCRAYGDRVPILTYMCNAAHFVEHAVCSAGASAPVIVTDPRLDSLCARLAKYYSLRRFVRETGRPAEEWGTRHEEGMFHYSSGMQAVVAAAGVCGRVSVFGFGKDPGARHHYHTLQRGELDLHDYEAEYEFYRDLEARPEAIPFLRDSGFRLPPVVVYR

SEQ ID NO: 6706 - protein, 77 aa, Zea mays
  VARIANT 64..77: note = Derived polymorphism lacks residues 64 to 77
  VARIANT 73: note = Ancestral polymorphism is G, Derived polymorphism is R
MGFEGLINDSMPPKDPEEGGENCEGNADPESLSDIDDAEADGYLHNEEETQYKKIIWEEMNKEYLEVGTSSQGSFGS

SEQ ID NO: 6707 - protein, 405 aa, Zea mays
  VARIANT 159..405: note = Derived polymorphism lacks residues 159 to 405
  VARIANT 168: note = Ancestral polymorphism is T, Derived polymorphism is I
  VARIANT 186..405: note = Derived polymorphism lacks residues 186 to 405
  VARIANT 232..405: note = Derived polymorphism lacks residues 232 to 405
  VARIANT 319: note = Ancestral polymorphism is S, Derived polymorphism is Y
  VARIANT 323: note = Ancestral polymorphism is T, Derived polymorphism is I
MASSAAAASSASALFRLPGSGHLRAPPRSGWRDHRRSRRATVRCSFAPVETARIKVVGVGGGGNNAVNRMIGSGLQGIEFYAINTDSQALINSQAQYPLQIGEQLTRGLGAGGNPNLGEQAAEESRETIATALRDSDLVFITAGMGGGTGSGAAPVVAQISKEAGYLTVGVVTYPFSFEGRKRSVQALEALEKLEKSVDTLIVIPNDKLLDVADENMPLQDAFLLADDVLRQGVQGISDIITIPGLVNVDFADVKAVMKNSGTAMLGVGVSSSKNRAQEAAEQATLAPLIGSSIEAATGVVYNITGGKDITLQEVNKVSQIVTSLADPSANIIFGAVVDDRYTGEIHVTIIATGFPQSFQKSLLADPKGARIVESKEKAATLAHKAAAAAVQPVPASAWSRRLFS

SEQ ID NO: 6708 - protein, 548 aa, Zea mays
  VARIANT 56..548: note = Derived polymorphism lacks residues 56 to 548
MARLPLAACAVAAAFYLCLHLASSSSSAPRLAPAPSDGGRRAGRTAYHFQPAKNWQNGPMYYNGMYHLFYQYNPHGALWGVGNLSWGHSVSGDLVNWAALDTALDPTSPFDANGCWSGSATILPGGTPAILYTGIDANGEQVQNVAFPRDPADPLLRRWDKPGYNPVIPLPADVPGDKFRDPSTAWLGRDGLWRVAVSAEVRGVASTLVYRSADFLRWERAPAAAPLHASRAAGMVECPDLFPVKEEGDDGDGQGLDASASGAGLRHVLKLSVMDTLQDYYMVGRYDDAADAFVPAEPERGDDVRGWRRLDYGHTFPRKLWLDEDGKQLRQWPVEEIETLRRKRVVLRRGTALATGGMNEIVGVAGSQADVEVAFKVSSLAGAEALDPNWLLDPQKLCGEKGASVPGGVGPFGLIVMASSDLREHTAVFFRAFRYHGRSSTRAGVYKPPYGGFVDVDVEEHETINLRTLIDHSVVESFGADGRMCITARVYPEHAETSNNHMFVFNNGTGTVEVYKLEAWELAAATVNSVGGNDSLVISKSNDQSESY

SEQ ID NO: 6709 - protein, 400 aa, Zea mays
  VARIANT 305..400: note = Derived polymorphism lacks residues 305 to 400
MTVIKAAGAEPCGDGGAYGARRRQSLRARYAYGFVFFATNLLAWFVRDYGARALRGLHHVPVCGAGDSKCFQSGGVLRVSLGCFIFFWVMFATTFGTRKLHEARNSWHSGCWILKSLVYAMSIGIPFIIPNIFIQFYGEVARLGAGIFLLLQLISMLHFISWCNKRWMPDPGSNQCGLFGLFLSTISYIASFVGIGVLYVLYVPNSSCAFNIFTITWTAILVTIMMAVSLHSKVNEGLLSSGIMSSYIVFLCWSALHSEPQTGKCHSHMKIAQDGDSATIVSFIIAICSIVMATFSTGIDTKSFQFRNDKVQLDEDIPYSYEIFHIVFAMGAMYFAMLFISWELNHPTRKWSIDVGWASTWVKIINEWFAASIYLWRLISPVVLRNQLANEELMPHRPTV

SEQ ID NO: 6710 - protein, 520 aa, Zea mays
  VARIANT 44: note = Ancestral polymorphism is A, Derived polymorphism is T
  VARIANT 64: note = Ancestral polymorphism is R, Derived polymorphism is S
  VARIANT 102: note = Ancestral polymorphism is A, Derived polymorphism is V
MSPPPLRLTAPMQIAAEDSGSDSSSSFAPPARDYTQDLPDEILALVFASLSPTDRNACSLACSRWMEVDATTRHRLSLDARAALGNAAPALFARFTAVTKLALRWARGSGADSLSDYGAAAVATALPSGRLSRLKLRGLRQLSDAGLASLAAAAPAIRKLSVASCTFGPKAFVAVLQSCPLLEDLSVKRLRGLPDTAGATTSIAEDIKFPPASSLRSVCLKDLYSALCFVPLVASSPELRSLKILRCSGAWDLPLEVITARAPGLVELHLEKLQVGDRGLAALSACANLEVLFLVKTPECTDSGIISVAEKCHRLRKLHVDGWRTNRIGDFGLMAVARGCPNLQELVLIGVNPTVLSLRMLGEHCRTLERLALCGCETVGDAEIICLAERWAALKKLCIKGCPVSDRGMEALNGGCPSLVKVKLKRCRGVSYECIENLKVTRGGSFSISLDIVLEHDARSASENGAQENGQAQITALTDQMAGMDLPVNAAGAQSSTHTITRMRSVVSALRRRFGNPPPP

SEQ ID NO: 6711 - protein, 442 aa, Zea mays
  VARIANT 25: note = Ancestral polymorphism is L, Derived polymorphism is F
MAGPGPARTARSVALLCFLVSCAALVDSRGGASRPSRQDLDVGLGGGGVGIGIGIGGGSPSSPSPTPPSSQPQPCDFENERLYRAYLVIQQFRSTVTCDPMGVTQSWSGTDVCSYKGFFCERPPNVTDRAIASVDFNGYMLQAGSLRGFVDSLPDLALFHANSNDFGGAVPALGGLQYFYELDLSNNKLAPAAFPADVLGLTNATFVDIRFNSFYGELPAGVFCKLPRVQAIFVNNNRFSGALPDNIGQSPVNYLSLANNRFTGEIPRSIARNAGTLLEVLFLNNSLSGCLPHELGLLEKATVIDAGANRLTGTIPASFACLRKVEQLNLAGNLLYGEVPDALCRLAFSNLKNLTLSDNYFTSLGSCCWDLIKEGRLNVDRNCIQWAPNQRSHEDCAKFLRQPKSCPVNNYVPCRSKYQSSSEPADDAAAEYRYRTYSALHP

SEQ ID NO: 6712 - protein, 571 aa, Zea mays
  VARIANT 100: note = Ancestral polymorphism is T, Derived polymorphism is I
  VARIANT 110..571: note = Derived polymorphism lacks residues 110 to 571
  VARIANT 162: note = Ancestral polymorphism is R, Derived polymorphism is W
  VARIANT 453: note = Ancestral polymorphism is I, Derived polymorphism is K
MNGKQSPRNGRTAYHFQPAKNWMNGPLYHKGMYHMFFQYNPHGPTFGTGKLSWGHSVSGDLVNWAFLGTALDPTSPFDAEGCWSGSATTLADGRPAILYTGRDASGVQVQNVAFPKNPSDPLLREWRKPPGCNPVVPQPGDVTGNNFRDPTTAWLGRDGLWRFAVAAEVGGVGSTLVYRSKDFVRWERGSAPLHASPDVPVWECPDLFPVAERGAEGLDTSARGGAGVRHVLKLSKAADEDYYVVGRYDDEADTFAPVEGVFDWRRIDHGHLFGAKTFFDARRRRRVLWAWVDETDDGVDKGWRGIQTFPRALWLDADGRQLVQWPVEEIETLRKGRAALAGAVVGAGGLREIAGVDALQADVEVVFEVPESLDDAEELDPEWLQHDPHKLRACAEKKASSPGPRGGVGPFGLVVMASGDMREQTTVFFQVLRHGGTYKVLMCADLTRLQTNILTTIILHAFSMQTWKYRSSTKEGVHKPFYAGFVDVDVEKDRGISLRTLIDHSVVESFGGGGRTCITARVYPEHVAAGGSSHLYLFNNGAHPVTVSKIEAWELGTASVNVEQDDRADPL

SEQ ID NO: 6713 - protein, 612 aa, Zea mays
  VARIANT 233..612: note = Derived polymorphism lacks residues 233 to 612
MAANPLATLAIAVFLICLLLPTSSSSSSICVARTQDHVRTAFHFQPAKNWQNGNFQISLAWYELLVQAQIDFRPVYYNGMYHLFYQYNPHGALWDVGNLSWGDSVSGDLVNWAALGNALDPTAPFDANGCASGSVTILPDGTPAILYSGIDADRRQVQNVAFPKNPRDPLLREWAKPAYNPVVPLPADVSANDFRDPTTAWVGRDGLWRFAISAVADGVGATLVYRSADFLRWERRAAPLHASQDAVMAECPDLFPVAARGAEGLDASARGAGVRHVLKVSMPDTLEDYYAVGTYDDAADTFTPDEDCGGGDYRRWRRIDRGHLYASKTFLDARRMRRVLWAWVNESDSEADDVARGWSGLQSFPRALWLDGGGKQLVQWPVEEIETLRTRRAAPLQEVEPGGGVREVTGIVSSQADVDVVFEIPSLRRAEGLDPGRLHDPDALCREKGGSLTGGVGPFGLLVMASGDMREHTAVFFRVFRILHEYAVLMCTDLSRSSTKAGVYKPTHGGFVDVDIEKDMSISLRTLIDHSIVESFGGGGRTCMTARVYPEHVAAGSSSHLYVFNNGSAAVKVSKLEAWELASASVNVDDDGGLMAGGSFANMCRAEEYNSS

SEQ ID NO: 6714 - protein, 180 aa, Zea mays
  VARIANT 109: note = Ancestral polymorphism is G, Derived polymorphism is W
  VARIANT 127: note = Ancestral polymorphism is L, Derived polymorphism is I
MSNTAEENTGGGGGGSTPTRVVVVERVVTVEYLEPSMSRELLGKFPDPSAFDFDYSQSGIWSPLNKVPRGGACEPETADATNSSTDFLIANPKRRARAGGRPKDSAGGGRSRWRRRRLRRDGSFLDLHETGRARLDFSPPAPSPAKEGWRWVLKAAIRKFKARQRRSRQAPLLQMVLPML

SEQ ID NO: 6715 - protein, 228 aa, Zea mays
  VARIANT 152: note = Ancestral polymorphism is P, Derived polymorphism is H
MGEQENNKIGGSGNDNAMAVDEAGAGAAANKGKSLGAADPRLQAISDAIRVVPHFPKPGIMFNDITELLLRPGVFRDAVDMFVERYRGMGIAAVAGIEARGFIFGPAIALAIGAKFIPLRKPKKLPGEVFSESYVLEYGMDCLEMHVGAIEPGERVVVVDDLVATGGTLSAAIRLLERAGANVVECACLIGLPKFKVPKSKFVQKSYQMYISFFSRCTNMLLTCTSVS

SEQ ID NO: 6716 - protein, 354 aa, Zea mays
  VARIANT 191: note = Ancestral polymorphism is R, Derived polymorphism is W
  VARIANT 153..354: note = Derived polymorphism lacks residues 153 to 354
  VARIANT 9: note = Ancestral polymorphism is M, Derived polymorphism is I
  VARIANT 1: note = Ancestral polymorphism is M, Derived polymorphism is V
MVAATTAGMFLVCFESLCPCFGSKSKDGSEDHVLAEYSNSLNSSEMRSISDRIAASPLRVPASPSRFSLSSPPSRNEPLNISLEHVVKLTHNFAPTLMIGEGYFGKVYRAALLDGRVVAIKRAKKVTYFCPGNYSSNFPSYNDLVLARMVPVWENFLSLRAEFSNEVALLKSIEHKNLVQLLGYIDKANERILITEYISNGTLREHLDGQHGLVLGFNQRLEIAIDVAHGLTYLHLYAEKPIIHRDVKSSNILLTEAFMAKVADFGFARTGPTEPDQSQIETDVRGTAGYLDPEYMGTSHLTIKSDVFSYGILLLEILSGRRPIERTRGPAERITVRWVCILYPTLAYHYQFVD

SEQ ID NO: 6717 - protein, 495 aa, Zea mays
  VARIANT 400: note = Ancestral polymorphism is S, Derived polymorphism is L
MAPLRRASRLLRSAVCRLRSPAPARAFSSAAATETGAVIAAAAVAVASSGLGLWLKPPSLADSGEAPGDQISVACAGATEAREEKGWFLFADSFRRRVFFNYEKRIRLLSPPEKIFEYFASVRNREGEVYMLPADLMRAVVPVFPPSESTVVREGRLRGERSPGELHCAPSEFFMQFDTNNDGLISFAEYIFFVTLLSIHESNFTVAFKMFDIDHSGIFSTLMLIKLIYLAKKKDLLVMSMFNHLTCLLMVKEGVIDREEFKKIMALMRSFNRQGSTHKDGLRIGLKVGKPVENGGVVEYFFGSDGNEPLHFDKFSKILKELHDEIIQLEFSHYDVKSSKTIPAKDFALSMVASADMNHINKLLDRVDSLVKEPDLKDIRITFEEFKAFADLRRRLEPLSMAIFAYGKLNGLLTKEDLKRAAQHVCGVDLTDRVVDIIFHVFDTNQDGNLSPEEFLRALQRRETDIREPTIPGPLGFLSCWFSGRKCSSLKHVVI

SEQ ID NO: 6718 - protein, 239 aa, Zea mays
  VARIANT 45: note = Ancestral polymorphism is S, Derived polymorphism is Y
  VARIANT 105..239: note = Derived polymorphism lacks residues 105 to 239
MWPIMTIAILAAVVGSQAVITGTFSMIKQCASLGCFPRVKIIHTSAKVHGQIYIPEINWIMMILCLAVTIGFRNTKHLGNASGLAIITVMLVTTCLMSLVIVLCWHKSIFLAIGFILFFGTIEALYFSAALIKFREGAWVPIVLAPIFILIMCVWHYGTIKKYEFDVESKVSINWLLGLSLNLGIVRVRGIGLIHTELETDIPAIFSHFVTNLRAHLPRFLFHFILYFFTLYCMRFEVL

SEQ ID NO: 6719 - protein, 374 aa, Zea mays
  VARIANT 33: note = Ancestral polymorphism is G, Derived polymorphism is S
  VARIANT 87: note = Ancestral polymorphism is C, Derived polymorphism is Y
  VARIANT 89: note = Ancestral polymorphism is F, Derived polymorphism is S
  VARIANT 100: note = Ancestral polymorphism is A, Derived polymorphism is V
MEAALELRARAFLALRRYSEVAEMLRDYIPSRGKSCSGEDTSSSSSASLLSTGSGDLGTISRAKLFSPDRHRSDDAEPDARPVRSFCCFDISELKRRVLAGLSKNPSTGTQWRYLVLGQACFHLGLIEDAMVLLQTGRRLASVAFRRESVCWSDDSFSSSSSSATAATPCVPSGKTSSSGSAFIIPTTESEAVSQLLAHVKLLLRRRAAAMAALDAGLSAEAVRHAAHLESLSIDPGRHLLYSYSAAAHGFVAALLPVPEVLQVVPDEMFQLHTTRFPEFLGLLTPAYRPAMGNLEAATHDVVIGVLDTGVWPESPSFAGGNLPPSPARWKGVCEAGVDFPSSLCGRKLVGACSFSRGLRAANGGAIGVGKRTF

SEQ ID NO: 6720 - protein, 157 aa, Zea mays
  VARIANT 79: note = Ancestral polymorphism is A, Derived polymorphism is G
MAEQTERAFLKQPKVFLCSKKATKVNKPGKGGNRFWKNIGLGFKTPREAIEGTYIDKKCPFTGTVSIRGRIIAGTCHSAKMNRTIIVRRNYLHFVKKYEKRHSNIPAHISPCFRVKEGDHVIIGQCRPVSKTVRFNVLKVIPAGSKSGAVKKAFTAA

SEQ ID NO: 6721 - protein, 1178 aa, Zea mays
  VARIANT 542..1178: note = Derived polymorphism lacks residues 542 to 1178
  VARIANT 541..1178: note = Derived polymorphism lacks residues 541 to 1178
MEPGLSIESGSAIRVAVLPVGGPIPPPRLREYAALVARHARVDLASLRTYYAEHQKSPFQHQPWETGCLRLKFVLGGCVPSPWEDFQSSRKVLAVIGICHLPSSPDLDHVAADFIDAARSYPSALANRCFAFCPTDAQLSAKKRDDIIMFPPSDQQSLELHMLTMIQDLAASLLMEFEKWVLRAESTGTILKTPLDSQSSLGSEEVIKAKKRRLGRAQKIIGDYCLLAGSPVDANAHYTTAIELARLTGDVFWHAGALEGSVCALVVDRMGQSDPILEDEVKYRYYTIIQLYRRATLQDNAQRVSPVSFELEAALKLARYLCRRELAKEVSDLLMGAADGAKALIDASDRLILYIEIARLFGTLGYKRKAAFFSRQVAQLYLQQDNAYAAMSAMQVLTMTTNAYHVQSRKTMKMNHDPSKEPRAGNTDSGKVHPQSIVSLFESQWSTLQMVVLREILISSIRAADPLSSWSAAARLLRSFYPLITPAGQSGLASSLANAADKLPTGTRCADPCLPFIRLHSFPLHPSQRDIVKRNPHKKEWWAGAGPSGPFIYTPFSKAGASGTSKQELSWIVGEPVQVMVELANPCSFDIVVESIYLSVHSGNFDAFPVSVSLPPNTSKLVLLSGIPTKVGQISIPGCIVHCFGVITEHLFKEVDCLLLGAAQGLVLSDPFRCCGSSKFKSVNFPSISVVPPLPLLIANVVGGDGSILLYEGEIRDVLITLTNAGTVPVEEANVALSGKNQDSVISIAHSTWKSALPIKPGGEVTFAVTLRAWHLSSADLEADGSRSPVNSRRIAREGTNPFLDIHYAGPAANLENGDVSLLPGRRLVVPLNICVVQGMRLVRARLLSMEIPARFTETHLKPVSGKDINLLKVDPYKGSWGLRLLELELFNPTDVVFYVDVAVHLDDTDVDQEVISDGDAACHKTRIDRDYSARVLIPLENFKLPVLDASFFVKASSSDEPLGSRAAAIAERNAKAELNASINNLISKIKVKWHSGRNSSGELNIKDAIQTALQASIMDILLPDPLMFSFKLVTNGTVVNVDSPKDSGNVLRCKDPISAHEMTHMEVQIRNNTKEIIRMNLSISCKDVAGENCFDENSATVLWAGVLSDIHLEVPPLQEVVHPFSMYFLVPGDYSLQAASVIIDATDVLRARAKAESPDEPILCRGSPFHIRVVGTA

SEQ ID NO: 6722 - protein, 380 aa, Zea mays
  VARIANT 157: note = Ancestral polymorphism is V, Derived polymorphism is L
MGNGSSTVSADCRGPFLIVVASSSVENVDHLLKRLGSPPRRRAPPSREGKTRAVVKRPAKSSEASIKLPRYSLRVVLCAYMILAHPSAVLSGQGEREKQLIESAANFIKEFELLIKVILDGPGQSSGVTGQRKFRAQLANFDKAWCSYLYSFVVWKVKDARLLEEDLVRAACKLELSMMQTCKLTADRHSQNNLTHDMKAIQKQVIDDQKLLRDKVQHLSGDAGLERMNSALSDTRSKFFEAKENGSPLTAPVANVSTPLSINSSGKAPLSEVPESSRTNVIGTSSVMPAAGQVPALVPVLRSGHGAPVGQPSPSAGDTYGQPECKGEKLDKLIRIGLLQLISSVEGLQLQSTPESFQINLLRLRAVQSQFQQVIVIATR

SEQ ID NO: 6723 - protein, 206 aa, Zea mays
  VARIANT 48: note = Ancestral polymorphism is L, Derived polymorphism is P
MQPKSICIYRSLLWESFVWFRNIALLASPHRDSCSETLIKNRPSLASLVITIRFVSVSVGTMDEENDGSTQSHTVCFFLSSAKSITVEMKVYMHCDACERKVRRTISKVEGVGTVEVDREENKVTVTGDFEPEKVVRKIRKKTGKKAEILVREENEEDEGNGEETYVPYPLLYPDADIPDEFQTYRPERWNFHYFDDENSQACTVM

SEQ ID NO: 6724 - protein, 159 aa, Zea mays
  VARIANT 142: note = Ancestral polymorphism is K, Derived polymorphism is R
  VARIANT 56: note = Ancestral polymorphism is K, Derived polymorphism is N
  VARIANT 51: note = Ancestral polymorphism is R, Derived polymorphism is H
  VARIANT 15: note = Ancestral polymorphism is A, Derived polymorphism is V
MAPKEHESSQKAAPAKKGDAKTQALKVAKAVKSGAAKKKTKKIRTSVTFHRPTTLKKARDPKYPRISTTGRNKLDQYQILKYPLTTESAMKKIEDNNTLVFIVDLKADKKKIKAAVKKMYDIQAKKVNTLIRPDGKKKAYVKLTPDYDALDVANKIGII

SEQ ID NO: 6725 - protein, 644 aa, Zea mays
  VARIANT 61..644: note = Derived polymorphism lacks residues 61 to 644
  VARIANT 76..644: note = Derived polymorphism lacks residues 76 to 644
  VARIANT 95..644: note = Derived polymorphism lacks residues 95 to 644
  VARIANT 178: note = Ancestral polymorphism is D, Derived polymorphism is N
  VARIANT 243..644: note = Derived polymorphism lacks residues 243 to 644
  VARIANT 257..644: note = Derived polymorphism lacks residues 257 to 644
  VARIANT 519..644: note = Derived polymorphism lacks residues 519 to 644
  VARIANT 536..644: note = Derived polymorphism lacks residues 536 to 644
MDLRISEGSGTNTTLDDQSIQSPTRRAKVWEYFLQELVEVDGVMKAVCKYCGAKLTSKRNSGTNSLRNHVADTCPKIPVEDRKQFIATMRKRTGEGSFVFDPRKTRECMVKWCISAEVAFNKFDDPFFATWMESLQPSFSGVGRQTMRNDCIARFKMMRQELRNELQSLNSRICLTSDLWTSNQKLGYLCLTAHYIDANFILKKKTIAFKDVKYPHTSLAVEEVITKCLIEWGIKEKVFTITLDNASNNQSACDLLRESGRSDMLFGGEHLHVRCCAHILNLLVQDGMAIAHGAIDKIRDLVRHIISSPSRIQAFNEIAERSGLPSKAGLILDVPNRWNSTHNMIMEAIEYKVVLKRYAEEQLEPSPDDEEWTNSEAIGEFLGAFEEATKAFSAHRSPTSHLFLHNVLCIHQALRNENWQINCVLEDLALAMDSKFDKYWEKGKYNMALVIATILDPSKKMDFLDFFYEKTCQQFIDIQINMSLAKQWFTKFFGEYAKIVQKDTTVSPIVATNTSTLGSPILGKRRLDKEFSQWSQTRGRRLAKSELDAYLEEEFVRTDERFEILSWWRTNTNKYPVLSAMARDLLAIPLSTVPSESAFSAGGRILADNRSSMTPETLECLVCCKDWLYEYPNIQVYPVVFGPS

SEQ ID NO: 6726 - protein, 128 aa, Zea mays
  VARIANT 99: note = Ancestral polymorphism is D, Derived polymorphism is N
  VARIANT 77: note = Ancestral polymorphism is E, Derived polymorphism is K
  VARIANT 75: note = Ancestral polymorphism is R, Derived polymorphism is P
  VARIANT 72: note = Ancestral polymorphism is L, Derived polymorphism is Q
  VARIANT 18: note = Ancestral polymorphism is A, Derived polymorphism is T
MMKCSGGTASRSDPLTSAMGNLCCCVQVDQLTVAIREQFGKFDSVLEPGCHCMPWFVGKRVAGHLTLRLQQQDVPCETKTKDNVFVNVVVSIQYCALADKASDAFYKLSNTRSHLHFNTERRPFSSSR

SEQ ID NO: 6727 - protein, 106 aa, Zea mays
  VARIANT 8: note = Ancestral polymorphism is E, Derived polymorphism is K
  VARIANT 14: note = Ancestral polymorphism is R, Derived polymorphism is H
  VARIANT 18: note = Ancestral polymorphism is A, Derived polymorphism is V
  VARIANT 26: note = Ancestral polymorphism is R, Derived polymorphism is H
  VARIANT 35: note = Ancestral polymorphism is T, Derived polymorphism is M
  VARIANT 37: note = Ancestral polymorphism is P, Derived polymorphism is S
  VARIANT 93: note = Ancestral polymorphism is D, Derived polymorphism is E
MPLPPSLELDMFHHAAAAGTGAAAVHFPFGSIPVTHSYYFFGQAAAAAEAGCHVLKLASAVTVAQSDSDYSSVVDRSPSPPAAVSARKPVVFDIDLNCSPPTEAGA

SEQ ID NO: 6728 - protein, 212 aa, Zea mays
  VARIANT 10: note = Ancestral polymorphism is E, Derived polymorphism is K
  VARIANT 14: note = Ancestral polymorphism is R, Derived polymorphism is H
  VARIANT 15: note = Ancestral polymorphism is R, Derived polymorphism is Q
  VARIANT 22..212: note = Derived polymorphism lacks residues 22 to 212
  VARIANT 23: note = Ancestral polymorphism is A, Derived polymorphism is D
  VARIANT 25: note = Ancestral polymorphism is E, Derived polymorphism is K
  VARIANT 39: note = Ancestral polymorphism is G, Derived polymorphism is D
MLQHSNSANELLLRRKLEEQQQAAELHHAIELQSRRLMGLQLLDLKARAAATTAAASTLPTPVANAFASSHPLSTMAVESPLESGEQLKLSSGFALEGKLNGGDKEESACEASPDAADSDQSGDHNLPDSPFASPTKSAALVHDSFAATEPENTASLVGSKIDGGSNHLRPLALEIPSPSSYFFPMRGCVGKASTLLFRGADYVREHSVIHE

SEQ ID NO: 6729 - protein, 149 aa, Zea mays
  VARIANT 100: note = Ancestral polymorphism is T, Derived polymorphism is A
MGSAVLFYCICIAAVVALSSSMVAVGSAAPGETPKFISASALECSANVTEIAKARKLIDVHGHGLCPVRFDHTRGISAVASSCKDRPLPSPERCCGALKAYACPYSELINDNANNGCASEMFYVIMTRGRLRPGLFSQLCVEGPLGLQC

SEQ ID NO: 6730 - protein, 541 aa, Zea mays
  VARIANT 391: note = Ancestral polymorphism is L, Derived polymorphism is Q
  VARIANT 82: note = Ancestral polymorphism is R, Derived polymorphism is G
  VARIANT 15: note = Ancestral polymorphism is P, Derived polymorphism is R
MANLLQQSMRELMVPRAWCLLLLPIFVLLLRYSVSSKRARKRQRQLDGDDDDDHLPLPPSPPPLPFFGHLHLIGSLPHVSLRNLATKHGSDLMLLRLGAMPVLVVSSPRAAEAVLRTHDHVFASRPRSLAAEVVLYGSSDIGFAPYGDHWRKARKLVTTHLLTVRRVRSFRHAREEEVSKVMAQIAEAAAAGAAVDVGELLGSFMNDLACRAVMGKSSGRTTKQLRQLVADTSPLLGGFNVEEFFPFLARFGVLSKVVRAKSEMLRKKWDELLDGLIDGHESTYKPTTAAAPASDLKDKDEDEDFIHILLSVRQEYGLTREAMKAILLDVFFGGIDTSASLLEYTMIELIQRPHVMKKLQAEVRSSSLPPHQHQQGQEILRETDLNNMSYLRAVIKESLRLRTVTPLLAPHLSMSRCAIDGLAVPAGVRVLINVWAIGRDPRFWEDAEEFVPERFLDGGSAADVGFRGTHFQLLPFSAGRRQCPGVNFAMAAVEVMLANLVHRFDWELPAGKAARDIDMSEEFGLVVHRKEKLLLVPKLHA

SEQ ID NO: 6731 - protein, 161 aa, Zea mays
  VARIANT 40: note = Ancestral polymorphism is V, Derived polymorphism is I
  VARIANT 25: note = Ancestral polymorphism is G, Derived polymorphism is D
MTMCDTSVGVAHDAFNTFFSKTGSGKHVPRAIFIDLEPSVIDETQPTIATVFVWRNSDKQMYSSEGRAPFDEEIILCTVEERILCSGPYYWVKCKPDKLIPVSQPNQGSVRGRKEKKRIKQRKDFIMDEKKKRRAQYSTAVKRKEAEQTERKMAAVARERA

SEQ ID NO: 6732 - protein, 508 aa, Zea mays
  VARIANT 317: note = Ancestral polymorphism is T, Derived polymorphism is S
  VARIANT 12: note = Ancestral polymorphism is A, Derived polymorphism is P
MVSTTHPTPALPRALLVRCQERERQRQPLLVDDDDPLPPSPPALPVLGHLHLVGSLPHLSLWNLARKHGTDLMFLRLGAMPVIVVSSPRAAEAVLRTHDHVFASRPHSLVAEIVLYGPSDVGFAPHGEYWRQARKLVTTHMLSVKKVQALRLAREEEVRVVMAQIGEAAAAGAAVDMSDLLGSFVNDLGCRAVMGKSFRSEGRNKLLRQLLSDTSPLLAGFNVEEFFPFLARFGVLSKMVRAKSERLKRRWDHLLDKLIQDHERDNSSDPKDKDANFIHVLLSVRHEYGLSRQQMKGILLDVFFAGIETSSSVLDFTMSELMRRPRLMKKLQAEVDSSVPEGQEAVSEADLALADMTYLRAVVKESLRLHPVAPLLPHFSMAPCSIDGYTVPAGVRVLINALAIGRDARYWEDAEEFLPDRFVGHGSAAHVGFKGNDFQFLPFGSGRRMCAGVNMGIASVELMLANLVRRFDWELPVGKKRGDIGMSEVFGLVVNRKDKLVLVPKLRV

SEQ ID NO: 6733 - protein, 150 aa, Zea mays
  VARIANT 12..150: note = Derived polymorphism lacks residues 12 to 150
  VARIANT 54: note = Ancestral polymorphism is S, Derived polymorphism is R
  VARIANT 57: note = Ancestral polymorphism is A, Derived polymorphism is D
  VARIANT 65..150: note = Derived polymorphism lacks residues 65 to 150
  VARIANT 66: note = Ancestral polymorphism is F, Derived polymorphism is I
  VARIANT 71: note = Ancestral polymorphism is C, Derived polymorphism is Y
  VARIANT 93: note = Ancestral polymorphism is R, Derived polymorphism is C
MVLHSRRRFHMQDLSNNQRSVDGFSLRFAYMNISHFYPNLKTIQATLVSAAKQSNGAFKFSCSFQFLFGFCRDRDSGYLTPLIQNDSTESLLRWQCQPVSHRNYRTTREIQIRRFQGSARYSRVASPSPRRLLQPQTTFHLISIYTDGGD

SEQ ID NO: 6734 - protein, 540 aa, Zea mays
  VARIANT 314..540: note = Derived polymorphism lacks residues 314 to 540
  VARIANT 186: note = Ancestral polymorphism is M, Derived polymorphism is T
  VARIANT 150: note = Ancestral polymorphism is H, Derived polymorphism is L
MENLAGQQFVYEVTSLRALFLLLLLSPFLFLIMRNARATTLMFDTKRTRGHRQPADRQQSLPPSPPAVPVLGHLHLVGSLPHVSLRSLARTLGADLMLLRLGSTPVLVVSSSSAAEAVLRTHDHVFASRPHALVSEVVLYGPSDVGFAPHGDCWRRGRKLITTHLLSVNRVQSFRHAREEEVSVVMGRIAEAAAAGAAVDVGELLGSFTNDLACRAVMGKSFRSEGRNKLFRELVLDTTKLLVGFNVEDFFPFLARFGVLSKLVRAKSERLRRRWDELLDRLIEDRESKYEAAAASDLKDDDDDNFIHVLLSVRQEYGHITREQMKALLQDVFIGGIDSTSSLLEFTMAELMRKPRVMNKLQAEVRSSTPEGHDGVVGEDSLEHMAYLRAVTKESLRIHNVTPLLAPHLSMDSCTIDGYTVPVGVQVLINSWAIGRDTRYWGDDAEEFVPERFMDGGSAVHVSFKGSDFEFLPFGSGRRMCAGVNFAMATVELMLANLVHRFDWDLPPGQEGRDIDVSQVFGLVVRRKKKLLLVPKLRVY

SEQ ID NO: 6735 - protein, 126 aa, Zea mays
  VARIANT 109: note = Ancestral polymorphism is T, Derived polymorphism is K
  VARIANT 90: note = Ancestral polymorphism is G, Derived polymorphism is V
  VARIANT 30: note = Ancestral polymorphism is G, Derived polymorphism is A
  VARIANT 29: note = Ancestral polymorphism is T, Derived polymorphism is M
  VARIANT 16: note = Ancestral polymorphism is R, Derived polymorphism is I
  VARIANT 9: note = Ancestral polymorphism is I, Derived polymorphism is F
  VARIANT 4..126: note = Derived polymorphism lacks residues 4 to 126
MRSSVILKFKRSMMVRHGEAVGIIGPSGTGKSTILKVMAGLLAPDKGDVIICGKKRHGIVSDEDIEGLRIDLVFQSAALFDSLTVRENVGFLLYKNSSLPEDRIGELVTETLAAVGLKASQASIFV

SEQ ID NO: 6736 - protein, 22 aa, Zea mays
  VARIANT 16: note = Ancestral polymorphism is P, Derived polymorphism is L
  VARIANT 1: note = Ancestral polymorphism is I, Derived polymorphism is M
MVKPTKFNIYNNSMCPGFARQD

SEQ ID NO: 6737 - protein, 786 aa, Zea mays
  VARIANT 415..786: note = Derived polymorphism lacks residues 415 to 786
  VARIANT 637: note = Ancestral polymorphism is D, Derived polymorphism is G
  VARIANT 647..786: note = Derived polymorphism lacks residues 647 to 786
MQPDQPVISLRPGGGGGPRAGRLFSPAFATSVSGDFLRPHGGGASGISKIGDSHFEPRERVRYTRDQLLELREIVDVSEEILRIKQEIDVELHGEDQSWVRNDSTVQGQAQAQTQAQNRYAETDSRDWRARSAQLTPTNEEKSWDNIREAKEAYASSGRQQEQANRQDQLSSQFASKAQVGPTPALIKAEVPWSARRGNLSEKERVLKTVKGILNKLTPEKFDLLKGQLMEAGITTADILKDVISLIFEKAVFEPTFCPMYAQLCSDLNEKLPTFPSEEPGGKEITFKRVILNNCQEAFEGASNLRAEISKLTGPDQGMERRDKERLVKLRTLGNIRLIGELLKQKMVPEKIVHHIVMELLGSGTDKKPCPEEEDVEAICHFFNTIGKQLDENTKSRRINDTYFIQMKELTMNPQLAPRLRFMVRDVIDLRSNNWVPRREEIKAKTISEIHSEAEKNLGLRPGAASVIRNGRSSPGGPLSPGGGFPMNRPGTGGMMPGMPGSRKMPGMPGLDNDNWEVPRSKSMPRGDSIRNQGLLLNKPSTVHKTSSINTRLLPQGSGAALIGKSALLGTGVSASRPLSFTPGPTPAQTTPKPIRAAPAVVPAPDKQASAPKGNTAELQKKTIALLEEYFGIRILDEAHQCIVELQSPDYYPEIVKEAVNLALDKGTNFVDPLVRLLEHLYTKKIFKTQDLESGCLLYGTLLDDIGIDLPKAPAQFGEIIARLTLLGALRFEALEVILKKMEDTYNRKAVSNAFMKTLEANPSGQAILGSPAAAAVIDACNSLLE

SEQ ID NO: 6738 - protein, 97 aa, Zea mays
  VARIANT 30: note = Ancestral polymorphism is A, Derived polymorphism is S
MAGRHTIILMQPSQNRSTRTFMDYDSVNHALDGMKIRNINPMVRNLTYDIGDLYNFIDGLTDISALVYDDSLHAFLPYDRQWIKQKLFQHLKRLAQQ

SEQ ID NO: 6739 - protein, 50 aa, Zea mays
  VARIANT 2: note = Ancestral polymorphism is M, Derived polymorphism is L
MLAPPRGQPTSAAARSTLLPPPRAPATATTTTTAAARRPRPTRRCAPLTS

SEQ ID NO: 6740 - protein, 400 aa, Zea mays
  VARIANT 40: note = Ancestral polymorphism is R, Derived polymorphism is C
MAVLSAADASPVSAIGFEGYEKRLEITFSEAPVFVDPHGRGLRALSRAQIDSVLDLARCTIVSELSNKDFDSYVLSESSLFIYPLKIVIKTCGTTKLLLTIPRILELAEELSMPLAAVKYSRGTFIFPGAQPAPHRSFSEEVAALNRYFGGLKSGGNAYVIGDPARPGQKWHVFYATEYPEQPMVNLEMCMTGLDKKKACVFFKTNADGNTTCAKEMTKLSGISEIIPEMEICDFDFEPCGYSMNAIHGSAFSTIHVTPEDGFSYASYEVMGLDATALSYGDLVKRVLRCFGPSEFSVAVTIFGGRGHAGTWGKALGAEVYDCNNMVEQELPGGGLLVYQSFCAAEDAVATSPKSVFHCFDGENVESAPPPMKKDYKLANLLCWEEEADAMEEKAGVLDE

SEQ ID NO: 6741 - protein, 404 aa, Zea mays
  VARIANT 40: note = Ancestral polymorphism is P, Derived polymorphism is R
MEADLERGLIVYEEPGPEPTDLLSSAWCSSAAIRVLHAGPKDECSMALVEHPVMALGSGRSDVLAKSGRSRSLVADSSGFSTAQWKYDDLKSWLWLQKAIHPELDYDLCLKKKWLPRKMAAWNGTSLKKWVKERKQRRKEEARLQRAEVHAAVSVAGVAAALAAVAAENAAAAPRRAPGTRETAVASAAALVAAQCAKAAEAAGASRGQVAAAVDAARASTDAGSVITLTAAAATSLRGAATLRGRRSCGHGQNERAEHAGPALSRDDLDFDLNHARSRAALAKGDEMLVAMPDGKWKLHTVSAASNKRGEIVLRIKKTSLVVMAPFSHAKESVVRDVRACGPEKPSHDEGATYAVEVSTDKGKVELRADDYGVYKRWVGTLSHMLVMSTAVSVSARHAPPRRD

SEQ ID NO: 6742 - protein, 544 aa, Zea mays
  VARIANT 21..544: note = Derived polymorphism lacks residues 21 to 544
  VARIANT 71: note = Ancestral polymorphism is D, Derived polymorphism is G
  VARIANT 87: note = Ancestral polymorphism is H, Derived polymorphism is Y
MGASSSTGNPSPEAHEQREQETLASAALSLPLLRAAFSRSAANALPDALAPPPASFRLPGSPAPPPPHFHGILGGLGPAIASQFFGHGAAAVTDGGAGWVQFLRGFNRCCARVTASRSLALLLRVYAAACAGAGAPCGVQLQPDEGGGDEDGKVVGELAPEEIAVFLWVCWVMAWSASASRVVSDGGDKSEPVTVLLPDVTHLVLSALVSAGVVTDDAGVWGWDVSSGGKGVKVQEFMSWVLSTPFGLGNCLSRYVRDKFRSLAADSVEESSVSTVSTTFDTSDVYLLTRGRAWAIALSLRNKLSEKLLSASVIGMDTEDLLYRSSVHGKGLSRFWSCVEGYKGPMLILLSAFSKGGGENVDSDRRWVIGVLTEEGFENKDTFYGSSGFLCAAHPIFRMLPPSGKEKNFMYCHLHPQIRAYEANPKPVGLAFGGTIGNERIFLDEDFSGVLVRHHAVDKTYQHGSLIPNQGYLPVEASVLDVEVWGLGGEATKRQQNMYKKREDIFSEQRRKVDLKTFASWEDSPEKMMMDMMSDPNTVRREDR

SEQ ID NO: 6743 - protein, 320 aa, Zea mays
  VARIANT 166: note = Ancestral polymorphism is A, Derived polymorphism is V
MAANVGAGRSAGGGGAGTGTGTAAGSGGVSTAVCRPSGSRWTPTPEQIRILKELYYGCGIRSPNSEQIQRITAMLRQHGKIEGKNVFYWFQNHKARERQKRRLTNLDVNVPVAADDSAHRLGVLSLSPSSGCSGAAPPSPTLGFYAGGNGSAVMLDTSSDWGSAAAMATEACFMQDYMGVMGGASPWACSSSSSEDPMAALALAPKVTRAPETLPLFPTGGGGDDRQPPRPRQSVPAGEAIRGGSSSSSYLPFWGAAPTPTGSATSVAIQQQHQLMQMQEQYSFYSNAQLLPGTGSQDAAATSLELSLSSWCSPYPAGTM

SEQ ID NO: 6744 - protein, 109 aa, Zea mays
  VARIANT 69: note = Ancestral polymorphism is D, Derived polymorphism is G
MDPSSGKPEEVAAYQSKEAKQARLQSMLAALLDDPILADVTRKPSLADVDTLINLELGSAMRLTVVKLDNTSFDVAVLNSATVKDLKLAIRKKINEIEQEKMGHRHISW

SEQ ID NO: 6745 - protein, 241 aa, Zea mays
  VARIANT 202: note = Ancestral polymorphism is R, Derived polymorphism is W
  VARIANT 193..241: note = Derived polymorphism lacks residues 193 to 241
  VARIANT 181: note = Ancestral polymorphism is P, Derived polymorphism is L
  VARIANT 168..241: note = Derived polymorphism lacks residues 168 to 241
  VARIANT 167..241: note = Derived polymorphism lacks residues 167 to 241
  VARIANT 165..241: note = Derived polymorphism lacks residues 165 to 241
MGRGKVELKKIENPTNRQVTFSKRRMGLFKKANELAILCDAQIGVIIFSGSGRMYEYSSPPWRIASVFDRYLKAPSTRFEEMDIQQKIVQEMTRMKDERNRLRMIMAQYMAEDLASFSAQDLSNLEQQIEFSLYKVRLRKEMHMPAEQSGYLCLMNPAAAIASGQHQQAGEMVGINPRPFPWWDVGASGSGSQSQQLLLHGRDAAESSMTALGLSPQMHGYRLQPRQPNLQQDADIHRWLW

SEQ ID NO: 6746 - protein, 917 aa, Zea mays
  VARIANT 41..917: note = Derived polymorphism lacks residues 41 to 917
MARSKNGCLKILVCAGSGSDPSAGSDADDHPDEENNAISDKSRWSFRRRSTRHRVLKNSDISEPETLSSSKAKADITPSNNVYTSTYSYASEKPLQQDKPDEKTLHQEKPEEKPLYQGNSDEKLMEKPSEKPTDKLMEEPADQIIEKSIELPTQRITETPTDEPAEKINVAPTEEPAGKITETASENTAEGSIKNATEETPERAVEELIEEADESISVSSTVLKEEENTSLVEGSSGDPEEDHLESAATNLQPRSDTCIAREELLNQKDLVKLQAVIRGHLVRKQASESLQCLLAIIKIQGLIRAHQAQHSPGKIQETIVHSSGEKLLRNGFALKLMDNTPTSKSIRIKCDPSESDVTWGWMERWTALIPPITVVHLPEHKENSELMGETVTEQVTEHAQCDEDIVPLDSDLSFPKLVADDVKETVETSDFSALEAPASVPDESPKMEMKHDPESELIETTNADADHVTDQKAENDVDEPFMSLDQQYAQADDASRNPCPLPGKFEPSNEDSGDAYNSEQTLEMEGKRFVARKPCNPAFAAAQLKFEELSTNSTVSRSSSPPHLDGVSKPRMHTPSSQEDYTPKQDGTGIQESSAGHDTKMRIAASECGTEISISSTLDSPDRSEGDGGEIVLEIGALENRNYVTGKADKDSSIVHPGVKDAPEAEAQPQKEVEENGHVPALETEAQPQKEPHTEPEVADLHGQLEKSVTSYATPEGTPMSRTTTIPESHGTPSSEVSVNTKRSRSNKPKSHASKRSLASPGSDSVGRSSTDKFSKESRHAKRESSSSKAAKSDQGDQEPRVSNSNSNPLPSYMQFTESARAKASSPKMSPDVQDSNAARKRHSLPMTNGKHDSSPRMQRSSSSQAPQGVKSSGPSPHSASGGKCLISLVTPLLCVHLVKDIEPSYAQAQTRGGISD

SEQ ID NO: 6747 - protein, 193 aa, Zea mays
  VARIANT 125: note = Ancestral polymorphism is R, Derived polymorphism is L
MGGLSVIAPPARDSASPQHRRARRAFLVSNYLILGCASGCGFLTLSLRLAPSVDGFLLILLHALTVAAAVAGCAVIAAPDPPRGRCYTVHMSATVVVSILQGAAAVLAFSRTSEFLSDGLKSYVREEDGAVILRMVGGLGVGIFCLEWVALALAFVLRYYVYVDRECGGNPMRRSAKVGGEDGAGTWPWPFQV

SEQ ID NO: 6748 - protein, 260 aa, Zea mays
  VARIANT 203: note = Ancestral polymorphism is R, Derived polymorphism is S
  VARIANT 100: note = Ancestral polymorphism is P, Derived polymorphism is L
  VARIANT 94: note = Ancestral polymorphism is R, Derived polymorphism is W
  VARIANT 32: note = Ancestral polymorphism is Q, Derived polymorphism is H
MQKMAKNTQQPRKDGGARSGGMSSSKKSRWYQRAVEVLLLLVWKQPAAGGAKASPTKAAAASGVTAAGKGTALATGPGKLRRSSSLNVAASFTRVCLCAPISSYNSESLYCFQADAAAPRPSYSYPRASSASASASGCASPLAAAELQAAAGRGRPAAGKGGGGGEGARRVFRGKSLTDDVLMRRFVVDEEAARRRDEMEVVRRRQAAVSRRRRLGPSPLSRMALADAESKAEEEPEAPAAAAPAAAARGTDDRVAAAGA

SEQ ID NO: 6749 - protein, 940 aa, Zea mays
  VARIANT 142..940: note = Derived polymorphism lacks residues 142 to 940
MDVPTPPNRAGCNSNISNIGSPMQSFDDPFGGAAMTSFDGYSELSSPSVADHIFSLLNDPSSVQHMFALWSSSGSSPRASAVREDMSFDTYPGPMDVTASLAQRINSASVFNPTEVDRGLKDSDGLVPNNGSQQGSSIIPRSVGNILADRMLMALSLFRKSLSDGVLAQVWMPVEHNGRVVLSTSEQPYLLDQDLAGYREVSRNFLFSVKEEPGLHLGLPGRVFISGVPEWTSSVTYYSKPEYLRMEHALLHEIRGSLAMPVYDPSKGSCCAVLELVTNKEKPDFDAEMDIVCDALQARCELADNNRSQQSEGIVLTLGIVYSENQKYASTEILDVLRAICHAHMLPLALTWIPTSNGTANGFCVAKNIRLDSQPGKSVLRIHESACYVNDAKMQGFLHACAERHLEKGQGIAGRALKSNLPFFSPDIREYSIEDYPLAHHARKFGLHAAVAIRLRSTYTGKDDYILEFFLPVNCKGCGEQQMLLNSLSSTMQRICKSLRTVSEAETDSVSATEPMYEKTNGSCLPTGNSESSSHDDQPITESAFHDLSSGDKQGDREPAKARSSSKRVAEKKRSTSEKNFSLDVLRKYFSGSLRDAAMSLGVCPTTLKRICRQHGISRWPSRKINKVNRSLKKIEKVIKSVHGVDRSLQYDPATGSLVPATSLPDKMPTSSAGVKTVEEKSSPEPGQDFSSPDGWQRESSQLHASSIPTRVGDEVQMLAINNEGSRNYASGIANIAQHSNSEDAHGPLYPVGAVNSSRTGETGYIDSPTSLHMDSVEGQTTVRDSRSVQQADVTMATKEQTLPSTSGTTDSSSGSASSQPAFKGNPGRALKVSSSDALTVKATCNGDTVRFKFLPAMGWYHLLEEVAKRFKLATGAFQLKYKDDEDEWVILANDADLQECVDVLDSIGSRSVKLQVRDLPCLVSSSGSSSCCLQVEGSA

SEQ ID NO: 6750 - protein, 246 aa, Zea mays
  VARIANT 212..246: note = Derived polymorphism lacks residues 212 to 246
MSCTTPKTTLTRISSPAAATVPRPNLCSCHHEYGSFLPTEFPVRTVAWATVLGQIVFGIVGFPSLGAVGCGRCSRRLRSCTPPPRPQGTTATSMRHLRLLHRSSTMLSQTWRGRLGGEGARTHATEGNLSCSSCGEPPEAHMYSYTHCNGNLTLGSKVAMFQYSSVEIYNACKPQPTLEFHNTDMHEWYGQDIRNVLATGVTLFSEVTSALQKLKDQFPVKDLSQLEEMLIIEKAEFMDSLAKAVD

SEQ ID NO: 6751 - protein, 415 aa, Zea mays
  VARIANT 96: note = Ancestral polymorphism is G, Derived polymorphism is S
MAASSGTRSVRLLVLLLCLLGFCVALSHQESAADSCARAKVAVASLVPFDSTSFRCTAAWKQQDFVLRYKNTGPSEWSFILSAPDRGSYVAVGFSGKGAMVGSSAVVGWAANGRGTVKQYYLGGKSPEECAPNRGLLKLVRNRTAVASRSGRLYLAFQLSTDYPQPYLIYAVGPDGSLPQSDSLRLPAHQNMASRSFNYTSGTSPAPGPRINPRGFYIFFSPPPVCVCVESTNACVCAGLSYNVAGSGDAAFPPERKHGLLGMMGWGVLMPIGMITARYFRQLDPCWFYTHMAIQVAGYAVGIAGIVLGFRLSEDGLRNVDVHKALGIAILAMASLQVMAILARPDKTSKVRRFWNWYHHNIGRAAILLAIGNIFLGLSIAQETSAYIVSYGVFVAVWVLAVAAFEMKRCYADDD

SEQ ID NO: 6752 - protein, 160 aa, Zea mays
  VARIANT 112: note = Ancestral polymorphism is G, Derived polymorphism is E
  VARIANT 105: note = Ancestral polymorphism is F, Derived polymorphism is S
  VARIANT 97: note = Ancestral polymorphism is F, Derived polymorphism is S
  VARIANT 93: note = Ancestral polymorphism is S, Derived polymorphism is L
  VARIANT 76..160: note = Derived polymorphism lacks residues 76 to 160
  VARIANT 50: note = Ancestral polymorphism is A, Derived polymorphism is V
  VARIANT 49: note = Ancestral polymorphism is A, Derived polymorphism is V
  VARIANT 45..160: note = Derived polymorphism lacks residues 45 to 160
  VARIANT 35..160: note = Derived polymorphism lacks residues 35 to 160
  VARIANT 20: note = Ancestral polymorphism is A, Derived polymorphism is T
  VARIANT 17: note = Ancestral polymorphism is P, Derived polymorphism is L
MGISPSKRVDAALRRAPLFAAACDAAFDRCLADAQRRFPGVRRYQLADAAAHLHSELSASVPLVRRWVPSPPPRVRVDAALRAAGLEDEAELSRLQFREFAVELFREAVLAGAADLLRAPAAAAGIVGIGMVARAAPPVVGRIVAVCAASVATAVYLSLG

SEQ ID NO: 6753 - protein, 380 aa, Zea mays
  VARIANT 300: note = Ancestral polymorphism is S, Derived polymorphism is L
MQLIRREPQTSMAGGTRSRCPVLLLLLLGVTTARLASGVVTDGLLPNGNFELGPAKSDLNGTRVMNQNSVPNWEIFGFVEYIGSGQKQDDMILAVPEGACAVRLGNDATIRQKLEVIRKTTYSITFCAARTCAQAERLNVSVAAESGVLPIQTVYTSSGWDSYAYAFRARHSTAWFSIHNPGHEDNPACGPLIDFIAIKALNPPPLAQGNMLRNGDFEEGPFIFPDTAWGVLVPPMSEDDVSPLPGWMVMSDTKVVKYVDAAHHAVPRGARAVELVAGREAALVQDVRTVPGRRYRLSLSVGDAANGCEGPMAVEAYAARATLRTTYESLGKGGSRRAAVEFEATANLTRVVLQSYNHHMKPDGTLCGPVVDDVSLVGLR

SEQ ID NO: 6754 - protein, 359 aa, Zea mays
  VARIANT 19: note = Ancestral polymorphism is R, Derived polymorphism is L
MEPMRREPQTSMAGGTRSRCPVLLLLLLGVTARLASGVVSDGFVEYIGSGQKQDDMILPVPEGACAVRLGNDATIRQNLNLIRETTYSITFCAARTCAQAERLKVSVAAESGVLPIQTVYTSNGWDSYSYAFRARHSTAWFSIHNPGHEDDPACGPLIDSVAIKALNPPHLTKESHTAGLSQRSEHADNMLRNGDFEEGPVIFPDTAWGVLVPPMSEDDVSPLPGWMVMSDTKVVKYVDAAHHAVPRGARAVELVAGREAALVQEVRTVPGRHYRLSLAVGDAANGCEGPMAVEAYAARATLRTTYESRGNGGSKRAVVDFTAIANLTRVVLQSYNHHMKPDGTLCGPVVDDVSLVGLR

SEQ ID NO: 6755 - protein, 692 aa, Zea mays
  VARIANT 68: note = Ancestral polymorphism is E, Derived polymorphism is Q
MKKTNCLPNYCLLLAAFPEFFVSSQKQTACWQLPNGNFEDAPARSQLNGTQVLGLYAIPRWEVSGFVEYIGSGQRQGDIIHSSSRCRREPTPCGWGTRPPSGSGWPCRGARATPSPSAPRAPAPRPLNVTVAPDSDVLPIQTVYASSGWDSYSWAFEARHGAVTLIVHNPGVSEDPACGPLLDSFAIKALRPPPVPTKNNMLQNGDFEEGPYMFPGVPWGGAGAVPPVDEDDYSPLPPWMVLSATKSVKYLDAAHHAVPRGAHAVELLSGTEAALAQDVATVAGRPYRLEFSAGDGCVGSLSVRAYAARGSVTVPHASRGKGGHRRGVLDFTAVAKPDAGGVRLLPNGNFEQGPDKYQMNGTWVIGRKSIPCWEISGFVEYIVSGQQQDNGMVVAVPEGARAVRLGNDASIRQRLTGMTRGTSYSVTFSASRTCAQAEQLNVSVAPESGVLPIQTVYTSSGWDSYSYAFRARHSAAWLVIHNPGVEEDPACGPVIDSVAIKALHPPSRTAKDNMLKNGDFEEGPYVFPDTPWGVLVPPMDEDDVSPLPGWTVMSDTKAVKYLDAAHFAVPRGSRAVELVAGTEAALVQEVRTTPGRSYTLSFSAGDAADGCAGALRVDAYAARGRLPVSYESRGTGGFVRNELEFAAVANLTRVVFQSMGHYMKPDGTLCGPVVDDVSLVAVHKHAARRLFM

SEQ ID NO: 6756 - protein, 397 aa, Zea mays
  VARIANT 7: note = Ancestral polymorphism is S, Derived polymorphism is I
MAIDERSVHGGAALVLRLLVCVVAARAVSAVADGPLLNGNFEDPPNQSQMSGSVVTGEHAVSYWKTSGHIEFICSGQKQGDMVLTVPDGSHALRLGSGASIQQQISLTKGLYYSLTFSASRTCSQNEMLNVTAAPVSGSPAQTGELPTQTVYTSSGWDSYSWAFRAEAGLMSITVTHNCGEEEDPACGPIVDAFAIKTLSQPEASQNNMLRNGDFEEGPYIPPDSQWGVLVPPVDEDDVSPLPGWNIMAYKKSVKYIDSAHFAVPRGARAVELVSGVETALLQEVYTTVEGSWYRLEFSAGDADGCASSYDDGSSSGMKVKAYAGTAETTVDVDFRDAGGSKRGKIEFRATASPTRVVFVSLGYHTKSDNSGTLCGPVVDDVSLVPIPQPYARRLLL

SEQ ID NO: 6757 - protein, 280 aa, Zea mays
  VARIANT 22: note = Ancestral polymorphism is P, Derived polymorphism is L
  VARIANT 31..280: note = Derived polymorphism lacks residues 31 to 280
MANAPRILALGLLALLCAAAGPAAAQNCGCQPNFCCSKFGYCGTTDAYCGDGCQSGPCRSGGGGGGGGGGGGGGSGGANVANVVTDAFFNGIKNQAGSGCEGKNFYTRSAFLSAVNAYPGFAHGGTEVEGKREIAAFFAHVTHETGHFCYISEINKSNAYCDASNRQWPCAAGQKYYGRGPLQISWNYNYGPAGRDIGFNGLADPNRVAQDAVIAFKTALWFWMNNVHRVMPQGFGATIRAINGALECNGNNPAQMNARVGYYKQYCQQLRVDPGPNLTC

SEQ ID NO: 6758 - protein, 238 aa, Zea mays
  VARIANT 169: note = Ancestral polymorphism is S, Derived polymorphism is C
  VARIANT 164: note = Ancestral polymorphism is T, Derived polymorphism is I
  VARIANT 161: note = Ancestral polymorphism is P, Derived polymorphism is S
  VARIANT 148..238: note = Derived polymorphism lacks residues 148 to 238
  VARIANT 145: note = Ancestral polymorphism is R, Derived polymorphism is H
  VARIANT 139: note = Ancestral polymorphism is A, Derived polymorphism is V
  VARIANT 103: note = Ancestral polymorphism is A, Derived polymorphism is D
  VARIANT 69..238: note = Derived polymorphism lacks residues 69 to 238
  VARIANT 60: note = Ancestral polymorphism is R, Derived polymorphism is M
  VARIANT 34: note = Ancestral polymorphism is L, Derived polymorphism is F
  VARIANT 26: note = Ancestral polymorphism is P, Derived polymorphism is L
  VARIANT 25: note = Ancestral polymorphism is G, Derived polymorphism is S
  VARIANT 23: note = Ancestral polymorphism is G, Derived polymorphism is S
  VARIANT 22..238: note = Derived polymorphism lacks residues 22 to 238
  VARIANT 21: note = Ancestral polymorphism is S, Derived polymorphism is N
  VARIANT 13: note = Ancestral polymorphism is A, Derived polymorphism is T
MANSFSFPLMKPTEIVEALHSYSIGPSSSLTEVLTLFLASIVGEGAILPQYLNISEDEYRKTIKVNVIRPWFLMKFLQVILMASPPQPKQLVLATSSTDPDLAALDLRTGVEDYVIHGSRPGCLGPLHLVWRTFASALALPALGRSPQLPTASLPSLKLFPLAITLGPSTSTTGTRGFMCQGGDFTRGNDTGGESIYGARFTDENLKLRHTGLDVLSMANAGPDTNDSQFFICTAQTP

SEQ ID NO: 6759 - protein, 439 aa, Zea mays
  VARIANT 30..439: note = Derived polymorphism lacks residues 30 to 439
  VARIANT 48: note = Ancestral polymorphism is C, Derived polymorphism is Y
  VARIANT 51: note = Ancestral polymorphism is C, Derived polymorphism is Y
  VARIANT 145..439: note = Derived polymorphism lacks residues 145 to 439
  VARIANT 167..439: note = Derived polymorphism lacks residues 167 to 439
  VARIANT 178: note = Ancestral polymorphism is D, Derived polymorphism is N
  VARIANT 180..439: note = Derived polymorphism lacks residues 180 to 439
  VARIANT 223..439: note = Derived polymorphism lacks residues 223 to 439
MDLRISEGSGTNTTLDDQSVQSPTRRAKVWEYFQQELVEVDGVMKAVCKYCGTKLTSKRNSGTNSLRNHVADTCSKIPVEDRKRFIATMRKRPGEGSFVFDPRKNRECMVKWCISVKVTFNKFDDPFFASWMESLQPSFSGVGRQTMRNDCIVRFKMMRQELRNELQSLNSRICLTSDLWTSNQKLGYLCLTAHYIDANFILKKKTIAFKDVKYPHTGLAIEEVITKCLIEWGIKEKVFTITLDNASNNQSACDLLRESGRSDMLFGGEHLHVRCCAHILNLLVQDGMAIAHGAIDKIRDLVRHIISSPSRIQAFNEIAERSGLSSKAGLILDVPNRWNSTHNMIMEAIEYKVVLKRYTEEQLEPSPDDEEWTNSEAIGEFLGAFEEATKAFSAHRSPTSHLFLHNVLCIHQALRNENWQINCVLEDLALAMDSKFDKY

SEQ ID NO: 6760 - protein, 147 aa, Zea mays
  VARIANT 10: note = Ancestral polymorphism is A, Derived polymorphism is G
  VARIANT 56: note = Ancestral polymorphism is S, Derived polymorphism is N
MRIQCDACEAAAAAVVCCADEAALCARCDVEIHAANKLASKHQRLPLGDAAALPASLPRCDVCQERPAFIFCKDSSLGLKELEWFEDIDLFHAHSPAKTAMAEFFASPQPVSNAGFYKANGARLFKKSRMEVPDDDDEDYFIVPDLG

SEQ ID NO: 6761 - protein, 485 aa, Zea mays
  VARIANT 118: note = Ancestral polymorphism is K, Derived polymorphism is T
MASRLFVLRRHTRWWQRQAPRPRSLCPPSHGGDSASSHGTLELLARLRSSPSYTFHKVFNRDARFFRLLQSCSIQACHCIHTSPSVNSGNQATAEPQQQNPGVPVPVDGSSELKPKRTKLKGRRAVTNFLKSLRWKKKKEFQRMTAEEKILYKLKLARKKEERLVVALKKIEPEDPSEPTHDPEVLTPEEHFYFLKMGQKCKNYVPVGRRGIYQGVILNMHLHWKKHQTLQVIVKTFTPEEVKEIAIELATLSGGIVLDIQDGNTIIMYRGKNYAQPPPEIMSPKVSLSRKKALDKSKYMEKLRALRRYIPRLEQELEDLHAQMKLAGEHQGQNAGKHVASISHNTNSMPVRKEPCGSIRNKTVSDLLSETVEGSKRLEDESSAIEDDSASESLSFTESEDLSDIFETESEEQEEDNKDRPLYLDRLDKFPSGKNDNEPDDFEEHLRRIASLSDKTDSPSKELKVSELDEIDKIFLRASSLLKKR

SEQ ID NO: 6762 - protein, 222 aa, Zea mays
  VARIANT 132: note = Ancestral polymorphism is A, Derived polymorphism is G
  VARIANT 127: note = Ancestral polymorphism is G, Derived polymorphism is R
MLSSSHLVKLPLLPRGLLSYLPASILPSGRESTADAAPSTPPSSKKMSSSAQQQQQQQAGSSKAESAELARVFELFDKDGDGRITREELAESLRKLGMGVPGDDELASMMARVDANGDGCVDAEEFGELYRGIMDGAAEEEEEEDDDDDDMREAFRVFDANGDGYITADELGAVLSSLGLRQGRTAEECRRMIGRVDRDGDGRVDFREFRQMMRAGGLAALG

SEQ ID NO: 6763 - protein, 156 aa, Zea mays
  VARIANT 79: note = Ancestral polymorphism is P, Derived polymorphism is L
  VARIANT 68: note = Ancestral polymorphism is E, Derived polymorphism is K
  VARIANT 55: note = Ancestral polymorphism is M, Derived polymorphism is I
  VARIANT 54..156: note = Derived polymorphism lacks residues 54 to 156
  VARIANT 41: note = Ancestral polymorphism is E, Derived polymorphism is K
  VARIANT 39: note = Ancestral polymorphism is P, Derived polymorphism is T
  VARIANT 34: note = Ancestral polymorphism is S, Derived polymorphism is I
  VARIANT 27: note = Ancestral polymorphism is A, Derived polymorphism is P
  VARIANT 24: note = Ancestral polymorphism is A, Derived polymorphism is V
MCSHQGPVVEKSTVVVSVPVVVMVETAEIDYNSSFSVFTMEAYDLLDGDACNAQIYSVASAVSRRVEKVERDYLSYDEPRTVFTMEAYDLLDGDACNAQIYSVASAVSRRVEKVERDYLSYDEPRTVFSGEVCNDLGGEFCDVSYHADVFRELAQT

SEQ ID NO: 6764 - protein, 425 aa, Zea mays
  VARIANT 90: note = Ancestral polymorphism is L, Derived polymorphism is P
MKAPSLLVQCFPGLLPSKATSCVPIVSEKDLQLPSPAVEIIPSKSVHPYKYAGEKVDVQGLNIFKGKVSVADMIVISPSEVASSKYDGTLKYWESSITLVDILKNEIRDGQLSFRGKRVLELGCGYGLSGIFACLKGASTVHFQDINAETIRCRTIPNVLANLEQAQDRQNRPSESPVTPSRQLLAPNVHFYAGEWDELPTILSVVQPPAAPTNLSFSEDDFMDGCSSHDGSSVVGHDYCPRRSRKLSGSRAWERASETDQADSGYDVILISDVPYAANSLKKLYALISKCLRPPYGVLYVASKKNLVGSNGGARQLRALMEEEGVLGGHFLTEVAIPVVPTVRVVITFTKFVPLIEPEEFFTPMSSPSLLASSGSGSIMAKPNTQKSSYLKWVSKNSRPEAVNLSQVADNGDPFLSIQYILSIT

SEQ ID NO: 6765 - protein, 202 aa, Zea mays
  VARIANT 173: note = Ancestral polymorphism is F, Derived polymorphism is L
  VARIANT 162: note = Ancestral polymorphism is D, Derived polymorphism is G
  VARIANT 154: note = Ancestral polymorphism is K, Derived polymorphism is N
  VARIANT 107: note = Ancestral polymorphism is M, Derived polymorphism is V
  VARIANT 96: note = Ancestral polymorphism is S, Derived polymorphism is R
  VARIANT 83..202: note = Derived polymorphism lacks residues 83 to 202
  VARIANT 80: note = Ancestral polymorphism is S, Derived polymorphism is P
  VARIANT 71: note = Ancestral polymorphism is F, Derived polymorphism is L
  VARIANT 70: note = Ancestral polymorphism is C, Derived polymorphism is F
  VARIANT 69: note = Ancestral polymorphism is F, Derived polymorphism is L
  VARIANT 68..202: note = Ancestral polymorphism lacks residues 68 to 202
  VARIANT 61: note = Ancestral polymorphism is T, Derived polymorphism is A
  VARIANT 48..202: note = Derived polymorphism lacks residues 48 to 202
  VARIANT 44: note = Ancestral polymorphism is E, Derived polymorphism is D
  VARIANT 43: note = Ancestral polymorphism is V, Derived polymorphism is I
  VARIANT 42: note = Ancestral polymorphism is D, Derived polymorphism is Y
  VARIANT 40: note = Ancestral polymorphism is R, Derived polymorphism is K
  VARIANT 34: note = Ancestral polymorphism is F, Derived polymorphism is L
  VARIANT 23: note = Ancestral polymorphism is A, Derived polymorphism is S
MQIALGRPPADEAETGLHKLSKARAFLQGNSGLFFTNLPRDDVERMFREFEEHDFARTGCTAADTVFWFCFFIYIPGLVSSNRLTRKLTMKLICGSSLVPFLVSCIMCFAKFTEPFKKTFTIPQVELKEGPLEQFTHEMEPFLRKQGLPVRLNKGVVELVADHRLLGIQMATFHLYLVCRWSSDEFEAYKEGLMHLGADDSS

SEQ ID NO: 6766 - protein, 366 aa, Zea mays
  VARIANT 59: note = Ancestral polymorphism is A, Derived polymorphism is G
  VARIANT 185: note = Ancestral polymorphism is G, Derived polymorphism is D
  VARIANT 209: note = Ancestral polymorphism is R, Derived polymorphism is S
  VARIANT 329: note = Ancestral polymorphism is R, Derived polymorphism is L
MAPVSISAVPFLPTAAEGETKLRASFVREEDERPKVPHDRFSDEVPVVSLEGIDGARRAEIRARVAAACEDWGIFQVVDHGVDAALVADMARLARDFFALPPEDKLRFDMSGGKKGGFIVSSHLQGEAVQDWREIVTYFSYPVKARDYSRWPDKPAAWRAVVERYSEQLMALACRLLGVLSEAMGLDTEALARACVDMDQKVVVNFYPRCPQPDLTLGLKRHTDPGTITLLLQDLVGGLQATRDGGRTWITVQPVEGAFVVNLGDHGHLLSNGRFKNADHQAVVNSECSRLSIATFQNPAPDATVYPLAVRDGEAPILDHPITFAEMYRRKMARDIELARLKKQVKADKSANKEFADSKPLDAILA

SEQ ID NO: 6767 - protein, 236 aa, Zea mays
  VARIANT 18: note = Ancestral polymorphism is R, Derived polymorphism is S
  VARIANT 173: note = Ancestral polymorphism is A, Derived polymorphism is T
MPSDAAIYMATPRLAQFRTKANAIFPPKSNREQTTRPSVPAPRSSSSSRTTSASPFPCLYYPSRRTTPPSMCKVAITIPSLVWLCRAVRRWRWRSRGRAADASRSTTTSFSFSSPRPCTSVPAGHVAVCVEAAAAAAGSGSTRRFVVRVAHLSHPSFRELLRQAEEEYGFPAAPGPIALPCDEDHFRDVLHRVSTSAAASSSSSSCCGLATRRCARGESGPLLQGRIMAVDQKLGW

SEQ ID NO: 6768 - protein, 320 aa, Zea mays
  VARIANT 59..320: note = Derived polymorphism lacks residues 59 to 320
MATPTIAPMVMMMAILLMVAASTAHDGHHAPGPHHHAAAPGPHHHHDHYSPAPAPGPHGHHRHHPQPRHHAPAPAPIHHGQPTGAPSPDNHGGHNSPAPVPVHADHPGNAPVPAPASAPSPYISGVHAAPAPAPASQVSCAPSPYQHDGHKAPAPTPTPVQGYQPASAPSPYHHGEHSSPAPSPVHDNRPASAPTPDNHGGNNAPAPAPVHAEHPTLAPSPLLQGQDAPTPSPVTVAPEQHRDHIPPQGKPPADAPAHVGEEAPQPSSFAQPPASDSRYYYTSPAPAPAPGSSAAPVAVAGRRSSALLAGVFLCAFVLIV

SEQ ID NO: 6769 - protein, 143 aa, Zea mays
  VARIANT 5: note = Ancestral polymorphism is V, Derived polymorphism is A
  VARIANT 18: note = Ancestral polymorphism is L, Derived polymorphism is M
  VARIANT 20: note = Ancestral polymorphism is R, Derived polymorphism is Q
  VARIANT 23: note = Ancestral polymorphism is S, Derived polymorphism is F
  VARIANT 46: note = Ancestral polymorphism is V, Derived polymorphism is M
  VARIANT 73: note = Ancestral polymorphism is R, Derived polymorphism is Q
  VARIANT 74: note = Ancestral polymorphism is Q, Derived polymorphism is K
  VARIANT 86: note = Ancestral polymorphism is G, Derived polymorphism is D
  VARIANT 100: note = Ancestral polymorphism is V, Derived polymorphism is A
  VARIANT 113: note = Ancestral polymorphism is R, Derived polymorphism is H
  VARIANT 134: note = Ancestral polymorphism is G, Derived polymorphism is D
MCRVALTIPSLVWLRRALRRWRSRAAEAASSSSDAAVPAGHVAVSVQGTAAAPRRFVVRLAHLSHPAFLELLRQAEEEYGFPAAPGPVALPCDEDRFLDVLRRVTSSASFSSHSCGPVVADRRARGDARPLLRGMAVERNLVW

SEQ ID NO: 6770 - protein, 392 aa, Zea mays
  VARIANT 358: note = Ancestral polymorphism is V, Derived polymorphism is M
  VARIANT 351: note = Ancestral polymorphism is A, Derived polymorphism is T
  VARIANT 185: note = Ancestral polymorphism is S, Derived polymorphism is L
MEEDPQPQVEVPCYFLCPISLAIMRDPVTLPTGITYDRDGIERWLLTATTCPLTKQPVPADCDPTPNHTLRRLIQSWCALHDADSADRVHTPKPRVDRTAVTALVSRVHSAATGSAPPQRPQLLAALRELRDVAAESDRNRKLVAAVPGAVDVLAAVFAASANKSSEGTGTADAVRDDALEVIALLPVPEQCLRRLEETNEALVSALVSALQWSSAPSRARAALLLERVTAALPPSRLASLPEQVFREAVELLRDRPVSRPATKAALQVLVRTAAWGRNRVKAVDAGAVPVLVDMLFDDGAERRACELVLAALDRLCGCADGRAELVAHAAGVAAVGRKALRVSEVATDKAVRVLRSVARHAGTSAVVQEMAQAGVAAMLCVVAQSEQFVAL

SEQ ID NO: 6771 - protein, 142 aa, Zea mays
  VARIANT 60: note = Ancestral polymorphism is R, Derived polymorphism is Q
  VARIANT 93: note = Ancestral polymorphism is V, Derived polymorphism is I
MAKCSSKIRYIVWLRQTLRRWRSRAAARAAVPAGHVAVCVGGAARRFVVRAAHLNHPVFRELLRQAEEEYGFPSGACAGPIALPCDEGLFEHVLRHLSSPSKSARFVTLEDLESGALSCCCVAAAGDSLPLLRGISADKAVW

SEQ ID NO: 6772 - protein, 55 aa, Zea mays
  VARIANT 4: note = Ancestral polymorphism is R, Derived polymorphism is C
MAERLKEAVPYIEQGHVRVGPEVVTGAAFPVTRNMEDTITWVDSSKIEEKVMGVQ

SEQ ID NO: 6773 - protein, 498 aa, Zea mays
  VARIANT 114: note = Ancestral polymorphism is G, Derived polymorphism is R
  VARIANT 67: note = Ancestral polymorphism is D, Derived polymorphism is Y
  VARIANT 7: note = Ancestral polymorphism is W, Derived polymorphism is R
MAVVDRWAGLGSALASFLFLWSMVQRHVPVTISHRVATWANKLVSYFNPYVEITISEYGAERFRRSDFFLAAEAYLSDACAPRARKLKAELGRDSSNLQVSVGDNDEVTDAFQGATVWWYVVKKVPRSNVISLYANQDDPRTYRVVFHRRHRDLVVGKYLPHVLKEGRAVTVRNRQRRLFTNNPSGGGRGRGDVWSHVPFEHPSTFDTLAMDPDDKEAVVDDLEAFREAKDYYTKVGKAWKRGYLLYGPPGTGKSTMIAAMANLLDYDVYDLELTAVNNNTDLRKLFIETTGKSIIVVEDIDCSVDLTGKRKDKKQADKKSEREADDKPKLPMEPEKDEGSKITLSGMLNFIDGLWSACGGERIIIFTTNHKDKLEPALIRRGRMDRHIEMSYCRFPAFKVLAKNYLDVEEHELFDQIGQLLEETDMSPADVAENLMSMSKKKKRDANACLESLVKALKQAKEEAAKAKVEAEAKKKVEAAAEAAKSKEEDEAKEGSG

SEQ ID NO: 6774 - protein, 138 aa, Zea mays
  VARIANT 2: note = Ancestral polymorphism is P, Derived polymorphism is Q
  VARIANT 3: note = Ancestral polymorphism is A, Derived polymorphism is T
  VARIANT 35: note = Ancestral polymorphism is G, Derived polymorphism is D
  VARIANT 44: note = Ancestral polymorphism is S, Derived polymorphism is L
MPATTKPILLPRAWAAAPLLLLLLVLHGRGGHCFGMEAELEMDSEAHRRLLWEATTGRRYTQGVVVPCSRTGWWRCSGGDPGRMARSGKPRGGRRQRSGGEPGRMVRSRFGGRSDGFGLSSNGVTCLRGWLVRADDGA

SEQ ID NO: 6775 - protein, 186 aa, Zea mays
  VARIANT 83: note = Ancestral polymorphism is G, Derived polymorphism is C
  VARIANT 82: note = Ancestral polymorphism is A, Derived polymorphism is V
  VARIANT 50: note = Ancestral polymorphism is P, Derived polymorphism is S
  VARIANT 41: note = Ancestral polymorphism is E, Derived polymorphism is K
MRPGSPPLHRHHPVLEHGTTTPCVYLRPVVASHSSRRCASESISSSASIPKQWPPLPCRTSSSRRSGAAAHALGSKIGLVVAGIVLSYSLKRSAKSKLSISPLNDIQQQVDKLTADSPMENKRTARSKPKANQKDTSANIHQHVNAHNQVNAPNAYQATPQFARKVIACAYELYAMDWIVIQNSFD

SEQ ID NO: 6776 - protein, 319 aa, Zea mays
  VARIANT 84: note = Ancestral polymorphism is S, Derived polymorphism is A
MDVVKAAQLSGRTLERVVVHPLVLLSIVDHYNRVARDTRKRVVGVLLGTSSRGSVDVTNSYAVPFEEDDKDPRIWFLDHNYHESMFSMFKRINAKEHVVGWYSTGPKLRENDLDVHALFNSYVPNPVLVIIDVQPKELGIPTKAYYAVEEVKENATQKSQKVFVHVPSEIAAHEVEEIGVEHLLRDVKDTTISTLATEVTSKLAALKGLDARLREIRSYLDLVIDGKLPLNHEILYHLQASLFLEICHDVFNLLPNLNVNELIKAFAVKTNDMMLVIYLSSLIRSVIALHNLINNKMLNKEHEKAEDSKPTAIPTAAGS

SEQ ID NO: 6777 - protein, 769 aa, Zea mays
  VARIANT 115: note = Ancestral polymorphism is L, Derived polymorphism is H
MAVLLRPAAIAGGRQVWPVAEDEEGAREAEASSQRLVEAVARGDAREAGELLAAGRADVNYAGVVWLRARRVAEAEPREDAAAEARAVHEEIRADVSPLFLAAGNGDVALVRALLAKGADVNGKVFRGYPTTAAAREGCAEVAELLVRAGASQPACEEAVVEAALQGQAALAAIFMGSDLVRPRVAAHALVSAAARGFVDVVDTLIKCGADPNATARVLLRSLKPSLHANVDCTALFAAIVSRQVAVVRHLLQAGVKRDTKVRLGAWSWDASTGEELRVGAGLAEPYDAVWCAVEYYESTGSILRMLLRSGFTSTAAHLGRTLLHHAILCGSAGAVQTLLASGADSEAPVKTTRSNRSRPVHLAARLGQPEILRMLADRGCDLNARAEAGDTAAIICSRHKREDCLRVLVSAGADVALLNSAGDSSASVASSGGWKTGFERAVIGAIRCGAVPRSSERSVFSPLMFGALCGDATAMEVLLSQPDVDVDEQDSDGCSPIMAAAKMGNVEAFRALVFAGANVKLSNKRGETAIGLAQQSKKRDLFEQVMLELALEKGMPGGFYALHCASRRGDTAAVRHLASTGCDVNIPDGDGYTPLMLAAREGHAGVCELLISYGARCDLRTPRGETALSLARAALATAAFNKAEDVIMDEMGRQAVLQGARVRKHTKGGRARPHGKSLRMVAAAGVLRWGGSSRRNVICREAEVGGSSAFQRHRQRKGDAYEPGLFRVVTATGREVHFVCQGGKEAAELWVRGIRAVTRAAFGKRGKE

SEQ ID NO: 6778 - protein, 549 aa, Zea mays
  VARIANT 54: note = Ancestral polymorphism is G, Derived polymorphism is W
MLALTASASSASSHPYRHASAHTRRPRLRAVLAMAGSDDPRAAPARSVAVVGAGVSGLAAAYRLRQSGVNVTVFEAADRAGGKIRTNSEGGFVWDEGANTMTEGEWEASRLIDDLGLQDKQQYPNSQHKRYIVKDGAPALIPSDPISLMKSSVLSTKSKIALFFEPFLYKKANTRNSGKVSEEHLSESVGSFCERHFGREVVDYFVDPFVAGTSAGDPESLSIRHAFPALWNLERKYGSVIVGAILSKLAAKGDPVKTRHDSSGKRRNRRVSFSFHGGMQVFSSISLINALHNEVGDDNVKLGTEVLSLACTFDGVPALGRWSISVDSKDSGDKDLASNQTFDAVIMTAPLSNVRRMKFTKGGAPVVLDFLPKMDYLPLSLMVTAFKKDDVKKPLEGFGVLIPYKEQQKHGLKTLGTLFSSMMFPDRAPDDQYLYTTFVGGSHNRDLAGAPTSILKQLVTSDLKKLLGVEGQPTFVKHVYWGNAFPLYGHDYSSVLEAIEKMEKNLPGFFYAGNNKDGLAVGSVIASGSKAADLAISYLESHTKHNNSH

SEQ ID NO: 6779 - protein, 288 aa, Zea mays
  VARIANT 38..288: note = Derived polymorphism lacks residues 38 to 288
  VARIANT 79..288: note = Derived polymorphism lacks residues 79 to 288
MPPTPRSYACCCRSSARSALTSALPHWPWWRRTLPCGRRRRQGTQWSFQLAVSRCECTSRLRLTILAHRLRCCSPTPRCHTEYGLFHDADLFAAFRGLFQSPGNGMNGTPRKLKLDKLAINKFSPTSLLNSIKLRREGPLSLMTEHKEALWSTYSPTTKPDTSVLNRLINAGVSPRIEESMSVVNNEILRRHFLELTTNFLAPFGPYLRTTTPSEGTSPFVDPPLLPPFHADEFINGLAARGPGKFLSKRMRSNWLDLYRRFIEGPNFMPWFRQRRAATEQEQQRLWW

SEQ ID NO: 6780 - protein, 188 aa, Zea mays
  VARIANT 20..188: note = Derived polymorphism lacks residues 20 to 188
  VARIANT 21..188: note = Derived polymorphism lacks residues 21 to 188
  VARIANT 42: note = Ancestral polymorphism is V, Derived polymorphism is M
  VARIANT 45: note = Ancestral polymorphism is A, Derived polymorphism is V
  VARIANT 47: note = Ancestral polymorphism is R, Derived polymorphism is H
  VARIANT 52..188: note = Derived polymorphism lacks residues 52 to 188
  VARIANT 55: note = Ancestral polymorphism is P, Derived polymorphism is L
  VARIANT 57: note = Ancestral polymorphism is A, Derived polymorphism is V
  VARIANT 58: note = Ancestral polymorphism is R, Derived polymorphism is W
  VARIANT 64: note = Ancestral polymorphism is K, Derived polymorphism is R
  VARIANT 68: note = Ancestral polymorphism is L, Derived polymorphism is Q
  VARIANT 77: note = Ancestral polymorphism is D, Derived polymorphism is N
  VARIANT 91: note = Ancestral polymorphism is A, Derived polymorphism is V
  VARIANT 107: note = Ancestral polymorphism is R, Derived polymorphism is H
  VARIANT 118: note = Ancestral polymorphism is Q, Derived polymorphism is P
METRDPPWQRTQSCRGSSDRQYVFGERWKEGKEGLTKDDVVVATAVRVGRDQGWPLARDEPIVRLDPLHYLFTLPADKDWTFLNYGVSFNAVADTSVLTSLDGLLLRAFLRGGGPAVQGLQDTAAAGVGCCVGDGYWTRSQLGPVVASKAKEAKRERLRCRIGAPGARRRDPERREARGRRLATPRLA

SEQ ID NO: 6781 - protein, 375 aa, Zea mays
  VARIANT 317..375: note = Derived polymorphism lacks residues 317 to 375
MARPRGKKRTAPRAAATDSVQPEAAATETAAAEPANRGRWKRVKAPPKPKPETDYFAEKRNLEDLWLSAFPVGTEWENIDKIKEFNWSFENLEKALEEGGELHGKTVYLFGSTEPQLLDVNGESKIVLIPIVVAVDCPFPPSDKIGINSVQRENEEIVPMKAMKMAWVPYVPLEDRLSRIDSLKTKIFTLGCTQRRSALKHLKIERVKKFDYCMPYYMPLQPLEDENDTVISFLYPLEPPVRFLIYFSEECRLLSCITVFTFYCLLQIVDEFDWEMDDYEDFADQKVQEGGLPEDEKEKFKEFLKEKVRERKRELKQAKEARRKAIDDMDPKVKEAFENIKFYKFYPVKTPDTPDVNNVKARYINRYYRNAHYLM

SEQ ID NO: 6782 - protein, 259 aa, Zea mays
  VARIANT 29: note = Ancestral polymorphism is S, Derived polymorphism is L
MGFQTIPVVPDLVVDKSEVETSQVAGSDSIVIERVETNLSKEPFLLVPLENKEEKESLGIICYLENNKVDVPEAFSPRRDILELSISSKSTDDSLSLGCETPRESIFDPFAPGPEEAACAPKKKVTRGAQVPPRRKLNFDSGDYPVKRLSFDCSDSEEEDQYIEVIHKMILDLLILDVPLGGQKETGKNATDLGLHGSCKTPDSKPLLTGIASTCPDAPLRPSLKALKLSPGICRKIDFDFDAVSGSGSLSSSMDKESN

SEQ ID NO: 6783 - protein, 155 aa, Zea mays
  VARIANT 7: note = Ancestral polymorphism is S, Derived polymorphism is Y
  VARIANT 10: note = Ancestral polymorphism is A, Derived polymorphism is V
  VARIANT 73: note = Ancestral polymorphism is S, Derived polymorphism is L
MSSVSNSIAVGLPSYGLYLETRFLTQTYRNFAQKSSYKYSRIRAVQGNGGRRRLVDIIRIIPELSRDYFKSRSRRALFGGISLLGGFYVAQTISLSFGTLGVNDVIAAVVCVLLTEYVTKFYYSRPKVTFPIALLNNFKMGFTYGLFIDAFKLAS

SEQ ID NO: 6784 - protein, 155 aa, Zea mays
  VARIANT 79: note = Ancestral polymorphism is I, Derived polymorphism is F
  VARIANT 55: note = Ancestral polymorphism is G, Derived polymorphism is E
MSRDPLVVGHVVGDILDPFIKTASLKVLYNNKELTNGSDLKPSQVASEPRVEIGGRDMRNLYTLTPQVQVTQQIENIFIGNEIVSYENPKPSAGIHRFVFVLFRQSVQQTVYAPGWRQNFNTRDFSALYNLGPPVAAVFFNCQRENGCGGRRYIR

SEQ ID NO: 6785 - protein, 1105 aa, Zea mays
  VARIANT 90..1105: note = Derived polymorphism lacks residues 90 to 1105
MAASSSRGVATAATDYDDEPYLLGFIISDVKTVRESVNRMIEAWREIPDLDEEVCSFDVPPSSQSTSSLTDTADSLGSTSTPSITRRNSWPTNRQPPPDASHNVTNRKGSTPSIVGKKILPPSRCSTDQAKKFEGRVDVTVASDATPAKMVTEEKLLNEGSVRERLEARRVLFQKTGDKGYKKLAGPKSGSRVFPYSGDGDFEETVETEGAPDELQSAHRDEALLKIRMQLVHIENQHASLLILLQRPWRDLRWTGISLPLAIGRMVVVVGSVGSFFCFFSQLHGALCNELYTVVREVLDAIPPFETTRSGCSPGLLALSSLRISVEKAKNLLQYCSESSKLYLAVTAESVLTKFENSRQGLLESLHQVEETIPEAVGSKITMIAQELEKAGFVLDQSEKQVGDEVSELIQNEPKSNGFLDENELEFLHQIAFRVGITSSVAALTERRALRRLLERAHAEEDLKKESIAAYLLHLIRKYSNIFKSETNDSTNSLCSSPSCSSSKLSSSTDLHGNCQILEKRLPSVGSLSPKQIGGLSGTGSMPLPPEELRCPISLQLMYDPVVIASGQTYERACIEKWFHSGNTTCPKTRKQLSQLLRTPNYCIKGLIASWCEQNGVPVPAGPPESPKLEHLSISSLESTTCAATDGANTNTVLFEDTTAKDDAKSESEVSKEMFSRQNSGEATSKLRIHEEVSPENCSALQSSKEAAPDACGVEDSVDVEKGKGSHQDSKDDVPVSERCEQWLHVLNKNDAESMSEKHKLVEQIRILLKNDDELRNYAGANGITEPLIHFLKMAIHRGGVQSQEVATMALFNLAVNNDGNKRLLLSAGVIPLMEQMIQKHETCEAAIAMYLNLSCIPEAQAIIGSSVAIHFLVNSLGEGGPRSDTCRMDALLTLYNLSLHAPNIPPLMASGIIENLRRVLVPSSPWTDKALAVLLNLALTRRGKEEIAASAAMVGAIVLIVDNGEPGEKEKAVSCLYVICSGDEGSSQTVLQEGVIPALVSVTANGTARARDKAQRLLRLFREQRQRELELEEMQPRVELHEVASRAAVQQQREEEEEEMALAVLPAAAPSKPSGGGKKPRLCRSGSRRFTKVFTCLLKKWSLR

SEQ ID NO: 6786 - protein, 125 aa, Zea mays
  VARIANT 70: note = Ancestral polymorphism is I, Derived polymorphism is V
  VARIANT 66..125: note = Derived polymorphism lacks residues 66 to 125
  VARIANT 50: note = Ancestral polymorphism is H, Derived polymorphism is D
MTSHLTWRQESVRIYSSASMLAWHRVKRLLSRFRVRVITRQSQGHHIVNHKKRDAAKVNMKKAKKKKRMITVPSSMAIRLFRLLLSIDRSSLALALALAFIARYPTSFFRLCCDRLKLARRHGYL

SEQ ID NO: 6787 - protein, 168 aa, Zea mays
  VARIANT 40: note = Ancestral polymorphism is C, Derived polymorphism is R
MADPRYWDWMAVGCCTVIVVTSGSIVLGAVVACLVFIFKCIRKWWQSPRILLFRFGGVTTLRRNLSYGYRCHLCHDHMVAGEKVRTLSCDHVFHCGGGSFKCEGIDKRLLTVPMEPCPTCDQVPHPVPWFRKPPPSPPSIPSQGASAALERDFEQARRAVSDAQRKTT

SEQ ID NO: 6788 - protein, 207 aa, Zea mays
  VARIANT 160..207: note = Derived polymorphism lacks residues 160 to 207
  VARIANT 8: note = Ancestral polymorphism is R, Derived polymorphism is W
MARTPSCWWRTPSSFVAESTGHQASSRLLSMKSVNAMLEVPSTGQILAAGTSIEAILISDIISSLDKLPAPSNPHPSRFGSSAESIFTDVSQIASPQDAEVKVAILTLSDTVSSGAGPDRSGPRAVSVVNSSSEKLGGATVVAPAVVLDEVDKIKDILIQWSDIDHVNLILTLGGIGFTPRDITPEATKTVIHEEAPSSHLLCIKKV

SEQ ID NO: 6789 - protein, 67 aa, Zea mays
  VARIANT 43: note = Ancestral polymorphism is R, Derived polymorphism is L
  VARIANT 16..67: note = Derived polymorphism lacks residues 16 to 67
  VARIANT 6: note = Ancestral polymorphism is S, Derived polymorphism is R
MVTRWSQKSPGLKILWIWTLGTAAIVVGGIVRMRVNDVQKILREEEEAAATATATSPPSERVLKDEE

SEQ ID NO: 6790 - protein, 72 aa, Zea mays
  VARIANT 19..72: note = Derived polymorphism lacks residues 19 to 72
  VARIANT 31: note = Ancestral polymorphism is T, Derived polymorphism is M
  VARIANT 33: note = Ancestral polymorphism is C, Derived polymorphism is S
  VARIANT 46..72: note = Derived polymorphism lacks residues 46 to 72
MTAKKALALAQFVHFSTKRAREIGKLPPKWTQCLVPLVNSSTVKIQGKLVFPTIARVPNDVAEVDAGDIALC

SEQ ID NO: 6791 - protein, 319 aa, Zea mays
  VARIANT 234..319: note = Derived polymorphism lacks residues 234 to 319
  VARIANT 157..319: note = Derived polymorphism lacks residues 157 to 319
  VARIANT 131..319: note = Derived polymorphism lacks residues 131 to 319
MKDRHLSLNQTQRVRLEAALQELQSVAPAAVSAAAVTVADTIPVNQEDNILKGHGTSDQDGEVVATLCGVVERVNKLVYVRTLRARYKPEVGDIIVGRVIEIAPKRWRLEINFSQDAVLMLSSMNLPDGIQRRRTAVDELNMRSIFEENDVICAEVRGFQHDGSLHLQARSEKYGKLERGQLLMVAPYLVKRKKQHFHHLEKYNVDLILGCNGFIWAGEHVVVGEKPKTTGGQQGFSTEAENFTPLETRKHICRLANSVRVLSALGFTLTVELIIETMEASASSNVEINDMLGAEFYVQTAEREAKRRADLLRKKNDAR

SEQ ID NO: 6792 - protein, 167 aa, Zea mays
  VARIANT 14: note = Ancestral polymorphism is D, Derived polymorphism is G
  VARIANT 16: note = Ancestral polymorphism is R, Derived polymorphism is W
  VARIANT 31: note = Ancestral polymorphism is R, Derived polymorphism is W
  VARIANT 33: note = Ancestral polymorphism is V, Derived polymorphism is M
  VARIANT 34..167: note = Derived polymorphism lacks residues 34 to 167
  VARIANT 35: note = Ancestral polymorphism is N, Derived polymorphism is I
  VARIANT 37: note = Ancestral polymorphism is L, Derived polymorphism is I
  VARIANT 43: note = Ancestral polymorphism is L, Derived polymorphism is H
  VARIANT 54: note = Ancestral polymorphism is D, Derived polymorphism is N
  VARIANT 55: note = Ancestral polymorphism is V, Derived polymorphism is M
  VARIANT 57..167: note = Derived polymorphism lacks residues 57 to 167
  VARIANT 73: note = Ancestral polymorphism is P, Derived polymorphism is L
  VARIANT 77: note = Ancestral polymorphism is P, Derived polymorphism is L
  VARIANT 110..167: note = Derived polymorphism lacks residues 110 to 167
  VARIANT 111: note = Ancestral polymorphism is V, Derived polymorphism is L
MEAYDVSYTTKVRDFRDLLEAAGAARAKECRPVQNLLFSECRLAINDLPNDLYDVAWDVVLIDGPSGWNPNSPGRMPSIFTTAVLARSGATAAKGPTDVLVHDFQFEVEQVLSREFLCDENRVTGSGTPSLGHFVIRGGRAGAGDAFCSAQEDGSSGEKTCRRRSHK

SEQ ID NO: 6793 - protein, 195 aa, Zea mays
  VARIANT 111: note = Ancestral polymorphism is P, Derived polymorphism is T
MLVICLAAAVVSVCLFFIFMCIVQWLDSPRMRVFRLGGVTTLRQNLDYTCTLCQNSMEAGEKVRTLSCDHVFHCGGSVKCEGIDHCLRTGPMERCPTCDRVPHPVPWKRTPPPSPPAPTPSQGALAAALPPLRLPLSTRDLDEALLRWEQIQKLAEASSSASLHRRHPRTSTSDKEEVLPLPADDEILPEAPSSQ

SEQ ID NO: 6794 - protein, 626 aa, Zea mays
  VARIANT 236: note = Ancestral polymorphism is A, Derived polymorphism is D
MPPPILLPPIFLLFLVAPLAAPQPAPGSAAAPQEDDLRCLRGVKHDLADPNERLADWDFKNTSGGAVCNYNGIGCWNLQESRVLSLSLSGFGLVGSIPSSLQYCRAATTLDLSSNALVGTILPALCDWLPFLVTLDLSSNQLNGPIPAELANCRFLNSLRLSGNQLSGQIPASLARLDRLKSLDLSGNKLDGQIPSQLGDNFPMDSFSGNSGLCGRPVSSRCGRGLGSTGLGIVIAAGVFGAAASLLLAYFFWRCTGKGKGGRRRHRRGTSESGGGEDGSWWTERLRAAHNRLVPVSLFQKPIVKVKLADLMAATHDFSTSHIVVAGSSRAGTAYRAVLRDGSALTVKRLHSCPLSEKAFRAEMGRMGQLRHPNIVPLLGFCVVEDERLLVYKHMESGALSSVMKKPGEAPLDWATRLRIAVGAARGLAWLHHGFQVPQIHQNLSSSAVLLDEDYDARITDVGLTRLVRMAPGEGGDTSPFLNGDFGEFGYVAPEYASNPVGTMKGDAYAFGVILFELVSGQEAAAVVTDVTGEGFKGTLVDWVNQLKASGRISDAIDKPLRGKGHEAEIQEFLKIAFACTQPRVTERHSMYRVFHALKSIGEGCDVTEQFDEFPLAYNKDDSDAI

SEQ ID NO: 6795 - protein, 171 aa, Zea mays
  VARIANT 117: note = Ancestral polymorphism is A, Derived polymorphism is T
  VARIANT 115: note = Ancestral polymorphism is K, Derived polymorphism is N
  VARIANT 108: note = Ancestral polymorphism is G, Derived polymorphism is A
  VARIANT 101: note = Ancestral polymorphism is R, Derived polymorphism is S
  VARIANT 95: note = Ancestral polymorphism is P, Derived polymorphism is L
  VARIANT 94: note = Ancestral polymorphism is D, Derived polymorphism is N
  VARIANT 43: note = Ancestral polymorphism is P, Derived polymorphism is L
  VARIANT 2: note = Ancestral polymorphism is L, Derived polymorphism is V
MLLRLKIVVGVHSVVLPVPVRGGFGHGACYAALEPCWRRSRRPALAAAGGLVTRRPRSATVVMALKEEPEGSRRGFVGSGPSCDPGLEIQVPSDPFLLWIRKESLNVGDHIYSWKATCFLSFQVVDAKVIHLGYNNSCIFLSLKDVKVMVETTLGKEELKEAVLMCTNRVS

SEQ ID NO: 6796 - protein, 670 aa, Zea mays
  VARIANT 309..670: note = Derived polymorphism lacks residues 309 to 670
MQISSTATEAQHTTPACSCSTRRRSIDFPHLWRGTGFRVNMCEGGRPEAASMASHRRPQSAGLSSGLPVPEQEAAGGGGGGAAEATRRPRGWRAVAFIIGFYAAASIAGNAFSFSLTSYLIGRYNMKQNAATNVNNIFSGTYNFSPVIGAFVADAFWGRFRTLLVGTVFGVAAMAVITLSATVHQLKPPPCSPLAQQAGTCAAPSALQRAVLYLGMGLLVVSAGGTSPTGLPFGADQFDERKEQHSKQGGLARFYNWYYAVAMVATFLALTVVLYVQVKVSWGLGFAIPTALMLIAFLVFLVGTKLYVYVPPEGSIFSSVARVFVASCRKWRLRLPHPDDARRQEELLYDPPAVGIGGGRRVFKLPLTLQLSFLNKAAIVTDAAAEIRPDGAPARPWSLCSVQQVEEAKCLLKIIPVWISGTVWFTMVTELTNYTFLQASTMDLHMGKHFTVPPASIVAVFYLAVALFVPVYDLLVSRATLRRGITLLQRQGAGLVVAALAFVVAAAVEPRRRRSALAHGDGMSPLSVFLLAPQLAVMGVSGGFTLVGQVEFYNTQFPEQMRTLANAVFYCAQGISSYLATLVVNIVNARTRRHGGSAGWVTDDINAGRIDYFYYAMAVLSGANFVYFLVCSYFYQYKGEQAADTPPARCEPATDSDSRTSESAAALLRT

SEQ ID NO: 6797 - protein, 182 aa, Zea mays
  VARIANT 164: note = Ancestral polymorphism is G, Derived polymorphism is R
MGASLASAGLVNYPLVAALLAFALAQSSKFFTTWYKEGRWDARQLIASGGMPSSHSATVTALSVAVGIQEGFRSATFATALVFACVVMHDAFGVRLHAGKQAEVLNQIVYELPEEHPLSETKPLREILGHTVPQVELNASYYLSSWPVASLESSWLSLCFWLSGGLSQVLFTLYLTGDGYKA

SEQ ID NO: 6798 - protein, 416 aa, Zea mays
  VARIANT 106..416: note = Derived polymorphism lacks residues 106 to 416
  VARIANT 223: note = Ancestral polymorphism is H, Derived polymorphism is Y
  VARIANT 229: note = Ancestral polymorphism is G, Derived polymorphism is A
  VARIANT 292: note = Ancestral polymorphism is F, Derived polymorphism is I
MHARHVLVSSVFLFFVVALCTVVLPPPRWPRSTSFFQPSWLPPLNRRERDDSADAHPPCDYSDGRWVRDDAADVTTYTEDCPFLDPGFRCTRNGRTDSSFRHWRWRPRRCDLPKFNATDMLERSRDGRIVFAGDSIGRNQWESMVCMLAAAVPAASSSRVYERSGKPISRHKGYLAMVFADYNLSVEYYRAPMIVMVHRFPAANNATAGSVRGGVRLDALPRHADRWAAADVLVLNSGHWWNQHKTVKAGNYFMVGDRLNKTMDIKEAFQRSLQTVKDWELSSAQLSESYFFFRSFSPSHYSNGTWNTGGSCAGQREPPTTNNGRSEEEYSWMNAMIAKMTEDIKSHGRKARFLNITHMTELRPDGHPAGHREPGTPPDAPEDCSHWCLPGVPDVWNQILYAHLLSAGYGTRRNQR

SEQ ID NO: 6799 - protein, 507 aa, Zea mays
  VARIANT 396: note = Ancestral polymorphism is L, Derived polymorphism is Q
  VARIANT 335: note = Ancestral polymorphism is V, Derived polymorphism is I
  VARIANT 334: note = Ancestral polymorphism is R, Derived polymorphism is W
  VARIANT 192: note = Ancestral polymorphism is L, Derived polymorphism is V
  VARIANT 118: note = Ancestral polymorphism is N, Derived polymorphism is K
MSGGSSPSSRRNSFNSLSKDLDLPSEQGCLSIVVLGASGDLAKKKTFPALYHLFEQGFIQSGEVHIFGYARSNLSDDGLRERIRGYLKGAPEDLSEFLQLIKYVSGSYDTGEGFEKLNRAISEYEVSKSSGSYRRLFYLALPPSVYPSVCKMIRTYCMNPSSHPGWTRVIVEKPFGKDLDSAEELSAQLGELFEEHQLYRIDHYLGKELVQNLLVLRFANRLFLPLWNRDNIDNIQIVFREDFGTEGRGGYFDQYGIIRDIIQNHLLQVFCLVAMEKPVSLKPEHIRDEKVKVLQSVNPIKPEEVVLGQYDGYKDDPTVPDDSNTPTFASVVLRVHNERWEGVPFILKAGKALSSKKAEVRVQFKDVPGDIFRSKKQGRNEFVIRLQPSEAMYMKLTVKKPGLEMATEQSELDLSYGMRYQNVKIPEAYERLILDTIRGDQQHFVRRDELQAAWKIFTPLLHDIDDGKLKALPYEPGSRGPKEADELSARVGYVQTHGYIWVPPTLA

SEQ ID NO: 6800 - protein, 296 aa, Zea mays
  VARIANT 268..296: note = Derived polymorphism lacks residues 268 to 296
  VARIANT 161: note = Ancestral polymorphism is P, Derived polymorphism is H
  VARIANT 24: note = Ancestral polymorphism is Y, Derived polymorphism is H
MEAEYPHQQAAPSYSTTATVFWPYATRRRKRAEDGSDLSLASDMDLDADAQRAAVRRCDKGCKCVFFGKSQDKLKAVSEELGHEIRVFSSENFALQPSKLPSADHEEGDDFYELQPADYYNLISNRMGELSKMLKTRKMREAELAAQRAKRTKAVMRVRFPDGYILEADFLPSERIHSLVDLLMKVLARPDLPFYLCLLLNADDLKAGPFLREGILSLDGLSLLLKPASQPDDSRMNSSTHQSGASQSDPVPTTNKKPGRPKWLKRPRQNNWYPLVAGDTTPGVSLYTAFQETESA

SEQ ID NO: 6801 - protein, 167 aa, Zea mays
  VARIANT 76: note = Ancestral polymorphism is R, Derived polymorphism is I
MLRPACKSCCAPASHEYAWCGTTMNVATPGGVGGPMEDKGEDSEAGSEDWMWAASPDKLVLQVQRQLQLTIKAQGIYLQMIIEEQQKLGGSIKASEGQKLSDSPPSLDDYPEIMQHSPKKPRIDALSLDSEHDIAQPKFESHLIGLWDHNIAFPVEEFKADPAMSKS

SEQ ID NO: 6802 - protein, 510 aa, Zea mays
  VARIANT 132: note = Ancestral polymorphism is A, Derived polymorphism is V
  VARIANT 149: note = Ancestral polymorphism is S, Derived polymorphism is L
  VARIANT 210: note = Ancestral polymorphism is I, Derived polymorphism is L
  VARIANT 380: note = Ancestral polymorphism is R, Derived polymorphism is C
  VARIANT 384: note = Ancestral polymorphism is R, Derived polymorphism is C
  VARIANT 422: note = Ancestral polymorphism is Y, Derived polymorphism is N
MIKQILGRLPRKPGKAGDSREAAAAGNGTEPSNSYSVVRGMDPGNKRAGNGDYPVPSGLTSNPVMNGAVVYHSSEPLPAFKDVPASEKQNLFVKKVNLCCAVYDFADPTKNLKEKEVKRQTLMELVDYITSANGKFSEVVMLEITKMVSINLFRSSSPTPRENKAIEGVDLEEDEPLMDPAWSHLQIVYEVFLRFVASQETDAKLAKRYIDHSFILRLLDLFDSEDPRERDYLKTILHRIYGKFMVHRPFIRKAINNIFYRFIFETEKHNGVAELLEILGSIINGFALPLKEEHKLFLVRALIPLHKPKCVSMYHQQLSYCITQFVEKDCKLADTVIRGLLKYWPVTNSSKEVMFLGELEEVLEATQLAEFQRCMVPLFRQIARSMNSSHFQVAERALFLWNNDHIENLIKQNYKVLLPIIYPALERNSRDHWNQAVRSLTLNVRKIFSDHDSAFFGECDQRFSDEELKQEESDSKREALWMRLEEMAASKPRENSPLGAPNGKPSQAAG

SEQ ID NO: 6803 - protein, 570 aa, Zea mays
  VARIANT 71..570: note = Derived polymorphism lacks residues 71 to 570
  VARIANT 389..570: note = Derived polymorphism lacks residues 389 to 570
MATAATAMVVPEQPRRRKPAPGRGGVALPAGLSEEEARVRAIAEIVSAMGELSRRGEDVDLNALKSAACRRYGLARAPKLVEMIAAVPEADRAALLPRLRAKPVRTASGIAVVAVMSKPHRCPHIATTGNICVYCPGGPDSDFEYSTQSYTGYEPTSMRAIRARYNPYVQARSRIDQLKRLGHSVDKVEFILMGGTFMSLPADYRDYFIRNLHDALSGHTSANVEEAICYSEHSAVKCIGMTIETRPDYCLGPHLRQMLSYGCTRLEIGVQSTYEDVARDTNRGHTVAAVADCFCLAKDAGFKVVAHMMPDLPNVGVERDLESFREFFESPAFRADGLKIYPTLVIRGTGLYELWKTGRYRNYPPELLVDIVARILSMVPPWTRVYRVQRDIPMPLVTSGVEKGNLRELALARMDDLGLKCRDVRTREAGIQDIHHKIRPDEVELVRRDYAANEGWETFLSYEDTRQDILIGLLRLRKCGRNVTCPELVGRCSIVRELHVYGTAVPVHGRDVDKLQHQGYGTLLMEEAERIAQKEHRSEKLAVISGVGTRHYYRKLGYELEGPYMVKCLA

SEQ ID NO: 6804 - protein, 517 aa, Zea mays
  VARIANT 61: note = Ancestral polymorphism is L, Derived polymorphism is H
MLPVVAMWGQRCGFDMTATTAIPDAVRTGLARNRGSSAARSASGTAAIISTSLGARARPYLRHAADLSALRSTSSPRRESSPIAETISAMARTLASSSERPAGRATPPRPGAGFRRRGCSGTTMAVAAVAIGREGFSERDLGLRVENELSSVGSVFLSAGRPSASVTVQNLPALYSHMAALYESLAADGVLETDAALLAEMRARIDEEIRKLDEKIADAEENLGESEVREAHLAKSLYFIRVGEKEKALEQLKVTEGKTVAVGQKMDLVFYTLQIGLFYMDFDLISKSIDKAKNLFEEGGDWERKNRLKVYEGLYCMATRNFKKAASLFLDSISTFTTYELFTYDTFIFYTVLTSVISLDRVSLKQKVVDAPEILAVIGKVPHLSEFLNSLYNCQYKSFFIAFSGLTEPIKLERYLQPHFRYYMREVRTVVYSQFLESYKSVTMEAMAAAFGVTVDFIDQELSRFIAAGKLHCKIDKVAGVLETNRPDARNAFYQATIKQGDFLLNRIQKLSRVIDL

SEQ ID NO: 6805 - protein, 1346 aa, Zea mays
  VARIANT 1128..1346: note = Derived polymorphism lacks residues 1128 to 1346
  VARIANT 1130..1346: note = Derived polymorphism lacks residues 1130 to 1346
  VARIANT 1192..1346: note = Derived polymorphism lacks residues 1192 to 1346
MASRQHNAQFHKSKTLDNKYMLGDEIGKGAYGRVYKGLDLENGDFVAIKQVSLENIPQEDLNIIMQEIDLLKNLNHKNIVKYLGSLKTKSHLHIILEYVENGSLANIIKPNKFGPFPESLVAVYIAQVLEGLVYLHEQGVIHRDIKGANILTTKEGLVKLADFGVATKLTEADINTHSVVGTPYWMAPEVIEMSGVCAASDIWSVGCTVIELLTCVPPYYDLQPMPALFRIVQDVHPPIPEGLSPEITDFLRQCFQKDAMQRPDAKTLLMHPWLQNSRRALPASLRQPTPLRNIDGDDESSRGDNNSGFCDTPGDTRATIASNVDQVNGRNGPNMDSAAQSKSEELHDGNLELTEGISSNNVALVKDNVVLNKDPTLVLHEKLPVESSFGDADLNGKVMAHELLQGGLPSKIELENKESSTVEDGDVFSFQAGRQNIDFQMVVEPSVVEGPKQLSRFSDKPEDASLEDLFPPIDKRGDNGAEPSTSTTVQELQYNGVHNGFVKGLNARVEKQKENDSESMNGGKLIEFAMQLENIDASGFGEHIPGESLFPLQSVEYSKIVAQLKPGESEDVILLACQKLLSIFSHRPEQKQIYMAQNGFLPLMELLEIPKNRILCSVLQLINNIVKDSTGFLENACLVGLIPVVMNFAEPNRPKDVRVQASLFLQQLCQASTLTLQMFIACQGIPVLVSFMEPDYAKYRQVCLDMVHLAIDGIWQVFKLQHSTPRNDFCRIAAKNGMLPRLVNTLYSLNEATRFASVSGSGASVTQNGSTPRRRSGQLDPSVLESCKARLDHHHSSGSLQSLQADADKHHILMDSSSSPRFSDKTSSNLERNENDLVIRPQRLSVSAGRTSTDRSPKHIELVSNGHNNSQNDQVRPLLSLLEKEPPSRHVSGQLDYVRHISGLERHETILPLLHTSTERKTNGELDLMMDFAEVSRHGRENGHLDSSIKASNRVHSMKYAPSASASNEGASTSGAASQTASGVLSGSGVLNLRPGSTTSSGPLAQMFSSMSADVAREYLEKVADLLLEFAQADTVVKSLMASQSLLTRVFQMFNKIEPPILLKILRCINHLSGDPNCLETLQRTDAIKHLIPILELRDGPLVYQIHSEVSSVFVLNALFNLCKINKRRQEQAAENGIIPHLMKFVMSDSPLRQYALPLLCDMAHASRNSREQLRVHGGLDVYLNLLEDDAWACTALDSIAVCLAHDNDHRKVEQALLKKEAIQKLVKFFQDCPEQYFGHILDAFLKIITKSSRLNTAMATNGLTTLLIARLDHREAIARLTLLKLIKVVYEHHPRPKQLIVENDLPQKLQNLIEERRDGQRGGQQVLVKQMATSLLKALHINTVL

SEQ ID NO: 6806 - protein, 423 aa, Zea mays
  VARIANT 265: note = Ancestral polymorphism is A, Derived polymorphism is V
  VARIANT 172: note = Ancestral polymorphism is I, Derived polymorphism is V
  VARIANT 140: note = Ancestral polymorphism is N, Derived polymorphism is I
MRPPSLLSLTLDAALLRIANIADLSHLPDHLLIDLFRRTLSAGKLTEKVLKLFLATDCEDIILAVRLLNIKQPLVPVLPTNSEVDIVIAALQPNLTTFFEAWRPFFSRFHIIVVKDPDMAEDLQIPAGFDLKVYTKSDINGLLGASSSINLSGHSCRYFGYLVSRKKYVISIDDNCLPAKDTAGSTVDVVAQHMANLKTPATPFFFNTLYDPYRKGADFVRGYPFSLREGVECMLSCGLWLHNADYDPMTHVVKRNQRNTTYVDAVMTVPLGAMLPVSGINVAFNRDVLGPAMFPGLRLRNEGKHRWDTLEDIWNGLCAKVVCDSLGYGVKTGLPYVMRSDAEAGKALESLKEWEGVKVMDDVLPFFQSLKLSRTAVTVDDCVKELAGVVREKLGPKNAIFTKAADAMVEWNNLWKVHGAQNA

SEQ ID NO: 6807 - protein, 1556 aa, Zea mays
  VARIANT 1061..1556: note = Derived polymorphism lacks residues 1061 to 1556
MRPSRSRPLGGPPRLPRPCLRLIGIGVRLLAMAAAPSPRPRMAHRKGGAAPISLFLDTDLGTHLALLVAPDTGIRGLKSQVAAEHAAAFPDIGPVITKSFQVRRKGVLYRLSDSMTVMSSFTKIEGGCFLHVNMAEATEATYCCQDAPAIDDKRLSDVSLGIHVKNHIKELPVMASDVACDLLPRDLEGGNDDTTLNNVQAHDALPNCTLVPSSSQLNTEILKNKAVGMDSDAEAGIDQVIDKAKSYSGQIKHANQAEGTYISSTSMACVDKSSNESNMSHAVAELHASRDHGVGDDVSDKKQVRVEQQLLEEIQSKDTLSQVKEHKKSRTGFFDASCTSLLKTGTTLVESLNTSNHQEVHETFNVESIQLENPSTVGKKKKRKRRQLSPSKSASAQETIEPSATAVDLLKPTGEGLPNNSLGIQIHNILAMDNLSQEKEHKKSRTSSPDTSSRHLLETDPASLREPLNTSNHQVHDTLHQESIQLENPSAAGKKKKRKRQLSPSKSVSTQITTEPSPGAAPADLSRSTGDEAYNVELNGKDETIVEESGCRLSSSELNDANQGGKSVQFVSDALASIDLICKQEKFGHSLKGCKDPSIANAIYSTSENVAIEGKTTKESCVPLDRGDKHEEKKQHNEGCHNEAVPEISHMEKGGRSTDVSNKRHTNQITSQVKKGKKSKVGSVGMPTVDATGEKDHMYSENAAKQDTVSTKKEIAHEPSVQQMSNIVYQGDSNVVENPSGDGKKKKKRRRHSESLKGMNPSQDLTSSSGFVTNKNSIQCTDAAPIDAKQTTQGIIEGETVNEHMKLSRSLDVAATNIVDGVLADLRPKDSLSKDLDEDLLPGQTHLGSNQNGLEVPESIAVKVGSVTAALPPKCPAAVHFASPVSSPRQKKSKGKKSKVLSTMTDSSHQSSGVSEEDANRELTESDSLRFADKTSDPEDIVTGNVVAQADDKRKTTKRQRKKGSVKQVCDTLALKETNDAEENLVQGGYVVDTPLSTVGEVEQKGKSSQIPTPKIRKTNCSTHGLDSHTTKDNQGVYVTDIIETHDNENAAGTPTLHEVQKYAMVLKSANTNSQKQRKTSSNSELQSQDCALEHGFTADLVNGRTEREVSTTSSASAVKPDYHTVFHRANDGINFLDHFSCSNMNDDPSIAAESKQNNEDEPLREMKNKKKKWKQGTSSIEPNDILESFPSEKASLTGHFGTSKAIVSSVAKESMNIENENVNDGKEKKRKGKANMEVPTAEKDNSNCDNQGIDISTQESLISFVQNERTGQDNGKESNSKVTQNASIMQHGREDPTWNHTPEKNLHQSVDDDQNKLLTEKDHAHISKEVGKFTSQPKPHAKIRKPDEFTIKGKVAPNPKPVSNLMKDFSTSPGASSDSTEGMPQSANRYKVSVQKVPSKMYQETSGNSKKASRKIVSGAISNDSIREGCGDELDTTTVMEGSSDSSSTSADSGGNLNESVTWNRITLIDYKVHQFKLTLGKNVGISSTAYDESEASDDDGAISLSQKSLKGGLHISSILRGSRSYKKARKKLEELLDDDDTIVPDSQPTDGLRG

SEQ ID NO: 6808 - protein, 167 aa, Zea mays
  VARIANT 42: note = Ancestral polymorphism is E, Derived polymorphism is Q
  VARIANT 11: note = Ancestral polymorphism is F, Derived polymorphism is L
MIKLRYPKKLFRRSSSKGSSTTSSSSSSDGDAAGSARGGEIEWEVRPGGMLVQKRDDGRGHVDVITVRVATGFSWHDVSVVATCTFVWACKKTIAGELKAVLWKMTGLEPREQRLLFRGKEREDGDHLHMIGVRDMDKVLLLEDPALKDMKLRAGLTAAYRQTFIRV

SEQ ID NO: 6809 - protein, 304 aa, Zea mays
  VARIANT 201..304: note = Derived polymorphism lacks residues 201 to 304
MDRRSLPPPQLKVHRSLRGSATSSSAAVNRRSQISSPITSLPITALEVCHFWRSATSASARRQWKVLDLLSLLPRSSQWEVRHFWKVRHLLLDPRQKWRGRSATSSSARGKNGVGDPPPHLLPFSRPRLIWKVRRRDSDVEAMAGLFGMVVLPALPAILAPNRRESCSPNLRWRRLHCRWRCRVCGGVCRWEGMVCSSSGQVVSLSLSSYGLTSTLSTAIGDLTFLRMLNLSSNWFHGEVPATIVRLAHLQALDLSYNAFTEFQRCNSRGHGAADNINCQSSHYNSTHFRDFISCSCQSNYRML

SEQ ID NO: 6810 - protein, 61 aa, Zea mays
  VARIANT 36: note = Ancestral polymorphism is A, Derived polymorphism is T
MVVGIVIRLVVAFVLLVLVFSAIRLHDRRQHAQQWAEERNQLRSYMTMDYAPWHRRVPKHN

SEQ ID NO: 6811 - protein, 185 aa, Zea mays
  VARIANT 15: note = Ancestral polymorphism is G, Derived polymorphism is W
MSTADAASPALAPDWDAPAGEGLALAQFAAGCFWSVELVYQRLPGVARTEVGYSQGHRHAPTYRDVCGNGTGHAEVVRVHYDPKACPYDVLLDVFWAKHNPTTLNRQGNDVGTQYRSGIYYYTAEQETLARESLAAKQKEWQDAIVTEVLPARRFYPAEEYHQQYLEKGGQSAKKGCSDPIRCYG

SEQ ID NO: 6812 - protein, 114 aa, Zea mays
  VARIANT 28: note = Ancestral polymorphism is V, Derived polymorphism is A
  VARIANT 33: note = Ancestral polymorphism is A, Derived polymorphism is T
  VARIANT 45: note = Ancestral polymorphism is D, Derived polymorphism is H
MDEGATTSDSSAAETFDPDLIHAIFKLVWRRRAGKGAGGGGSIEDIDAERAPETSRRNRSTTANATALKVSCELLRIFVTEAIQRSAFIAEAEDGAVIEPTHLERVLPQLLLDF

SEQ ID NO: 6813 - protein, 164 aa, Zea mays
  VARIANT 16: note = Ancestral polymorphism is R, Derived polymorphism is C
  VARIANT 22: note = Ancestral polymorphism is R, Derived polymorphism is C
  VARIANT 42: note = Ancestral polymorphism is T, Derived polymorphism is A
  VARIANT 67: note = Ancestral polymorphism is T, Derived polymorphism is I
  VARIANT 99: note = Ancestral polymorphism is T, Derived polymorphism is I
MHQQNLIADLCLALGRCALVSRRFHALVPLVCSVFVRVDEPTSGLDNASALHIVGALRAMAEARGRTVLLSIHQPGACIVKMFDSVLLLAVGSVLHHGIVDQLRALLGDAGLHLPPHVDDVEFAIDSVDALRRHARRPPETERAAASVPAARQAGGGRPRDHDG

SEQ ID NO: 6814 - protein, 278 aa, Zea mays
  VARIANT 209: note = Ancestral polymorphism is W, Derived polymorphism is R
  VARIANT 199: note = Ancestral polymorphism is R, Derived polymorphism is L
  VARIANT 110..278: note = Derived polymorphism lacks residues 110 to 278
  VARIANT 98: note = Ancestral polymorphism is R, Derived polymorphism is H
  VARIANT 94: note = Ancestral polymorphism is R, Derived polymorphism is W
MLCTPPPPQPPLQSSRRPRPLPLRAAPRCSKPNDAEPSPSPPSTAAAGGVRRQVLSPEGRAKLDPRPDRDFYALPRLVTHVDDGFIATLTGLYRERLRAGWDVLDLMSSWVSHLPPEVRFRRVVGHGLNAQELARNPRLDLFFVKDLNKEQRLELESGTFDAVLCTVSVQYLQSPEKVFAEIFRVLKPGGVCIVSFSNRMFYEKAISAWRDGTAYSRVQLVTQYFQCVEGFTQPEVIRKLPSAGGSPSSPLDAVMRLFGVAGSDPFYAVISYRNFKPM

SEQ ID NO: 6815 - protein, 806 aa, Zea mays
  VARIANT 6: note = Ancestral polymorphism is L, Derived polymorphism is P
  VARIANT 19: note = Ancestral polymorphism is P, Derived polymorphism is L
  VARIANT 463..806: note = Derived polymorphism lacks residues 463 to 806
MALMRLLMIASLPLPLPSLSYKTSRCCCHRSRRLVRSAMPGACQDLSTITPTPRRQSMAQLQRGSVLVGGRELLVRAPPNVNLRPAGAGVADGGAASGAAFLGARAPAASSRHVFSVGNLASGWRWLSLFRFKIWWMIPATGVGAAAVPAETQMLLLEYRSEAGPAAATERGSLYALVLPVLDGGFRASLQGSPEDELQFCFESGDPDVQTMEAVDAVFVNSGDNPFKLLKESIKMLSKIKGTFSHIEDKEIPSNLNWFGWCTWDAFYKAVNPSGIEEGLQSLREGGVPPRFLIIDDGWQETVDEIKEVDEALREQTVFAQRLADLKENHKFRGETCKNLEDLVKTIKEKHGVKCVYMWHALLGYWGGTLAASKVMKKYNPKLVYPVQSRGNVANLRDIAMDSLEKFGVGIVDPDKIYEFYNDQHSYLSSVGVDGVKVDVQNVLETLGRGFGGRVAVTRKYQQALEESIAQNFKTNNLICCMSHNSDSIFSALKSAVARASEDFMPREPTLQTLHIASVAFNSLLLGEIFIPDWDMFHSKHESAEFHGAARALSGGGVYVSDKPGVHDFSVLKKLVLPDGSILRARYAGRPTRDCLFTDPVMDGKSLMKIWNLNNFTGVIGVFNCQGAGQWVWPVKQTAYVPTNINITGQLSPSDVESLEEIAGDDWNGETAVYAFGSCSLSRLQKHQSLEVSLSTMTCEIYSISPIKIFSEVVQFAPLGLIDMFNSGGALDNISSVADSSATTVHIRCRGPGRFGAYSDTRPELCRVDEHEVEFTLAEDGLLTFYLPPSSSQDNLRHVEIVYKAS

SEQ ID NO: 6816 - protein, 150 aa, Zea mays
  VARIANT 16: note = Ancestral polymorphism is A, Derived polymorphism is V
  VARIANT 7: note = Ancestral polymorphism is L, Derived polymorphism is I
MALLSLLAFLLATAAAPAAVAAVGNATYDGSKTDASPAVLCNGEGCEPPAQPLPIYGYPSPAAPSLPSAPPAPPSAPGSQTPCPPVTVVCCGGAGGQLPQQPNREPPGAGGYVPYYNTSAASPPALLLAPVTGGYYVMAMACIFLLWTLV

SEQ ID NO: 6817 - protein, 541 aa, Zea mays
  VARIANT 94: note = Ancestral polymorphism is T, Derived polymorphism is I
METLRAYDELFPWALLVLVTTITILYLKQLLVAAFKRRATSSPSLPCPRGLPLIGNLHQLGTVPHDALAALAAKHAAPVMLLRLGSVRTLVVSTADALRAVFQPNDRAMSGRPALCAATRITYGLQDIVFSPPDGGFWRTARRASLSELLSAPRVRSFREVREQEAAALVAAVTDMSRSGSPVNLSEELMATSNKILRRVAFGDGGGEEESIRASAVLEETQKLLGGFFVADYMPWLGWLDALRGLRRRLERNFHELDAFYEKVIDDHLSKRGDDDDASKSKGEDLVDVLLRLHGDPAYQSTFNSRDQIKGILTDMFIAGTDTAAATVEWTMTELVRHPDILAKAQKEVRGAVVGRDDDIVRESDLPRLKYLKQVIREAMRVHPPVPLLVPRETIEPCTVYGCEIPARTRVLVNAKAIGQDPDAWGADAARFVPERHEEIADLSDHKPWHDSFSLVPFGVGRRSCPGVHFATSVVELLLANLLFCFDWRAPHGGVVDLEQETGLTVHRKHPLVLVARRVRVQAPSDDELDGRFSAMHSVPS

SEQ ID NO: 6818 - protein, 625 aa, Zea mays
  VARIANT 297: note = Ancestral polymorphism is R, Derived polymorphism is W
  VARIANT 346: note = Ancestral polymorphism is T, Derived polymorphism is M
  VARIANT 384..625: note = Derived polymorphism lacks residues 384 to 625
MMSRFAHLGKSRKLAETLLVASKPNTAGGQNIASSFAFGLGYSSRAFLHGKVHNGPNTSYMLGRANDSLHWSTGVRKFSILSSCSQNAFQSQLAWKRLVALGSRAPKASPIFSKVACAIGLAVSRSNIAPYLVAFIAGEVMLAQKTSADGEYYPIRERAQDGRIYVTSLIYSAVELVIIIFRSIYLALLFTPSILMAPFAETLGSKYRKTWLRLVHRTLELAGPAFIKWGQWAATRPDLFPSDLCTELSKLHTKAPAHSFTYTKKTVEKAFGRKLSDIFENFEEDPVASGSVAQVHRAVLRFRYPNRQTKRVTVAVKVRHPGVGDSIRRDFNIINAVAKISRYIPTLNWLRLDESVQQFAVFMMSQVDLAREAAHLSRFIYNFRRWKDVSFPRPLYPLVHPAVLVETYEHGESVSHYVDDLEGHDRIKSALAHIGTHALLKMLLVDNFVHADMHPGNILVRVAQPKNSNNTLKKSRPHVVFLDVGMTAELSSNDRVNLLEFFKAVARRDGRTAAESTLKLSKQQNCPNPKAFIEEVERSFSFWGTAEGDAIHPAECMHQLLEQVRCHKVNIDGNVCTVMVTTLVLEGWQRKLDPDYNVMKTLQTLLFKEDWAKSLQYTIQGLMAP

SEQ ID NO: 6819 - protein, 197 aa, Zea mays
  VARIANT 7: note = Ancestral polymorphism is G, Derived polymorphism is R
  VARIANT 23: note = Ancestral polymorphism is R, Derived polymorphism is H
  VARIANT 68: note = Ancestral polymorphism is G, Derived polymorphism is S
  VARIANT 93: note = Ancestral polymorphism is A, Derived polymorphism is V
MTMARPGAALPLLLVVVGACCARLAAAVHLSALGRTLIVEASPKAGQVLHAGEDTITVTWHLNASASSVGYKALEVTLCYAPASQEDRGWRKANDDLSKDKACQFRIARHAYAGGQGTLRYRVARDVPTASYHVRAYALDASGAPVGYGQTAPAYYFHVAGVSGVHASLRVAAAVLSAFSIAALAFFVVVEKRRKDE

SEQ ID NO: 6820 - protein, 305 aa, Zea mays
  VARIANT 116: note = Ancestral polymorphism is P, Derived polymorphism is L
  VARIANT 107..305: note = Derived polymorphism lacks residues 107 to 305
  VARIANT 77..305: note = Ancestral polymorphism lacks residues 77 to 305
MFLSPNALRFLFCSFKSARWCLFFIQQEVYMVVSIGLDVKPGSTVKCEPGYGFMLHLSQAALGNRRRVIMRYCLDHLISSISSRSDHNFFVSLTSCLPSSTMDLDSEDEDEELNVPVVKENDIFNNDLGGPYAFLEFNSLISGFNIVPMSPMFNVMAWAQPRVASPHGANHTGKVDGKKQKSQEKAVPAASKSSPASKKSKDDDDSDEDETDDSNEDETDDSDEGEGLSPEEGDDDDSSDEDDTSDDEEEDTSTPKKHEAGKKRAAESSVLKTPLSDKKAKVATPSAQKTGVPLNGLTKLSSKIV

SEQ ID NO: 6821 - protein, 229 aa, Zea mays
  VARIANT 41: note = Ancestral polymorphism is V, Derived polymorphism is A
  VARIANT 49..229: note = Derived polymorphism lacks residues 49 to 229
  VARIANT 51: note = Ancestral polymorphism is C, Derived polymorphism is R
  VARIANT 57: note = Ancestral polymorphism is G, Derived polymorphism is V
MEGVPLALTCPRRSPLPIAGARMLIPAQKVGAIIGHKGERVRRLCEETRACVRIIGGHLCEAEQAVIIFGREQLDEPLPPAMDALLRVYQQTINNDSLDVGPDNVIVRQILAPSEQAASLIGEHGVMINSIMEASQTVIRVLGNELPSDLIDTLLKWIPSNDEELRLRLSSRSTATPHASVAAFASAPVSHTAPWLGKFIAFEPFNVGGFDWAIYFYPDGKSGEDGMLK

SEQ ID NO: 6822 - protein, 388 aa, Zea mays
  VARIANT 203: note = Ancestral polymorphism is K, Derived polymorphism is T
MPEVGQYGYKKTDGICDSVCGEPVSKTALTMSRLKCALRGFDLRALMVLLIGVPILILMIYAHGQKVTYFLRPIWESPPKPFKTIPHYYHENVTMENLCKLHGWKVRDFPRRVFDAVLFSNELDILEIRWNELSPYVSEFVLLESNSTFTGIKKPLHFKENKHRFGFAKSRLTYGNIGGRFVKGENPFVEESYQRVALDRLLKLARIEDDDLLIMSDVDEIPSGHTIDLLRWCDGIPDILHLQLRNYLYSFEFFLDDKSWRASIHKYQAGKTRYAHFRQADELLADSGWHCSFCFRYISDFAFKMQAYSHVDRIRFKYFLNPERIQDVICRGADLFDMLPEEYTFQEIIAKLGPIPSTYSGVHLPSYLLRNVDRFRYLLPGNCRRESG

SEQ ID NO: 6823 - protein, 263 aa, Zea mays
  VARIANT 169: note = Ancestral polymorphism is E, Derived polymorphism is K
  VARIANT 165: note = Ancestral polymorphism is V, Derived polymorphism is A
  VARIANT 137: note = Ancestral polymorphism is A, Derived polymorphism is T
  VARIANT 40: note = Ancestral polymorphism is P, Derived polymorphism is L
  VARIANT 8..263: note = Derived polymorphism lacks residues 8 to 263
MADAEDIQPLVCDNRTGMVKAGFAGDDAPRAVFPSIVGRPRHTGVMVEMGQKDAYVGDEAQSKRGIRTLKYPIEHGIVSNWDDMEKIWHHTFYNELRVAPEEHPILLTEAPLNPKANKEKMTQIMFETFNTPAMYVAIQAVLSLYASGRTTGIVLDSGDGVSHTAPIYEGYALPHAILRLDLAGRDLIDCSSALDCVCSKDIIQNLTERFYSLHNYCIAFFVEYYLLGDGLLLLLAGLRTDGLQSIVGAWYQRGRQGCTCSQS

SEQ ID NO: 6824 - protein, 747 aa, Zea mays
  VARIANT 4..747: note = Derived polymorphism lacks residues 4 to 747
  VARIANT 15..747: note = Derived polymorphism lacks residues 15 to 747
  VARIANT 294..747: note = Derived polymorphism lacks residues 294 to 747
MDLRYSHAWPRINAWDLVVKVKYGDTLKRFNVSVNGSHLEHDLPALRLKISIAFKFNSDTEYTLTYTDDDGDDVMLDDDNELRDAAVNQKLNPLRISVQLKGGNVETARTEQHTTNLKSTRSTSLEDELAQVKSAIDEALQFVPEQIPAVLAKLSHDLHSRAALSAPTLAELLYRIVELVVRSSNIQPSGGSGVGSQKIGNSKAKLETTTMSVSASNSPDMQNPETPENGLKSVLLENPAAKKDQVSLCPSVEDSLVFTSLGGRKSEPKRNADNETEIKLDARSKEGKSFGSSYRGLDANFGSIAQCEHHRWVQCYGCGVTHIVGSRYKSDLEDEYDLCDDCFSHIDNGAEYTRLDSSASRCAPVAKTNSLLKDVTVPDGTTMAPSHPFTKIWRVRNNGSTRWPYGTKLVWDGGHLAPPSTVRSPISVNGMINPCEETDVAVDFLAPARPGRYISYWRLALPSGQRFGQRIWVYIKVVTLPLPAFGLCHIDAYIYLVEQPIQSSGGKQAAVNQAKLKRLTLDIDSNIFYSEHFYGCPGIPEANSKPFTPYIETNNVFSESFPRCPGSFQETMKLEESRPARGDMLSVPTTVAPVQIPATDVSAESSLDSIPGGVTASEAFALPNPLPMLPVSSSAPVVDDYVHMCAPAASIAPVPATPLPEQVVNHMEGKLMGELEGLGFMQADLNKHILRQNNYDLDQSVAHLRDYDAWDALEFFKLVRFGEGGQADPEDEQTHWQQTILYFSDPI

SEQ ID NO: 6825 - protein, 202 aa, Zea mays
  VARIANT 110..202: note = Derived polymorphism lacks residues 110 to 202
  VARIANT 68: note = Ancestral polymorphism is E, Derived polymorphism is K
  VARIANT 42: note = Ancestral polymorphism is G, Derived polymorphism is E
  VARIANT 37: note = Ancestral polymorphism is L, Derived polymorphism is S
MKRKSSATTDLRAFIARAAAKKKDIVAPSSNEREMQLVIFQGQIETSNATPAEQERVEPEPPIIVDAEDNDDFESVHLNGTASTQAEYMIEALSLGEIETGQGLNQEMGLARPGVIDRQLVELNNRFDEVNTELLRCMASFNPSKNFDGFNTEKLVKLAGFYPQDFEFEEKVVHWNGSAESPDLVCRGLVFQTIYGTGLEVH

SEQ ID NO: 6826 - protein, 385 aa, Zea mays
  VARIANT 23: note = Ancestral polymorphism is P, Derived polymorphism is S
  VARIANT 18: note = Ancestral polymorphism is A, Derived polymorphism is D
MKIVHRDLVRNGPGSVKAYGRAPQLVPEEEDDLWHAYNLIAIGDSLQAVTVRKVLREVASGGRDAERVKLKLEIVVESVDYDKEGSVLRVRGKNITENDHVKIGQFHTLELELKRPFVLRKEIWDWLALETIQQACDPAASADLAVILMQEGLAHLFLIGKSITATRARIETSIPRKHGPAIAGYETALKKFFEYVLQAFLKHIDFEVVQCTVIASPGFTKDQFRDYLFLEAARRDLRVIIENKQRLVLAHATSGYKHSLKEVLDTPGVMALIKDTKAAQEVRALQDFFNMLTNESARACYGPKHVEFALQQFAIQTLLITDTLFRNADIATRQRYVKLVEDVKKNSGTVHIFSSMHVSGEQLAQLTGIAAILRFPLPELEDMEL

SEQ ID NO: 6827 - protein, 175 aa, Zea mays
  VARIANT 94: note = Ancestral polymorphism is R, Derived polymorphism is C
  VARIANT 25..175: note = Derived polymorphism lacks residues 25 to 175
MRGGGARAPTRTSSQRRARRRGRWRGRRARRRHCRGGGTGGTRLWRGEACGGSSAEAGERGLAAGSTGVWGSGPEPPSPEEDNEQEQQSYCDHRGSDGGDGVDYGQARETTVEQLEGGAAGGGEKAWQWTEARGDAGRVCVRGSDWGLGKGMGMAGPSICQPSSTRIKINNESSA

SEQ ID NO: 6828 - protein, 302 aa, Zea mays
  VARIANT 221: note = Ancestral polymorphism is A, Derived polymorphism is V
  VARIANT 116: note = Ancestral polymorphism is S, Derived polymorphism is L
MSCGRGSTGEVEGGKSVAAMTPWHDSLAPPPRVLISHRPSDASGQGIVLSLQHPRSGDEVGYLFIDGQLQEINWFKERYGAWFLGDYVCEDGGLYYCTPVDPIFIFLPTFEAARMSNDKDPGKFRQLDEILYVEGYPGYQQLMNVANHHMELVCEVKEVSNMKFFRLDNSKVLSWLCCKVYDLKEVFPKLGKNYAAQTEKEKLKEAVQMIREYLKDEPWLALLCKKLQLDINAITVDATTKTAEASVYADSCPAPALPSESKTANGGAKSSKGRPAKKAKTEVGSKNIKDMFRRVTRSGSGS

SEQ ID NO: 6829 - protein, 355 aa, Zea mays
  VARIANT 262: note = Ancestral polymorphism is D, Derived polymorphism is G
  VARIANT 120..355: note = Derived polymorphism lacks residues 120 to 355
  VARIANT 101..355: note = Derived polymorphism lacks residues 101 to 355
  VARIANT 92..355: note = Derived polymorphism lacks residues 92 to 355
  VARIANT 70..355: note = Derived polymorphism lacks residues 70 to 355
  VARIANT 38..355: note = Derived polymorphism lacks residues 38 to 355
MRGGDRPSASLQLLSLGLVLLYFFTSGSTVGLVEGQLQKTWCIAKPSASNEILAQNLDYACSQVSCAVIQKGGPCYYPDSPVSRAAVAMNLYYAYSGRHPWNCYFNNSALVVQSDPTVLQLTFRSELVDTPFRIHVEDRLASESEQQHQEQKESPPPPATAKATATTRQTEASPFSDTMTASPLLFLDPAAPAPAPGSSSGPALDFLTAATQEGKHIQQEDDDNDGGGDGDEEDIARLMELLGLSSGGGGSSRRDDDGGGCDCSGADGFLAKVVGVVGPKCDREKGRLDAWIRHYHRGGGREPARLAHLLLARAAADTAAVAFPASVKDFLDHDPPRQLTDESEWSDANGDNNRD

SEQ ID NO: 6830 - protein, 300 aa, Zea mays
  VARIANT 40: note = Ancestral polymorphism is P, Derived polymorphism is H
MAEIPVIDLRLAGSSPDESARLRDACERLGCFRVTGHGAPAGLLADMKAAVRALFDLPDDAKRRNADVIPGSGYVAPCPANPLYEAFGLLDAAAPADVDAFCARLDAPPKVRETVKTYAEKMHDVIVGVAGELATSLGLGLEEHSFQDWPCQFRINRYNYTQETVGSSGVQTHTDSGFLTVLQEDECVGGLEVLDPAAGEFVPVDPVAGSFLVNIGDVGTAWSNGRLHNVKHRVRCVAPVPRISIAMFLLAPKDDRVSAPEALVDAGHPRRYKPFNYDDYRRLRLSTGERAGEALARMAA

SEQ ID NO: 6831 - protein, 249 aa, Zea mays
  VARIANT 4: note = Ancestral polymorphism is A, Derived polymorphism is E
  VARIANT 199: note = Ancestral polymorphism is L, Derived polymorphism is R
  VARIANT 200: note = Ancestral polymorphism is P, Derived polymorphism is S
MEKAIDRQRVLLAHLLPSPSATSSQPQLAASACAAGDSAAYQRSSSFGDDVITARTITVSIEEIIRTACVSLQCLQDPNMQGQARRLQGHLPRGPPHCCSQGSLPFKVNRQCSSRLQAVADVVAAIKVDKHILESTGLSSAPMGITSENVAHRYGVTRQEQDQATVSSSLSIDCNSSQVSDGAGAVLLMKRSVALKKGLPILGVFRSFATVGVDLAVMGAGARRVATLLNEMKRRGRDCRFGVVTMCIG

SEQ ID NO: 6832 - protein, 178 aa, Zea mays
  VARIANT 11: note = Ancestral polymorphism is R, Derived polymorphism is Q
  VARIANT 15: note = Ancestral polymorphism is H, Derived polymorphism is D
  VARIANT 136: note = Ancestral polymorphism is A, Derived polymorphism is E
MAKADARTRGRAASHVPTPTWAQRTEALTHVLTHPSHAPSLQSQLFLASRVPCPPRGLGSTTSYPPFLCPGASLLRWALASVFLPRAASLCLPPSSWRSRCPFQLPPPVVPSAAIEPAPERWADSELRAYARRRRERRGPLTVRPPVAVVGVVLTTVPNVVIVVAFVKEYFWGRTSRI

SEQ ID NO: 6833 - protein, 245 aa, Zea mays
  VARIANT 168: note = Ancestral polymorphism is R, Derived polymorphism is W
  VARIANT 166: note = Ancestral polymorphism is R, Derived polymorphism is M
  VARIANT 165: note = Ancestral polymorphism is R, Derived polymorphism is C
  VARIANT 115: note = Ancestral polymorphism is C, Derived polymorphism is Y
MHACFHGGGGGNSRITKSVGFIVKSMKALSLLKVKTAGDGHPHAPRRRRRRHRRRSPEADELQDKDVAAASSSASSSAKIAPAQPHEAADGDLRRDRLPQDEELRRQGGAKHGHCDKCCSPLEDDDEEAAAGTADAAGDGEWAAEPEPGVLMTLWPRGDGSNYLRRIRFSEEYFGDAWAAQTWWADNCDRIVELYSVVVQPEHPSQDGDDDDDDDDPAAPVTPCQSEDDEHQRQNLVSLHFAAAF

SEQ ID NO: 6834 - protein, 396 aa, Zea mays
  VARIANT 157: note = Ancestral polymorphism is K, Derived polymorphism is N
  VARIANT 276: note = Ancestral polymorphism is L, Derived polymorphism is R
MTRLLLLSLLLSVAAGAYDGAGQPPISRRSFPEGFIFGASSASYQYEGGVTEGRRGPSIWDTYTHQHPGMFCFFEKKNIFLPPSHANKIIDRSNGDLAIDSYHLYKEDVRLLKDMGMDAYRFSISWTRILPNGSLSGGINKEGIRYYNNLINELLLKAFCSTGYASGVLAPGRCSPWEQAKCSAGDSGREPYTVCHHQLLAHAEAVHLYKEKYQASQRGKIGVTLNSLWFLPSSPSKSNDDAVRRALDFMLGWFMDPLVSGDYPASMRRLAASFWLFMYPDGFRELLLYIKENYGNPTIYITENGFDEANNMSLPLHEALKDDTRIEYHHKHLLALLSAIRDGANVKGYFVWSLLDNFEWVNGYTVRFGLNFVDYNDGLKRYPKNSAHWFKEILRR

SEQ ID NO: 6835 - protein, 336 aa, Zea mays
  VARIANT 20: note = Ancestral polymorphism is T, Derived polymorphism is A
  VARIANT 165: note = Ancestral polymorphism is L, Derived polymorphism is P
MASNTAALLLLLLLSFQLIAMSLSQTQLSTQDLPALIKIRQQLGNPDALAGWRPDSLCWGWWPAACNEQGRVTKLFLERLNITSTLPPAIGELDQLETLSIIEMPGLGGRIPDSFCNLRHLSLFNLMVTSVSGPIPACLSRTNLTSASFFRSKLNGIIPGSLWKLPYFTYFNAAYNNLVGPIPPLLVHGGTPDRPLGLMLDGNRLSGPIPWTFALERHLLQFRVANNKLTGDPSFLFGRRKTVTGTIDLSGNNFRFNLTGVEMPMQLSFLNLSHNRIYGGVPVSLRDTRVAVLDLSYNDLCGKIPTGGHMVQFKAAAYEHNKCLCGTPLPPCANGR

SEQ ID NO: 6836 - protein, 327 aa, Zea mays
  VARIANT 40: note = Ancestral polymorphism is K, Derived polymorphism is T
MCRSREKSTSASPAFAARTAPSPKARSRNSANFEGAKRKKRRTPECFTFIFSASQNGRFSYGYASSPGKRASMEDFYETKIDCVDGQIVGLFGVFDGHGGAKVAEYVKENLFNNLVSHPKFISDTKVAIDDAYKSTDSEFLESDSSQNQCGSTASTAVLVGDRLFVANVGDSRAIICREGNGTKASLCLFFKPLVTFTRDHKPDQTDERQRIEDAGGFVMWAGTWRVGGVLAVSRAFGDKLLKQYVVVDPEIREEVVDDTLEFLILASDGLWDVVSNEEAVAMTRSIKDPEEAAKMLLQEAYKRESSDNITCVVVHFLHGQGSSGYA

SEQ ID NO: 6837 - protein, 176 aa, Zea mays
  VARIANT 34: note = Ancestral polymorphism is P, Derived polymorphism is T
  VARIANT 4: note = Ancestral polymorphism is P, Derived polymorphism is L
  VARIANT 1: note = Ancestral polymorphism is M, Derived polymorphism is T
MMKPSCVLLLSSLLVATLAATSSSSPPYSVGKHPGWLLVLGRKGRELGQSSGYHYYQHQSKQPEVSSYSLSYISPRTCSTFIPLSAHQRLNHEPEGSIQHNVQTENLTQLSVHGVQLQGVAMEVKKPEEEATARRTADQSGDAETGLIYSADYSSVAMHAASPPTAKPKHRHPTRP

SEQ ID NO: 6838 - protein, 94 aa, Zea mays
  VARIANT 3: note = Ancestral polymorphism is H, Derived polymorphism is Y
MAHAAVVALLAVAVILACLPPPAASSYRGAAALRRLETAEPMDTAQGLREKADVNKGAEEDLSTTGFGAESEREVPTGPDPIHHHARGPRRQSP

SEQ ID NO: 6839 - protein, 495 aa, Zea mays
  VARIANT 18: note = Ancestral polymorphism is I, Derived polymorphism is V
  VARIANT 24: note = Ancestral polymorphism is L, Derived polymorphism is H
MAPFRRWADLPADLLCRIGDRLDLKWYASARGACTAWRCALAPPSPALLVVANDARWCPYAASLPTRRSFELTAIVSGSRCVGSSNGWLALSVVLFSGGTIFVLLNPIAAVEILLPPLIYESRWVSKVVFTPNPAKDDFAAAAICDIDRIAYVTAGARRWAVIDPVRLTNGDQLTDVVYTDKGRVYCLTKCGDVHVLRLPERRCRKPANADEAGPSEPPFSVLQPPQPAERTNNCRPLRWQHLRNFRMMRHEQAQTRDQDPTIPLRVTFCAETFIPYKKFPPESQGPHLNAPATVEPLLCEANLPFDPATVFPPPYDTVSSFTSAKNLVFCEGNLYQVWRNASCTVTLQLPTGGQRRVAENEILVLRYYPRRQPCWDVVKNLGGHSLFVGRNNAVSMYAEGVPGLRGNCVYWIGGRGRDQGMVFDMESGSSTPCRAPPVSLLPGHPHSTICWYFLSDLMSINNSYNSSCSSSSGGRKVYQTRARARADLGQDMEE

SEQ ID NO: 6840 - protein, 703 aa, Zea mays
  VARIANT 140..703: note = Derived polymorphism lacks residues 140 to 703
MEGHVAMEWNDPNPGPESLTSFQTEAVRPDTAGGHSNDDVEAGFEKHGLAVTVRPPEEEARSVPLTPQLGQKSSPGSSLAERMQARAGFMVSKLNMPFSTAAGADNSVPEVPSPYLTIPPGLSPATLLESPVFVSNSMGQASPTTGTLFMFGSTNDNDPIRFGGGPPSVGDGPNAFPFKPLDLKSSHYTAEAMKEQNTKSSVKTETKILTVQEASLLSQLNQLNHNSQTIINSGGPHDPKLSRPASGAGAGNEHISPPDHGQTAEESDAREDYPAMATTTPAEDGYSWRKYGQKQVKHSEYPRSYFKCTHPNCLVKKKVERSHEGHITEIIYKGAHNHPKPTQSRRPGVQPVHPFGDSAQADAADNLGSQANALDANQPRRAGVQDGMDATSSPSVPIERCDSPASMQVDSATRFGSPEGADVTSVSDEVGGDDRVTRGSMSQGGADAEGDELECKRRKLESYAIDMSTASRAVREPRVVIQTTSEVDILDDGYRWRKYGQKVVKGNPNPRSYYKCTYPGCVVRKHVERASHDLKSVITTYEGRHNHEVPAARNSGHPGTAAATGAGGPRRLEHPSLRDGLMGHLGGCGVPFGLPPPRDPLAPMGNYPTYASSIPLGGAGPTSLPSLPVPAGTLSAVDGLKLPMLAPSSLQQHPLLRHRQAMQAAGLVAPKDDVKVEGNVAGGAAPSVYQQMMCSGLRLRQQM

SEQ ID NO: 6841 - protein, 281 aa, Zea mays
  VARIANT 174: note = Ancestral polymorphism is A, Derived polymorphism is V
  VARIANT 94: note = Ancestral polymorphism is N, Derived polymorphism is K
  VARIANT 74: note = Ancestral polymorphism is A, Derived polymorphism is V
  VARIANT 6: note = Ancestral polymorphism is Q, Derived polymorphism is R
MLPPKQLLTIVIIIFSTLSFIKLLLLTSSSSSSAGFTSRSSPAWDADGGGNGTARSALASKELALLRSVIAARAPCRLLVFGLSPQLLALAKLNFGAGAGAATAFVTDSADDADAARRALLSDRGAGSTAAAAVHQTRYRDAAAEAWPLLRRARGSPACRRPTGTVRKSGCPLALTSLPREVLDARWDVVVVDGPSGAAPEEPGRMGTIYTAAALARAMAGGEAVDVAVHDVDRTVERWYAWEYLCEDNLVAAKGRLWHFRIAAGAGPTDAFCSIGPVHIL

SEQ ID NO: 6842 - protein, 550 aa, Zea mays
  VARIANT 18: note = Ancestral polymorphism is A, Derived polymorphism is S
  VARIANT 211: note = Ancestral polymorphism is S, Derived polymorphism is I
MAAADASAETAAIARRLASCNTGTRERALRYLLSDFLPASAPRLSATDLLKLWKGIFFCFWHADKPLYQSSVATRLASAVSAPPSPTDGTAFLAAYLTTLRREWAHIDVHRLDKFYLLNRRFLHHAFLLLRANSFAPDVTSQVVSVLSDKALLPEADNVAAATSRGLGYHVAEAFLDELLPVLPVSLETMDTLLAPFFTVLEKSTDRVMVSKVKAGVFERLLDSGSRLLEMVKKGEEVEKGDAEEKLGKVGLLFGFSKRFLDIGAMAETVQSNRKVVFGLRDAFVKIEKGLQLSGLEIPAPKFEATEVPVPPNVGKGKAQKKKKAKKAALAEGEMEEDNDLKREKKIKKEKKEKKRRKVEVVDEGDVTEKSTNAPGADQQMGDGTDGITFDAALKSNLQKQFEMVAAEAGMAEGGSSSSDSPVTPVTGKVATKRKRSKSADKLSEASAGDGGSEGNLLAQDGEKSGKKVRFSMKNNLVWRPHNPLPPQCLRLPPSATPRGSALKKGVQPGPITPTPLKKAKPKAKSAKKVLKKPPSSAVKRLRKLQSFSA

SEQ ID NO: 6843 - protein, 472 aa, Zea mays
  VARIANT 7..472: note = Derived polymorphism lacks residues 7 to 472
MNSRALQLQLQAAAAAAPVHAGEDGEPEATPKAPLLKIQGQGSGLARSMGTTTGNATKCPECPKWFPSLKAMCGHLRQHPDRDYRGATRPTPATISAAAAVSVAVAGDNEPTNKVPRKESVVVAINMVAAAATAVQKQPWEEAETQWPAKAKRGRTHVAPMQASSISEEEEAAMEEEAAMILLEMSRTSSETQRQQQPVEPVRSPYAVSGHQIQTTSVVEELMQQQTPENALELSAESQTSVAKHVTDLVEAVLIMVPANKAIFPSLNSGAGDKKPKKRWVRNPVHTAASTTSPPPPEGAVRTPPAGKMHTCPTCPKSFSTHQALGGHMASHVKNKTTSARHDDHAAAHAVIKPDVLAHSDQSAGNGDVDIIPASSGAGKGGALQERQDAQPPPARAPTPPQTSAPHKCDECTKSFSSGQALGGHKRKHWSLEKQQARAALFAPVIEPEPELRDFDLNELPKEEQDEDNNQP

SEQ ID NO: 6844 - protein, 187 aa, Zea mays
  VARIANT 135: note = Ancestral polymorphism is F, Derived polymorphism is S
  VARIANT 49: note = Ancestral polymorphism is T, Derived polymorphism is N
MSYAYLFKYIIIGDTGVGKSCLLLQFTDKRFQPVHDLTIGVEFGARMINIDNKPIKLQIWDTAGQESFRSITRSYYRGAAGALLVYDITRHLLRLLEQSTRKSKMAFSMYLMRYSPIVKNVICPPGTLVLLSITFCLLTARILLPAHEYDLIHLLSNSQSYGIKVGYVVPGQSGGAGSSSQGGGCCS

SEQ ID NO: 6845 - protein, 459 aa, Zea mays
  VARIANT 28: note = Ancestral polymorphism is S, Derived polymorphism is N
MMMMMAGEHVLAALATLLLASLLTLVLNHFLPLLLNPKAPRGSFGWPLLGETLRFLTPHASNTLGGFLEDHCSRYGRVFKSHLFCTPTVVSCDQDLNHFILQNEERLFQCSYPRPIHGILGKSSMLVVLGEDHKRLRNLALALVTSTKLKPSYLGDIEKIALHVVGAWRRHGGVRVVAFCEEARKFAFSVIVKQVLGLSPEEPVTARILEDFLAFMKGLISFPLYIPGTPYAKAVRARERISSTVKGIIKERRSAGSWNKQGDFLDVLLSSNELSDEEKVSFVLDSLLGGYETTSLLISMVVYFLGQSAQDLDLVKREHDSIRSNKGKEECLTSEDYKKMEYTQQVINEALRCGNIVKFVHRKALKDVKYKEYLIPSGWKVLPVFTAVHLNPSLHGDAQQFQPCRWEGTSQGTSKRFTPFGGGPRLCPGSELAKVETAFFLHHLVLNYRTDSVNPHARK

SEQ ID NO: 6846 - protein, 99 aa, Zea mays
  VARIANT 29: note = Ancestral polymorphism is G, Derived polymorphism is S
  VARIANT 70: note = Ancestral polymorphism is P, Derived polymorphism is R
MPSEKSRSKAMVLVARTDGVSSMEIAGDGKDQLVVVGVDVDTVCLVMCLRKKLGYADILKVEEVKDKKPPEGPKVVDPLPYYCPCYYGYYCHHHNNPWC

SEQ ID NO: 6847 - protein, 94 aa, Zea mays
  VARIANT 13: note = Ancestral polymorphism is K, Derived polymorphism is N
  VARIANT 65..94: note = Derived polymorphism lacks residues 65 to 94
MEWWQKAVVVPVKRAWIAAAARLTTRHKKEDGGHGVLVKLHDDVQTCAYEDVQVMWEMLQRAETERLAREPSPKGARALVWLRRHHKMDPRRRC

SEQ ID NO: 6848 - protein, 411 aa, Zea mays
  VARIANT 195..411: note = Derived polymorphism lacks residues 195 to 411
  VARIANT 131..411: note = Derived polymorphism lacks residues 131 to 411
  VARIANT 30: note = Ancestral polymorphism is A, Derived polymorphism is D
  VARIANT 6..411: note = Derived polymorphism lacks residues 6 to 411
MAAPQQRRRQPSAPQQQHQNGRIDLRDLKAQMLKRLGPDRSRRYFGYLNGYLSERLSRQDFEKLCLQTLGQENLQLHNRLIRAILYNAYQGKCPPPPLDAGRPVGSSVKKASQAAEVLNTCNSDAKLLQVQGLRSVATAQDHTLKDSMNNMGPKCRVAAVNHNQVTHGASGSLENGTINPIELKRLHFQQCEPVEPPAKHPRVEQLPPNNMLLQRSMSSTAERSAEILRSPVRAPLGIPFCSASVGGARKFPPPPIVTGEDHFNSCFEDGGLFSTELLHRRMEKTAETLGLAGVTMHSAELLNIALDEYMKNLIRSSVELVGGSVQRDARKGTLPHKNQVYGNRINGVWLPNHVHMQSGSGSSGTTNEIGSNQLISVSDFKVAMQLNPQHLGENWPVLLEKICLCSSEEND

SEQ ID NO: 6849 - protein, 371 aa, Zea mays
  VARIANT 232..371: note = Derived polymorphism lacks residues 232 to 371
  VARIANT 170: note = Ancestral polymorphism is R, Derived polymorphism is C
  VARIANT 79: note = Ancestral polymorphism is N, Derived polymorphism is S
MSVSASSPAAAAGDEKQEAAPVRRCKGVNDLDKVVLREVRGSSAEVYLYGGHVTSWKDEHGDELLFVSNKVLLFFCFHNLPVVYQLYGTFFLGAIFKPPKAIRGGIPICFPQFSNFGNLEPHGFARNRTWSVDDDPPPFPVPTSNSAYIDLILKPTEDDLKIWPHSFEYRLRVALSPGGDLMLTSRIRNTNADGKPFSFTFAYHTYFKISDISEVRVEGLETLDYLDNLQDRARSTEQGDAIVFESELDRIYLGTPSKIAIIDHEKKRTFVVRKGGLPDAGLFTRFHIFFVTVVWNPWDKKAKAMSDFGDDEYKRMVCVEAAAIEKTVTLKPGEEWTGKLELSAVPSSYYSGQLDPDRVIQDSTVPEDSIS

SEQ ID NO: 6850 - protein, 97 aa, Zea mays
  VARIANT 33: note = Ancestral polymorphism is V, Derived polymorphism is A
MQLASKFVGVSKVGITGDGKDRLEVEGEGVDTVLLVNYLRKKVCRSADIVKVEVKDKKDEKKPEEPPYYCWPNYYYCPPPPPPLPMVERADDSCHVM

SEQ ID NO: 6851 - protein, 132 aa, Zea mays
  VARIANT 69: note = Ancestral polymorphism is G, Derived polymorphism is S
  VARIANT 98: note = Ancestral polymorphism is A, Derived polymorphism is S
  VARIANT 110: note = Ancestral polymorphism is P, Derived polymorphism is A
MTKQKAVIRLGVTNDQNRSKAMQLASRFHGVTLVSITGAGKDQLEVVGEDIDIPCLVNSLRKKVCRSAGIVVVEEVKDKAKVEEEKKKKEEEEKKKKAKELQEAIQKHCPPPPFYGGPPFLCEEQTTGCHIM

SEQ ID NO: 6852 - protein, 136 aa, Zea mays
  VARIANT 42: note = Ancestral polymorphism is L, Derived polymorphism is P
  VARIANT 55: note = Ancestral polymorphism is D, Derived polymorphism is H
  VARIANT 57: note = Ancestral polymorphism is C, Derived polymorphism is S
MKVTYCPTEQPSSAEQPTFHSAPRNRFTYLHAAHHHLSISSLQQKIVIKVCMPCDKCRSKAMGLAAIEGVSKIGITGDGRDQLEVEGDDIDTVCLVNCLRKKVGRADIVKVKELKPEPRGEAARGEGETVLLWPHQ

SEQ ID NO: 6853 - protein, 113 aa, Zea mays
  VARIANT 32: note = Ancestral polymorphism is M, Derived polymorphism is I
MKQKIVIKVCMPCDKCRSKAMGLAAKAGANKMGITGDGRDQLEVEGDDIDTVCLVNCLRKKVGRADIVKVEEVKPAEKKPPEEKEKEKPAEAVPLPYCWYPNPNYYHYYHYQW

SEQ ID NO: 6854 - protein, 290 aa, Zea mays
  VARIANT 191: note = Ancestral polymorphism is G, Derived polymorphism is S
  VARIANT 185: note = Ancestral polymorphism is A, Derived polymorphism is V
  VARIANT 160: note = Ancestral polymorphism is A, Derived polymorphism is T
  VARIANT 108..290: note = Derived polymorphism lacks residues 108 to 290
  VARIANT 74: note = Ancestral polymorphism is P, Derived polymorphism is L
  VARIANT 57: note = Ancestral polymorphism is V, Derived polymorphism is I
  VARIANT 49: note = Ancestral polymorphism is R, Derived polymorphism is C
  VARIANT 47: note = Ancestral polymorphism is A, Derived polymorphism is V
  VARIANT 46: note = Ancestral polymorphism is R, Derived polymorphism is Q
MPRPPRTHAPPSARLPPQSVRRGPEQPSAATLQASFLCSLTLALLRAGRLSAASHVISSLPAPPPACLLRRLIPALASSGLVAAASRFRPVAADTVSYNIFLAGLSEQGHGRLAALVLSEMCKHGVPWDGVTMSTTLMGLCRTKLIGEAAALAETLDMAATLVMVERMTTQGLALDVVGYNTLVARFCHSGDADAAWEVAERMKADGVEPSVVTHTALIGECCKMKQIEEAFTLYEGMVRSGVLPDVVTLSALVDGLCRDGRFSEAYALFRDVQNDDAIRRELASYTRAI

SEQ ID NO: 6855 - protein, 68 aa, Zea mays
  VARIANT 18: note = Ancestral polymorphism is A, Derived polymorphism is V
MEGAAGQMLVPILGIVAVAAVTFYTVSFMEMRDKSFEELDEKYSDFDESGGRQRRSRRRAERDRKKSK

SEQ ID NO: 6856 - protein, 136 aa, Zea mays
  VARIANT 12: note = Ancestral polymorphism is P, Derived polymorphism is S
  VARIANT 51: note = Ancestral polymorphism is R, Derived polymorphism is S
  VARIANT 65: note = Ancestral polymorphism is I, Derived polymorphism is T
MKQKIVIKVSMPCERSRTKAMTLAAGANGVISVAIAGEKLEVVGDDVDPVRLASCLRRKVGHADILQVEEVKDKKPSEDPKPPPAPPAPQPVVVHPPPPHWPHCYPGGYHHHHHHHHHPPPPPVVVCDEPSGCHIM

SEQ ID NO: 6857 - protein, 147 aa, Zea mays
  VARIANT 99: note = Ancestral polymorphism is P, Derived polymorphism is R
  VARIANT 117: note = Ancestral polymorphism is P, Derived polymorphism is L
  VARIANT 119: note = Ancestral polymorphism is P, Derived polymorphism is S
MKQRIVIKVQMTCDKCRKNALALACSTYGVQSVGIEGEERDHQLVVIGDGVDATCLASGLRKKVKAGRADIVKVEAVGDEKEATTKDDAAASSGSNPNPVAGWPPQWYPYHPGYYCPGPGVVHPYAGHCLVEDPCADDEAPWRCTIM

SEQ ID NO: 6858 - protein, 160 aa, Zea mays
  VARIANT 20: note = Ancestral polymorphism is G, Derived polymorphism is A
  VARIANT 21: note = Ancestral polymorphism is H, Derived polymorphism is N
  VARIANT 66: note = Ancestral polymorphism is R, Derived polymorphism is C
MSGEMRKEMVIRVQTSSEKGNSKAIKAAAAISGVESVMTIAGEDKSLLLVIRGVGIDSDRITKKLRRKVGHAEVVELRTVDAAAADHAPYRYYHASPSPSPSPYRYYGGMDHRYGGAGGGYPAAQYQQQHDYQLYHPAAATTHTVVHHEYATDPNGCSVM

SEQ ID NO: 6859 - protein, 156 aa, Zea mays
  VARIANT 26: note = Ancestral polymorphism is A, Derived polymorphism is V
  VARIANT 44: note = Ancestral polymorphism is T, Derived polymorphism is A
  VARIANT 95..156: note = Derived polymorphism lacks residues 95 to 156
  VARIANT 117: note = Ancestral polymorphism is S, Derived polymorphism is C
MLLSSSGGAGAGAASCTSDGGRELVAALLESPGIRHAVDRLKVAPERRISTGGPLSCRDGSYPPYYAANITSRYFFYCKNPQCRLQAKHKGIASQIEIENPSLVKTKNVKVKDIDVCGTLGRQFTCALYTLLSKGMMLCQYSELLLYYVALLGLSW

SEQ ID NO: 6860 - protein, 202 aa, Zea mays
  VARIANT 48: note = Ancestral polymorphism is Q, Derived polymorphism is H
  VARIANT 50: note = Ancestral polymorphism is S, Derived polymorphism is P
  VARIANT 71: note = Ancestral polymorphism is A, Derived polymorphism is T
  VARIANT 73: note = Ancestral polymorphism is E, Derived polymorphism is K
  VARIANT 112: note = Ancestral polymorphism is A, Derived polymorphism is T
  VARIANT 114..202: note = Derived polymorphism lacks residues 114 to 202
  VARIANT 138: note = Ancestral polymorphism is R, Derived polymorphism is W
MSNYVHPQVARNRIDVFGYKKTCGQEINFSLTYIVFLYHHELDDLRTHLPFTQATGEVGEQLDLLQKDVQAREVSQMQLKDIVIRIETDIMDEVAKAFEIATLRGEIRILSTHWMNKTKNLKSQLKKHKRTDQELKKRVLKLEFCLRSCHPLILLCALVTTIENMNLGAWRGGAPTVAHLFLYVQFLEKATCTNSALGSVVG

SEQ ID NO: 6861 - protein, 1418 aa, Zea mays
  VARIANT 54..1418: note = Derived polymorphism lacks residues 54 to 1418
MASSVQMSASNLLRTEGFSGNKGQRYGLISARSLGSRRLRMTQHCFHQKHLCWRHVQRGVVCDIRSLSSPGAVVSKGFDSPLVEKHDTSLDVGVIHFYRIPFLQESETMELLKKVKAKVSANVVDILTEQCFNIQLDNPLTPEKLSALHWLLAETYEPEKLQSRSFLEEEVSKSSCTVIVEVGPRMTFSTAFSTNAVSICKSLSLVEVTRLERSRRYLLRLEPGSGPLNGSELKEFAALVHDRMTECIYSKKLTSFQSDVVPEPVHVVPVIERGEEALEEINVKMGLAFDKQDIEYYTHLFRDDIIRNPTTVELFDIAQSNSEHSRHWFFNGKLVIDGETMPATLFQLVKSPLKANPNNSVIGFKDNSSAIKGFPVNHLRPTIPGSTSPLSIMIRELDILFTAETHNFPCAVAPYPGAETGAGGRIRDTHATGKGSFVVASTAGYCVGNLRIDNSNAPWEDPSFSYPVNLASPLQILVDASDGASDYGNKFGEPLIQGYTRTFGMRLLNGERREWLKPIMFSGAIGQIDHAHISKGDPEIGMLVVKIGGPAYRIGMGGGAASSMVSGQNDAELDFNAVQRGDAEMAQKLYRVVRACAEMGENNPIVSIHDQGAGGNCNVVKEIIYPEGAEIDIRSIVVGDHTLSVLEIWGAEYQEQDALLVKPENKSLLELLCERERVPMAVIGKIDGCGKIVLIDSTAVEHAKLNGLPPPTPVEELELEKVLGDMPQKTFEFKRVSRVTEPLDIAPEVTLLEALKRVLRLPSVCSKRFLTTKVDRCVTGLVAQQQTVGPLQLPLADVAVIAQTYTDLTGGACSIGEQPLKGLLNPKAMARLAVGEALTNLVWAKVTSLADVKASGNWMYAAKLDGEGADMYDAAVALSDCMIELGIAIDGGKDSLSMAAQCDGEVVKAPGNLVISTYVTCPDITLTVTPDLKLGNDGILLHIDLAKGNRRLGGSALAQAFDQIGNDCPDIDDVLYLKKVFEAIQELLSQRLISAGHDISDGGLIVSVLEMAFAGNCGFKLDIDLEDRSLLEGLFAEELGLVIEVHSKYLNIVKQKLEATGISANVIGEVTCSPEIEVFVDGNLHLKEKTSDIRDLWEETSFQLEELQRLKSCVKLEKEGLKSRTSPSWSLSFTPKFTDEKLLIASSKPKVAIIREEGSNGDREMAAAFHAAGFEPWDITMSDLLAGKSSLTVFRGIAFVGGFSYADVLDSAKGWAASIRFNKPLIQQFQEFYHRPDTFSLGVCNGCQLMALLGWVPGSDVGGSLSKGGDITQPRFIHNESGRFECRFTSVSIGVSPAIMFKGMEGSTLGVWSAHGEGRAFFPDENVLATVVKSNLAPVRYCDDFNNITETYPFNPNGSPLGIGALCSPDGRHLAMMPHPERCFMMWQFPWYPKEWQVEKSGPSPWLRMFQNAREWCS

SEQ ID NO: 6862 - protein, 332 aa, Zea mays
  VARIANT 33: note = Ancestral polymorphism is Q, Derived polymorphism is L
MARAGGGGPVRGAALVVVLLGIVVGAARAQLRQNYYGSSCPSAESTVRSVISQRLQQSFAVGPGTLRLFFHDCFVRGCDASVMLMAPNGDDESHSGADATLSPDAVDAINKAKAAVEALPGCAGKVSCADILAMAARDVVSLLGGPSYGVELGRLDGKTFNRAIVKHVLPGPGFNLDQLNALFAQNGLTQTDMIALSGAHTIGVTHCDKFVRRIYTFKQRLAWNPPMNLDFLRSLRRVCPLSYSPTAFAMLDVTTPRVFDNAYFNNLRYNKGLLASDQVLFTDRRSRPTVNLFAANATAFYEAFVAAMAKLGRIGLKTGADGEIRRVCTAVN

SEQ ID NO: 6863 - protein, 600 aa, Zea mays
  VARIANT 301..600: note = Derived polymorphism lacks residues 301 to 600
MRRSCWSRAGNNQHCLPKAAPDAWLVLKDTLCAVQTMKIDDERPYQTHIFHDLASNGSPKLDCEAERQSNHKVEADKMVEQTNQSEVSFVKAEHLNGGKIRKTRIEDYSYDKDVVEIKLPDTDLSSDYGVHFVKDVCIDEGVLPDQKISSEKQVDQKVSINFDSSEYTNGDLREDISADSTKTAHELKTEIVVLPVLCDTHNNNTVEQNSSCKKQDLEDNNTTDVSTDSHDEGLNPKQLPFHEVAQDYQEVDSVIPESNENQDRLFTGDATHQVSSNDCYEAGIGIASEASNIIHNDLPEESAAADFPVVIPEEVAVTAALGMEVSNQVNHYNPFIAYGSLDETWEPNLSLPTTVDAASIAPICPVEKTDSFSDLVNRPLEGFDPIELDEAIIEENRSDSVEESSSTLDVQASEQRDDQRESLTNNDVKTDAAHETGTAISLSTSNGEHSGVKGEKCQKHETDGRDTDDFNPRDVEPGTKVSEDTTDVKSSAHVQTESVVQQNGPDSAKVTTAQTVIRNPFESSFSGPSITSGPLTPSGHIPYSGNISLRSESSTTSTRSFAFPVLQNEWNSSPVKMAKADRRRQKEDRGWGYRILCCKF

SEQ ID NO: 6864 - protein, 907 aa, Zea mays
  VARIANT 210: note = Ancestral polymorphism is A, Derived polymorphism is V
MGRPKGGAASSSKKPKAKQKQRGGVDFKKYKHKVGRKLPPPKNATNTEIKSKAIVLPEQSMASERTGMAVNKRGLTLRELLQQTGHYNANVRRAALNGIKDIVVKHPTELKLHKVAIIEKLQERICDTDKVVRESLYNILQSLIFPSLKEDNTISVRSTLFLLMANILNGTTHLSVEIQLMAFRFLELVVLNFPSSFSSYAEQTFNNFVAVLSNDRINLHDRNKLNSVLSGLGHCLSLVAKTIENDDTSNRQAHNLSARENWKFTTDEDSTGGAFSMSNLLTKLQNLVQILTNSVEVSASELCAKSALDVQSSEALLSALQCLDLICRIFVHEVKKPQLKFSIPKNQHGPDWLRSSLLVHLNNLWGVKRLFHGKGDDKFFIFNLRIAEIFLRLNVWIDNTVFSAEEFCLFVSSLFAKAKTLRNKDLIEIYLSPLITCIPGLISNAPDDSKGYLLEVFTDSFKDCKVDCKLMLPYLDAVGGMLFPVGSLSDTMLNIPLTTEKTSIWLAENDSGVLGYHDIWIHELPGILLQSIDKAPLVTKVALELLLRIGQYFPAVDCGRLRPFMKLFGVESLPGAVDLGPFVKLPRDCQELAISCLYYFPSLLPDVIEPLASCCLSDALEPLILFRAIEVLQSTYKAGSLHITEQLSFLLLLMARFRVHPGDIVTLEDSSKLSNWDTFKSLNRLILTSLSEMGDGSLVLELIWNNLFNAIAQKPSLHNMNGLLRIIVTLDAGTSKLMNGNVVKLIAGYLVDASLDLSKSTEFGFQPDKTRLFQYFLKPCTIMFDKNDKVLCSTLESLKSFVTGGDHLLSSVSNLNYPGELSCRVCAVTTILIFLCNDRKLHRNLSLGKLVIKGILEYIRHQLDSSVPDVTHVGKQKLKSAFEQLKTKALQLNCWDRSELEGFSSAT

SEQ ID NO: 6865 - protein, 163 aa, Zea mays
  VARIANT 15..163: note = Derived polymorphism lacks residues 15 to 163
  VARIANT 17: note = Ancestral polymorphism is E, Derived polymorphism is G
  VARIANT 45..163: note = Derived polymorphism lacks residues 45 to 163
  VARIANT 46: note = Ancestral polymorphism is S, Derived polymorphism is Y
  VARIANT 78: note = Ancestral polymorphism is G, Derived polymorphism is R
  VARIANT 83: note = Ancestral polymorphism is A, Derived polymorphism is V
  VARIANT 109: note = Ancestral polymorphism is D, Derived polymorphism is Y
MWDDANLKQLIEIFKEGIEARNRPHGCWTRKRLEEPWAKAFFFTKSGMKLVKTRLKNKLDDLDGMMQSKLLCARRNGGMKHLARCNNPERGLECGHVKFQKRGPKYLDDLHRLFDKVHVSEGFRIMSGTHQTYREPLLRTDVKVYILRNGGGNRWGSAPPPKI

SEQ ID NO: 6866 - protein, 75 aa, Zea mays
  VARIANT 29: note = Ancestral polymorphism is A, Derived polymorphism is T
MGGRSFFCIFSFSRKSRRYSVDDEEAGDAAWEVPGRLRKVRSSDEDNGWWVGERDVDQKASDFIATFHRQRRLVV

SEQ ID NO: 6867 - protein, 266 aa, Zea mays
  VARIANT 109: note = Ancestral polymorphism is P, Derived polymorphism is S
  VARIANT 86: note = Ancestral polymorphism is A, Derived polymorphism is T
  VARIANT 50: note = Ancestral polymorphism is A, Derived polymorphism is S
MPGPGAHLLYALSGGAALSRLAGPDRRFGPHHCAVYAANAFLGPDLGSFAEWLCSFLPSASAAGDLAMAAVHHPFYYPLLLGLPLAWAYAWLSRRLLRAGVLDSPSGVPLRKRQCFLLISAGSLSHFFLDHLFEENGHSTMYTWILSTGWWKGRAPINPDAVLVVGLLCTCLMGGYVYINRVNHGRSAAEKSNQSFFLILMIATLYCMWCASQIYLRQPPQPAIGEEADLGVIIFLAIYLFLPHGLCALSMNQKDYTDALNELPLQ

SEQ ID NO: 6868 - protein, 154 aa, Zea mays
  VARIANT 72: note = Ancestral polymorphism is L, Derived polymorphism is V
  VARIANT 39: note = Ancestral polymorphism is S, Derived polymorphism is N
  VARIANT 24: note = Ancestral polymorphism is D, Derived polymorphism is E
  VARIANT 16: note = Ancestral polymorphism is D, Derived polymorphism is E
MASKVELVVEVKSPADKLWAALRDSTELFPKIFPEQYKSIETVEGDGKSAGTVRLLKYTEAVPMLTFAKEKLETADDENKVVSYSVVDGELADFYKNFKITLKVTPAKAEGEGGAVVSWAMEFDKANDQVPDPDVIKETATKTFHDLDDYLLKN

SEQ ID NO: 6869 - protein, 115 aa, Zea mays
  VARIANT 19: note = Ancestral polymorphism is L, Derived polymorphism is V
  VARIANT 38: note = Ancestral polymorphism is A, Derived polymorphism is T
  VARIANT 52: note = Ancestral polymorphism is P, Derived polymorphism is L
MAPSKLAVVVALVASLLLLTTSNTKLGLFVLGQAAPGAYPPRAPPPHQIVDLAKDCGGACDVRCGAHSRKNICTRACLKCCGVCRCVPAGTAGNQQTCGKCYTDWTTHGNKTKCP

SEQ ID NO: 6870 - protein, 409 aa, Zea mays
  VARIANT 226: note = Ancestral polymorphism is P, Derived polymorphism is L
MQTNAKHPSVAPAEEDLDTSTTTHLIHSPVSSLHHLSLPLPSPPQIEASQGHRHHHFTAAVDFTLSHSQTKLPSAHGPTAAPPPTPAVSRAARHRGRLLRGGAAPRLSPNYYRRSCPRVERIVSDAVAAKQRANPSTAAGTLRLFFHDCFVNGCDASVLVSPLSSSGAAPERAAEINLSLPGDAFDAVARAKAALEAECPGVVSCADALALAARDLVAALGGPRFPVALGRRDSRRSDARDVEGNLPRTNMSARAMVRLFARKGLSPREMVALAGAHTVGFSHCAEFAPRIYGYRGASHDPRLNPEFARALQRSCAGYRTDPTVSIFNDIVTPRDFDETYYKNLPHGLGLLASDAAIWEYPPTRVFAQRYAANRTAFFEDFAAAMQRLGAVGVKTGRQGVVRRRCDALD

SEQ ID NO: 6871 - protein, 368 aa, Zea mays
  VARIANT 64..368: note = Derived polymorphism lacks residues 64 to 368
MASSSASSRHQVTITLGRSGQVVKRRAMSDDINDGELPLLGKKRSVRDRLGSNVSDSDFYESQQRNKRRQLESNSSHGDDGSGLELKISGTTYSVELACKIFEDRLVGKGDLRLKLMRKGLLPRSNGSAEQNDIDLREKLSRNHKLPNYDSRGHAAESRASYDMRDEPPELSSRYSSREDVLGSRHSSVVSRVPYARSVDDLLKLDYSRKSYPSWTDDGLRHRSPERMLKVRSDMYPRIAYDQIRPMPPLRSAGSSRPQSFITRDAPDTSRSQPYAGKSTISIDTVQRTNGITPSTAALPKAPVMDEAPLTVTGLLNSLGLEKYVVLFQAEEVDLSALRQMGESDLKDMGVPMGPRKKILLAVGPQSK

SEQ ID NO: 6872 - protein, 344 aa, Zea mays
  VARIANT 22: note = Ancestral polymorphism is A, Derived polymorphism is G
MASEVAGLAVVSAAASVALVYARLATSRLAPGTPRLAALLPVLLLLPVLPFAFSSIHLRTVSAFFLVWLCGFKLLLLAAGHDGPLHPALPLVRFVACAALPIKVRDENDKKQQSRISRSSLPSGFLLSYAAKAALFSALVSVRCYRARMPAYAVPVFDGAHVYLMLELFLASAAALARALLGAELEPQFDRPYLASSLRDFWGRRWNLMVPGVLRPCVYRPVRARFGAAAGVLAAFLVSGAMHEVMFYYITLEAGTGEVTAFFALHGACAVAERWMARQGGMWRPPRPVATALTLAFVTGTGSWLFFAPVIRSRLDEAIIAECEGMLAFLERAGRNLAAMAHLI

SEQ ID NO: 6873 - protein, 330 aa, Zea mays
  VARIANT 82: note = Ancestral polymorphism is S, Derived polymorphism is T
  VARIANT 11: note = Ancestral polymorphism is Q, Derived polymorphism is E
MLSLSPLSHLQRRLLAADPKFLAPPLFRSFSRATAPAARKPTTAVAVLWDLAASHPPSTLPLYDAAVRLHLAATSFGRPRLSMAFLHPSHRLPAPAASAATTHLCRVCGRRFRARDALLRHFDAIHAREHAKRLARIDSARGGRRVHLAAALSLKLSKYEKAARELTAGAGTASPSDEIGRAGVRVELSRTPAASLREHAQLVLDEGSARCLMLVSGHEELASLLRVARERGVRSVVVGGESGLARWADVGFSWAEVIAGKARCAAPSVSGKWRDLDVLKGLEWRYEDDDDEEEIVFEDGDGDGVDELARKGKGKPWWKLDSGDEDSSAG

SEQ ID NO: 6874 - protein, 298 aa, Zea mays
  VARIANT 100..298: note = Derived polymorphism lacks residues 100 to 298
  VARIANT 130: note = Ancestral polymorphism is P, Derived polymorphism is L
  VARIANT 169..298: note = Derived polymorphism lacks residues 169 to 298
  VARIANT 280: note = Ancestral polymorphism is K, Derived polymorphism is N
  VARIANT 281..298: note = Derived polymorphism lacks residues 281 to 298
MACSHIAAAGVSSPAAAAARSPAHSPASAFARLRSTPRFASAGLSVKGNGAAFPLVAAAGPAAAAPVADLDGRPATEKQPIIVIDNYDSFTYNLCQYMGELGLNFEVYRNDELTIEDVRRKNPRGILISPGPGEPQDSGISLQTVLELGPTIPIFGVCMGLQCIGEAFGGKIIRAPSGVMHGKSSPVYYDEELGKALFNGLPNKTFRVDAALAPFASMDSPFTAARYHSLVIEQETFPHDALEATAWTEDGLIMAARHKKYKHIQGVQFHPESIITPEGKKIILNFVRFIEELEKQRS

SEQ ID NO: 6875 - protein, 362 aa, Zea mays
  VARIANT 51: note = Ancestral polymorphism is A, Derived polymorphism is T
  VARIANT 60: note = Ancestral polymorphism is K, Derived polymorphism is N
  VARIANT 66: note = Ancestral polymorphism is S, Derived polymorphism is F
  VARIANT 69: note = Ancestral polymorphism is P, Derived polymorphism is H
  VARIANT 72: note = Ancestral polymorphism is L, Derived polymorphism is P
  VARIANT 87: note = Ancestral polymorphism is W, Derived polymorphism is R
  VARIANT 103: note = Ancestral polymorphism is V, Derived polymorphism is I
  VARIANT 176..362: note = Derived polymorphism lacks residues 176 to 362
  VARIANT 191: note = Ancestral polymorphism is T, Derived polymorphism is N
  VARIANT 202: note = Ancestral polymorphism is D, Derived polymorphism is N
  VARIANT 226..362: note = Derived polymorphism lacks residues 226 to 362
  VARIANT 246: note = Ancestral polymorphism is S, Derived polymorphism is L
  VARIANT 271: note = Ancestral polymorphism is T, Derived polymorphism is I
  VARIANT 295: note = Ancestral polymorphism is R, Derived polymorphism is W
  VARIANT 334: note = Ancestral polymorphism is P, Derived polymorphism is L
  VARIANT 355: note = Ancestral polymorphism is S, Derived polymorphism is Y
MRTGSGFVGDASFSRSLPNHPKLPKGKLVAVVVVDGWGEANTDQYNCIHVAQTHVMDSLKNMYMLSFTPAHLLGLRFVGDASLVFSRSLPNHPKLPKGKLVAVVVVDGWGEANTDLNVFKVCFCDFCYVCSEVLALIISPTRELSSQIFNVAHPFFATLNGVSSMLLVGGLDIKAELKKVEEEGANILVGTPGKLFDIMHTDALEYKNLEILILYEDYRFLDMGFQKHINFILSMLPKLRRTGLFSATQTKAVADLSKAGLRNPIRVEVKTEAKSTSKDDGQQELGPSITPLGLRLEYMICEKSKKSSQLVDFLVQNNYWAVVLPLINSLKGSPIIAYHGKTKQSLREKALASFYALSSCFY

SEQ ID NO: 6876 - protein, 180 aa, Zea mays
  VARIANT 3: note = Ancestral polymorphism is P, Derived polymorphism is R
  VARIANT 53: note = Ancestral polymorphism is G, Derived polymorphism is R
  VARIANT 103: note = Ancestral polymorphism is V, Derived polymorphism is A
MDPACEELERRSRYLSALVRRTKFADPPQPEPEAKADVEPPQLKAPPHVGGEGKGGKDEAKAEERTPMKKPRGEAAAAEAEGRKVAVCVRAADMPLPLQRRAVRIALEAVAAMPRLESKRLALALKKDFDTTYGPAWHCIVGTSFGSYVTHSLGGFLYFSVDKAYVLLFRTAVQPLVQLQ

SEQ ID NO: 6877 - protein, 272 aa, Zea mays
  VARIANT 111: note = Ancestral polymorphism is E, Derived polymorphism is K
MASAELSREENVYMAKLAEQAERYEEMVEFMEKVAKTVDSEELTVEERNLLSVAYKNVIGARRASWRIISSIEQKEEGRGNEDRVTLIKDYRGKIETELTKICDGILKLLETHLVPSSTAPESKVFYLKMKGDYYRYLAEFKTGAERKDAAENTMVAYKAAQDIALAELAPTHPIRLGLALNFSVFYYEILNSPDRACSLAKQVCFSAPFDVFLAFDEAISELDTLSEESYKDSTLIMQLLRDNLTLWTSDISEDPAEEIREAPKRDSSEGQ

SEQ ID NO: 6878 - protein, 170 aa, Zea mays
  VARIANT 15: note = Ancestral polymorphism is C, Derived polymorphism is S
  VARIANT 37: note = Ancestral polymorphism is R, Derived polymorphism is L
MSIMHVQRRVRLMSCERLCRKTRIWLGTYETAEDAARAYDEAARLISGPAARTNFPLTGGGGGGTLSPTLRAKLEKCCCTALAQEAQHGADVPRTGAGRGDDGSSRRDRRRDGDEEDEEAGVKVEPDADADGEEYIEEMIRELTYYGPVEIQHHPSAAGGGGACSSSAIG

SEQ ID NO: 6879 - protein, 215 aa, Zea mays
  VARIANT 40: note = Ancestral polymorphism is A, Derived polymorphism is T
  VARIANT 20: note = Ancestral polymorphism is C, Derived polymorphism is Y
  VARIANT 2: note = Ancestral polymorphism is Q, Derived polymorphism is H
MQSRKDQLAREAMASAPAFYVALLLLLASVAAVHAVPPQAGTSSTCSTDLLRLLPCLPFIEGTATVPADTCCANLGSMVHDEPQCLCQALSNPSTAPVAVNMTRVMAMPRLCRLDLPPATGACAVAGLLPHGPSPPLPPPPPPPAAAVTPHASANSSAPATLTTPATPTPTTPRMIPSPSVSSQTPPRYSRGSKMIAHGFSVTLGFVALVSVLAF

SEQ ID NO: 6880 - protein, 151 aa, Zea mays
  VARIANT 95: note = Ancestral polymorphism is E, Derived polymorphism is V
MEEGGGAVSRTLGDEEDKAAERKRQLMGQDLSGLGVKGLQNLENQLEMSICCIRTKKDQLLVDEIHELNRKGSLIQQDNMGLHRKVNLIRQENAELYKKLYEKEAEGEVNRDSTTPYNFVVAEGANVPIHLELNIPLQENGVEQPVAPKLG

SEQ ID NO: 6881 - protein, 87 aa, Zea mays
  VARIANT 39: note = Ancestral polymorphism is C, Derived polymorphism is Y
  VARIANT 27: note = Ancestral polymorphism is G, Derived polymorphism is R
MGRGKIVIRRIDNSTSRQVTFSKRRNGIFKKARELAILCDAEVGLVIFSSTGRLYEYASTSIKSVIDRYGRAKEEEHVADPNTELKN

SEQ ID NO: 6882 - protein, 162 aa, Zea mays
  VARIANT 127: note = Ancestral polymorphism is K, Derived polymorphism is N
MLPMAVHPTSTPSLSPRARVSPPRPSTSLAATSSSPCSRIVSFKSRRLPLRSVRSVVAAAAAAAAEEEENKVVVPERQDPMLVLKFIWMEKNIGIALDQLVPGYGSIPLSPYYFWPRKDAWEELRAKLEEKEWISQKQMIILLNQATDIINLWQQGGGSLST

SEQ ID NO: 6883 - protein, 365 aa, Zea mays
  VARIANT 136: note = Ancestral polymorphism is L, Derived polymorphism is H
  VARIANT 54..365: note = Derived polymorphism lacks residues 54 to 365
MEQEPHRPMELPPGFRFHPTDEELITHYLARKAADARFAALAVAEADLNKCEPWDLPSLARMGEKEWYFFCLKDRKYPTGLRTNRATEAGYWKATGKDRDVFRGKALVGSKKTLVFYTGRAPRGEKSGWVMHEYRLHAKLHGHGHGHGQGAAVVVVPKAAGTKNEWVLCRVFKKSLVVGGAAAAAAPTAGKRGGTETSSNSKTGDVAAISHLPPLMDVSGSGSGAAAAAAAHVTCFSDALEGQFLDQTTTTPPPEAAAAATDDDGHLGALAAASSSAFQLPGFAHYYYGGGAPHLHQHHGAASLVQLLEGSVPPCNKGGERERERERLSASQDTGLTSDVNPEISSSSGQRFDHDHDHHLCCWGY

SEQ ID NO: 6884 - protein, 98 aa, Zea mays
  VARIANT 69: note = Ancestral polymorphism is L, Derived polymorphism is S
  VARIANT 63: note = Ancestral polymorphism is S, Derived polymorphism is F
  VARIANT 28: note = Ancestral polymorphism is T, Derived polymorphism is A
MTTKPAATHCVLVTAVCWYASSVTAVPTHPIRNPLRFRSMPSTPTPTPLLLASCPRWLAANCSLASLCSGAVACGDETKDSGAGDGELKQKSQRPRCW

SEQ ID NO: 6885 - protein, 55 aa, Zea mays
  VARIANT 13: note = Ancestral polymorphism is V, Derived polymorphism is A
MDRNLSGFLIGCVGTAVTLLAYQQTAVTSTQCVAAGFVVILFALFVKEESAVYGN

SEQ ID NO: 6886 - protein, 144 aa, Zea mays
  VARIANT 29: note = Ancestral polymorphism is E, Derived polymorphism is Q
  VARIANT 33: note = Ancestral polymorphism is E, Derived polymorphism is K
  VARIANT 44: note = Ancestral polymorphism is E, Derived polymorphism is V
  VARIANT 76: note = Ancestral polymorphism is Q, Derived polymorphism is R
  VARIANT 106: note = Ancestral polymorphism is L, Derived polymorphism is F
  VARIANT 112: note = Ancestral polymorphism is E, Derived polymorphism is K
MASQAIESHRAGAEVVTGGDAICRKKSIELLEELGLPKGFLPLEDIQEFGYNRETGFMWLVQGKKKVEHTFKKIKQTVSYAAEVTAFAEKGKLRKITGVKTKELMFWLSVVEVYVPEASLEKVTFKTGTGLSDTFDASAFALGE

SEQ ID NO: 6887 - protein, 385 aa, Zea mays
  VARIANT 260: note = Ancestral polymorphism is G, Derived polymorphism is S
  VARIANT 247: note = Ancestral polymorphism is S, Derived polymorphism is F
  VARIANT 244: note = Ancestral polymorphism is L, Derived polymorphism is Q
  VARIANT 243: note = Ancestral polymorphism is L, Derived polymorphism is R
  VARIANT 229: note = Ancestral polymorphism is R, Derived polymorphism is C
  VARIANT 177: note = Ancestral polymorphism is S, Derived polymorphism is R
MAALINPIYRRLAAFACRRISAPAVEKPVLPLVYHRNLQQRHNSSLVDASGGFSEMLASTRRCYVFGGKGGVGKTSMAASLAVKFANHGEPTAIVSTEPSPSLGDLFEQDMGVGGKTVRITGFDSLFAVEAGQFKIKGEPEDLGSFINNLLGKMGLGTHSDIMHVSPYISSLALLLSDHITCACICPFMVAKSMIREMLDGMPPGLEEALVLSKVIKSIDVQEADILRRLVLDAPSTGHTLKLLSASDWIEMFLTLSIKGIKVASSMPSFNMYLEDVQFISARLEELRQQVRRVREILFDPQSTEFIVVTIPTMMAVTESSRFHESLKKDGAHTRRLVINQVLPPSASDCRFCAAKRRLSEGKSCDFRKKHVPSVRYWRTENSAA

SEQ ID NO: 6888 - protein, 144 aa, Zea mays
  VARIANT 24: note = Ancestral polymorphism is R, Derived polymorphism is S
  VARIANT 32: note = Ancestral polymorphism is E, Derived polymorphism is V
  VARIANT 53: note = Ancestral polymorphism is R, Derived polymorphism is H
  VARIANT 76: note = Ancestral polymorphism is Q, Derived polymorphism is R
  VARIANT 116: note = Ancestral polymorphism is P, Derived polymorphism is L
MASQAIESHRAGAEVVTGGDAICRKKSIELLEELGLPKGFLPLEDIQEFGYNRVTGFMWLVQGKKKVEHTFKKIKQTVSYAAEVTAFAEKGKLRKITGVKTKELMFWLSVVEVYVPEASLEKVTFKTGTGLSDTFDASAFALGE

SEQ ID NO: 6889 - protein, 125 aa, Zea mays
  VARIANT 24: note = Ancestral polymorphism is S, Derived polymorphism is F
MRALALTLPALVLAALLSCTPEISAVRVPAATLADQTSNRRGASSPPAAAEQPTRKAASDDDAAAAAAAASSARASRLDDASASWKAPAVAGGASYSPPPSAVFDPDRMSKRRVRRGSDPIHNKC

SEQ ID NO: 6890 - protein, 202 aa, Zea mays
  VARIANT 100: note = Ancestral polymorphism is E, Derived polymorphism is G
MAGESCVPKPLFGGAIFTTFPDRFQDVSNIREVPDHQEVLVDPSRDESLIFELLDLKGEVDDAGSALWFLQDIANEQDAGDNLVVEHSGTLELAALHLGEAPAVAATAVGQLAVSKGRQGREAQNIVRIYLANIRLKNAATDVLITAYEPLLINPLSESAAAVAAGPAIPAEQVGCLPMSEVFKLAVTNFNVRDWNLFDGGP

SEQ ID NO: 6891 - protein, 491 aa, Zea mays
  VARIANT 120: note = Ancestral polymorphism is G, Derived polymorphism is D
  VARIANT 343..491: note = Derived polymorphism lacks residues 343 to 491
MAAAAAASRAFLRPHRCLLLPHTHPLRRRLSTNATASAPAATAASPGVVDVLMKRGLVEAITSEALAAARPGELKVYCGFDPTAESLHLGNLLGLVALSWFRRCGHTAVALIGGATGRVGDPSGKSSERPELGIAAVEGNSDAIKSLVAQILGRVPEPAHRSHSGQKELSLDNSANSSQTMGSFLILDNYDWWKDITLLDFLREVGRFARVGTMIAKESVKKRLASEDGMSYTEFTYQLLQGYDFLYMFKNMGVNVQIGGSDQWGNITAGTELIRKILQVEGAHGLTFPLLLKSDGTKFGKTEDGAIWLSSKMLSPYKFYQYFFAVPDIDVIRFMKILTFLSLDEILELEDSMKKPGYVPNTVQKRLAEEVTRFVHGEEGLEEALKATEALRPGAQTQLDAQTIEGIADDVPSCSLAYDQVFKSPLIDLAVSTGLLTSKSAVKRLIKQGGLYLNNVRIDSEDKLVEEGDIVDGKVLLLSAGKKNKMVVRIS

SEQ ID NO: 6892 - protein, 370 aa, Zea mays
  VARIANT 228..370: note = Derived polymorphism lacks residues 228 to 370
  VARIANT 200: note = Ancestral polymorphism is L, Derived polymorphism is R
  VARIANT 186: note = Ancestral polymorphism is H, Derived polymorphism is P
MARVELLALLCLAGTLGAQATAGPRPDARVGVYELKLGDFSVKVTNWGARLMSVVLPDCKGNLADIVLGRDTVAEYFRLKVVLPTQNDTSYFGPITGRVAQRISRGRFVLDGKVYHLQRNDGRNTIHGGGTAFSKSVWTVKEYVGGGDSPYVTLYYHSFDGEQGFPGNLDAYVTYRVSGPYTLGVHMSATALDRATPVNLLLHAYWNLGGQGSGDVLGHELRLHASRYAVLDEELLPSSGRVAPVAGTPLDFRTPTPIGARIRQVTGGKVVGYDANYVVDGEGMRPVAQVRDGASGRAVELWANQATVQLYTGNWLNHTQGKGGGVYDQYAGFTLETMGYVDAVNHPEFPSQTLLPGQEYKHDMVFKFSF

SEQ ID NO: 6893 - protein, 361 aa, Zea mays
  VARIANT 1: note = Ancestral polymorphism is M, Derived polymorphism is I
MARAAALASSLVLLCLALAGSTDAARKTVGAYRLRNKKGDFSIKVTNWGATLMSVIVPDSKGNLADVVLGYDKLAQYVDASSAFGTVVGRVANRIANGSFVLDGKTIRLNKDGTTTLHGGHRGFNRVIWTVKEYVPGGDSPYITLYYRSFDGEQGFPGDLDVYVTYQLCCGPYELRAVMNATALDKATPVNLANHAYWNLAGSGDALGHLVQVLASRYTPVDAAMIPTGEVAPVTGTPYDLRAPTLLGSRIKHVSAAGMAGFDVNYAVDGDGFRFRRVARLRDPASGRALELWANQPGVQLYTSNWLSNVEGKGGRVYGQYGAVCLETQAFPDAVNHPNFPSEIVRPGGTYQHDMLFKFSF

SEQ ID NO: 6894 - protein, 127 aa, Zea mays
  VARIANT 57: note = Ancestral polymorphism is R, Derived polymorphism is W
  VARIANT 41: note = Ancestral polymorphism is P, Derived polymorphism is L
  VARIANT 31: note = Ancestral polymorphism is A, Derived polymorphism is T
  VARIANT 27: note = Ancestral polymorphism is G, Derived polymorphism is D
  VARIANT 26: note = Ancestral polymorphism is A, Derived polymorphism is T
  VARIANT 13: note = Ancestral polymorphism is V, Derived polymorphism is A
  VARIANT 8: note = Ancestral polymorphism is P, Derived polymorphism is S
  VARIANT 1: note = Ancestral polymorphism is M, Derived polymorphism is V
MSSVEYQPSTIAVASILVARGRETPAGNLDALKAILGSSFPQLDTGHVYSCYSAMIREDDKSPTQSTSTSTGVASSGVSVAAHAGGSGSPSLGASVSVGANNAAGTAPPATTDNRNKRRQLRSPQRQ

SEQ ID NO: 6895 - protein, 261 aa, Zea mays
  VARIANT 51..261: note = Derived polymorphism lacks residues 51 to 261
  VARIANT 24..261: note = Derived polymorphism lacks residues 24 to 261
  VARIANT 21: note = Ancestral polymorphism is S, Derived polymorphism is F
  VARIANT 16: note = Ancestral polymorphism is P, Derived polymorphism is L
  VARIANT 14: note = Ancestral polymorphism is P, Derived polymorphism is L
MESISGEDAPKHNLILSALVSNLQCMLAARRPFTAEVSTAATASEAEALAQEAEASDAPTGDGTLARPIVLLTCAGGEPKTKPQRDRCSDRVQRRCKQGVACGRRGADRLLHVQRSRVTVKQGGRDRRHREGATEAKCKHLGTSVTEAERKSTSLLLQKARRMPTEADFMFGSDKILSKMGEGLGFLQSVVSSSAGYLRYYSNEEGYELDFRRSFVLYPSSDCFFCSTTNMPNMAGRGLEVKPGPTVKCVLGHDFILHFPL

SEQ ID NO: 6896 - protein, 91 aa, Zea mays
  VARIANT 47: note = Ancestral polymorphism is A, Derived polymorphism is S
  VARIANT 58: note = Ancestral polymorphism is E, Derived polymorphism is K
  VARIANT 63: note = Ancestral polymorphism is S, Derived polymorphism is R
  VARIANT 88..91: note = Derived polymorphism lacks residues 88 to 91
MASIITGDFAEAYVRKNACEEETRKAEASTAGGVAAAATPGDKKADASASSEKKVAKEAAAGSNKGEGGSLFGLLKKKVHPKVGGSSGAYS

SEQ ID NO: 6897 - protein, 383 aa, Zea mays
  VARIANT 338: note = Ancestral polymorphism is A, Derived polymorphism is S
MHGRRHLAASLTRALIQAPSRSISSTPSLLQTLDPSVPSPPAAGAGRLAELRRRLQADAPSLGDFTYSVEVGTRQRPLPKPKWMKETVPGGAKYAAIKAKLRELKLHTVCEEARCPNLGECWSGGETGTATATIMILGDTCTRGCRFCNVKTSRTPPPPDPDEPSNVAQAIASWGLEYIVITSVDRDDLPDQGSGHFAETVQKLKALKPEMLIEALVPDFRGDPSCVEKVATSGLHVFAHNIETVEELQRNVRDYRANFKQSIDVLEMAKEYAPPGTLTKTSIMLGCGETPDQVIRTMEKVRAADVDVITFGQYMRPSKRHMPVSEYVTPEAFEKYRALGVEMGFRYVASGPMVRSSYKAGEFYIKAMIEAERAKGTAADSSA

SEQ ID NO: 6898 - protein, 219 aa, Zea mays
  VARIANT 82: note = Ancestral polymorphism is A, Derived polymorphism is T
  VARIANT 112: note = Ancestral polymorphism is A, Derived polymorphism is T
MAGSRAQPSLELSVRVVRVDGLDQEQLERGGTLFLRYYVPAGDGRRRLRVDTREVPCGGDLRWGGELARFERRGGSSGTGGAAPAAGIAFELRWRPRPSSSGLAAALLGAAARARRPSSRVLARAELPWPDVSSSSRPAERWLTLSLSQVGRDRELGGCKAPKLLVEAEAVHAVAGAQVTTGRTPGGVPPECCRAGERCGQCGWIGSEEDMFLAATFSH

SEQ ID NO: 6899 - protein, 513 aa, Zea mays
  VARIANT 176..513: note = Derived polymorphism lacks residues 176 to 513
MTGGGFAAAEGGHARDDYGGGVTVSVVVTCLMAASCGLIFGYDIGVSGGVTQMESFLAKFFPEVSSGTKDAKHDAYCKYDDQRLTAFTSSLYIAAMLSSLVASRVTRTVGRQAVMLMGGVLFLLGSAINAGAVNVAMLILGRMLLGFGVGFTTQAAPLYLAETSPARWRGAFTAAYSIFQVLGALAATVTNYLTNRVPGWGWRVSLGLAAVPAAIVVLGALLVPDTPSSLVLRGDADGARASLQRLRGPGAETDAELKDIVRAVERARRDDEGAYGRLCAKGYGHYLVMVVAIPSFFDLTGVIVMAVFSPVLFRTVGFSSQKAIFGSVILSLVNLASSLLSSFVLDRAGRRFLFIVGGAAMMICQLAMSCILAGHLGKQNAVTMPRDYAVAVLVLMCLYTFSFGVSWGPLKWVVPSEIYPVEIRSAAQALTVSIALCLSFAQTQVFVSLLCAMKHAIFLFYAGWVLVMTAFIAAFLPETKGVPLEAMRAVWAGHWYWRRFVRDAKQEVQVNCM

SEQ ID NO: 6900 - protein, 318 aa, Zea mays
  VARIANT 47..318: note = Derived polymorphism lacks residues 47 to 318
MASSAFLNALVLRSPSPSLSSSSNRRSTGAFAFPNPPRFPCLRSARRLVLARAAAAPAPGDGPEDEWGPEPEGGSAVTGAAVAEAPEAREVAELKAQLKDALYGTERGLRASSESRAKVLELITQLETRNPTPAPTEALTLLNGKWILAYTSFSQLFPLLGFGNLPQLVKVEEISQTIDSENFTVQNCIKFSGPLATTSVATNAKFEIRSPKRVQIKFDEGIVGTPQLTDSIVLPEKFELFGQNIDLSPLKGIFSSIENAASSVAKTISEQPPLKIPIRTNNAESWLLTTYLDEELRISRGDGSSIFVLFKEGSTLLY

SEQ ID NO: 6901 - protein, 557 aa, Zea mays
  VARIANT 6..557: note = Derived polymorphism lacks residues 6 to 557
MPASEEELSNWKGLSRCRRGTNRMAGGVIVPSDGPAADHGGSLTLSVFMTCLVAASGGLIFGYDIGISGGVSEMEPFLRRFFPRVLERMASARGNEYCLYDSQTLTAFTSSLYVAGLLASLVASRVTRAMGRQAVMLMGGALFFAGGAVTGAAVNIAMLVVGRMLLGFGVGFTNQVSLSPLSRTIRSSAPAASLETTHQAAPLFLAEMAPPRWRGSLTAGYQFFLALGVLIANLVNYATAHASWGWRVSLGLAGASAVAIFVGALFLTDTPSSLVMRGRADGARAALLRVRGPDADVEAELRDIAKAVEAARRGEDGAFRRMATRREYRPHLVLAVAVPMFFQLTGVIVLAFFAPLVFRTVGFGSRAALMGAVVLGAVNLGSLVLSTFVIDRYGRKVLFMAGGVQMVVCQVAIAWIMGAKIGKGGEAAMAHPYAVAVLVFTCLHTAGFGWSWGPLGWVIPSEIFPVDIRSAGQAMNVSIGLCLTFVQTQSFLAMLCRFKYATFAYYAAWVAVMTVFIALFLPETKGIPLESMGTIWVKHWYWKRFVHDGKQSNVALT

SEQ ID NO: 6902 - protein, 410 aa, Zea mays
  VARIANT 57: note = Ancestral polymorphism is M, Derived polymorphism is T
MEPFMRRFFPRALERMASAKGNEYCIYDSQTLTAFTSSLYVAGLVGSLVASRVTKATGRRAIMLMGGALFLAGGAVTGAAVNIAMLIVGRILLGFGVGNAMEAWTRNLQMASPSEWWYRSFIYKGLKLSKVLKAQSDVELSQLRKEVSELRKDTAKNTKTLTTLSKDFLECKNMVKGLTEQKDVIQSVLEAKYKRISAEAIKKQEENNSEIFGLLHQLVEGNKKNHDIFDELAEEKKKTTQLLISMAAMQSTVDSLYDICSCCKQHMYDTLSLVRARPKQMIFKDADTSKALRWMDGEVKGFSPVLDSSGDYYALANARGIACILEKADCSHLKMMTLGLKHFAVSFRGMYPYLKDTVAVAGVAEVLEAEVALAFRELVSEGLLKLGAAGSHDHPPVPPPRGGTGEVPEP

SEQ ID NO: 6903 - protein, 164 aa, Zea mays
  VARIANT 56: note = Ancestral polymorphism is Q, Derived polymorphism is R
  VARIANT 57: note = Ancestral polymorphism is G, Derived polymorphism is D
  VARIANT 61: note = Ancestral polymorphism is P, Derived polymorphism is L
  VARIANT 64..164: note = Derived polymorphism lacks residues 64 to 164
  VARIANT 105: note = Ancestral polymorphism is G, Derived polymorphism is D
  VARIANT 116: note = Ancestral polymorphism is L, Derived polymorphism is P
  VARIANT 119: note = Ancestral polymorphism is G, Derived polymorphism is D
  VARIANT 121: note = Ancestral polymorphism is V, Derived polymorphism is A
  VARIANT 127: note = Ancestral polymorphism is G, Derived polymorphism is D
MVRASLLAVREALAVGAAAATRHGADAAPLGPVAILLLAVAATAAVAAIAAFGCAQGAKKPRRQNNNNNAYYYGQGYPPPPAGAYGYPAQAAYGYPAQGAGGRPGRSGLGSGAAGLAVGAVGGLAAGAIIGSALDSGGGGGCGGGGGCGGGGCGGGGCGGGCGG

SEQ ID NO: 6904 - protein, 386 aa, Zea mays
  VARIANT 75: note = Ancestral polymorphism is G, Derived polymorphism is R
  VARIANT 107..386: note = Derived polymorphism lacks residues 107 to 386
  VARIANT 269: note = Ancestral polymorphism is A, Derived polymorphism is V
  VARIANT 342..386: note = Derived polymorphism lacks residues 342 to 386
MDPTTSGERHLCRIGVSRGDDPVGALGESQHSFGFGGTGKFSHQRRFVNYGVKFGVGDTVVCAVDLDSKPMTSIGFARNGEWLGIARHFDAGEKGLGLVDAPLRLMRWGFALFPHVLLKNVIVEMQFSREDGLLPVDGYEPWASAFSQRNSEFGPSFEQNKCEVMMMVGLPTSGKSTWAEKWVKEHQEKRYILLGTNLVLEQMKVPGLLRKNNYGERFERLMDCATWIFNKLLTRAANTPRNFIIDQTNVYKNARIRKLRPFANYRNTVVVMFPTPSELKSRAAKLFNEMGKEIPAEAVNEMTANFVLPLSKDMPHSKEPFDEVIFTELSRDEAQRTLDDMQRVLPRNVTPSYGNSGNQKHYSSTYAGTAAPLDPEATCANQVEVN

SEQ ID NO: 6905 - protein, 38 aa, Zea mays
  VARIANT 19: note = Ancestral polymorphism is A, Derived polymorphism is V
  VARIANT 18: note = Ancestral polymorphism is T, Derived polymorphism is I
MAESPWGLSPFKVRERSIARASKSAIVKYSNKRKRILH

SEQ ID NO: 6906 - protein, 108 aa, Zea mays
  VARIANT 75: note = Ancestral polymorphism is R, Derived polymorphism is H
MEGDRLRCAKSRNPRPLWKEIGISVRVRCAKSRNPRPKSRNPPPLRKEIARRRLGLLCGSNVLHKTTNKGKSWVHYKAVAANLYPVKFLDDNKGFVLGNDGMLLRGLG

SEQ ID NO: 6907 - protein, 493 aa, Zea mays
  VARIANT 196: note = Ancestral polymorphism is M, Derived polymorphism is T
  VARIANT 32: note = Ancestral polymorphism is A, Derived polymorphism is P
MGSIVADADRRPHAVCVPFPAQGHVTPMLKLAKVLHSRGFHITFVNSEFNHRRLLRSRGASALDGLPDFRFAAIPEGLPPSDADATQDVPSLCRATMENCLPHFRSLLAELNSSPDVPPVTCVVGDDVMSFTLEAAREVGVPCALFWTASACGYLGYRYYRDLMEKGIFPLKDAEQLTNGFLDTPTDWALGMSKHTRLKDFPSFVRSTDPDEFMFHFALKVTEQIVGADAVILNTFDELEQEALDAMRAMIPSSASIHTIGPLAFLAEEIVPRGGPTDALGSNLWKEDVSCFEWLHGRAPRSVVYVNYGSITVMTNEELVEFAWGLANSGHDFLWIIRPDLVNGDAAVLPPEFLEAIRGRGHLASWCPQEVVLRHEAVGVFLTHCGWNSTMESLCGGVPMLCWPFFAEQQTNCRYTCVEWGVAMEIGQDVRREAVEEKIREAMGGEKGMEMQRRAGEWQQTGLRATRPGGRSYANLDKLVADVLLSGTSGKSS

SEQ ID NO: 6908 - protein, 80 aa, Zea mays
  VARIANT 38: note = Ancestral polymorphism is E, Derived polymorphism is K
  VARIANT 30: note = Ancestral polymorphism is G, Derived polymorphism is C
  VARIANT 28: note = Ancestral polymorphism is G, Derived polymorphism is S
  VARIANT 23: note = Ancestral polymorphism is P, Derived polymorphism is R
  VARIANT 17: note = Ancestral polymorphism is E, Derived polymorphism is D
MALDATSLPVLSVPALEVCSGTRRTGNGGGVSSAPGAEVSVDVPVLWSDEGRMKRELVAWAKAVASMAIRETMRAELTAD

SEQ ID NO: 6909 - protein, 487 aa, Zea mays
  VARIANT 61: note = Ancestral polymorphism is G, Derived polymorphism is D
  VARIANT 138: note = Ancestral polymorphism is R, Derived polymorphism is S
  VARIANT 185: note = Ancestral polymorphism is P, Derived polymorphism is L
MGSVAADAAGKPHAVLVPFPAQGHVTPMLKLAKILHCRGFHVTFVNSEYNRRRLLRSRGADALDGLPGFRFATIPDGLPPSDTDATQDVPSLCRSTEETCLPHFRALLQCLNASSPDVPPVTCVVGDDIMGFTLDAAREIGVPCALFWTASTCGYMGYRYYRTLIDKGIFPLKEEHLTNGFLDTPVEFAPPGMSKHMRLKDFPSFMRSTDPDEFMVHYAVRVTDHTAGADAVLLNTLDELEQEALDAMRAAVIPPAASINTIGPLALLAEQIVPRGSQLDSLGSNLWKEDASCFRWLDGRKPRSVVFVNYGSVTVMTSAELVEFAWGLANSGHDFLWIIRPDLVSGDAAVLPPEFQEAIEGRGLLANWCAQDAVLRHQAVGVFLTHSGWNSTLESLCAGVPMLCWPFFAEQQTNCRYTCAEWGAAWAWRSATTCGGRPWRRGYGHTGGHGRGEREGDASPRGGVAGDRRARDAARRALVRQPGEAGD

SEQ ID NO: 6910 - protein, 124 aa, Zea mays
  VARIANT 80..124: note = Derived polymorphism lacks residues 80 to 124
  VARIANT 106..124: note = Derived polymorphism lacks residues 106 to 124
MSGPGHARPKVAAASPRLTWSSRNRLASPRARARARVALSLLLLLAIKVATYLQGWHLEVDVGAGILAVDGLFVTAYVAWMRARLDYLASPLQFLTNACVILFLVQSVDRLMLCLGYFWIRLKG

SEQ ID NO: 6911 - protein, 354 aa, Zea mays
  VARIANT 294: note = Ancestral polymorphism is E, Derived polymorphism is K
  VARIANT 290: note = Ancestral polymorphism is S, Derived polymorphism is I
  VARIANT 272: note = Ancestral polymorphism is P, Derived polymorphism is S
  VARIANT 230: note = Ancestral polymorphism is V, Derived polymorphism is G
  VARIANT 169: note = Ancestral polymorphism is F, Derived polymorphism is S
  VARIANT 146: note = Ancestral polymorphism is P, Derived polymorphism is R
MPTYTVRHSLPVGAAAVAGANAKNVSPPPVAAAWPGGGGAEEAVAGGKEEWQLTPLDMGLGVGEGWDVADAVAPPGLAPDHTFLRWIIGGEDASATMGSVMDSPVLELDHAPSMMSLAFGSTMPFAPTLEDAKPGTALVSPASHHRLELNLIHENLSGFARELGVFLQFATYNVDALDPAELVAITSGDAVAVHLPVGSAHVAAMPAVLRLVKRLGAKAFQPCVSLLDSVDAVGGADAEAVGRIERFMVQSDVELRVVSRHRAAAAVDKPPPLPWRTGLASAGLMPVQASTFAESQAEALLKRMALMGFRVEKRGGALCFLLAARSASTVSAASWSPCRRGGADRRGYAAATKS

SEQ ID NO: 6912 - protein, 345 aa, Zea mays
  VARIANT 130: note = Ancestral polymorphism is E, Derived polymorphism is K
  VARIANT 63: note = Ancestral polymorphism is E, Derived polymorphism is K
  VARIANT 58: note = Ancestral polymorphism is F, Derived polymorphism is L
  VARIANT 43: note = Ancestral polymorphism is L, Derived polymorphism is I
  VARIANT 29: note = Ancestral polymorphism is C, Derived polymorphism is F
MEALLELEKMQRVLSLMSSRGLSHTDSSCGGAAADRFLAQFLLFMVQPFDSLTLENKFLLISELLRKATPNTLEEVQHLTHLEGSANKDICSGGSLQPIKKFKMHAEKSTVQAMPMVGFDAMARAKSTLEDFCRSYFMFHGLDVNKPQAIFKYLPVLSFTESYIYQLDASNEDCLHVVPDDNTSKVRPALLRTELKSGIQYWSLERKLCQALLRNEKVNELHMDFLSVSEFLVEISDDLYDYEDDVMNNTFNILRMFAAIYGPLEAPNMLAKCIGEAEEKYESFSKKLDPSLSGSYWRRCEEATKEGGKTSGHAYGTWNIPRVISNEDAFRRERRSKHDACAVIT

SEQ ID NO: 6913 - protein, 553 aa, Zea mays
  VARIANT 160..553: note = Derived polymorphism lacks residues 160 to 553
  VARIANT 170..553: note = Derived polymorphism lacks residues 170 to 553
  VARIANT 243..553: note = Derived polymorphism lacks residues 243 to 553
  VARIANT 372..553: note = Derived polymorphism lacks residues 372 to 553
MCVLLLFDYLVRRYGFLNWDPPSTSQIGSPSRPGSGLRGAATASSVSRDRELSPRLQRSRSSAGGGSKASLSPERRRGVGAMQQRVAQLEEELRREREEKARTVRDLEDLRRDGGAKGVADKVHLLEREVSKSKQSERKMLESLIYQTKQLEQTKISLEEAKLEMATLQQQASKSLASARRGGVLEQRSVRDLMFGGADEEIMVLRAELRAAVQGEERSRKALDDLSAALSDVTAEARQVKAWLSEAQAELEAANAEAGRLRAALRGASDERDRYRLEADECAAAWGDKERVLLDCVRASEGDASRARQENTRLVESQRVVRDENARLRDILKQAVAEASAARDSLELARAENARLSAAVADKDGALQSLRQEYECVRVSEAAAQGSLRELNSLLAATTTTACNTPASSAKTAPAPGYGLDQRLPNGSSKKGTPRSASQRWMPDKPRTPSSRRTYSIGEPGKLTTGFSRSARMGNLNPRDRVFASLSNIADLKSAADAATEDLDDEFDHIDESHYVDTEDSTKHKKSLIFRRFGDFFRRKSLYKPNSAPVHTL

SEQ ID NO: 6914 - protein, 703 aa, Zea mays
  VARIANT 188: note = Ancestral polymorphism is G, Derived polymorphism is C
  VARIANT 557: note = Ancestral polymorphism is M, Derived polymorphism is I
MAALEAAREWAGSVIPPELAAAAGGDPLAALAATAAALVAGLLIIAVWFRSGGGTPSKPVATPVRPPPVKVDADADVDDGRKRVTIFFGTQTGTAEGFAKSMAEEARARYEKAVFKVVDLLERFLGRVQDDYAQEDEEYEEKLKKETVVLFFLATYGDGEPTDNAARFYKWFTEGKEKEVWLKDLKYGIFGLGNRQYEHFNKVAKVVDELVEEQGGKRLVPVGLGDDDQCIEDDFTAWKELVWPELDQLLRDEDDTTGASTPYTAAIPEYRVVFIDKSDLSFQDRSWTLANGTGVIDIQHPCRSNVAVRKELHKPASDRSCIHLEFDISGTGLVYETGDHVGVYAENSVQTVEEVERLLDLSPDTFFSIHADAEDGSPRKGGGSLAPPFPSPCTLRTALLRYADLLNPPKKAALLALASHASDPAEAERLRFLASPSGKDEYSQWITASQRSLLEVMAAFPSAKPPLGVFFAAIAPRLQPRYYSISSSPKMAPSRIHVTCALVYGPSPTGRIHQGVCSTWMKNTIPLEYSEECSWAPIFVRQSNFKLPADPSTPIIMIGPGTGLAPFRGFLQERLALKQSGAELGTSILFFGCRNRNMDYIYEDELQTFLEEGALSELIVAFSREGPTKEYVQHKMVEKATDIWNIISNGGYLYVCGDAKGMARDVHKMLHTIVQEQGSLDNSKTESYVKSLQMEGRYLRDVW

SEQ ID NO: 6915 - protein, 136 aa, Zea mays
  VARIANT 60: note = Ancestral polymorphism is E, Derived polymorphism is D
  VARIANT 43: note = Ancestral polymorphism is R, Derived polymorphism is S
  VARIANT 41: note = Ancestral polymorphism is R, Derived polymorphism is S
MARTKQTARKSTGGKAPRKQLATKAARKSAPTTGGVKKPHRYRPGTVALREIRKYQKSTDLLIRKLPFQRLVREIAQDFKTDLRFQSHAVLALQEAAEAYLVGLFEDTNLCAIHAKRVTIMPKDIQLARRIRGERA

SEQ ID NO: 6916 - protein, 535 aa, Zea mays
  VARIANT 383: note = Ancestral polymorphism is P, Derived polymorphism is S
  VARIANT 321..535: note = Derived polymorphism lacks residues 321 to 535
  VARIANT 146..535: note = Derived polymorphism lacks residues 146 to 535
MAAVVSWYGPLIDLSAAASHVGGFVQLLAVVRRLLPHQEQNAATGRTYQRTIAEVGDDTRSSFSVSLWSSKHNSTIIAGDVLLLQNIKIVQFRNGLEGRASQMSSVQVLLNSKDLLDTEPEGICELISSCKVGNATKSKLRKVAEWIIHTKCALGESHHQMQVVSKNWKLAKENESAHFLSISELISQRKLCNINIYACIGKMVLVSSPTSPLKVNLSVIDRRSFKEHSDIVRDLVTAGCKLCGSPLYHKNLHEENTFALDCPNNPKYLHVPGQIYRPFLIYIYDQSGQVPLLVRNRAAETLFANITADDVSECHNSHMLSETYESCNLSTPGTVDDCGNKEIAKRRKTEQKPNFYLIWLTLIKCLLSQGSNSPFCFQISVNPEKNVEDGRFELVPNETPGNTAIDLAEQASKSFFFLVRIPAVGPGPANSPSGGNLPIPNMPPWAKWLVGAAIVVAIPIYRRFRTLEDKIEKTAEVAIEVVDTVAEAAEKVAGEVAGAFPGNESLREAASRIKAVTDEIEEDAERAEALIEKVS

SEQ ID NO: 6917 - protein, 388 aa, Zea mays
  VARIANT 73..388: note = Derived polymorphism lacks residues 73 to 388
METRQLLLVFCLLGAGMAVVVDAQAQSAPAPPPRQTPSAPPQQTQFGRTMSTFITVAISVFFFLLFVCAYINQCRLADPGAAAAAAAAAAAAGGGGGGPSRRGKRGLDPAVVATFPIVSYREVVEHKIGKGVLECAVCLTAFEDDDDLRLLPHCSHAFHPECIDPWLQSRVTCPLCRANLEKPAPAPAVAPPSPSPRLAPRQPSPPPEAVAIPVSDDGSEGGSSSCEDDRKEEAVELETLRSARRAARMPRSHSTGHSLFAAAAAAAAAEEGDHERFTLRLPEHVREQVLRSRRLRHATSLLNLSDMSSEGSSRGGRGVAGAGSFGNGGGSSHGGRRWQSFLARTVSWARGGGDGSVRRGWDGSTRRGRDGGESSWKGVASPPPTGRP

SEQ ID NO: 6918 - protein, 423 aa, Zea mays
  VARIANT 264: note = Ancestral polymorphism is A, Derived polymorphism is V
  VARIANT 242: note = Ancestral polymorphism is E, Derived polymorphism is K
MAAVLTRAGGRSKRSVSGFHLRSVLAGHGTFSSEAASTAVGDRVVAATGEHDGDDLRSRIFRLGLAKRSATAALEKWSSEGRDAPTAELRRIARDLTRVRRYKHALEVADWMKTHHESDLSENDYGMRIDLITKVFGASAAEDFFEKLPPGAKSLEAYTALLHSYGRSKMTDRAERLFERMKDASLPMDALVYNEMMTLYISVGELGKVEAVAEELKRQNVSPDLFTYNLRASAAAASMDLEGFRAVLDEMSRDPKSSTEGGWALYRDLASVYVDAGQLLGSVNSPPVEAGEARISQREWITYDFLVILHAGLGRPERIRDIWRSMVATSQSQSQQQQRMTSRNYVCVVSSYLACGRLEDAGEVVDQWQRSKAPEFDVSACNRLLDALLRAGLADAAGRFRELMLQKRCILTSSSSSRAAVVE

SEQ ID NO: 6919 - protein, 300 aa, Zea mays
  VARIANT 101..300: note = Derived polymorphism lacks residues 101 to 300
  VARIANT 96..300: note = Derived polymorphism lacks residues 96 to 300
  VARIANT 87: note = Ancestral polymorphism is R, Derived polymorphism is C
MEVAGRCQLRQLVSSKAPSALGPRSTLPRRLATFAAASSCSCSCPLRDGNRRAHGVRASESTDTDAPAFGPPRPRRPPRFLCLHGFRTSGEIMRRQVVGRWAPEVTARLDLVFADGPFPAEGASPVAGAFDPPYYEWCQFVGEDFLSCRNLDRCFSYLEELMAREGPFDGLLGFSQGAGLSAVLAGLQEQGLALTGVAQVKCVIVIAGAKIRAPAAVARAFDTKITCPSLHFIGEEDFVKVHSEELVRAFADPLVIRHPRGHTVPKLDEKGLQTMLTYLDKIEREIWEHSSTDAEIVGSN

SEQ ID NO: 6920 - protein, 146 aa, Zea mays; identical to SEQ ID NO: 6338
  VARIANT 104: note = Ancestral polymorphism is T, Derived polymorphism is M

SEQ ID NO: 6921 - protein, 444 aa, Zea mays
  VARIANT 98: note = Ancestral polymorphism is V, Derived polymorphism is L
MSASRSGRIRRAGSVALGDFLRREASAERAALGGGERPSVAAGQACRAKKGEDFALLKPACERRPGAPSTSFSAFALFDGHNGSAAAVYAEEHLLANVLGCVPADLSRDDWLAALPRALVAGFVKTDKDFQTKAHSSGTTVTLAIIDGSVVTVASVGDSRCVLDAAGSIYYLSADHRFDANEEEVGRVTECGGEVGRLNVVGGAEIGPLRCWPGGLCLSRSIGDQDVGEFIIPVPYVKQIKLSNAGGRLIISSDGVWDALTAEMAFRCARGLPPEAAAEQIVKEAVESKGLRDDTTCIVIDIIPPEKQKCTIESPKTPGKGLVLLKNFFLRKTASGSLSLADKDNYPEPDFVEEVFEDGCPSLSRRLNSEYPVRDMFKLFACAICQIDLESGQGISIHEGSSKTGKLRPWDGPFLCHSCQEKKEAMEGKRHSRALPLYMDYHWT

SEQ ID NO: 6922 - protein, 558 aa, Zea mays
  VARIANT 294..558: note = Derived polymorphism lacks residues 294 to 558
MAARWQPGSKSRSSALRPTVLVAAASVAAVLLTAAVLFGARWTPSSDAETWVSAGVRVVMNAMSDKGGIPLATVPNPGDRLLGGLLSPDFDDSSCLSRYRASLYRRASLHALSPHLVSALRRYESLHRLCAPGTPAYARATERLRASPNASGDGADPSSSGARCNYLVWTPNAGLGNRILSIASGFLYALLTDRVLLLHSSSSHDLGDLFCEPFPGSTWILPEKDLPAVHEGLSTRTNASLGNTLRRGEALRGAPWLYVHLLHNYNVQDKLFFCDEVQAELRRVPWLVFQADNYFAPGLFLVPRHERELARMFPRRDAVFHHLGRYLFHPSNAVWGMVTRYHGSYFARADERVGVQVRVFKWAPISTDQFYAQILKCAEHENILPGVSVPRANTTAAAVGSAAQPAKRKAVVVVSLYNEYSEKLSELYHEHGAAGGEAVSVFQPTHLGEQRFGDRQQDQKALAEMVLLSFADVLVTTGVSTFGYVSQGLAGLRPWVLMPPNHGKAPDTPCRLAPTIEPCFHSPPNYDCRAKARGDTGRMVRHIRHCEDFPQGVQLLQS

SEQ ID NO: 6923 - protein, 178 aa, Zea mays
  VARIANT 52: note = Ancestral polymorphism is G, Derived polymorphism is S
MALLSATSPAKAHLPTLLAYHDEPQQHQHALPPAHPQCFGGGGGKARQRARGRCAAAMRPLDAAVAPAPTPAAGEAPRKRPRVLVAGGGIGGLVLALAARRKGYDVTVFERDLSAVRGEGQYRGPIQIQSNALAALEAIDMSVAEEVMRVGCVTGDRINGLVDGMSGSCAVWRGAHRY

SEQ ID NO: 6924 - protein, 128 aa, Zea mays
  VARIANT 13: note = Ancestral polymorphism is A, Derived polymorphism is V
  VARIANT 36: note = Ancestral polymorphism is E, Derived polymorphism is K
  VARIANT 37: note = Ancestral polymorphism is A, Derived polymorphism is V
  VARIANT 39: note = Ancestral polymorphism is G, Derived polymorphism is D
  VARIANT 42: note = Ancestral polymorphism is C, Derived polymorphism is Y
  VARIANT 47: note = Ancestral polymorphism is E, Derived polymorphism is G
  VARIANT 53: note = Ancestral polymorphism is P, Derived polymorphism is S
  VARIANT 56: note = Ancestral polymorphism is D, Derived polymorphism is Y
  VARIANT 57: note = Ancestral polymorphism is L, Derived polymorphism is R
  VARIANT 65..128: note = Derived polymorphism lacks residues 65 to 128
  VARIANT 75: note = Ancestral polymorphism is R, Derived polymorphism is M
  VARIANT 77..128: note = Derived polymorphism lacks residues 77 to 128
  VARIANT 95: note = Ancestral polymorphism is R, Derived polymorphism is K
  VARIANT 126: note = Ancestral polymorphism is I, Derived polymorphism is S
MSEITDQTVEKHAECLPALKVLDVSNCLNISAKGIEALGRHCKLLVELKRNMPPPDLPQGLPSTQQQLRWWLKKRRWQSRTLGSASSLPSAGCCRPWTYSGCWNVRLEGDVVERCCGLKFWFQSMILR

SEQ ID NO: 6925 - protein, 240 aa, Zea mays
  VARIANT 101: note = Ancestral polymorphism is S, Derived polymorphism is P
  VARIANT 66: note = Ancestral polymorphism is R, Derived polymorphism is C
MRVALGKSSRIYSPSLRLFPLATTLGPSTSTSGTRWMARRGEGHLTVDGAHGARKEWRTFSGSLLCSNGVNVHVPRHGADAAQLARISWNKVLDFKTLSWSKLEAKSQAEPSELAGAVSFSASAGHSLLRSLIHKPALGLPCVLMEVFHSLLETLQCPTAEPEIIFNLLLQAKLETVTKELQATDQVLHRISFMHHLFQIMLTENKLQTSSMMQVLPRKRRRSRSWLLNVVNQILVRLPE

SEQ ID NO: 6926 - protein, 192 aa, Zea mays
  VARIANT 9: note = Ancestral polymorphism is R, Derived polymorphism is W
  VARIANT 42..192: note = Derived polymorphism lacks residues 42 to 192
  VARIANT 50: note = Ancestral polymorphism is R, Derived polymorphism is Q
  VARIANT 75..192: note = Derived polymorphism lacks residues 75 to 192
MGTRLPPGRKRTKSRNRCRSGERGGRSRMGKTQKAGEASRAWWRHSRRGRSRCWEATTNLEDLGSGFRFETAALQAVAAHAAPTLPNALEATASASSNKVKSIGQVVDDLNTVAGLLSNLQDRRLRRRQDEQHRPQGDAAPVASGTPTPPGYCCGSLQQVTRHMRLPADLQSGFQLPILVLHKCKEAHQEDT

SEQ ID NO: 6927 - protein, 442 aa, Zea mays
  VARIANT 47: note = Ancestral polymorphism is S, Derived polymorphism is F
MADTPSPSPTAAAGAEPGSASTPLLRRRGSYTRTVSHARDELSSFRSGLRWMCVDHSDASSPAVSWLVFAALGVAVPAAAHAAAAPRRAYDTQVQVSLTLSAALAYTTLYSLVRRHGLRRLLYLDRLRHDSQDVRAGYIVQLAGSFRLLACFVLPCFLADAAYKAFWYCANRPFPLWWSAAACALEMASWMYRTAMFCMACVLFRTICYLQILRMTGFARDFGQCADVAAVLRQHRRIRVQLQRISHRYRSFILYSLILVTASQFTALLAATRPHARVNFATAGELALCSMSLVTGLLVCLHSAAKITHKTQSITSVAAAWHADATINSLDRDQENPRTPSKACLQQQTPTSPFPMAGASSGEESDDDEWRSEDGVDTSRFTPFHATNVSFQKRQALVTYLENNRAGITVFGFVVDRTWLHALFMIEFSLVMWLLGKTIGIS

SEQ ID NO: 6928 - protein, 362 aa, Zea mays
  VARIANT 46..362: note = Derived polymorphism lacks residues 46 to 362
MEPTSSASIARQTWELENNIPAAASDPDAMDAIYRYDDASQARAQQEKPWANDPHHFRRTKISALALLKMVVHARAGGTIEVMGLMQGKCEGDAIIVMDAFALPVEGTETRVNAQADAYEYMVDYSTINKQAGRLENVVGWYHSHPGYGCWLSGIDVSTQMLNQQFTEPFLAVVIDPTRTVSAGKVEIGAFRTYPKDYKPPDEPVSEYQTIPLNKIEDFGVHCKSYYALDITYFKSSLDSHLLDLLWNKYWVNTLSSSSLLGNRDYVAGQIFDLADKLEQAEGQLAHSRFGGMIMPSQRKKEQEESPLAKVTRDSSKITAEQVHGLMSQVIKDILFNSVHPSSKASTSAPPDSSGPEPMVEA

SEQ ID NO: 6929 - protein, 216 aa, Zea mays
  VARIANT 116: note = Ancestral polymorphism is G, Derived polymorphism is D
MQLFSGRSKDHKIGGGGGKCHAVEGTTTRHSKGGKCRALCCGASSRLSVSSSSASCSSAADAALEPPTQPRGLSRLAHGMVQARLQSMIDAAAEAGRPPVARRPDELAERERRRRGFPRAAWARGGCYEKSVREQAPTRRTSCVVLLAEDRRTHDPLEEFRRSIAEVIAAKRMAEPAELRALLNCYVSVNAREHRAAILQAFHEVCSVLCSCKQLG

SEQ ID NO: 6930 - protein, 141 aa, Zea mays
  VARIANT 30: note = Ancestral polymorphism is A, Derived polymorphism is T
MDEWIRQAEVWVRQSESWIRQQPPEQIYVAATVVAVTILLLIVGAVPNLELPMVLTVLKCCICIENIHSAKEAYRSYVLAYDSHSMKDIFNVHQLDLQMSHYPILSAPLHAPTVAIPRKLEWGAATIKKEKKCPFTTVYIS

SEQ ID NO: 6931 - protein, 329 aa, Zea mays
  VARIANT 284: note = Ancestral polymorphism is D, Derived polymorphism is E
MASAGTTAVVPEVALRSGNARTAMPMVGMGTASFPLVHEAVKDGVLSAIEVGFRHFDTASMYGTEKPLGDAVAEALRRGTLRSREDLFVTSKLWCSQNHPDLVLPSLRETLKNLQMEYVDLYLIHWPVCLKPGPPELPTRKENAVPLDLAGVWRAMEECQRLGLAKAIGVSNFTTRHLDGVLAVATVPPAVNQVELNPAWQQRTLRAYCADRGIHVAAYSPLGGQNWDGQGSAVLDSEVLAAIAKARGKTVAQVALRWIHEQGVTCIVKSYSKERLRQNLGIFDWELTDEERLKISQIPQRKVVQTSSLFSQEGEFTAVDPAELNILEE

SEQ ID NO: 6932 - protein, 216 aa, Zea mays
  VARIANT 175: note = Ancestral polymorphism is S, Derived polymorphism is F
  VARIANT 143..216: note = Derived polymorphism lacks residues 143 to 216
  VARIANT 134: note = Ancestral polymorphism is P, Derived polymorphism is H
  VARIANT 69: note = Ancestral polymorphism is N, Derived polymorphism is K
MDLLERNIKTETEETRKEQERKEEEAEAEAEAGERKTQEPPQQGQGLSLSLANGSGRSGMLPMSNVSANPSQLTIFYGGSVCVYDSVPPEKAQAIMLIAAAAAAAAATKSSAAPTVKPPMVPAATVAPAAVVSPVLTRSPSLQSTSVATGQPQVVAEPSSICKLQADLPIARRHSLQRFLEKRRDRVVSKAPYSTAKSSDGMESPRIEVTAEGKAQ

SEQ ID NO: 6933 - protein, 360 aa, Zea mays
  VARIANT 280: note = Ancestral polymorphism is G, Derived polymorphism is W
  VARIANT 253: note = Ancestral polymorphism is S, Derived polymorphism is C
MHILNFSTAYTFYRALATPDKHRQTRERHAMSSPAARSITCYSKIPEFLVGTNGQPMPAVGLGTASHPFVAEDVRTSVLTALELGYRHIDTAGLYASERVVGEAMAEAVSCGLVASRDELFVTSKVWCTQCHPELVLPSLKESLKNLQMEYVDLYLIHWPMAVKPSKPHFPMKREDIVPMDLSGVWQAMEECHRLGLAKMIGVSNFTTKKLQELLAIAKISPFVNQVELNPTWQQKKLIEFCNDKGIHVTAYSPLGGQRISKLNPVRQSDILEEIGKARGKSVAQISLRWIYEQGASMVAKSLKRERLKENIEIFDWELSDEDRFKIGQIAQRKLVTVQNLLCPEGISSVDILDVDVIEI

SEQ ID NO: 6934 - protein, 85 aa, Zea mays
  VARIANT 56: note = Ancestral polymorphism is G, Derived polymorphism is R
  VARIANT 38: note = Ancestral polymorphism is L, Derived polymorphism is I
  VARIANT 37: note = Ancestral polymorphism is K, Derived polymorphism is I
MSPFACWWSTQQRKLASANASQIIQSLHAGFVPILEKLSKGKDVEKFSSPYPFFCGSFWHWVLHGDAVLDELLVNFQIKACCVVV

SEQ ID NO: 6935 - protein, 129 aa, Zea mays
  VARIANT 19..129: note = Derived polymorphism lacks residues 19 to 129
  VARIANT 21: note = Ancestral polymorphism is L, Derived polymorphism is F
  VARIANT 41: note = Ancestral polymorphism is D, Derived polymorphism is N
  VARIANT 44: note = Ancestral polymorphism is A, Derived polymorphism is V
  VARIANT 46: note = Ancestral polymorphism is R, Derived polymorphism is I
  VARIANT 60: note = Ancestral polymorphism is S, Derived polymorphism is F
  VARIANT 76: note = Ancestral polymorphism is S, Derived polymorphism is L
  VARIANT 87: note = Ancestral polymorphism is T, Derived polymorphism is I
MVPRYQVERLKGENATLFQQFSDANQQFSTAVTDNRILKSDVEALRIKVKMAEDMIARSSVSCGLGDLGLAPYVNSRKMCQALNVLIGLDLLGSDAFSGPTAGTRVRELMKSLCPYKWFKYDVQFYPSR

SEQ ID NO: 6936 - protein, 407 aa, Zea mays
  VARIANT 240..407: note = Derived polymorphism lacks residues 240 to 407
MRSGGGGNKRSLLLLLSAWWLLLGSLVAQLPAARGGSGHVVTRMPGFDGPLPFHLETGYVEVDEQLGVQLFYYFVRSEKDDPGEDPLLLWLSGGPGCSGLSGLAYEIGPFHFDARGYRGGFPTLLYRPETWTKVSNIIFMDSPVGTGFSYATSDEGLKSSDTQAVRQLAIFLRKRAHDRLPDLPVLMQWLEEHPEFLPNPLYIGGDSYGGMIVPALALQIHTSSATTLLHISTVPLLQTYSSYNCYVLFTTIYSQFDTDGVVPFLHGMGLIPYEFYENAREMCGGKYSDAASVACAEVTRAIANITSAVNREHVLEPACPDDDDDELFGPKTTMAETDGGTSRRLMLQSADYFLPAGFKCRGLVRFQPSICLTRSWFPLGLLQRASYVLSRVWANDETVQESLGVRK

SEQ ID NO: 6937 - protein, 598 aa, Zea mays
  VARIANT 315..598: note = Derived polymorphism lacks residues 315 to 598
  VARIANT 244..598: note = Derived polymorphism lacks residues 244 to 598
  VARIANT 159..598: note = Derived polymorphism lacks residues 159 to 598
MTSPPPPPPPTVCVLLPFSPSSAGRPHHSRHPARRRLCVRSSRPSPPGIPNTSTRPPPLPPRRLHGADRRLSALIHRGDLDAALRLVGSSPRPPDVPLANRLVRDLCRRGRPADAARVVEACGPEATAATYGALVDGYCRAGLLEDARRVVGGMPAHVQASSAYAHNPLIHALCERGRVADALVVLDGMLCRGCAPDVVTYNILLQAACKGRGYRQALELIDFMRAEGCEPNNVTYNVIIDAMCREGDVDQARELLNSLPSRGCKPNTVNYNTVLKGFCSIERWVDADEILDEMVRENCPPNEATLNVIINTLCRKGLLQKVTLYLEKMSKHGCTANVVTYNAVISGMCEQGNVDSALELLSNMQSFGCKPDIVTYNTVLKGLCSADRWEDAEELMIKMSQNDRLPDNSTFNTIISFWCQKGLILQAFEVFKQMPEKGCNPNSTTYSTIIGGLTKAGKMEQALELLNEMANKGFNTDKMYRVLTESLNKEDKIEEVVQVVHKLQDSGISPQTVLYNTVLLGLCRNGKTDYAIDVLADMVSCGCMPDESTYIILIEGLFYEGYSKEARELLSRLCSRDVLSNSLIKNEALLLDQNIRSS

SEQ ID NO: 6938 - protein, 140 aa, Zea mays
  VARIANT 42..140: note = Derived polymorphism lacks residues 42 to 140
  VARIANT 29: note = Ancestral polymorphism is M, Derived polymorphism is T
  VARIANT 25: note = Ancestral polymorphism is L, Derived polymorphism is P
  VARIANT 22: note = Ancestral polymorphism is L, Derived polymorphism is Q
MWELCQTPPKDDAIPFDNVLHQNSLIKTMRRQVHMTLVKRTRKRRAHDINRSENQATTGLGESDNKEPLQTRTFANGMITQEVEMGKPDGKKATHGKKVSVKYIGKLKDDNIFYSNVSGRHFESRLGVGQVSGWDVGHMY

SEQ ID NO: 6939 - protein, 175 aa, Zea mays
  VARIANT 32: note = Ancestral polymorphism is P, Derived polymorphism is L
MRLSSILGCCTMTERASQRDKKSIRTPTVSAPLISVIHLLFNKASCTVLLRVILFGIVANSLGAISETFFPLIHLSVQKKVLDPLPVSVISTLEKKSLDLLGTCIGSPAHGRLGSVLCSHNHLMRRAQRSSGRLEILNPPNCKGWHTLPHATKQCSPFTSFLPFHRKPFLILSMA

SEQ ID NO: 6940 - protein, 218 aa, Zea mays
  VARIANT 210: note = Ancestral polymorphism is A, Derived polymorphism is V
  VARIANT 207: note = Ancestral polymorphism is R, Derived polymorphism is W
  VARIANT 173: note = Ancestral polymorphism is G, Derived polymorphism is R
MASSSASGAGVEGGVGEGPTTLDELYQINVVPAELHFKFRKELQGLRVGLNLEFYNLEVNDFEAKIVLKPLDYERKWKFQYKPISGDIQLLSKKIPVTKFLNLQVIFLLQHPVSCNSVSFVLGKPQVGIGHNFQLNATGWKWKLSTCLGGDGVSQIRNKSKLSLFPGFDLRIGWKAEYVLPEIHGAVGTGEPAFSMNYGRLHASIDRVEAIVTQSDQY

SEQ ID NO: 6941 - protein, 491 aa, Zea mays
  VARIANT 313..491: note = Derived polymorphism lacks residues 313 to 491
MAPPPLFPLPPLLILLVIVPLFPTAARTATTLPLYRHLPHVAEAVASHHHPLSRLAAASLARALHLKRRDPNHHSQKGSGGHPSVPATAALYPHSYGGYAFTASLGTPPQPLPVLLDTGSHLTWVPCTSSYECRNCSSPSASAVPVFHPKNSSSSRLVGCRNPSCQWVHSAANLATKCRRAPCSPGAANCPAAASNVCPPYAVVYGSGSTAGLLIADTLRAPGRAVPGFVLGCSLVSVHQPPSGLAGFGRGAPSVPAQLGLPKFSYCLLSRRFDDNAAVSGSLVLGGTGGGEGMQYVPLVKSAAGDKLPYGVYYYLALRGVTVGGKAVRLPARAFAANAAGSGGTIVDSGTTFTYLDPTVFQPVADAVVAAVGGRYKRSKDAEDELGLHPCFALPQGARSMALPELSFHFEGGAVMQLPVENYFVVAGRGAVEAICLAVVTDFSGGSGAGNEGSGPAIILGSFQQQNYLVEYDLEKERLGFRRQSCTSSPS

SEQ ID NO: 6942 - protein, 204 aa, Zea mays
  VARIANT 34: note = Ancestral polymorphism is G, Derived polymorphism is D
MGSASRAISCLCCPCRCLFSCLCSILVSLAVTLGLLALALYLILKPRMIAATVDSASLSQFALSASSTLAYDLNVTMTVRNPNTRVGLYYDDVQALASYEGQRFGYAPLDAFYQGTGAATKLAPGFRGTQLLQGDVAAAQFRQQQSAGRFDVDVDLNAKLRVKFWAFKAHGPNAKITCTLSVPVPVPAAASASPFQPTDCKVWF

SEQ ID NO: 6943 - protein, 199 aa, Zea mays
  VARIANT 174..199: note = Derived polymorphism lacks residues 174 to 199
  VARIANT 143: note = Ancestral polymorphism is D, Derived polymorphism is Y
  VARIANT 128: note = Ancestral polymorphism is C, Derived polymorphism is Y
  VARIANT 49: note = Ancestral polymorphism is G, Derived polymorphism is R
MDKSIPVVSKIFCSGTPTMLMIRMRPIVVNGGGFVVTDLSHNIVFVVDGCGILGSKGELMVKDGEGEPILFISKKGGIVQALSTRNKWNGYSMDYQGKNKLVFSLTDPKLCTAQGAPIRIHIEPKRHCKNWDFEIGGSFADRDCTIVDCTRKIVAQMGTKEPIGGKDFYHVEVQSGYDQAFIIGVMAILDNIHGESTRC

SEQ ID NO: 6944 - protein, 113 aa, Zea mays
  VARIANT 3: note = Ancestral polymorphism is E, Derived polymorphism is G
  VARIANT 6: note = Ancestral polymorphism is P, Derived polymorphism is A
MGEAPPPCAIVGPRRAAAHSFRLPRHGRRKVHVVRLGGPGARGRGRGLRLRQWLRRAAWRLAELCVAALSGHHGHPHPGAPPSAAHPPWTGVEPCFAAPFVPVARMKRAAAQA

SEQ ID NO: 6945 - protein, 128 aa, Zea mays
  VARIANT 59: note = Ancestral polymorphism is E, Derived polymorphism is G
MSWSAPDDILLSTSLAGFLDKKLIVLLRDGRKLLGTLCSFDQFANVVLQGACERVIVGEQYCDVPLGLYVIRGENVVLIGELDHEKDELPAHMTCVLEAEIRKAEKAEREARDLKGTMRKRMEFLDFD

SEQ ID NO: 6946 - protein, 385 aa, Zea mays
  VARIANT 98..385: note = Derived polymorphism lacks residues 98 to 385
  VARIANT 119..385: note = Derived polymorphism lacks residues 119 to 385
MDDDDDMSPSSSPSPPSSALPVDGPVTVAAAPPGATMVVALPIHRTAASLYASAAAAGGGGGGREDAWSDGATSALIDAWGERFVALGRGSLRHPQWQEVADAVSSRDGYSKGPRSDVQCKNRIDTLKKYKVERAKPVSAWQFFDRLDFLLAPTYGNKPGSSGGGGGGHNSNSRGQMPSALRVGFPQRSRTPLMPAAKRRAPSPEPSVSSDGFSPLPALPPAVNGKRKRPDEGRPDGGSGDDRARGLQELAHAIRRLGEAYERVEAAKLEQAAEMERQRMDFAQELESQRVQFFLDAQMELTQARNHVSPASAARPAAGGSSRRTSVVTDTGGSSNHHSRYRISHGDMHRHAPRSHYQPQYHGNNHAGAGAGAASEEEDDYEEES

SEQ ID NO: 6947 - protein, 550 aa, Zea mays
  VARIANT 45: note = Ancestral polymorphism is R, Derived polymorphism is C
  VARIANT 54: note = Ancestral polymorphism is P, Derived polymorphism is L
MVDTSTSPHSAAGGGTIIDDLHGFLRHRLRTHSSVLCAHAFLFRRGLLLGHPVPAGLLLTASACSAASPPAHILRLLRHLPPPLPLFSLDAALRALGPRIPFSALLSLFAALLRSHHPLFPDHFSFPPLLSAAASSTSPRLHFRSALALHGQLLRRGLLFSSPPHAANALFHFYATAGGILSARYLFDEMPFRDIASCNTLMTALARTPSGLDAARQVFEGMHLRNVVSWNVMINGYVKAKQPEQALEVVRWMAEVGVRGTAITMVGAATSCARLGRLGAGREVHCAFLRRFEDDNLLVWTALIDMYGKCRRAGIARKVFDQLRMRNLVCWNAMIIGHCVYGEPVDGIKLFQHMIALGNVQPDGVTFIGVLCACARLGLLEDGKAYFEQMNTTYNFKPTFSHYWCMANLYGSVGLLEEAEGLLQNIPEDLKARALGGLLGLCRFRRDWRLGERIALRLIELEPSNNAHYALLCNVYAAAGRWEEVHRVKAIMKERDERFSPGHRLVNLNEIVDEFKIRERQPENQEIYFILDDLVSKLKLDCKEKEKNDF

SEQ ID NO: 6948 - protein, 220 aa, Zea mays
  VARIANT 150: note = Ancestral polymorphism is S, Derived polymorphism is L
  VARIANT 130: note = Ancestral polymorphism is S, Derived polymorphism is L
  VARIANT 112: note = Ancestral polymorphism is G, Derived polymorphism is D
  VARIANT 26: note = Ancestral polymorphism is A, Derived polymorphism is P
  VARIANT 25: note = Ancestral polymorphism is M, Derived polymorphism is T
  VARIANT 12..220: note = Derived polymorphism lacks residues 12 to 220
MFIRKAYRSSLQEGAVNPLGLGFVMPTLFSSYGLAVWYGSKLIVERGYDGGMVIYVIMSVMIGVMSLGQATRSVTAFAEGQGAAHRMFKIIERNPDIDIDDNTGIILEDVKGDVQLKDVYFSYPTRPKFSLQVPSGTTMALVGDSGSGKSIVISLVERFYDPHAGEVLIDGVDIRRMKLGWMRGKIGLVNQEPVLFSTTIRENIAYEIEKPTLEDIKRAI

SEQ ID NO: 6949 - protein, 97 aa, Zea mays
  VARIANT 30..97: note = Derived polymorphism lacks residues 30 to 97
  VARIANT 73: note = Ancestral polymorphism is L, Derived polymorphism is I
MATEKLGIKVERNPPESRLSELGVRQWPTWGCEKSKFPWTYSAKETCYLLQGKVKVYPDGHGEEFVEIAAGDLVVFPKGMSCTWDVAEAVDKHYNFE

SEQ ID NO: 6950 - protein, 607 aa, Zea mays
  VARIANT 457: note = Ancestral polymorphism is R, Derived polymorphism is T
MEPTAAQPRSFSNLSPTPDLDGSQDDNVLPFISRMLMEDDGVDEFLYQQYPDHNPALLQTQQLFAQVLSDTSTNALTALQAVAHGSDLQDPSSLNSTATGAVEPASILLPAEGSSCCKDAVSMAFFRGMEEANKFLPGDGGGGYTVDCRGRKKRLDGDDEGEGRSSKQMAADGEESEESAAREMLDRLMLNGDDEPMLADIQELRAAMDMAKTLPGRPGGRAHGVDLHSMLLHCADALASNNRHSAADLLARIRRHSSLCGDATQRLAHWFAEGLELRLNGTGSLHYRSSSLMAKSASCAGAPLKAQQFFMASCCFLPVSILFANKTIYNAAAGRKKLHIVHYGLEHGLQWASLLRWLAHREGGPPEVRLTGIDVPQPGFRPARLIEEAGRRVHACARRLGVPFRFRGIASRPEAVRAGDLGIDPDEVLVICSMFHFRTLADESTDDPIGVVLGAIREMRPAVFVHAVLNASYSTAFFATRFRELLYNFTALFDMMDAILPRDNGRRLLFEREVLARCAVNAIACEGAGRAHHTRSYKQWQARSRRAGLRQLPLDGDVVRTLRDKVSREYHEGFVITEDQQWLLQGWKGRVLYAISTWTADDGLAGN

SEQ ID NO: 6951 - protein, 208 aa, Zea mays
  VARIANT 32: note = Ancestral polymorphism is D, Derived polymorphism is G
  VARIANT 24: note = Ancestral polymorphism is G, Derived polymorphism is C
MSRRAAALLLACLVAVTAAALADGALLPWFGGGRRGLDEAAVSDVGLLAADPFRILEHVPFGFDRDDVAMVSMARVDWRETPDAHEIVVDVPGMRREDLRIEVEDNRVLRVSGERRRAEERKGDHWHREERSYGRFWRRFRLPENADLDSVAASLDSGVLTVRFRKLAPEQIKGPRVVGIAGGDGGAEAKESIGTGAGDGHQTKKVEL

SEQ ID NO: 6952 - protein, 274 aa, Zea mays
  VARIANT 199..274: note = Derived polymorphism lacks residues 199 to 274
MVLELVFLLVLGLVQFLLMLLPVCGFAAKEQQAREPEAEMLPPAAVKTELVYLGNLVGWHGGSAAVLGVAAGLALIVGFVRCDTCEVNNLWEDAIIDSNPALKSRSYLGKNSIPDSRVSTVTPATISFFKVSYRLQGEKLKEGEDIYIYQQGRLEAPFLHGSCMERNYWQKTNLDQILECAKGIRVTNFASCFICNQQGHLSKNCPENKHDIPSKEIPASIILLRERTPIISSDGSILHARQQAFWYGAEWYSGLSIVKSTGSENNGLKQQPLA

SEQ ID NO: 6953 - protein, 760 aa, Zea mays
  VARIANT 414..760: note = Derived polymorphism lacks residues 414 to 760
MAHEREPLLQQRQTGVGNACGAKDSSSAPAPSAAALPSLARTVLKFLMWAVFLTWAAGIFLYPTKPVQAVFRKWVGLTRDSMFGIAGGIFLTFSAPILIIALLAYVYISFFPSEHVVEKRKLRSLSFRLWTFPVLVDGPFGVVSAVEFIGIVLFIVFVVYSMTYYAVEAVSLVSKFDIPSMTESELILDVIGLRLGAVGLFCMLFLFLPVARGSVLLRLIDIPFEHATRYHVWLGHLTMALFTLHGLFYVISWSMQGRLREELRQWKEIGVANLPGVISLAAGLLMWVTSLHPVRKRFFELFFYTHQLYVVFVVFLAFHVGDFIFSICAGAVFLFMLDRFLRFWQSRAKVDIISAACRPCGTVELVFSKPASLHYNALSFIFIQVRELSFLQWHPFSVSSSPMDGRYHMSVLIKVLGTWTEKLRSIITDVQEKNGGDSELQCGRMTACVEGPYGHESPYHLMYENLVLVAGGIGISPFLAILSDIIHRIEEGKQCMPKNVLVLWSVKKSKELSLLSAVDAQTISSSVSDRLQLDIQAFVTQEPHPPLEDGIVGDDQKVPGMFVKNGTAMSGLVGTGDNFWAAMYFLASTLGFLLAYALVQVYYVKPHNVVAWWYLGLLFMLCMVAGVALPGGLVVLLWHLSEKQRLEDDKWDASQSPRAEQTGPLAAAGGGDDDAAPSVSLAALRTTRYGCRPNFEAEFAAFAERAGDAADVGVLVCGPQGLQTSVARECRARNLRRGGLGAAKSRSGAVFHFNSHSFDL

SEQ ID NO: 6954 - protein, 108 aa, Zea mays
  VARIANT 29: note = Ancestral polymorphism is D, Derived polymorphism is N
MEADTGCRLEVDDVLSFADDLVVVLRRSDDADANAQVIAGAGLLRTACRSESDHLHLQLKDYQQKICSCKDKTDKAKAETIAADELSVLQNKMEENLQEDKQLREELR

SEQ ID NO: 6955 - protein, 297 aa, Zea mays
  VARIANT 224: note = Ancestral polymorphism is R, Derived polymorphism is T
MPSVEVEVQVGGAGGWRPKQQQKHRHHHHPLEIRQVWADNVDREFKLIRAAIERFPYVSMDTEFPGVIHHPPPAVHHSTLTAPQRYALLKSNVDALHLIQVGLALAPSPGSPPALAFQINLRGFDPRVHRHAPDSVRLLAASGLDLAAHRARGVPARAFAALLASSGLICNPAVAWVTFSSAYDFAYLVKLLMGRKLPRALPDFLRYVRVYFGAAVYDVKHMARVACASHGEVALLGGLERVAAALRVRRAAGQGHQAASDSVLTWDTFREMARIYFPKEGSLEPCAGVLYGLELPN

SEQ ID NO: 6956 - protein, 257 aa, Zea mays
  VARIANT 99: note = Ancestral polymorphism is E, Derived polymorphism is K
  VARIANT 56..257: note = Derived polymorphism lacks residues 56 to 257
MQRHLHKLTKNMSAVIIQEEALLSLDPVAAACSMMNQTIKDAGIQNDALLSEVLYECKKELMEKSAIEETISELMDVKIPMLQAEQLPAMENEKRSIPECSLQKSVSSGCLNSADRMNGAVRPNFLDFQGLDFEATFGLRRAYSEGDIQNLGANTPRPAANVCVTISDLKAEERKQKLSRYRKKKIKRNFGRKIKYACRKALADSQPRVRGRFAKIEECDLLLLNSGTYMEVQSIIQLFKIHLLYPAVLVRAEGVKS

SEQ ID NO: 6957 - protein, 448 aa, Zea mays
  VARIANT 361: note = Ancestral polymorphism is R, Derived polymorphism is L
  VARIANT 126: note = Ancestral polymorphism is W, Derived polymorphism is C
MASHRRQSMSASEWNSRATAAPWADLLPEMCNLVRERLDPISIIRFPAVCRDWSTACEVYPLLRPGLPALLTPSVDSDGYDTEHSVEAGAFCLHDVSACGGGGRKSFLGEAEGFKDRAWVGGNHGWLVTTDIRCEDVQLLNPVTGARVYLPSLYTISEVKRLAHFSVGDHKYNEILKVALCRTPAHADGHLAVAIFSEDLLAFTAAGGGGEGEGEDEGEGEGEWTAVKNTAADDVSYMDAIVLDGKLFAVDKVGRIYSWHLDGGAATTEPTVVQGPNIDDMSRQHDYDRCAFYLAASGDDGHQQLLLIYIYGYEIEDVYKYHRTYPWDERVLHRMVFDKRRSFGDRGMSVHELDASSGTWRRVTDFGGDRALFLGANYPFFVTVRHETGLEADCVYLADTPSGYDVAIFDLKKEGHGSDGHIKQQLHYSLVNEPFQMPMWFLPTEYPH

SEQ ID NO: 6958 - protein, 746 aa, Zea mays
  VARIANT 600..746: note = Derived polymorphism lacks residues 600 to 746
  VARIANT 496: note = Ancestral polymorphism is V, Derived polymorphism is D
  VARIANT 310..746: note = Derived polymorphism lacks residues 310 to 746
  VARIANT 298: note = Ancestral polymorphism is G, Derived polymorphism is R
  VARIANT 212..746: note = Derived polymorphism lacks residues 212 to 746
  VARIANT 189..746: note = Derived polymorphism lacks residues 189 to 746
  VARIANT 173..746: note = Derived polymorphism lacks residues 173 to 746
  VARIANT 142: note = Ancestral polymorphism is P, Derived polymorphism is L
  VARIANT 111..746: note = Derived polymorphism lacks residues 111 to 746
  VARIANT 10: note = Ancestral polymorphism is P, Derived polymorphism is L
MSTAVSSRRLATIGVIGALTLQFVASATAGPIALPGCPENCGGVQVPYPFGIGRGCFHEGFNLTCDEAQHPAKLLLGDGVEVLDISLPDCTVRIQTKISWVEYAAEFNGSWSVPAPDGPLMVSTARNSFVAFGCNVLAKLIPYGTVLSYASACAAACVNTPDVSSCSGVGCCQTSIASLGSDLPWYGIQVKHLEGETGNYYHRAVFIVDQDWFSRVEAAMASNFSALFFGNRFHEKVVMVDSVPVVLEWSLDLIRDAGLFVLSPIGPQSSDFRCLSSNSFSYTIIGNYDRRRCNCSHGYEGNPYIADGCQDIDECQLPDIYPCHGTCINVPGTYRCSSKKGIKSLPGLIAIIALSAGFGLLFSILGVSNIINKLKQRRAKLLRQKFFKRNHGLLLQQLISSNKDIAERMKIFSFEELEQATNMFDQNRIIGDGGHGTVYKGILSDQRVVAIKKSRVVVQREIDQFINEVVILSQTNHRNVVTLFGCCLETEVPLLVYEFISNRTLSYHLHGQYENPLSWNDRLRIALETARAIAYLHSAASISVFHRDIKSANILLTDTLTAKVSDFGASRSISIDETGIHTAIQGTHGYLDPEYYYTSRLTEKSDVYSFGVILAELLTRIKPVFSTHSSEGKSLASHFVSVIKDCSLLDILDPQIVEEGRAKDAEAVARLAEVCLSLKGEERPTMRQVEITLEDVLGPNVHSSCRVSRTSQGALKDQTQNQNKGNEGTRLYSLEKEFIQSSEIPR

SEQ ID NO: 6959 - protein, 223 aa, Zea mays
  VARIANT 117..223: note = Derived polymorphism lacks residues 117 to 223
  VARIANT 51: note = Ancestral polymorphism is S, Derived polymorphism is L
  VARIANT 33..223: note = Derived polymorphism lacks residues 33 to 223
  VARIANT 17: note = Ancestral polymorphism is S, Derived polymorphism is F
MAPFALGSQVVAVASVSVGLNSSVKGVALKECEHPLAARQRKFVRVQLLRSGWCIRKIPGRDACQITVLHHEDNGMNIEMAKLAFSKGIWSYICKMSNALRRYPQHGSPSVSILTMQKLMKKDLTNLSLFACQFPKDLETADASLSASQNTAASVVPSTPTSRTSPCKLAGRKSRQMIASGILLVGSIVCLSRGRSNLGAQLAMAFFLKKAFKQERQSGSSST

SEQ ID NO: 6960 - protein, 468 aa, Zea mays
  VARIANT 127: note = Ancestral polymorphism is H, Derived polymorphism is Y
  VARIANT 35: note = Ancestral polymorphism is T, Derived polymorphism is K
  VARIANT 8: note = Ancestral polymorphism is L, Derived polymorphism is F
MLAVLRWLAAPVLTLPWHRASGGRGTRRGLSVQVTDRAVARRALVQHSAAFLDRPTGAVPSTILTRNRHYNILSAPYGPYWRAARRNVATGVLHPSQLRMLGGTRARVLGDLVRALKSGAPAGESLYFAVYSVLAGMCFGEDVVAELGETRLRAMQKFQRDILLALPSFGVFVRYPRIGRFLYRSRWHRLLALRRQQEESFLPLVAAIRNRREASRGNTTLTTYVESLLDLRIHEDGGRAVTDGELVSLISEFLGAGTESTAAALEWTMANLVKSPDLQQKLRLEANAMACGKRVIEEEDLARMPYLRAVVLESLRRHPPVPFVIRRVDGDDAKKVIGVSRLPDGGATVNFLVGKIGRDPAAWSDPMSFKPERFMPGGEGDGTDLTCTTELKMMPFGAGRRVCPGLATAMLHLKYFVANLLTEFEWWEAEDDKVDLTEFRGFFFTVMNRPLQARLVPTDAAAAPWLSN

SEQ ID NO: 6961 - protein, 316 aa, Zea mays
  VARIANT 305: note = Ancestral polymorphism is A, Derived polymorphism is P
MLPLAHSAGCSHLHLPPAPSRAYLPNRRRVRSLVRARPPSAGASGTETTSTTSGSVMSFLCPLLKLLGGGDPSQQRNDVVEVTTSSISSLSRLPWGSKVATSSGENIDSAISIPTLQLYEFEACPFCRRVREAMTELDLSAEVYPCPKGSLRHRDIVKKIGGKEQFPLLVDASTGISMYESGDIVKYLFRNYGQGRSPSPGLLESTIFTGWVPTLLRAGRGMTLWDKAGAVPAEKLELFSYENNPCARIVREALCELELPYVLQNVGEGSSRTDLLLRKSGSKQVPYLIDPNTGFQSGDHKKILPYLFQQYPVSSI

SEQ ID NO: 6962 - protein, 267 aa, Zea mays
  VARIANT 46..267: note = Derived polymorphism lacks residues 46 to 267
  VARIANT 36: note = Ancestral polymorphism is A, Derived polymorphism is V
MLEVRTARRPALADISGGGFFIRTVESPRGVLLNGAVKRPARQFLSPSSNKENVPPVGALRATPKRRTPLPDWCRSWGYSDCPGLIFEATSIFMSSATHVYNLQTIQPLRLIRSRKIDTYIYYQDPTNKNGGKWVIRFKKAVSRLILCGFDRLSANMVARTFDIVVYVVQEAANSVARKRDMKIRDRVLRLTHAKPVDAAPKKTEVKKRSRVPNHKEVSTPGSKSNEGSDKAKRKASVLSYQGLRSSKSGVVKKVKVTQQPREAEEN

SEQ ID NO: 6963 - protein, 342 aa, Zea mays
  VARIANT 10: note = Ancestral polymorphism is Y, Derived polymorphism is H
MASRQTFACYTMALLFAAAAVSAQLSTDFYDDTCPDALDIIESAVRAAVSKESRMGASLLRLHFHDCFVNASAMCHTSKFPSAFHFCFSHEGCDGSVLLDDALGFTGEKTAQPNKNSLRGFDVVDDIKAQLEDACNQTVSCADILAVAARDSVVALGGPTWDVELGRRDGTTANLDDANNDLPAPTLDLGDLIKAFSKKGLSASDMIALSGGHTIGQARCVNFRGRLYNETASLDASLASSLKPRCPGAAGSGDDNTSPLDPATSYVFDNFYYRNLLRNKGLLHSDQQLFSGGGSADAQTTAYASDMAGFFDDFRDAMVKMGAIGVVTGSGGHVRVNCRKTN

SEQ ID NO: 6964 - protein, 277 aa, Zea mays
  VARIANT 1: note = Ancestral polymorphism is M, Derived polymorphism is I
  VARIANT 37: note = Ancestral polymorphism is R, Derived polymorphism is H
  VARIANT 39: note = Ancestral polymorphism is G, Derived polymorphism is D
  VARIANT 52: note = Ancestral polymorphism is A, Derived polymorphism is T
  VARIANT 53: note = Ancestral polymorphism is F, Derived polymorphism is S
  VARIANT 62: note = Ancestral polymorphism is V, Derived polymorphism is M
  VARIANT 64: note = Ancestral polymorphism is E, Derived polymorphism is D
  VARIANT 78: note = Ancestral polymorphism is D, Derived polymorphism is V
  VARIANT 136: note = Ancestral polymorphism is A, Derived polymorphism is V
  VARIANT 149: note = Ancestral polymorphism is C, Derived polymorphism is F
  VARIANT 165: note = Ancestral polymorphism is V, Derived polymorphism is E
  VARIANT 188..277: note = Derived polymorphism lacks residues 188 to 277
  VARIANT 212: note = Ancestral polymorphism is R, Derived polymorphism is I
  VARIANT 225..277: note = Derived polymorphism lacks residues 225 to 277
  VARIANT 247..277: note = Derived polymorphism lacks residues 247 to 277
MGAGASGLAGAEPSGKVARGAGLGDLPELCTAEVLLRLGAPDICRLTRLNLAFHGAVGADFVWEAKLPLQGSGQRPRDRADGPLHMMAMPALFEAILLLILKDGQGGDERKELAKTVAKLAEDGKLDAIPSRVKLASCELDLRFCSATCVCVYNFSSPTACPYNVDIPLESSKDMKKTRKNFMHALKCLVVESEQGADGCDRAVGSLGLRLRAIRGDVQGVSTPQAEELVCKVETTVRGRLCCSLSSSDTCALVVRGGCGSRRESIRHQVCPHEGLV

SEQ ID NO: 6965 - protein, 158 aa, Zea mays
  VARIANT 33: note = Ancestral polymorphism is P, Derived polymorphism is L
  VARIANT 51: note = Ancestral polymorphism is R, Derived polymorphism is W
  VARIANT 71: note = Ancestral polymorphism is V, Derived polymorphism is E
  VARIANT 75: note = Ancestral polymorphism is G, Derived polymorphism is S
  VARIANT 77: note = Ancestral polymorphism is R, Derived polymorphism is H
  VARIANT 88: note = Ancestral polymorphism is V, Derived polymorphism is E
  VARIANT 91: note = Ancestral polymorphism is G, Derived polymorphism is R
  VARIANT 101: note = Ancestral polymorphism is V, Derived polymorphism is A
  VARIANT 106: note = Ancestral polymorphism is A, Derived polymorphism is T
  VARIANT 109: note = Ancestral polymorphism is P, Derived polymorphism is T
  VARIANT 112: note = Ancestral polymorphism is G, Derived polymorphism is D
  VARIANT 121: note = Ancestral polymorphism is T, Derived polymorphism is I
  VARIANT 126: note = Ancestral polymorphism is P, Derived polymorphism is L
MEAAASALLLLGLSASLAPFASAAAPYDPPTVPELMDQLGLPRALLPETARRYLLHDDGTFELFLDDGCVVEAGGYRVGYDIKLSGTVSPGSVTGLEGVRVRVLFAWVPITGVEAADGEVTVHIGPIRKSFPAVGFKSSPRCIIGLAAADILPPLVEQ

SEQ ID NO: 6966 - protein, 289 aa, Zea mays
  VARIANT 12: note = Ancestral polymorphism is A, Derived polymorphism is D
  VARIANT 34: note = Ancestral polymorphism is C, Derived polymorphism is F
  VARIANT 37: note = Ancestral polymorphism is G, Derived polymorphism is D
  VARIANT 132..289: note = Derived polymorphism lacks residues 132 to 289
MGYRGLLHALRALLMPWRNALQLAGLGNFKNFQFPPDYYNGLAALFFNTNDDAIRNLFTSGTKNVFHMSTLFVFFTAILAGATYMQAHSGDPSCGLISDHDPGLFALLGATSFLDRRNNEDDCVSRRRESGEYRSGVEDHRPQWGSSGRRATSIRGSRFQNSLGLCLDPHLLVMLKGKGFMKEKVKTSGSSVLQRFGAFEFAKRGSGKGLKIENLDFSDEEMDMYVDLHPITNTSPYTVVETMALAKAAVLFCALGLKAPARCAKDPRGELSLFESFSRDQILQCWPFF

SEQ ID NO: 6967 - protein, 79 aa, Zea mays
  VARIANT 41: note = Ancestral polymorphism is K, Derived polymorphism is N
  VARIANT 40: note = Ancestral polymorphism is H, Derived polymorphism is R
  VARIANT 24: note = Ancestral polymorphism is D, Derived polymorphism is N
  VARIANT 5: note = Ancestral polymorphism is P, Derived polymorphism is S
MLAFPICILKLAIISDIVQAIEADIELNLSKVEAGAQGEHKVQRGFLPVTTHSCHYFSNPGFAAAIGNLLTHETAQEKS

SEQ ID NO: 6968 - protein, 868 aa, Zea mays
  VARIANT 22: note = Ancestral polymorphism is P, Derived polymorphism is S
  VARIANT 470..868: note = Derived polymorphism lacks residues 470 to 868
  VARIANT 511: note = Ancestral polymorphism is L, Derived polymorphism is P
MRPRPSRFLQLLLVVVIACAVPGVRCSDRRFPHLDRVRELQRREGSSSAEQEAAARGLLARLLPSHSTSFEFRVISTSTELCGGKTCFVINNHPLFDGEGTPEILILGASGVEISAGFHWYLKHYCAAHISWDKTGGAQLSTIPRPGSLPRVPDGGVLIQRPIDWSYYQNAVTSSYSFAWWDWDRWEKEIDWMALQGINLPLAFTGQESIWQRIFERYNISKSDLDDFFGGPAFLAWSRMANMHGWGGPLPQTWLDDQLVLQKKILSRMYSFGMFPGGTSTIVAFLDFVQLLEQLFYVKDPFTSCYVSNRLKSTFVAVLPAFSGNIPAALKSKFPSAKVTHLGNWFTVDSNPRWCCTYLLDASDPLFVEIGKMFIEEQIREYGRTSHIYNCDTFDENTPPLSDPNYISSLGAATFRGMQSGDNDAIWLMQGWLFTYDPFWEPPQMKALLHSVPVGKMIVLDLYAEVKPVWINSDQLYGVPYIWKVLFSLSANSMHYYPPFIFLHKKTRVTPFQVGVGMSMEGIEQNPIVYDLMSEMAFHHRQVDLQVWVKTYPTRRYGKPVKGLQDAWWILYRTLYNCTDGKNDKNRDVIVAFPDVEPFVIATPGLHVNTRQMYSTVPSKNYIRKDVSSDAYEHPHLWYDTNAVIHALELFLQHGDEVSDSNTFRYDLVDLTRQVLAKYANDVFLKIIESYKSNNMNQVTILCQHFLSLVNDLDTLLSSHEGFLLGPWLESAKGLARNSEQEIQYEWNARTQITMWFDNTETKASLLRDYANKYWSGLLQDYYGPRAAIYFKHLLLSMENNAPFALKEWRREWISLTNNWQSDRKVFSTTATGDPLNISQSLYTKYLSNADLLGLVEGTGSPWKSASL

SEQ ID NO: 6969 - protein, 217 aa, Zea mays
  VARIANT 6: note = Ancestral polymorphism is H, Derived polymorphism is Y
  VARIANT 26: note = Ancestral polymorphism is E, Derived polymorphism is V
MELRLYHLALLLGLVAWAAAAATGAEAQPVCDPSIIATQIALFCMPDMPTAPCCEPIIASVDLGGGVPCLCRVAAQPQLVLARLNATHLLALYASCGGQHTVGAHLAAACQGPSPPATVPVIAPPPPAAPRLKQPTREAPPPPPQSEKPSPSPQQQPGVAAAHGKAIPTSSAANFSTLAPAAAPTTPTPPHSGSDNGCVVVSSTIVIFVIAVITILE

SEQ ID NO: 6970 - protein, 682 aa, Zea mays
  VARIANT 402..682: note = Derived polymorphism lacks residues 402 to 682
  VARIANT 197: note = Ancestral polymorphism is G, Derived polymorphism is D
  VARIANT 24..682: note = Derived polymorphism lacks residues 24 to 682
MISIYKNQNYTTEQHNYFCTFCICSDDTSMRINCFYSGMPSDALYQELWHACAGPLVTVPRQGERVYYFPQGHMEQLEASAHHQQLDQYLPMFDLPPKILCRVVNVELRAEADSDEVYAQIMLQPEADQNELTSLDAEPQEREKCTAHSFCKTLTASDTSTHGGFSVLRRHAEECLPQLDMSQNPPCQELVAKDLHGTEWHFRHIFRGQPKRHLLTTGWSVFVSSKRLVSGDAFIFMRGENGELRVGVRRLMRQVNSMPSSVISSHSMHLGVLATASHAISTGTLFSVFYKPRTSRSDFIVSVNKYLEAKKQKISVGMRFKMRFEGDDAPERRFSGTIIGIGSLPAMSKSLWADSDWRSLKVQWDEPSSILRPDRISPWEVEPLDAANPQSPQPPLRAKRPRPPASPCMVSELPSGFGLWKSPIESSCTLSFSEPQRARELFPSIPTSTLSSSSNVSFNSKNEPSMLTSQFYWSARHTRADSCAASTNTVVIEKKQEPSSGGCRLFGINICSAEEEVLPEVTAPGVGYEQTAASVELNSDKLSQPSDVNNSDALAASSERSPLESQSRQVRSCTKVIMQGMAVGRAVDLTKLSGYSDLCQKLEEMFDIQGELGSTLKKWRVIFTDDEDDMMLVGDDPWDEFCRMVKRIYIYTYEEAKKLTSKSKLPVSSDSSKLSAANSLSE

SEQ ID NO: 6971 - protein, 618 aa, Zea mays
  VARIANT 122..618: note = Derived polymorphism lacks residues 122 to 618
  VARIANT 229: note = Ancestral polymorphism is N, Derived polymorphism is Y
  VARIANT 243: note = Ancestral polymorphism is P, Derived polymorphism is Q
MSQPAATVAAAAQPQGRGPAGRQGGGGGLGQSIAGIVRMAVFWYFASKFFGPKRPPADPGMLMSNLFQKGEPMDMWMYLSENEKFNDFANEDALIWHEANIPYAVWGPTSTRTRSLTYYPSEALKHNGSLYAHVYFARSGYPVDPTDPEYEQKSSFGRTHPVVAFLPKSKAGKKKSLLGDSEEPEEKAPRNKENKESEDKDEGPTEYISYWKPNVTINLVEDFTRYSQNQALFLSIPTIMYLPLLLHVSLNYLNVDPVTGDYYPTVFFNEFWLLKDKLIALNETVEELPLNLEVGPISMTKWQLFLQIEQSFQVHRSYGSMLEGEADELKRVFLEGNPYLLGLTMVVSLLHSLFDFLAFKNDIQFWNKNKSMEGLSAKSVVLNFVCQLVVFLYLLDNDTSWMILASSGVGVCIEFWKIGKAMHIEVDRSGKIPMLRFRDRESYAQNKTKEYDAIAMKYLTYVLFLLVVGFSIYSLKYEKHKSWYSWILSSMTSCVYMFGFIMMCPQLFINYKLKSVAHMPWRQMTYKFLNTIIDDLFAFVIKMPMLHRLSVFRDDVIFLIYLYQRWKYPVDKKRVNEFGFGGEDEPAAQEAVEGSDSAAAPQLTEAGSETSTEDKKTK

SEQ ID NO: 6972 - protein, 334 aa, Zea mays
  VARIANT 15..334: note = Derived polymorphism lacks residues 15 to 334
  VARIANT 87..334: note = Derived polymorphism lacks residues 87 to 334
MNRGRHRSRKHVEGQPGHAAKAMSAVAVAAAVAALAGAEATAAAGLAVNQHRQPGKSYATGATDPCSLQYSRELAANKLSNESENMQDSDNVSMLTSMNTGNTAGSVFPFSKQNTDLFEVTSSRPEFGLVPSDSLTSSPHSSLKKASEKGSPPAPSPLLPPRALQRRLDPRVIGKSGANVRRVEQQTGARIKVQEIDKDASGERLIIVSSNEIPTEPISPTIEALILLHDKVITEMRRRTGAEIRVYSKADKPKYLSFGDELVQVAGPPAIARGALTEIASRLRTRTLRDTSTANNPPPFAPSDDPPGILNTVYMNILLASPLLKAILKDATAV

SEQ ID NO: 6973 - protein, 590 aa, Zea mays
  VARIANT 25: note = Ancestral polymorphism is R, Derived polymorphism is Q
MDVEMSCAAPEAAAVPVDWRGRPCRPRRHGGMRAAVFVLGVQAFEIMAIAAVGNNLITYVFGEMHFPLSQAANVVTNFVGTIFLLALLGGFLSDSYLGCFWTMLIFGFVELSGFILLSLQAHLPQLKPAPCDMSSTDGGCEKASGFKSTVFFLALYLVALGSGCLKPNMIAHGADQFDAATPGGANSLPTYFNSAYFSFCAGELVALTALVWVQTHSGMDVGFGVSAVAMAAGLASLVAGAAFYRNKPPQGSIFAPVARVFVAAFTKRKQVCPSSSNSVNAGACEPARLAGNFRHNNKFRFLDKACVPAAPQGPNTKPESAWRLCTVAEVQQAKTLLAVTPIFACTIVFNTVLAQLQTFSVQQGSAMDTALPPGSGSFRIPPASLQAIPYALLLALVPAYELLLVPLMKRLTGTRSGITPLQRIGVGLATLAFSMVAAADVERRRRDAAAEGRQMSVLWIVPQFLVFGVSEMFTAVGLIEFFYKQACAGMQAFLTALTYCSYAFGFYLSSVLVSLVNRVTARHGGAGWLGDNNLNKDRLDLFYWMLAVLSVLNFCCYLLCARWYNAGAQGSDAAASGLVASEVDDRKEII

SEQ ID NO: 6974 - protein, 135 aa, Zea mays
  VARIANT 26: note = Ancestral polymorphism is A, Derived polymorphism is G
  VARIANT 46..135: note = Derived polymorphism lacks residues 46 to 135
  VARIANT 55: note = Ancestral polymorphism is A, Derived polymorphism is S
  VARIANT 63..135: note = Derived polymorphism lacks residues 63 to 135
MYIYQIGKTKVFLRAGQMAELAARRAEILANAARLIQRRIKTHLMRKEFIKLRKASVQSQKFWRARLAKKIFEYMRRDVASIRIQKHVRAHSARKAYLQVYESATAIQTGLRAMAARNEHRFRRETRASIIIQLS

SEQ ID NO: 6975 - protein, 336 aa, Zea mays
  VARIANT 281: note = Ancestral polymorphism is V, Derived polymorphism is A
  VARIANT 221..336: note = Derived polymorphism lacks residues 221 to 336
  VARIANT 168: note = Ancestral polymorphism is Q, Derived polymorphism is H
  VARIANT 162: note = Ancestral polymorphism is R, Derived polymorphism is W
  VARIANT 153..336: note = Derived polymorphism lacks residues 153 to 336
  VARIANT 104..336: note = Derived polymorphism lacks residues 104 to 336
MEEDSGLFMQWAMTTLQHDDEDLGVDHIDNNGRDEATFPSLRALREASQAAEMIQELIGEPHAANSRCSGGDGDTTGGGTASSISGTAPRNSSSSSATIQPVGWNFGAAPAPPGRDGVPAVSATGSLLPDLVYGSPPTRRAAVLKSVGSIYAQDHIIAERKRREKINQRFIELSTVIPGLKKMDKGTILSDATRYVKELQEKLKALEDGGSGSNDRSIESWVLVKKPCIVVPGEDAGSPSWDSSGASPATNPLPEIEARFLNKNVMVRIHCMDGKGVVVRVLAELEELPLSIVHANVMSFQACTLIITITAKASFFSFSVIIDYTNNNIILCFLTT

SEQ ID NO: 6976 - protein, 162 aa, Zea mays
  VARIANT 29: note = Ancestral polymorphism is S, Derived polymorphism is I
  VARIANT 33: note = Ancestral polymorphism is V, Derived polymorphism is E
MSSLAKASIYLRDCVGSGLSKHQFKLLCSVFNVTTLVLSGFQTMVISEEFPEFRNLLTLLLEKCDLSDNFQMLANFLQHSPDLEKLTLGRCKFSKDPKKKKGKARLSKGCLNQFNVRCKNLKLTEIIYEDDDAKKVVELLWSMSGDLPKNYIKLTKVDPDHP

SEQ ID NO: 6977 - protein, 425 aa, Zea mays
  VARIANT 8: note = Ancestral polymorphism is K, Derived polymorphism is M
  VARIANT 119: note = Ancestral polymorphism is H, Derived polymorphism is R
  VARIANT 251: note = Ancestral polymorphism is N, Derived polymorphism is I
MELEAIGKRLRISSGSSSLARDRLTSLPDCVIHHIMSFLRARQVVQTCVLSTRWRHLWRSVPCLDIDQDEFKAAGSNRITEKEREHFEDFTDHLLIPNNISIALLDTLRLHVSDDEYYHRGASVRWIRHGIKYSAQNPGIMHKESNLAFWRLKKLHLSGVYLDGSFMKHVSSGCPYLEVLELKDCPCTFEEVTSHTLKNLILENCGCNGLYGITITSPTLKSLTIIGSEYYNTITLVLKAPAVAYLLLDVIAYFVKFGVSFDEMSSLAKASIYLRDCVGSGLSKHQFKLLCSVFNVTTLVLSGFQTMVISEEFPEFRNLLTLLLEKCDLSDNFQMLANFLQHSPDLEKLTLGRCKFSKDPKKKKGKARLSKGCLNQFNVRCKNLKLTEIIYEDDDAKKVVELLWSMSGDLPKNYIKLTKVDPDHP

SEQ ID NO: 6978 - protein, 110 aa, Zea mays
  VARIANT 9: note = Ancestral polymorphism is S, Derived polymorphism is L
  VARIANT 13: note = Ancestral polymorphism is E, Derived polymorphism is K
  VARIANT 20: note = Ancestral polymorphism is K, Derived polymorphism is N
  VARIANT 34: note = Ancestral polymorphism is D, Derived polymorphism is E
  VARIANT 41: note = Ancestral polymorphism is G, Derived polymorphism is S
  VARIANT 51: note = Ancestral polymorphism is H, Derived polymorphism is Y
  VARIANT 70: note = Ancestral polymorphism is H, Derived polymorphism is N
  VARIANT 84: note = Ancestral polymorphism is L, Derived polymorphism is P
  VARIANT 85: note = Ancestral polymorphism is Y, Derived polymorphism is C
  VARIANT 90: note = Ancestral polymorphism is I, Derived polymorphism is F
  VARIANT 98: note = Ancestral polymorphism is T, Derived polymorphism is I
  VARIANT 103: note = Ancestral polymorphism is R, Derived polymorphism is C
MNCSGIIESGESEKVLLLMKSGVRIPFYVHFCSDKSTTPSGFNLKLRKHIHNKRLEDVHMLRYDRIMLFHFGFGSNAHFIILDLYAQRNILLMDLEYTVMTLRSHRLLPD

SEQ ID NO: 6979 - protein, 434 aa, Zea mays
  VARIANT 12..434: note = Derived polymorphism lacks residues 12 to 434
  VARIANT 39: note = Ancestral polymorphism is A, Derived polymorphism is T
  VARIANT 156..434: note = Derived polymorphism lacks residues 156 to 434
  VARIANT 176: note = Ancestral polymorphism is H, Derived polymorphism is Y
MASGVLSQLYHQGVEVDALVRVETDRMRAALQEARRRHARGVVAAVGRAAEARLRAAEAELERACRRGADLEERLRQLAGEGQAWLGVARSHEVVAAGLRATLDKVLQQPAVAAAGGGECGVAEDAQSCCFVASPSGLVAGDAVSTGHNSQGKKEQEQAANPMPTRSSQVQPTPPHPPRRRRRRVANGNFSKRRRGSTARNFNRPHRRGLLLTDPEGRLDSRPSPATPGMPSSRLVHLILLATLSLLLAQTLASSAPVPAAGSASAESGDPCATTVADGEADVPLCPVWCFRPDPVCGADGVTYCYLPEEMRNPDSFKWMLQNPMYRQQLQDMLKNMGGSPDQWDNRMLDHLKNFDLSSPEVRQQFAQVGMTPEEVVSKIMANPDVAVAFQNPKIQTAIMDCSQNPLNIVKYQNDKEVMDVFMKISQIFPQING

SEQ ID NO: 6980 - protein, 551 aa, Zea mays
  VARIANT 21..551: note = Derived polymorphism lacks residues 21 to 551
  VARIANT 32..551: note = Derived polymorphism lacks residues 32 to 551
  VARIANT 63..551: note = Derived polymorphism lacks residues 63 to 551
  VARIANT 96..551: note = Derived polymorphism lacks residues 96 to 551
  VARIANT 101..551: note = Derived polymorphism lacks residues 101 to 551
  VARIANT 123..551: note = Derived polymorphism lacks residues 123 to 551
  VARIANT 326: note = Ancestral polymorphism is P, Derived polymorphism is L
MAKRLAGADKEVLVEVVRFTQKSGLRGCDGGWKDFLARNDRKFGASVSDPRKRSRDVLLAFLQTFPKDFQKYFGKLVKRHNERSAVQQYVADFPDEVSPQQKLVQLTAEHPEYRKHYCFPSYQEASKVLQIDVSSLTSSSAMLSIDCEMVLCSDGTEAVVRVCVVDDKLKAKLDILVNPSKTVADYRTHITGVSKKDLEGVTSSLVDVQKSLKRMLSKGNILIGHSLHRDLCALKIDYSQVIDTAYIFKYANLPTTASPSLNSLCKAILGYSVREEGEPHNCLKDAEAAMNLVLAKLKNEFNDPIEIAASSVTESDVVKLLAHRIPVYLPCQELCKIFSGNPNIDDKIDSRIRGEFYSTCISFNDVDEVDKAFEELDGQKTKDSGGRLQKHVLLKLDNGDVVSFYVRKMVYDSWPKQIEVPRKRPEPTEDPEPKKEHAKGVQQKKRNNFVRDTEDPEPKKRPEPIEDPEPKKEHAEGVQRKKRSKKHANKEDTEDLEPKKRSDPTEDPEPKKRPEPTEGIQQKKRSKKHAKVQQKKRSKKHANKENELMVE

SEQ ID NO: 6981 - protein, 316 aa, Zea mays
  VARIANT 172..316: note = Derived polymorphism lacks residues 172 to 316
  VARIANT 107: note = Ancestral polymorphism is A, Derived polymorphism is D
  VARIANT 70: note = Ancestral polymorphism is R, Derived polymorphism is P
MELSRAIVCASLRQVYSLHGRCGPPTGAFLTPRSSPTVVGVLVPFAWSSCLRRGDGLGNWALLHLLQEVRRCCISRALRPRQQEWVEGWVRRNDTLVRGLPILVGGASLVAVLLNRAVSGIAAVADASSSQSRADILTLALSVTDILAGLVWLSIRPKSISPVVPRGVECKRVGPGVSSSALHELLWTWDSLTTATCCKSLVIVYGGNCALQIGVAAGSPEDGNALNVDVQKFTQGSLYKSVMESKKQSYLANLVLYPGRSELPFLPANTQALILQPIGDKGIAIVGGDTIRGFTNIDQAWIAMIADKLDATLSKS

SEQ ID NO: 6982 - protein, 1133 aa, Zea mays
  VARIANT 969..1133: note = Derived polymorphism lacks residues 969 to 1133
MTGAREPVAMEIPAEEGPAAARAPPRRIRRRLVEGARGGGAPASVEEIEARLREAELRRQQFREWLACKARKKPRSPSWSSQEEDHGQRLEAKLLAAEQKRLSLLAKAQNRLAKLDELRQAAKNDVEMRFEKEREELETRVESRVRQAEENRMRLLHADMQKRAALKERTARSLVQKAKSESKYMEQVRSAISLKRAAAEKKRLRLLEAEKTKAQARLLRIQKAAMTVCSRRESERRKLKEQLDNKLQRAKRQRAEYLKQRGSPRGSTHADYLKHAYALSRKLARHWRIFVKSRKTTFALAQAYDALGINEKSVKNMPFEKLAMSMESPVVLRSTKALLDRLEKRLVISHSVASSSVENVDHLLKRLGSPPRRKAPPSREGKTRAVVKRPAKSSEASIKLPRYSLRVVLCAYMILAHPSAVLSGQGEREKQLIESAANFIKEFELLIKVILDGPGQSSGVTGQRKFRAQLANFDKAWCSYLYSFVVWKVKDARLLEEDLVRAACKLELSMMQTCKLTADRHSQNNLTHDMKAIQKQVIDDQKLLRDKVQHLSGDAGLERMNSALSDTRSKFFEAKENGSPLTAPVANVSTPLSINSSGKAPLSEVPESSRTNVVGTSSVVRSLFSASSSSVSSSPEKQPTENEKMVNEMLHEDASAFAGRSDSASTAEEEFQNKVRETMEKAFWDMVTNSMRGERPDYSQLINLVKEVRDSLHDLAPKEWKEKILENIDLEILSQVLGSGSQDAQYLGQILEYSLDMVRKLSAAAKEDEMKKNHDKLLSELSTNSEVNGDGINSFVIAVIKGLRFILEEIKELKAEVSKARIQMMQQIIKESAGVEYLQKAFADRYGPPETAPASLPLTLQWILTSKNIAEEEWSEHSDCLSVMPAAGQAPALVPVLRSGHGAPVGQPSPSAGDTSGQPECKGEKLDKLIRIGLLQLISSVEGLQLQSTPESFQINLLRLRAVQSQFQQVIVIATSMLVLRQVLMSENSRATPLELENAISELVKALADILHSSPDSGTEEIVQAMVNASASVGSPSEEKVQARMQMITRVFLKSLQPGDVVFKKVSRAVYCAFRGIILGGSGPKGQKLADAALRRIGATNVVDRVLKAAEVLIKVATVSEKVHGPWYKALIV

SEQ ID NO: 6983 - protein, 191 aa, Zea mays
  VARIANT 4: note = Ancestral polymorphism is A, Derived polymorphism is E
  VARIANT 18: note = Ancestral polymorphism is L, Derived polymorphism is P
  VARIANT 23: note = Ancestral polymorphism is M, Derived polymorphism is T
MATARGTAAMGMFFLVALSASHTASSLRPGAGLGTCRASGYLPGRSGNCEKSNDPDCCEDGKMYPQYHCSPPVTASTKAVLTLNSFEKGKDGGGPSECDNAYHSDSEKVVALSTGWFSNMARCGHRIRISANGNSVYAKVVDECDSVHGCDDEHNFEPPCDNNIVDASPAVWDALGLDQNVGMVDITWSEE

SEQ ID NO: 6984 - protein, 581 aa, Zea mays
  VARIANT 306..581: note = Derived polymorphism lacks residues 306 to 581
  VARIANT 285..581: note = Derived polymorphism lacks residues 285 to 581
MAQWFVWSAVVLCRECLELKMSEANTTQLDLEKGFSQVSNDNDSSSPATMHKMKVETEDGGSEIESPTPEKRESRSKGVVVSSLARNLLAERYRDRFSNQLVEDEGQTDDEDYNGSVSPSSSQSLFSESIELLDKHKDLLSLFNRMESSIRLLHLRKKMATFNNIATQVEILTKRKLLYSHLAQMKHLFPEAIQIKRILVHDEKSLCMYADMEITLLMDVVECTSPDQSPSMTICEAFYSKLLSFLDAHHKGADIPEAILPELFNSKPREKLYLEAVHNGYAAESPLQGATEERFLNASHFPQSFRKLMSQKIIADGIQKTQLLSDPADLSSVIAYGTKGSNGNPKKEDEHAPVPGKYEISATPSRHLISCCQEGTPKQGTSESPLFSGTPVMQTPKRQLPTSLDKPKATCGHISEPCSASSARRSLNTLLKFEVGSPYYDGVEHTDTTKKGMISEDSSNFNKSFEEDSPVLFIDKDKIDEVDSVDSQEKIASLHTTFDIVCDISHPTKNSLITKQELFHNILANNLEIEEIGEIEEQLNILEDLAPDLISKKMINGGEILYSIQPISDQNSVRVRLVEPV

SEQ ID NO: 6985 - protein, 420 aa, Zea mays
  VARIANT 175: note = Ancestral polymorphism is D, Derived polymorphism is G
  VARIANT 199: note = Ancestral polymorphism is R, Derived polymorphism is S
  VARIANT 215: note = Ancestral polymorphism is P, Derived polymorphism is S
MALRSQLARARCVALQDHLAASPDLPRHPALRSLLRLVNAELRFLSSLRLAPATPLSSNLPHLVALHLVLTHPAIRSPSRLSPLPGVDFSCAFRGRPAWVLVSASNPARLAWAPPGGLRARFAAALEAARGAPPATRPEKLLVVFSRGVGVDIARGLTEGFEAVEADLLEEFIGDSEEENEHGWVVISLDSSEELRNFRAFEIDVVEGASEVLLPSDVAVDEVSADEEELLGFWGSFAAFMEKMWKVSRELVNLDTTALVAIVSGISNGGVGKLMAAPEAETRARFKCNYKFVMDQAQYELQFPILIELRKAVEGKQCIICETVNLEFKEIVSMCGGPEENTRARHLLKQLTIVPDNPSARMMDLPTTRKLAMKNKIVFGTGDHWRAPTLTANMGFVRAVSQSGMSLLTIEHRPRALIGL

SEQ ID NO: 6986 - protein, 319 aa, Zea mays
  VARIANT 62: note = Ancestral polymorphism is R, Derived polymorphism is M
  VARIANT 119..319: note = Derived polymorphism lacks residues 119 to 319
  VARIANT 172: note = Ancestral polymorphism is R, Derived polymorphism is G
  VARIANT 174: note = Ancestral polymorphism is R, Derived polymorphism is H
  VARIANT 247: note = Ancestral polymorphism is T, Derived polymorphism is I
  VARIANT 260: note = Ancestral polymorphism is G, Derived polymorphism is S
  VARIANT 261: note = Ancestral polymorphism is V, Derived polymorphism is A
  VARIANT 286..319: note = Derived polymorphism lacks residues 286 to 319
MDLVVESVVHGRLPVRPSRFPLLPGSLPSTTVALSAAFSGRPCPPIVRRNAPAVVPFAKKKRNEYIEDPPDEEVADDFTDEMEEDFDDAKEDEGDVMDDDEEYEDDYDFEDDFESDDEQDLYAGDGGAGGGISLAGAWWDKEALALAEQVSASFNDDLKIYAFKTAANLTIRVRIEKMSTRYGSPTIDDIEAYTIAYRAKLDEAESAGKIPKNISLEVSSPGVERVIRIPEELERFKERAMYVRYTTASDEATTPQEGDGVLTLISYDMDLRECTWGIADVKINRQQSGKGRPLSKKQREWRLQTPFESLKLVRLYSEC

SEQ ID NO: 6987 - protein, 399 aa, Zea mays
  VARIANT 38: note = Ancestral polymorphism is M, Derived polymorphism is I
  VARIANT 39: note = Ancestral polymorphism is A, Derived polymorphism is P
  VARIANT 49..399: note = Derived polymorphism lacks residues 49 to 399
  VARIANT 54: note = Ancestral polymorphism is T, Derived polymorphism is A
  VARIANT 55: note = Ancestral polymorphism is I, Derived polymorphism is T
  VARIANT 70: note = Ancestral polymorphism is P, Derived polymorphism is S
  VARIANT 73: note = Ancestral polymorphism is P, Derived polymorphism is S
  VARIANT 79: note = Ancestral polymorphism is A, Derived polymorphism is T
  VARIANT 81..399: note = Derived polymorphism lacks residues 81 to 399
  VARIANT 148: note = Ancestral polymorphism is L, Derived polymorphism is P
  VARIANT 164: note = Ancestral polymorphism is K, Derived polymorphism is M
  VARIANT 176: note = Ancestral polymorphism is S, Derived polymorphism is F
  VARIANT 182..399: note = Ancestral polymorphism lacks residues 182 to 399
  VARIANT 189: note = Ancestral polymorphism is Q, Derived polymorphism is K
  VARIANT 192: note = Ancestral polymorphism is W, Derived polymorphism is C
  VARIANT 195: note = Ancestral polymorphism is G, Derived polymorphism is R
  VARIANT 296: note = Ancestral polymorphism is W, Derived polymorphism is R
MSSIGELLVIPFLSKFPIPSHGEDASSVAVQNYFGVLIPYGGLQDFLTEKKDLTITLIRNRILPLYSLDPCSPYLISTANWVIGQLAICLPEDMSSSIYQSLMKALTMEYVQDITCYPVCASASGAIAELIENSYVPPDWLILLQVVLKRISTGDENESALLFKLLGTIVEEMHVSPVMPGRSPFIISQYSWCIGFLDRGSPGNPSTPVGGCRYDSSLGLLTKFLNLLKGAPGGIVDLNNVAETLEEGSAFLPLSCVNDASVLLEFVMSSVTCMEETESLKVFELVATWADAIANWDSWEEMEDQGVFNTIKEAVNFHQRFDLAGLFLKTHFLKVCRNGTIKIGLETNKIMDFIKFDIGNMVMMTGGRNTRRVGVIKNREKHKGSFETIHVLLRAFCYV

SEQ ID NO: 6988 - protein, 123 aa, Zea mays
  VARIANT 18: note = Ancestral polymorphism is P, Derived polymorphism is H
  VARIANT 35: note = Ancestral polymorphism is C, Derived polymorphism is F
  VARIANT 40: note = Ancestral polymorphism is P, Derived polymorphism is H
  VARIANT 101: note = Ancestral polymorphism is G, Derived polymorphism is R
MAKHVAAIFKITNSKDIHEIPNIFLEEGKSFLQLFLKRNPASRASAVQLMDHPFVQDHPAVRAVKSSALRNTSSSPADGRHTMSNRKLPSRKIITPLKGVGLSMRDFTGFSTVVPSPHSPNPG

SEQ ID NO: 6989 - protein, 400 aa, Zea mays
  VARIANT 154: note = Ancestral polymorphism is P, Derived polymorphism is T
  VARIANT 123: note = Ancestral polymorphism is A, Derived polymorphism is V
  VARIANT 54: note = Ancestral polymorphism is A, Derived polymorphism is V
MSIPHLFRCPISLDIFTDPVTLCTGQTYDRPCIERWLAAGHRTCPVTMQPLGDAALVPNRTLRHLIERWLSADHQISDATTPAAAAATSDDNAEEPSLAALKRCLQSGAGSGAKVAALKKGVALASESDVGRACMLQLGFLPVLLQLVFHAPTTRDLSEQEGLALQCALTLLPSSPASPQHGCLNMLKTEASLTSFVGLLARGPAAAKAGLCRLLETIATAAATRDLALAAAASPRVWQALLPLLRHDDERVSVAAVRAVAAICCAAEPARGSAVHHGAVPALLGCLAWASAGKGRGAAAWSALAALEALAASEAGRRAVARDPGAVRSLVRHVFMMSSSNEGSEHAVAALLAVCRESRAARTEAAAAGLVTQVLLLLQSQCGTRAKTRARSLLKMFKSM

SEQ ID NO: 6990 - protein, 237 aa, Zea mays
  VARIANT 135: note = Ancestral polymorphism is L, Derived polymorphism is F
  VARIANT 72: note = Ancestral polymorphism is N, Derived polymorphism is D
  VARIANT 10: note = Ancestral polymorphism is L, Derived polymorphism is F
MGGASDSNLLPPGFHFFPSDEELVVHFLRRKASLLPCQPDIVPTVCMNHHDPWELNAIGFVRVVPDRFASNNNQQILFSPFLGKALEAGSQWYFFSHAKQSRATPNGYWSSVCADETVLSGGGGCSVVVGLKKTLVFSTGEPSDGAETNWIMHEYHLLDGRTGGSSSSSSASSIHSSSKKSHHPNTEFSNWVICRVFDSTGGGSQANCHDDEGMELSCLDELFLSLDDYDEVSLSSN

SEQ ID NO: 6991 - protein, 33 aa, Zea mays
  VARIANT 28..33: note = Derived polymorphism lacks residues 28 to 33
  VARIANT 4: note = Ancestral polymorphism is M, Derived polymorphism is I
MLLMQSTIWMGRCCLEGKLLLFLQRKTGRSLLT

SEQ ID NO: 6992 - protein, 188 aa, Zea mays
  VARIANT 168: note = Ancestral polymorphism is G, Derived polymorphism is R
  VARIANT 149..188: note = Derived polymorphism lacks residues 149 to 188
  VARIANT 91: note = Ancestral polymorphism is P, Derived polymorphism is T
MPTPALPPPALPLFPRRLAADLDPANLALATTAHAPTRDGSSPPCPSHHNRAAPSPAEPETSELAVEAMPLGDGAEVADFMLPDELLVALTWDPYKQLDLTCRITALAVSGRVSGLERETGRLRAEAAGKDRENTELRERVVLLDTALQETNARLHPPMLTMADLPTGTRDLAREFRFPPGWFLEGSK

SEQ ID NO: 6993 - protein, 105 aa, Zea mays
  VARIANT 38..105: note = Derived polymorphism lacks residues 38 to 105
  VARIANT 43..105: note = Derived polymorphism lacks residues 43 to 105
  VARIANT 45: note = Ancestral polymorphism is K, Derived polymorphism is N
  VARIANT 49: note = Ancestral polymorphism is K, Derived polymorphism is Q
  VARIANT 89: note = Ancestral polymorphism is P, Derived polymorphism is L
  VARIANT 90: note = Ancestral polymorphism is D, Derived polymorphism is N
MGLKAIGARSNTMKLDNNAEMNSVDTAGVEDLMDTIEEVKPCWTKPSPKNQPSNGFVTFSLTMGPEYHISRITDVVVVARYLGATFVLLDIRGNELGNKRMGLYL

SEQ ID NO: 6994 - protein, 165 aa, Zea mays
  VARIANT 162: note = Ancestral polymorphism is P, Derived polymorphism is L
MSSQPPSTRTSPDTKVPRTGELALRRAIPANPNMKAIQESLEDISYLLRIPQRKPYGSMEGDVKKSMKIAMDNKEAILASIPEEHKEEGAKLYTSLLEEKTGLQTLLKYIKENNPDKLSIALASSLDTVAELELLQAPGLSFLLVCPFSVEERLAGCRYLAPEYA

SEQ ID NO: 6995 - protein, 154 aa, Zea mays
  VARIANT 49: note = Ancestral polymorphism is L, Derived polymorphism is F
  VARIANT 101: note = Ancestral polymorphism is V, Derived polymorphism is G
  VARIANT 107: note = Ancestral polymorphism is G, Derived polymorphism is R
MGPEAVRKSLEPTATAEEITGSTPARLHFYDPFVLSGVRIEAAEHGRLLCSFVVTPRLASPVGYLRSGVTATLADQLGSAVFFCSGIPSSGVSIEISVSFVDSAAVGEEIEVEGKLLRAGKSVGVVSVDFRKKKTGKLMAQARHTKYLVASSKL

SEQ ID NO: 6996 - protein, 443 aa, Zea mays
  VARIANT 202..443: note = Derived polymorphism lacks residues 202 to 443
MDSVMAAPDSPPQTVVLVSAGASHSVALLTGNVLCSWGRGEDGQLGHGDAEDRLVPTVLSGFDAPAITSVICGADHTTAYSEDELQVYSWGWGDFGRLGHGNSSDVFTPQPVKALQGLKIKQIACGDSHCLAVTMAGEVQSWGRNQNGQLGLGTTEDSLLPQKIQAFESVCVKMIAAGAEHTAAVTEDGDLYGWGWGRYGNLGLGDRNDRLLPEKVSSVEGEKMVLVACGWRHTITVSDSGNLYTYGWSKYGQLGHGDFEDHLVPHKVEALKDSTISQISGGWRHTMALTSEGKLYGWGWNKFGQVGVGNNDDHSSPGQVSFPEDQKISQVACGWRHTLALSEKKNVFSWGRGTSGQLGNGEIVDRNTPVLIDALSSDGSACKKLESSTAAPFAAKVWVSPSERYAIVPDENVRKAGGGTARGNGADANVPENDVKRMRVQSS

SEQ ID NO: 6997 - protein, 163 aa, Zea mays
  VARIANT 93..163: note = Derived polymorphism lacks residues 93 to 163
  VARIANT 80: note = Ancestral polymorphism is T, Derived polymorphism is I
MKGDYHRKDAAGSTMNPYKADQVSSDCSPLLEAGQAESLGTELLEMVPSREEEIKLKEYREDTVSTFVVDDYIYVWMMKTVLLDVKSTNTIVQIKSKIGALEGIGLLLSTCGGVWPTSPGWRAAASRAPPIEDNSEGRDGLLWWRDLARCHAGEVSIVVAQIK

SEQ ID NO: 6998 - protein, 63 aa, Zea mays
  VARIANT 58: note = Ancestral polymorphism is A, Derived polymorphism is T
  VARIANT 38: note = Ancestral polymorphism is E, Derived polymorphism is G
  VARIANT 34: note = Ancestral polymorphism is H, Derived polymorphism is Q
  VARIANT 26: note = Ancestral polymorphism is R, Derived polymorphism is L
MWCDSYFGKFCVDMPNSLGKYYYFIRLMGRKASHVALECALQSHPNMVKFFTIDPTSAAAISR

SEQ ID NO: 6999 - protein, 141 aa, Zea mays
  VARIANT 74: note = Ancestral polymorphism is P, Derived polymorphism is S
  VARIANT 58: note = Ancestral polymorphism is T, Derived polymorphism is M
  VARIANT 56: note = Ancestral polymorphism is A, Derived polymorphism is V
  VARIANT 55: note = Ancestral polymorphism is R, Derived polymorphism is C
  VARIANT 52: note = Ancestral polymorphism is E, Derived polymorphism is K
  VARIANT 49: note = Ancestral polymorphism is T, Derived polymorphism is M
  VARIANT 46..141: note = Derived polymorphism lacks residues 46 to 141
  VARIANT 41..141: note = Derived polymorphism lacks residues 41 to 141
  VARIANT 34: note = Ancestral polymorphism is C, Derived polymorphism is R
  VARIANT 15: note = Ancestral polymorphism is R, Derived polymorphism is Q
MLAARNRSVLSQGSRSYKSAKVAAKRLEEAALSCKGDERVQLLRRWLVTLKETQRATTVVRELQLGDNPDQTAPLLIETEKLLAQLFETEMNRRLKEDTYKGKKFNAICHFLGYQARGALPSKFDCDYAYASPSPAHLIKN

SEQ ID NO: 7000 - protein, 86 aa, Zea mays
  VARIANT 8: note = Ancestral polymorphism is A, Derived polymorphism is D
  VARIANT 14..86: note = Derived polymorphism lacks residues 14 to 86
  VARIANT 34: note = Ancestral polymorphism is D, Derived polymorphism is N
  VARIANT 46..86: note = Derived polymorphism lacks residues 46 to 86
  VARIANT 71..86: note = Derived polymorphism lacks residues 71 to 86
MNKLKKMALRVIAESLSEEEIAGLKEMFQTMDTDNSGAITYDELKEGLRKYGSTLKDTEIRDLMDALQTTWILKLYIKNHICGLCQ

SEQ ID NO: 7001 - protein, 265 aa, Zea mays
  VARIANT 91: note = Ancestral polymorphism is H, Derived polymorphism is Y
  VARIANT 114: note = Ancestral polymorphism is Y, Derived polymorphism is H
  VARIANT 165: note = Ancestral polymorphism is E, Derived polymorphism is K
MQLYHHPYSLDSQKVRMALEEKGIDYTSYHVNPLTGKNMNVDFFRMNPSAKLPVFQNGAHVIYRAIDIIQYIDRLAVHLSGEIPPVNTEVHQWMQKVDAWNPEMFTLTHTPAKHRAFVSKFIRRVLIARMAQAPDLASMYHVKLREAYETDDKVKDPDIMKQSEEELSKLLDDVEAQLGKTKYLAGDEFSPADSMFVPVLARITILDLDDEYINCRPKILEYYNLVKLRPSYKITIGRYFSGWKKYRTLFKTSFFLCVRTLFRKY

SEQ ID NO: 7002 - protein, 476 aa, Zea mays
  VARIANT 60: note = Ancestral polymorphism is H, Derived polymorphism is Y
  VARIANT 207..476: note = Derived polymorphism lacks residues 207 to 476
MEAAPTPEPGPHVLVIPFPAQGHALPLIDFVALLAARGLRLTVVTTPANLQLLSSLLAAHPTAVRAATFPFPSHPSLPPGLENTKGCSPVQFPAFVHALAELRGPILAWVKAQPDPVVAVVADFFCGWAQPLAREIGAAGIVFSPSGVLGTAVPHSTFRRLVRRPAECDGDDEFSVSFPAIPGEPSYQWRELLMMYRNYMAGALDEQVGASVRQNFMWNLHDSWGFVFNSFRALEGRYLEQPLEDLGFKRAWAVGPVAPEADAAVARGGQATVELADLSAWLDAFPEGSVVYVCFGSQAVLSPAVAAALAEALERSAVPFMWAVGDAVVPDGFEARAAASGRGSVVRGWAPQVALLRHPAVGWFVTHCGWNSTLEAVAAGVPMLAWPLTGDQFFDARLLVDEARVAVRACKGGLGFVPDAGELASVLADATGEKGHDVRTRAKALAAEAARAMKPGGTSYADLELLVQEIRNRKLS

SEQ ID NO: 7003 - protein, 297 aa, Zea mays
  VARIANT 71: note = Ancestral polymorphism is S, Derived polymorphism is Y
  VARIANT 78..297: note = Derived polymorphism lacks residues 78 to 297
  VARIANT 110: note = Ancestral polymorphism is T, Derived polymorphism is I
  VARIANT 113: note = Ancestral polymorphism is P, Derived polymorphism is A
  VARIANT 117: note = Ancestral polymorphism is D, Derived polymorphism is H
  VARIANT 126: note = Ancestral polymorphism is P, Derived polymorphism is L
  VARIANT 187: note = Ancestral polymorphism is T, Derived polymorphism is N
  VARIANT 212: note = Ancestral polymorphism is D, Derived polymorphism is G
  VARIANT 236: note = Ancestral polymorphism is A, Derived polymorphism is V
  VARIANT 254: note = Ancestral polymorphism is G, Derived polymorphism is R
  VARIANT 278..297: note = Derived polymorphism lacks residues 278 to 297
MEDIEDVLGPVGLSVGGAPPVLRLLLASVAASSSAGRPGLRMRGLSSRPGSPARRRFTSRLSGAHITRQASLLTSFCLFSFIARTSKVVSVLSDSEYMSGQLSAFGYAIIEEPEGADLWLINTYGLFLLLADCSLKPRSIHEMNLKLLWISVRKNKFIEILPINVGCLGACTYCKTKHARGHLGSYTIDSLTGYRYNLPNLLNTIVAEHPVDRSTLLRIGMTNPPFILEHLKEISAVLRHPWVYSFLHVPLQSGSDAVLTAMSGEYTVGKFRKVVDALCELVPGMQIATDIICGFPG

SEQ ID NO: 7004 - protein, 451 aa, Zea mays
  VARIANT 262: note = Ancestral polymorphism is V, Derived polymorphism is G
MKLPLLRPLWLGLGSAAGPPDAAPEPAKPSLPAAWLLLHALFCATSMAVGFRFSRLIVYLLFLPTPPINPAAHLVSLVSPPAVVLAGGNATAMATITTTTTTTTTVTTTTTVAAEISARPQHHHHHGPVFVGRHPIRVRAWPHPNPSELLDAHRILAAVQNAQRSAKRRGAGPARPVIAVTPTTTSALQVPSLTSLAHTLRLVDAQLVWIVVEPGHRTDAVAAVLSRSNLDFLHITGPGDSTASLRMHALREIRAKRMDGIVVFADENSILRTELFDEAQKVTTVGAVPVGILGEDDGTSESFLQAPSCDAEGKLVGYHVSEETVLPANRSDMLMASRLEWAGFVVNARALWEDTKERPLWVRDLSAIDDADARAASPLALVTDAGRVEPLASCAQAALAWSLRSDSLHEVKFPHEWKIDPALLNTGARQQTVQPETQPMQTTLASTEDQH

SEQ ID NO: 7005 - protein, 142 aa, Zea mays
  VARIANT 36: note = Ancestral polymorphism is H, Derived polymorphism is Y
  VARIANT 68: note = Ancestral polymorphism is A, Derived polymorphism is V
  VARIANT 80: note = Ancestral polymorphism is G, Derived polymorphism is V
  VARIANT 84: note = Ancestral polymorphism is M, Derived polymorphism is I
MIMAKLTMLIVEGPTATNHTESPSRPPGHHHTTPHHTTGGGGDPVENTKAMATALNRGLRLLAAGAEASKPASRGFHATGVKRMGGHGHDEPYYIHAKHMYNLHRMKHQGLKVTLSVLGAVGIGVGVPVYAVIFQQKKTASG

SEQ ID NO: 7006 - protein, 442 aa, Zea mays
  VARIANT 187: note = Ancestral polymorphism is Y, Derived polymorphism is S
MATRVLPPALLSFILLLLLSLSARDTVAAGEDFPRDGRVIDLDDSNFEAALGAIDFLFVDFYAPWCGHCKRLAPELDEAAPVLSGLSEPIVVAKVNADKYRKLGSKYGVDGFPTLMLFIHGVPIEYTGSRKADQLVRNLKKFVSPDVSILESDSAIKNFVENAGISFPIFLGFGVNDSLIAEYGRKYKKRAWFAVAKDFSEDIMVAYEFDKVPALVAIHPKYKEQSLFYGPFEENFLEDFVRQSLLPLVVPINTETLKMLNDDQRKVVLTILEDDSDENSTQLVKILRSAANANRDLVFGYVGIKQWDGFVETFDVSKSSQLPKLLVWDRDEEYELHPYKNHCVTGMFLTSDGTVFLSMKVDGSERLEEGDQASQISQFLEGYRAGRTTKKKITGPSFMGFLNSLVSLNSLYILIFVIALLFVMVYFAGQDDTPQPRRIHEE

SEQ ID NO: 7007 - protein, 650 aa, Zea mays
  VARIANT 500..650: note = Derived polymorphism lacks residues 500 to 650
  VARIANT 446..650: note = Derived polymorphism lacks residues 446 to 650
  VARIANT 180..650: note = Derived polymorphism lacks residues 180 to 650
  VARIANT 64..650: note = Derived polymorphism lacks residues 64 to 650
  VARIANT 47: note = Ancestral polymorphism is C, Derived polymorphism is R
  VARIANT 7..650: note = Derived polymorphism lacks residues 7 to 650
MTEGQSEETASAPEGVSVLRKNSDDVGWEYGVLVDINNKDKVKCILCDNQMCGGVYRLKQHIAQEGKNAKKCQGMKTTKEKLLEAQEKCKKALDGAKRKREVKTVRELELREEVHVSRVGGSEEVTCVGSSEPHKLGPMDKWTKAIDPTATKSESLTQQRLNKELWKERLHEVHKYIARWAFNHAISFNACDNDEFKQMCEAIGQFGPGIEPPTMFDLRGRLLEEEYARTKSLLQEREAEKMKNGCSIMTDAWSDKKRSIMNVCTNCADGTSFISSKEMSDVSHTSEVIFELVDKAIEDIGPDDVVQVVTDNASNNMGAKKLLHVKRPHNFWTSCATHTINLMLQGIGNMPRFKKVIDQAKAFTIFVYGHTRTLECMRYFTEGKEIVRPGVTRFASNYLTLDNIQEKKDQLRKMVVHILRLVDGDVKPSMGFVYGEILKAKRHVKEALGNVENRFKDVVVVIDKKMAGRLDSPLHLTAYLLNPHYSYADPSIFDVPKITEGFINCVETFYYHDDEMQEQAANIELQKFRNREGPFSKKLARTFENFDYNPASWWRLYGTETPALQKMATKILSLTASSSGCERNWSGFDGVHTKKRNRLTTDRLNKLVYIQFNNRLINKRAKIKSKKITDVLLSSGTTEAQGYPMLLIST

SEQ ID NO: 7008 - protein, 498 aa, Zea mays
  VARIANT 31: note = Ancestral polymorphism is V, Derived polymorphism is E
  VARIANT 47: note = Ancestral polymorphism is R, Derived polymorphism is G
  VARIANT 101: note = Ancestral polymorphism is S, Derived polymorphism is L
  VARIANT 137..498: note = Derived polymorphism lacks residues 137 to 498
  VARIANT 180: note = Ancestral polymorphism is R, Derived polymorphism is C
  VARIANT 201..498: note = Derived polymorphism lacks residues 201 to 498
  VARIANT 219..498: note = Derived polymorphism lacks residues 219 to 498
  VARIANT 364: note = Ancestral polymorphism is A, Derived polymorphism is V
MNLTLSLATNGGATAKKRKLLRDSVVVDDDVTTSCDGGDRRHGRVARLLLQAGRERVTAKLEADDDRLRLLHLLLASVSAAEAGDARAAAAALHEVRRRASFRGGDPAQRVAAHFARALAASSLVVRSPPGAEAEASPPTRAERFLAHTMFYQASPIYQFAHFTANQAIVEAFQSGGRRRRRLHVVDLDVSYGFQWPSLIQSLSAAAAASASTSTSSASHDGDEPVSLRITGFGTSHDELRRTEARLARFASGFPSLMFEFDGIVDDGPDSVLRDERIKVVDHDATVVVNLVLPGSRSSMTTGTRQKARSALLARTIHSLNPSLVFLVEKDGGGGGNNNATSRGTGRSSLLLPAFTASLRYFSAVFDSLHECLPADSAERLAIERDHLGVEISDAMACLDFNSNGGDDDHMAEPSWRQMMERSGLFEGVELSTRTVSQAKLLLKMKSAGCGGGGFRVVEGEGGRAMSLAWRDREQLITATGWRRRRPSIDHHEARVHG

SEQ ID NO: 7009 - protein, 335 aa, Zea mays
  VARIANT 279: note = Ancestral polymorphism is V, Derived polymorphism is L
  VARIANT 278..335: note = Derived polymorphism lacks residues 278 to 335
  VARIANT 225..335: note = Derived polymorphism lacks residues 225 to 335
  VARIANT 203: note = Ancestral polymorphism is N, Derived polymorphism is I
  VARIANT 202..335: note = Derived polymorphism lacks residues 202 to 335
  VARIANT 199: note = Ancestral polymorphism is R, Derived polymorphism is W
  VARIANT 190: note = Ancestral polymorphism is A, Derived polymorphism is T
  VARIANT 184: note = Ancestral polymorphism is R, Derived polymorphism is W
  VARIANT 161..335: note = Derived polymorphism lacks residues 161 to 335
  VARIANT 147: note = Ancestral polymorphism is G, Derived polymorphism is E
  VARIANT 145: note = Ancestral polymorphism is H, Derived polymorphism is R
  VARIANT 140..335: note = Derived polymorphism lacks residues 140 to 335
  VARIANT 127: note = Ancestral polymorphism is N, Derived polymorphism is Y
MKSMGSRDKLAAASSPRRVLLVVFAFCFAFATFLTFLYTTSHFTTAPGSGSGSIAASTTTTTTTTSGSAGGGGGQGQAGPESVSKRLPVPVFEALVHFASISNATHRMSDTDIRAMSSVLRARAPCNLLVFGLGAESPLWLALNHGGRTVFLEENEFYVKYLEPRHPGMEAYDVSYTTKVRDFRDLLAAARAARAKECRPVQNLLFSECRLAINDLPNDLYDVAWDVVLIDGPSGWNPNSPGRMPSIFTTAVLARSGATAAKGPTDVLVHDFQFEVEQVLSREFLCDENRVAGSGTPSLGHFVIRGGGAGAGDAFCSAQEDGSSGEKTRRRRSRK

SEQ ID NO: 7010 - protein, 356 aa, Zea mays
  VARIANT 342..356: note = Derived polymorphism lacks residues 342 to 356
  VARIANT 30: note = Ancestral polymorphism is V, Derived polymorphism is D
MEKYELLKDIGAGNFGVARLMRNKETKELVAMKYIPRGQKIDENVAREIINHRSLRHPNIIRFKEVVLTPTHLAIVMEYAAGGELFDRICNAGRFSEDEARYFFQQLICGVSYCHSMQICHRDLKLENTLLDGSPAPRLKICDFGYSKSSLLHSKPKSTVGTPAYIAPEVLSRREYDGKTADVWSCGVTLYVMLVGGYPFEDPDDPKNFRKTIGRIMSIQYKIPEYVHVSQDCKELLSRIFVANSAKRITIREIRNHPWFLKNLPRELTEAAQAMYYKKDNSAPTYSVQSVEEIMKIVEKARTPPPSSTPVAGFGWAEEDEQEDSKDPDEEHEDGEDEYEKQVKQVHASGEFHLSC

SEQ ID NO: 7011 - protein, 126 aa, Zea mays
  VARIANT 24: note = Ancestral polymorphism is W, Derived polymorphism is R
  VARIANT 45: note = Ancestral polymorphism is L, Derived polymorphism is H
  VARIANT 51: note = Ancestral polymorphism is P, Derived polymorphism is R
  VARIANT 72: note = Ancestral polymorphism is L, Derived polymorphism is P
  VARIANT 85: note = Ancestral polymorphism is R, Derived polymorphism is Q
MANEGVAAERAVKAPPPETESIVWREDKGRFQTPDGEAFLQYRLLDGRGAPAAAVMDLVHTYVPRSKRGQGLAARLCDAAFAHAQARGMRVLPTCSYISDTYLPRNPALKELVDKDQEPHPKPSSM

SEQ ID NO: 7012 - protein, 207 aa, Zea mays
  VARIANT 185: note = Ancestral polymorphism is P, Derived polymorphism is L
  VARIANT 148..207: note = Derived polymorphism lacks residues 148 to 207
  VARIANT 138: note = Ancestral polymorphism is L, Derived polymorphism is V
  VARIANT 107: note = Ancestral polymorphism is K, Derived polymorphism is R
  VARIANT 100..207: note = Derived polymorphism lacks residues 100 to 207
MSPYTLGRAACVCLSCSYVFSSIQFYVMKRSGMEANHMMVRSLYDSSWRRMLLQRPRIRIDGLYVCYYRYLRFFPSGKFLYKISPDKIKDAVKCMHFRASKADCVFKSEYILSEDGQIEMALLYPGQWCTLVRMHLRLRVNATELQNWKGSILELVEGWEEDETHDPDAPAVSHSRGLSPSVFVPFEEADTSVLNLPVEKMGYYVPG

SEQ ID NO: 7013 - protein, 84 aa, Zea mays
  VARIANT 2..84: note = Derived polymorphism lacks residues 2 to 84
MQIEMALLYPGRWCTLVRMHLRYFWCRLRVNATELQNWKGSILELVEGWEEDETHDPDAPAVSHSRGLSPSVFVPFEEVHYFYI

SEQ ID NO: 7014 - protein, 806 aa, Zea mays
  VARIANT 234..806: note = Derived polymorphism lacks residues 234 to 806
  VARIANT 3..806: note = Derived polymorphism lacks residues 3 to 806
MDWARQKGVSLPLPRSEYEPPRMHYQHAGSRSRMPPFARGGGAYSRGQKQFYPPPPPPLPAAALPLLPQNKHEVLMEAGRLAAEYLVAKGVLPPGSLQQRGSTVVAGGWGQLPPPPPPPLSVTQEAPAYHIARNSRRQIDDERGIRNARSRRNRGGDYSSSNGSNYNGRGKRKFGADNKYSDWTKDRGRNRRYSDIRSYDDEDDDGAPPGFKRERQSGGGIDEVGSSMSGVAWEGPSSKVEAMGESELEDTGSKASSNSNIQQKASALQEVEDENEANKMQENSVVSNSDVAEQALNGEDNSNNDSSAGVEEAGTKHLPVSSGEKVSDGRLEHSGVLNDKVEDDSTLHEKSEDDTMSEEVSVMESNLPNDARNLLNYCSFARVPTRPRTVLANRNVGPGQREITVSEQLNLVTSEEISNMAMDGEANTNSITSIEEGSKVELVGQDQEHAEQSAICNQVAESVAFHEKETRGETEEKEEQKNIPQHYEVEDNKETNELCPTFASSQNNQSAICNQVAESVASHEKETQGETEEMEEQKNIPQHYEVEDNNETNELSPTFASQNNFNLQVEKGIQIYNLDTPPQDELLIDPPDKGKTVDSELLPNIKAEDAVTVEEEKIGQSSSFKIRDLNLVGSPEVVDMRGDPRLGQSSTAGCPVDLQDNQQVEFETALGNNPNNTDTCAPFLLGNKSVQVIDIEDDIPIEAGACDTSKSKGEMVYSSMESMMNPPPVNTDALHGIQDGYSLAISDYLGADMSCYQSIQAELQDGMDLNGSEGITVMDDPIYSSLSDIGFMEVWDQQPQDYEKFF

SEQ ID NO: 7015 - protein, 188 aa, Zea mays
  VARIANT 9: note = Ancestral polymorphism is C, Derived polymorphism is S
  VARIANT 15: note = Ancestral polymorphism is G, Derived polymorphism is V
MAAVAALSCPAPPRVFRCAKTLPAPSAATSSRGRVGYGSSYARRWQCRRWTHRPDATTTRIRRATPRRTAVVRVNCAYSPRAETITACSWNEYVICSDVPVLIEFWASWCGPCRMVTRIVDEIAQEYVGRIKCYKLDTDDYPQVATAYSIERIPTVLLFKDGEKIHSITGTLPKAVYVKAIEKSISEQ

SEQ ID NO: 7016 - protein, 421 aa, Zea mays
  VARIANT 15: note = Ancestral polymorphism is R, Derived polymorphism is W
MAGGGRDGPAARLLRRVPAAVSVLLMLTLCSPGPPGAVVVVSARKVGETCALDRNCDAGLHCETCVADGNVRPRCTRVAPVDPQTKARDLPFNRYAWLTTHNSFARLGQRSQTGVAIATPWNQQDTVTEQLNNGVRGLMLDMYDFRNDVWLCHSYGGICQNFTAFQPAVNVLREVERFLSRNPAEVVTIFVEDYVESPMGLTRVLNASGLARYVLPAWRMPKSGGDWPLLSDMVRDNHRLLVFTSKAAKEAAEGVAYEWRYVVENQYGTKGMVKGTCHNRAESAAMNDLSRSLVLVNYFRDLPNLPAACKDNSAQLLDMVTACHDKSGDRWPNFIAVDFYKRSDRGGAAEATDKANGGLVCGCGSISACNANGTCTPRHGRTPRGIFNASSDAAAWRPPPPVLQWQRLILLPSLLALLLGL

SEQ ID NO: 7017 - protein, 270 aa, Zea mays
  VARIANT 46: note = Ancestral polymorphism is S, Derived polymorphism is F
MLTLFAAFQVIRSGIPNFCAVALALHDLGYKASGIRLDSGDLAYLSIEARKVFRAVEKEFNLPGFAKMVITASNDLNEETIDALNKQAINLSCGHEVDAFGIGTYLVTCYSQAALGCVFKLVEINNRPRIKLSEDVAKVSIPCKKRCFRLYGKEGYPLVDIMIRESEPSPKAGERILCRHPFIESKRAYVVPQHVEELLQYYWPGTSDKPRAELPSLEKIRSRCMQQLEKLRPDHIRRLNPTPYKVSVSAKLYDFIHCLWLNEAPVGELQ

SEQ ID NO: 7018 - protein, 85 aa, Zea mays
  VARIANT 12: note = Ancestral polymorphism is R, Derived polymorphism is M
MGIHLVAFVAARGFLQVFQVSAPLLWPLNLWLPLARHLPEACAAFYDALVSHAASLRATVRRRRRDSGDALDEYLRSAIMLTLSD

SEQ ID NO: 7019 - protein, 796 aa, Zea mays
  VARIANT 213: note = Ancestral polymorphism is W, Derived polymorphism is S
MTSANKAKLQLQERVPLPRTAWKLADLAVLSLLLALLARRASSLVSSGGTAAACTWCWVAALICEAWFTVVWLLNMNAKWNPVRFVTHPERLAGYWAGDDELLPAVDMFVTTADPKLEPAVVTVNTVLSLLALDYPAGKLSCYVSDDGCSAVTCYALREAAEFAKLWVPFTRKHGAKVRAPFAYFSSSSGGGAAERGGGGGAADADAEFLRAWTSMKNEYEELVRRIESAEEKSLVRRGDGAFAEFVGADRGNHPTIIKVLWDNDSSKSESDEQAAGDGVPSLIYVSREKSRTQPHHFKAGAMNVLTRVSAVLTNAPIMLNVDCDMFANNPQAALHAMCLLLGFDDEVHSGFVQAPQRFYGGLADDPFGNQMQVIFEKVGHGIAGLQGIFYCGTGCFHRRKVMYGVPPGSGTGATKGESMNLTGCAIQALAAADSPSYKELQKKFGSSKELIESARSIITSKEAPAAVADLTSRVEVAKQVSACSYETGTSWGQEVGWVYGSMTEDVLTGQRIHAAGWRSALLSPDPPAFLGGAPTGGPASLTQYKRWATGLLEIVLSRHNPFLLSASKRLRFRQCLAYLVIDVWPVRAPFELCYALLGPYCLIANRSFLPKASEPGFVVPLALFLAYNAYNLGEYVDCRLSARAWWNNQRMQRITSSSAWLLAFLTVVLKTVGLSETVFEVTRKEQQQQQGSPDGDGADADPGRFTFDSSPVFVPPAALAMLSVVAVAVGAWRAVTGGGGGPGVGEFVCCAWLLLCFWPFVRGLVGGRGSYGIPWSVRIKAALLVAAFVHLSTRK

SEQ ID NO: 7020 - protein, 513 aa, Zea mays
  VARIANT 430..513: note = Derived polymorphism lacks residues 430 to 513
MLMEEECVEAPSYIHIDSNAFSYRKHKSQTEEDIAVCECQYDILDPESPCGDRCLNLLTNTECTPGYCRCGVYCKNQRFQKCQYARTRLVRTGGRGWGLVADENIMAGQFVIEYCGEVISWKEAKRRAQAYETQCLKDAYIIYLNADESIDATRKGNLARFINHSCQPNCETRKWNVLGEVRVGIFAKQNIPFGTELSYDYNFEWYGGVMVRCLCGAASCSGFLGAKSRGFQEATYLWEDDDDRFSVENIPLYDSADDEPTSINKEILVSSDGMVTQYSNISRVQSTENPGNTGTNEFAPIIVDELTSSNGLAPMNVEPLTVSSNEFTPSNAMPMVARLVENGSTGYSAQDTHDASQNSAPKAANHANQTGPQNNSNHSALVPVKPAPKRRGRKPKRVVHKQLDIPDICDRLTSSVACEEILYCEEVKNQAVSEIDALYDEIRPAVEEHERDSQDSVSTSLAEKWIEASCRKYKAEFDLYAAVLKNVASTPLRSKDDVGPREQNGLKYLENGS

SEQ ID NO: 7021 - protein, 84 aa, Zea mays
  VARIANT 40: note = Ancestral polymorphism is V, Derived polymorphism is A
  VARIANT 51: note = Ancestral polymorphism is W, Derived polymorphism is R
MGFHLLAFVAARGLMQAFNLSAPLSLRLPLARHLPEALAVLYGVLAAQAAWLNGALARGAAWSHSGSRGGVDEYVRHAMLSVYD

SEQ ID NO: 7022 - protein, 117 aa, Zea mays
  VARIANT 32: note = Ancestral polymorphism is L, Derived polymorphism is P
MLLLAVPAVLAGFLKAFRLAFLLWPLNLALPLARDLPRACITVRAIASFYAAGLRGYVAGARRGVQLLHARRQLGQQQQQLAASSSSSSSSSALGVAWTREDADVVAHAMLAFDDIY

SEQ ID NO: 7023 - protein, 233 aa, Zea mays
  VARIANT 40: note = Ancestral polymorphism is L, Derived polymorphism is V
MDRYQRVEKPREESPIGANEIRITAQGRPRNYITYALALLQDNATDDIVIKAMGRAINKTVAIVELLKRRIAGLHQNTSIESIDITDTWEPLEEGLVTLETIRHVSLITIKLSKKELDTSSPGYQPPIPADQVRPAADFDQDAEAVPSGRGRGRGRRSRGRGRGRGFSSGVDYDDEIGEPEEAPRGYRGRGRGRGGRGSFAVGRGYGGDNYAMEEAGRYDDDGYNAPPMQRYG

SEQ ID NO: 7024 - protein, 103 aa, Zea mays
  VARIANT 30: note = Ancestral polymorphism is F, Derived polymorphism is I
MPVHVALLAAPAVAAGFLRAFQFAFLLWPFNLALPLARHLPRACVALRGLASFYDAELRRYAAAGAGPVPPRSHRYASLRAVQGTREDAAVARAMALLVDISY

SEQ ID NO: 7025 - protein, 167 aa, Zea mays
  VARIANT 123: note = Ancestral polymorphism is S, Derived polymorphism is I
  VARIANT 122: note = Ancestral polymorphism is P, Derived polymorphism is A
  VARIANT 109: note = Ancestral polymorphism is C, Derived polymorphism is Y
  VARIANT 81: note = Ancestral polymorphism is D, Derived polymorphism is N
  VARIANT 73: note = Ancestral polymorphism is S, Derived polymorphism is Y
  VARIANT 62: note = Ancestral polymorphism is T, Derived polymorphism is I
  VARIANT 52: note = Ancestral polymorphism is R, Derived polymorphism is H
  VARIANT 50: note = Ancestral polymorphism is R, Derived polymorphism is L
  VARIANT 48: note = Ancestral polymorphism is S, Derived polymorphism is F
  VARIANT 44: note = Ancestral polymorphism is A, Derived polymorphism is S
  VARIANT 42..167: note = Derived polymorphism lacks residues 42 to 167
  VARIANT 41..167: note = Derived polymorphism lacks residues 41 to 167
  VARIANT 37: note = Ancestral polymorphism is W, Derived polymorphism is S
  VARIANT 31: note = Ancestral polymorphism is G, Derived polymorphism is D
  VARIANT 28: note = Ancestral polymorphism is L, Derived polymorphism is Q
  VARIANT 26: note = Ancestral polymorphism is E, Derived polymorphism is K
  VARIANT 22: note = Ancestral polymorphism is G, Derived polymorphism is S
  VARIANT 12: note = Ancestral polymorphism is Q, Derived polymorphism is R
  VARIANT 3: note = Ancestral polymorphism is Q, Derived polymorphism is E
  VARIANT 1: note = Ancestral polymorphism is M, Derived polymorphism is I
MGEILGLVQVDQSTVAIKENFGKFSEVLEPGCHFLPWCIGQQIAGYLSLRVRQLDVRCETKTKDNVFVTVVASVQYRALADKASDAFYKLSNTREQIQSYVFDGNCSDCLKWRALCSSLAFPSSSRYSALPPPWLFCTFAVISAGVDKAKDLGAGSDGDRHVSRVKV

SEQ ID NO: 7026 - protein, 168 aa, Zea mays
  VARIANT 28..168: note = Derived polymorphism lacks residues 28 to 168
  VARIANT 31: note = Ancestral polymorphism is R, Derived polymorphism is M
  VARIANT 77: note = Ancestral polymorphism is E, Derived polymorphism is G
  VARIANT 111: note = Ancestral polymorphism is V, Derived polymorphism is I
  VARIANT 117: note = Ancestral polymorphism is E, Derived polymorphism is D
  VARIANT 119..168: note = Derived polymorphism lacks residues 119 to 168
  VARIANT 124: note = Ancestral polymorphism is G, Derived polymorphism is E
  VARIANT 136: note = Ancestral polymorphism is V, Derived polymorphism is A
  VARIANT 139: note = Ancestral polymorphism is S, Derived polymorphism is F
  VARIANT 140: note = Ancestral polymorphism is R, Derived polymorphism is C
  VARIANT 143..168: note = Derived polymorphism lacks residues 143 to 168
  VARIANT 153: note = Ancestral polymorphism is C, Derived polymorphism is S
  VARIANT 158: note = Ancestral polymorphism is C, Derived polymorphism is Y
MVILLQLCSKDSMTREKLKEGEDIYIYQLSRKPRGPSSLAFSCVNLELLQEHVVTALSVESYYRFNYAKDQIKTCVEFPECFVSKTVGEALNKPVLGHLAMQKLSGTIQVVLEFFVEIQFDANGKISGAAIRAYLVERSRVCQISDPERNYHCFCMLCSAPSETSMVA

SEQ ID NO: 7027 - protein, 215 aa, Zea mays
  VARIANT 121: note = Ancestral polymorphism is G, Derived polymorphism is A
  VARIANT 95: note = Ancestral polymorphism is D, Derived polymorphism is Y
  VARIANT 55: note = Ancestral polymorphism is M, Derived polymorphism is T
  VARIANT 44: note = Ancestral polymorphism is S, Derived polymorphism is N
MFQDVEEIIRRQINMSVLPSVQPFHAIAYPIDPLLALEIRYVSSDFGNHPLSHLMRSVFGMHDRANIEVFCYAHSQNDGTEWRQRIQSEAEHFVDVSVMTSDNIAKLINQDKIQILINLNGYTKVINNDVCSVNSLSILDISVIVSVISCLVSSNDCHLLFSCCNMYLWVFWGKLFSLTFEDCDCYFVGTTDICYWCYIESEYLAMELSYFIRKQ

SEQ ID NO: 7028 - protein, 483 aa, Zea mays
  VARIANT 357..483: note = Derived polymorphism lacks residues 357 to 483
  VARIANT 163: note = Ancestral polymorphism is T, Derived polymorphism is N
  VARIANT 150: note = Ancestral polymorphism is R, Derived polymorphism is C
  VARIANT 123: note = Ancestral polymorphism is S, Derived polymorphism is L
  VARIANT 92: note = Ancestral polymorphism is R, Derived polymorphism is S
  VARIANT 82: note = Ancestral polymorphism is P, Derived polymorphism is Q
  VARIANT 80..483: note = Derived polymorphism lacks residues 80 to 483
MSAIELVQGSRAGQEAEQEPESEPQRKWVALVSVAVLDKEDDRTQEIVLGTDVLLDLKDPPLPSYLVLHPSVSLDPRSNEEPLSAYILAAHRSGYILLQVVEGNRPDFFLCDTHSRTVTILPLVSSFLRTCQGLDICTHLSIGLIADPLRRGHYVVAQLQPPNSFYHPNRLLCYSTAERRWFVRHLTRETDHMCSPFSQNGVLAHEGRLWWIALAYGIFFCDPFTPDLRFPELCFLPLPADCQMDGYVVFEPHIRTLINQRRCVRPSEGKLRFVEIRGLAYDDVLIDEDDAPPGPANPTVGMWTLDDDPEGPDPWKLEYEVPFAEIWDNETYADAGLHPGEVPHVALVDPNDHCVVYFFQGSKLFGLDVLKKQVITCKECLIDRDQVIMFQSSRPIVDAWELSSPPPTLPGDDDDLSPEDNVSPGQPDEGEKKRQVTESVYSWLSDVWEWTRGDVDEKMAPSTSDDESSHSSDAPEIQLPSSP

SEQ ID NO: 7029 - protein, 480 aa, Zea mays
  VARIANT 266: note = Ancestral polymorphism is R, Derived polymorphism is C
  VARIANT 223: note = Ancestral polymorphism is Y, Derived polymorphism is N
  VARIANT 68: note = Ancestral polymorphism is D, Derived polymorphism is Y
MSAIGLVQGSRAGKEAKQEPESEQEADSEPHQRKWVALVSVPVLLGNADDDRAQAMALGTDVQLDLKDPPLPSYLVLHPRVSPNPRSNEEPLSAYILAADRSGYILLQVVEGNRPDFFLCDTHSRTVTIIPPVCSYLRTGLDIDIRPNLSIGLIADPLQGHYVVAQLHPATLHRYRLLCYSTAKREWNVRYLTRQEDHLMINTSIDNAVLAHNGCLWWIALGYGIFFCDPVTPVLELAELRFLPFPAGCQMNAYASLCPKHLKQRRCVRPSEGKLRFVEIRGFYCNVDWSIRYDDVLFEPTVRMWTLEDPERPDPWTLEYEVPLADIWNNETYANARLPPGEVPQVALVDPNNHCVVYFFQGSKLFGFDMQNKQVIACKKCLIDRNKVIMFQSSRPIVDAWELSSPPPFMLSEDDGDLSSEDIVFPRGKKRRVCKFVHSWTSSRPVVGRTWKIASPPPDASSHTSGDQADDAPSSPKGAE

SEQ ID NO: 7030 - protein, 252 aa, Zea mays
  VARIANT 67: note = Ancestral polymorphism is Q, Derived polymorphism is K
MQGEYRSSSEESAAAAAAAAMAPLAAAAAAAVKMEAEQAAMASAAAPQLGSAHQHQHQHQQMQPRRQYRGVRMRKWGKWVAEIREPHKRTRIWLGSYATAVAAARAYDTAVFYLRGRSARLNFPDEIPSLAPSEGEGDGDGGEPARDPADGGGGGTLSAASIRKKAIEVGSRVDALQTGMMVPPPHHRERQRHHHHHHHHLPQLRMHAAAAEAAAAEHRQEVKQSPQRPAWSGRVKNPDLNRAPSPESSDAE

SEQ ID NO: 7031 - protein, 152 aa, Zea mays
  VARIANT 2: note = Ancestral polymorphism is S, Derived polymorphism is F
  VARIANT 13: note = Ancestral polymorphism is P, Derived polymorphism is H
  VARIANT 15: note = Ancestral polymorphism is C, Derived polymorphism is Y
  VARIANT 39: note = Ancestral polymorphism is V, Derived polymorphism is I
  VARIANT 48: note = Ancestral polymorphism is A, Derived polymorphism is T
  VARIANT 67: note = Ancestral polymorphism is R, Derived polymorphism is S
  VARIANT 82..152: note = Derived polymorphism lacks residues 82 to 152
  VARIANT 103: note = Ancestral polymorphism is M, Derived polymorphism is K
  VARIANT 105: note = Ancestral polymorphism is S, Derived polymorphism is T
  VARIANT 107: note = Ancestral polymorphism is A, Derived polymorphism is V
  VARIANT 113: note = Ancestral polymorphism is S, Derived polymorphism is C
  VARIANT 135: note = Ancestral polymorphism is L, Derived polymorphism is V
MSTIFIQVMTAHPDCATLDTTILDALHIMHDGKFLHIPVLDGDGQVAACLDVLQLTHAAISMVEGGRGATNDVANIIMQKFWDSALEPPDEDFDSHIELSLVMPSDAGDGRSCIYPPAVANRLFVRYSLTEVLKLKHHMLHYQRPAVLTTME

SEQ ID NO: 7032 - protein, 663 aa, Zea mays
  VARIANT 513..663: note = Derived polymorphism lacks residues 513 to 663
  VARIANT 459..663: note = Derived polymorphism lacks residues 459 to 663
  VARIANT 440..663: note = Derived polymorphism lacks residues 440 to 663
  VARIANT 306..663: note = Derived polymorphism lacks residues 306 to 663
MQGQRNSMEHFADVFGFDVASSSGNPVMDQQSYWNNVLGSVESHNLQGYQMAHSDAAMPYGNEPQQDGTFLGFWESGEASSSASALNYGSSNNVKTEHLNIGGGGGLRIGESRLVADNGISLDVDINLNANVNDLCGQSSNVNCASQGPEQYCGSDRNAINSQPTDLGLHPFRTFLLDAQQAESFTLNPSENPLGDFSSMQESIEQRPGGSLDGRRLACKRKNIEGANGQSSAGASTSFPHRNDNAFHNIASSSYNPAPIRNSSSPKCLPVPSSIEDQLPRYGTNVGLSAGTYDLHGGVNNAVNSQRSFRARTTTSQQVAPCSVWPSSNAIRLSNSWNHQPPHFQSAFDDPQEVIPVVSSLNLQYQHPMNVPGVPQAANRFTDHGASSSRAGSLENRIIGSEEVPRRYAAPTNYSDLVPPPAVDLRRLVPEPFNWSSDVRGTAISGSIIPPVSRTNNSSTVNPPAGFNHQNLTRRHPRNLSEEIGRLSGALRGHQPPRLRSGFLLERQGDGVWGVPLSTRGREGRRLMEIRNALEMIQRGENVRLESIFYGGLDIHDRHRDMRLDIDNMSYEELLALEERIGNVSTGLSEEAVIKLLKQRKFSSWRLKASLDPEPCCICQEEYVDGDDLGRLDCGHDFHAGCIKQWLVVKNVCPICKNTALKA

SEQ ID NO: 7033 - protein, 319 aa, Zea mays
  VARIANT 132: note = Ancestral polymorphism is I, Derived polymorphism is M
  VARIANT 129: note = Ancestral polymorphism is T, Derived polymorphism is S
  VARIANT 112: note = Ancestral polymorphism is I, Derived polymorphism is T
  VARIANT 90: note = Ancestral polymorphism is K, Derived polymorphism is T
  VARIANT 87: note = Ancestral polymorphism is T, Derived polymorphism is N
MSEIELVQCSRAGKEALQEPESEPQRKWLPESEPQRKWVALVSDAVLLGNEDDRAQEIVHGTDMLLELKDPPLPSYLLLHPRVSTNTRRTSSPLSAYVLAANNRSACILLQIVEGNRPDIFLCDTHRCTVTILPPLPSYLWSRPGIYIRPHLSIGLIADPYHRGHYVVAQLQPTTSFHNPNRLLCYSTAKHQWFALQITRQTAHLYNPLSENGVLAHDGRLWWVALAHGIFFCDPFTPVLQELRLRYLRLPADCHGYVALEPRIRTLIHQRRCVRPSEGQLRFVEIHGLAYDDVLVDAPANPTVRMWTLEDPERPDPWT

SEQ ID NO: 7034 - protein, 487 aa, Zea mays
  VARIANT 298: note = Ancestral polymorphism is W, Derived polymorphism is C
  VARIANT 93: note = Ancestral polymorphism is R, Derived polymorphism is G
  VARIANT 13: note = Ancestral polymorphism is G, Derived polymorphism is C
MSEKDLTEFSRAGQEAEQEPESEPQRKWVALVSVVVFSKEDDRTQEIVLGTDVLLDLHDPPLASYLVLHPRLAPNSRRPDEPLSAYILAANNGSACILLQVVSGNRLDFFLCDTHSRTVDIVAPVSCHLRTDQDIDIRPHLSIGLVADPYERGHNVIFQLHPTTSLYHQSRLLVYPTARRRWFVLPIPIARQAAHMCNPFSENSALAHDGRLWWVALAYGVFFCDLFTPSCAWRPELRFLPLPADCQMDGYVAFEPRVRTLLHQRRCVRTSEGKLRFVEIRGLSYDDPPRDPANPTVWMWTLQDPEGPDPWTFEYEVPFAEIWDNETYADAGLPPGEVPHVALVDPNDHCVVYFLQGSKLFSLDVRKKQVIACKESLIDRDQVILFQSSRPVVDAWELPPPPPTFSGDDDDLLPEDVLSDREEKRQVNEYVQSWLDQVWLEWTRRDADTTDEGAPPPSDEPPDHSGVQQAGDEPEIQAPGTGSPGAL

SEQ ID NO: 7035 - protein, 610 aa, Zea mays
  VARIANT 487: note = Ancestral polymorphism is G, Derived polymorphism is V
MPSPSSLHHFSPRLPLASTNGKATPFHFHQFTTNDVQATTNQQELIRMGDAAIAVVHEADEEEQEHIFRSRFPPVDLPDDVTVPEFVLAGAEAYADKVALVEAAPGGRSYTYGEVARDVARFARALRSVGVRKGHVVVVALPNLAVYPVVSLGIMSAGAVFSGVNPRAIAAEIKKQVEDSDAKLVVTNEVAYDKVKDAGVPVIGIGDDMERLPGAISWDELLAAADRTGAPVVALDPVQQSDLCALPYSSGTTGVSKGVMLSHRNLVSNLCSSMFAVGEELVGQVVTLGLMPFFHIYGITGICCSTLRHKGTVVVMDRFDLRTFLGALVTHRVMFAPVVPPVMLAMVKSPVADDFDLSGLALRSIMTAAAPLAPDLLAAFEKKFPGVQVEEAYGLTEHSCITLTHAASGDDARQGPVQVAKKNSVGFILPNLEVKFVDPDTGRSLPKNTPGEICVRSQAVMQGYYRKKEETERTIDAKGWLHTGDVGYIDDDGDVFIVDRIKELIKYKGFQVAPAELEAILLSHPSVQDAAVFGLPDEEAGEVPVSCVVRRCGASESEADIMAYVAGRVASYKKLRLLQFVDVIHKSVSGKILRRQLRDEFVSRTKTAAA

SEQ ID NO: 7036 - protein, 285 aa, Zea mays
  VARIANT 20: note = Ancestral polymorphism is Q, Derived polymorphism is E
  VARIANT 43: note = Ancestral polymorphism is R, Derived polymorphism is H
  VARIANT 59: note = Ancestral polymorphism is A, Derived polymorphism is T
  VARIANT 143: note = Ancestral polymorphism is S, Derived polymorphism is F
  VARIANT 144: note = Ancestral polymorphism is V, Derived polymorphism is A
  VARIANT 145: note = Ancestral polymorphism is L, Derived polymorphism is Q
  VARIANT 155: note = Ancestral polymorphism is T, Derived polymorphism is M
  VARIANT 156: note = Ancestral polymorphism is G, Derived polymorphism is R
  VARIANT 166: note = Ancestral polymorphism is H, Derived polymorphism is L
  VARIANT 168: note = Ancestral polymorphism is R, Derived polymorphism is M
  VARIANT 206: note = Ancestral polymorphism is A, Derived polymorphism is V
MEERREMDPVTHAHRVAWLQHGLLVLLQIHPVRLHLDGDAAVHRPTTEDICYYLDCHLTSIKATRNLVTEIFNFSQDDLLTEDMMILDTHGEVFIWIGQYVESKEKQKAFDIGQFRRFNCLRCFSCVESLQKLEHKMLDNFFSVLSCVISVPFYTGFLPLLFWSGHGRLARQMTLLMAFCDYLGNSVKDMVSAPRPCSLPIRRVTATEDEKENAIYLLHYVLTYGEHGSLTVAAGLSLALLPQICCGFSSSDPCWCSAKELEIGDFGYAWSFEFFLCCNPYRELL

SEQ ID NO: 7037 - protein, 364 aa, Zea mays
  VARIANT 166..364: note = Derived polymorphism lacks residues 166 to 364
  VARIANT 38: note = Ancestral polymorphism is P, Derived polymorphism is L
MARQQWSSGGLAVAVLAVLSSVLICSGHPVPGGLPLLPHFYGHACPQMEAIVGSLVAKAHAEDPRMAASLLRMHFHDCFVQGCDASVLLDADGSGRFVTEKRSNPNKDSLRGFEVIDEIKAALEHACPHTVSCADIVAVAARDSVVLRRLYIYIIVTPIVDGLGRRSSCMQTGGPGWEVPLGRRDSLTASLSGSNNLIPAPNDSLPTIIGKFANQGLDIVDLVALSGGHTIGDSRCVSFRQRLYGQNNNGQVDRTLNPAYAAELRGRCPRSGGDQNLFALDLVTQFRFDNQYYHNILAMNGLLSSDEILLTQSRETMDLVHRYAADQGLFFDHFAKSMVKMGNISPLTGSAGEIRHNCRRVNHF

SEQ ID NO: 7038 - protein, 214 aa, Zea mays
  VARIANT 123: note = Ancestral polymorphism is T, Derived polymorphism is A
MAATRASPVLLLLLTVQLSLLFRLPDSPSTLALALAAEPEQQNAKQHRQPALLVQSTCNSTSFYDLCIAALAADPASSTADVPGLGAIAVSAAANNASGTAAFLGNASDAAATPQADRALLRACAGKYAAARDALVQARASLAEQAYDYAFVHVSAAGEYPAVCRTLFRRRQQQQRGASRSAYPAELAKREEALRRLCTIALDIISLLQNQETY

SEQ ID NO: 7039 - protein, 233 aa, Zea mays
  VARIANT 220: note = Ancestral polymorphism is G, Derived polymorphism is W
  VARIANT 120..233: note = Derived polymorphism lacks residues 120 to 233
  VARIANT 84..233: note = Derived polymorphism lacks residues 84 to 233
  VARIANT 47: note = Ancestral polymorphism is C, Derived polymorphism is R
MTEGQSEETASAPEGVSVLRRNSDDVGWEYGVLVDVNNKDKVKCILCDKQMCGGVYRLKQHIAQEGKNAKKCQGIKTTKEKLLEAQEKCKKALDGAKRKREVKTVRELELREEVHVSRVGGSEEVTCVGSSEPHKLGPMDKWTKAIDPTATKSESLTQQRLNKELWKERLHEVHKYIARWAFNHAISFNACDNDEFKQMCEAIGQFGPGIEPPTMFDLRGRLLEEEYANTSSN

SEQ ID NO: 7040 - protein, 257 aa, Zea mays
  VARIANT 142: note = Ancestral polymorphism is D, Derived polymorphism is Y
  VARIANT 183: note = Ancestral polymorphism is S, Derived polymorphism is L
  VARIANT 215: note = Ancestral polymorphism is D, Derived polymorphism is G
MAATVLFTPAQCHRATATTSGRGAPSHCALAPGHRRPGRGSVRAVPPEQSSLPQAAAAAVYGTAGDVKAALYRALDGANRGIFGMTSAKRSEIHGLVELLESRNPTPEPTAKLQDKVDGCWKLIYSTISILGKKRTKLGLRDFISLGDFLQIIDVKQEKAVNVVEFSARALKILTGKLTIEASYRVTSQTRVDIKLESSTITPEQLMNIFQKNYDMLLDIFNPEGWLEITYVDESLRIGRDDKENIFVLERADLPDV

SEQ ID NO: 7041 - protein, 352 aa, Zea mays
  VARIANT 318: note = Ancestral polymorphism is G, Derived polymorphism is S
MGGCSSSSTTETVQDEGSKTAKDQGPKIAEDVTQLIGKTPLVYLNKVVAGCEARVAAKLEIMAPCSSVKDRIGYSMIADAEEKGLITPGKVLNTSPLSVLIEPTGGNTGIGLAFMAAAKGYRLVVAMPSSVSTERRAVLRAFGAEVVLTDPLLSMDGVVRKAQEVAARTPGAHVLQQFANPANPRAHYEATGPEIWSATAGKVDALVAGIGTGGTVTGAGRYLKEKNPAIKVYGVEPSDSAVLSGGKPGPHKIQGLGAGFVPGVLDVSLLDEVFQVSNEEAAGMAKQIAREEGLLVGISSGAAAVAAVRVARRAENRGKLIVAIFASFGERYLSSFMYESLKEEAESMAFEP

SEQ ID NO: 7042 - protein, 231 aa, Zea mays
  VARIANT 204..231: note = Derived polymorphism lacks residues 204 to 231
MAFALLVAAARAESAGSTRSPAAAAGGGRAMGGGWPRPGGALAAPRLLLRALLLCSLLAQPHPSRAFFFFGGVRTSLHVPQHRGGGREEKVPMTVVVPDYSPRPAPLGLSPSAAPAPAPVPGSDGDEDGTPRLPSERRGTGAPSSTGHSASAQAPAAATSTDFVSSSPAVPLPAGVTDSATVLPMPTPGQHLRDDVGMGTRRLQARVLQLAVPLLMMLSFAATSVSAGVVM

SEQ ID NO: 7043 - protein, 595 aa, Zea mays
  VARIANT 250..595: note = Derived polymorphism lacks residues 250 to 595
MASSVPVVDILDDDDDDNTCLGIASPASCKRSLGSSGTSSRDFLDAFSPSPPLRKRPPLAAVAPINLDDTPSPPKRRRSSVSINLDDTPSPPKPRLSSVPKQPVGVDDDVALSPTGDVVADRPDSIFYWAAFSESPETVVPTSDGLGSLAAETPGFASPDSVRPPAAPDMSMSSAPPAQKGSGVTSLISLDSDNESDDDIMNMEPLTNLPNNKEAMMCQKDGTEQVHEKQKRQPAGKKLTKEEKDKLMQERKQKRQEDKLLKQALKDELAKKKKMEKAIQKWESGKFALECITVEIDNSVIQRGSIGGPLLSSLTENGLSYEPTKNRISGSILWKLDVPDDIAQAFSDLNNSCDMNQNPLSQVKYVAIVLEAEEFCNLISNGSFFDHVQRVCDGYPGFTICYIINKLMNYINKCEQSQYKNPSNTWRRPPVEEVLCKLATHYINVHSRQCIDEAEVVEHLVGLTSSLAKCKFRKPLTWLSVQANGAVIPKGFVHKDLAKKDTWLKALIAIPDIQPRYAFAIWKKYPCMRSLLNEYMDGSKTVAEKELLLSDLKWEDRLGDEGKRLGNKCSRRVYRMLMAQNGDLDADDPEAGGRS

SEQ ID NO: 7044 - protein, 338 aa, Zea mays
  VARIANT 25: note = Ancestral polymorphism is N, Derived polymorphism is I
  VARIANT 52: note = Ancestral polymorphism is P, Derived polymorphism is A
  VARIANT 86: note = Ancestral polymorphism is R, Derived polymorphism is M
MAAVQAQEALHIEEEYNSMIRSQSNVCFLSKKQRSREMRALLEAQEDLTISPVLHNMMVHRRTSSEIELAMADYFDASVEALEMCRQLLQNIKDAQSNYQCMDSFVASISAAGCAGAPPALNFPYCRSNPFSTTTRSNLRSIHDRYFCVLQSIRSSHRRVGRKLKMVKAVKKLSRALLVVAGGAAAAAALGTGAHLLFFGLILIGTATAGALKTWIAPRGRGTKKPSGSKTMSSSLLRLHEQLDAAAKGTYVLGQDLDTVSNLVARLSDAIERDNAMARWCAERADEGSSVLEMANELRRSCSSSRSLTDELEEHVSMFLATIHRARLLVIREFSKKA

SEQ ID NO: 7045 - protein, 811 aa, Zea mays
  VARIANT 535..811: note = Derived polymorphism lacks residues 535 to 811
MHVVRAFVLSVLLVILHAPSPYAATDTLRHGHALAGSDKLVSGNGKFALGFLQLQPGSSYYLGIWFDKVPVLTPVWAANRDNPVSANSTWRELVISDDGNMVFQAQGATVWSTRANTTTNDTVAVLLGNGNLVLRSASNSSLTFWESFDYPTDTQLPGVKVGWNKVTGLNRRLVSRKNAVDLSSGIYSSTLGRDGVARMLWNSSSVYWSSTWNGRFFSAVPEMSAGSPLANFTFVNNDQEVYFTYNIFDESTIVRTTLHVSGQNQVRVWTGQDWMTGNNQPAHQCDVYAVCGPFAVCEPNGDTLCSCMKGFSVRSPSDWEVEDRTGGCVRDTPLLSCGAGDGNSGTGMAADKFYSMPGIRLPQNGKAMPADASSAKQCAQVCLSSCSCTAYSYGKDGCSIWHGELLNVATEGDSDDTIYLRLAAKEFRSGKGSSRSGVVIGAAVGASVAAAAALVFVLLVLIWRRNGRRWSRPVVHNDKGSVVGIVAFKYADLQDATKKFSEKLGEGGFGSVFKGCLGDSTTTVVAVKRLDGARQGEKQFRAEVNSIGIVQHINLVRLIGFCCEGDRRLLVYEHMPNGSLDSHLFRSHGGAGVGAGAALDWNVRYKIAVGVARGLAYLHHGCRDCIIHCDIKPQNILLDASFLPKIADFGMAKFLGRDFSRVVTTMRGTVGYLAPEWISGTPITSKIDVYSYGMVLLEIVSGKRNSITQQSSSHTIEGQQGDYLPVQVAGKLLRGDVLSVVDADLRGDVNVEEVERVCRIACWCIQDREFDRPTMVEVVQFLEGICEPEIPPMPRLLHAIAGGGSNQTAGV

SEQ ID NO: 7046 - protein, 140 aa, Zea mays
  VARIANT 91..140: note = Ancestral polymorphism lacks residues 91 to 140
  VARIANT 76..140: note = Ancestral polymorphism lacks residues 76 to 140
  VARIANT 71: note = Ancestral polymorphism is F, Derived polymorphism is S
  VARIANT 62..140: note = Derived polymorphism lacks residues 62 to 140
  VARIANT 55: note = Ancestral polymorphism is H, Derived polymorphism is D
  VARIANT 49: note = Ancestral polymorphism is P, Derived polymorphism is L
  VARIANT 46: note = Ancestral polymorphism is S, Derived polymorphism is Y
  VARIANT 45: note = Ancestral polymorphism is L, Derived polymorphism is P
  VARIANT 43: note = Ancestral polymorphism is V, Derived polymorphism is A
  VARIANT 31: note = Ancestral polymorphism is E, Derived polymorphism is G
  VARIANT 27: note = Ancestral polymorphism is V, Derived polymorphism is L
  VARIANT 21: note = Ancestral polymorphism is P, Derived polymorphism is T
  VARIANT 19..140: note = Derived polymorphism lacks residues 19 to 140
  VARIANT 11: note = Ancestral polymorphism is S, Derived polymorphism is L
  VARIANT 6: note = Ancestral polymorphism is F, Derived polymorphism is L
MSHISFLRVCSYIKDNKLQDPTNNNILKCDEKLKTILLGRSKATPSELPMIVKLHFPKLPKYIAWRLPIVFPLWCQLPSKTSTFGSHSSRRNRHLPHNIFFRYLAKFYGCGHVFAGEPQGMFIATRITNPFEIFGVLGFS

SEQ ID NO: 7047 - protein, 207 aa, Zea mays
  VARIANT 148: note = Ancestral polymorphism is G, Derived polymorphism is V
  VARIANT 99: note = Ancestral polymorphism is V, Derived polymorphism is G
  VARIANT 49: note = Ancestral polymorphism is G, Derived polymorphism is R
  VARIANT 41: note = Ancestral polymorphism is S, Derived polymorphism is I
  VARIANT 10: note = Ancestral polymorphism is S, Derived polymorphism is Y
MGAGSTNCTYGVSRSSLRIMGLSMFGKNDSGTKYHYNEIISYLDLFIPGKLMGFFTTKKDEASCEKLRWIGSGLSCVCIKRKGTYERICKNFRPVQLNVFIQLVVNCLGHLITAAELFSALRGRLYDSNKNLVMATLSTIGGLASAMGPSVEKSSKGILADVLKCLGDNKKHMRECTLTALDSLVAAAQLEKMVPYIIMSLGDQKTV

SEQ ID NO: 7048 - protein, 198 aa, Zea mays
  VARIANT 71: note = Ancestral polymorphism is E, Derived polymorphism is A
  VARIANT 44: note = Ancestral polymorphism is G, Derived polymorphism is R
  VARIANT 27: note = Ancestral polymorphism is R, Derived polymorphism is C
  VARIANT 21: note = Ancestral polymorphism is E, Derived polymorphism is D
MTPFVVDLGFGEESILQGLTEANIVGRGGSGRVYRVTFTNRLNGAAGAVAVKQIRTAGKLDGKLEREFESEAGILSNVWHINIVRLLCCLSNTEAKLLVYDYMDNGSLDKWLHGDALAAGGHPIVARARSARRAPLDWPTRLKVVVDAAQGLCYMHHICVPPIVHRDVKTSNILLDSVFRAKVADFGLARMLAQAGAP

SEQ ID NO: 7049 - protein, 788 aa, Zea mays
  VARIANT 593..788: note = Derived polymorphism lacks residues 593 to 788
  VARIANT 530..788: note = Derived polymorphism lacks residues 530 to 788
MKIQPILQEDLKLDFSKSRTNKTGNAEITKRRRMVVIDEVDSFLFRPHVGLRAKFQVKKKQFFRNFITITLFGAVGTLISFTVISLGALGLISRLNIGALELGDYLGVVNDTTSVVLFNAIHNFDPGNISGAKLLNFISSFLYLFGSNTILGVASGLLSAYTIKKLYFGRHSTDREVSIMMLMAYLSYMLAEPGKVYRFEQHHFSLGAGFKSCFCFPTILSIKFDQKTPNGKISFRQQVIVWWAGLMRGVVSIALAYNKVNLVFGLYGLSFGLELCYCFCFLYPFQNIGHFLLSARHFGRDIIMPNLKSSVTTIASAVEYMDEVLKALPPGEARNEDSRTLQFNYGSFKHKALDKSLTKKVPKNRLTSNTKLTQCCSIVGIFEALTAFPFLPSCCAKPCPKPSTILFQSPLSTIFQGKTLAILHEFQVLQVVAVGECGLDYDRLQFCPTDMQKKFPGGVTYSFTDLAEDQDRLLSFEKMFIGVNGSSLKTNGNLEVLRGIPVERLMMETDSPYCDIINTHAGSQYVKSVWPSKKKEKYEPDSTVKGRNEPCLVREKTLAILHEFQVLHVVAVGECGLDYDRLQFCPADMQKKYFEKQFELAKAVKLPMFLHMRAVGEDLCEIMTRNLHRFPGGVTHSFTDSRIGYFLLRRCLSVKSLSPSNKNLHLLQHDDQCSTTLIRVEIQISSVENICFSFKYFILLHAFSVEASKQVLEVVAGSKEISDIEGLSRTLYHNTCSSSSAVFDKSSFNQCEYMINGYTNLAGSSFLRILTRLLMRSLRVVLPSRIAD

SEQ ID NO: 7050 - protein, 98 aa, Zea mays
  VARIANT 72: note = Ancestral polymorphism is T, Derived polymorphism is I
  VARIANT 56..98: note = Derived polymorphism lacks residues 56 to 98
  VARIANT 25: note = Ancestral polymorphism is T, Derived polymorphism is I
  VARIANT 7: note = Ancestral polymorphism is A, Derived polymorphism is V
MVLRRAATECPKKVAGLKDLVNLPTQLREFAGGRSQMSHISFFLSVWSYIKDNKLQDPTNKNIVKCDEKLKTVLLGRSKVQLSELPMIVKLHFPKLPK

SEQ ID NO: 7051 - protein, 136 aa, Zea mays; identical to SEQ ID NO: 3315
  VARIANT 84: note = Ancestral polymorphism is R, Derived polymorphism is S
  VARIANT 58: note = Ancestral polymorphism is S, Derived polymorphism is C

SEQ ID NO: 7052 - protein, 427 aa, Zea mays
  VARIANT 390..427: note = Derived polymorphism lacks residues 390 to 427
  VARIANT 366..427: note = Derived polymorphism lacks residues 366 to 427
  VARIANT 355..427: note = Derived polymorphism lacks residues 355 to 427
  VARIANT 346..427: note = Derived polymorphism lacks residues 346 to 427
  VARIANT 319: note = Ancestral polymorphism is S, Derived polymorphism is L
  VARIANT 288: note = Ancestral polymorphism is R, Derived polymorphism is G
  VARIANT 205..427: note = Derived polymorphism lacks residues 205 to 427
  VARIANT 89..427: note = Derived polymorphism lacks residues 89 to 427
MSRQAPSAPSASSLPRTLDKRVRLRSVSQPPSALDPRPHPRSPWKASVMLASSLNPARSPWKGPPPLPRIGLAIHGSGLTPDYARVKGQYSAWVVQSAALVTYRCLSGSPKNLPPLPRPTTRLPSPTTRWARSGFFETWLTAMDSRWRILSRCKKRLTDARTRFPGLHEELKRCVNGCDIAVIFDMLWGSILDNFYEYLLKVWIQGNKTEHVKHNRQMWDTSMEGLLSLTKKTTPSNYYYICEKNGGSLCDKMDELACFAPGMLALGASGYGPEQSEQIMNMAKELAGTCYNFYQTTPTKLVGENYFFHAGQDMSVGTSWNILRSDTVESLMYLWRLTGNTMYQDWGYCWNICVQVNTGEKDNMMQSFFLAETLKYLYLLFSPPSVISFEECVFNTEAHPLRIAPVNGNKGIGTSVRPFGRKQGNPE

SEQ ID NO: 7053 - protein, 304 aa, Zea mays
  VARIANT 215: note = Ancestral polymorphism is D, Derived polymorphism is G
  VARIANT 129: note = Ancestral polymorphism is R, Derived polymorphism is H
  VARIANT 116: note = Ancestral polymorphism is K, Derived polymorphism is N
  VARIANT 104: note = Ancestral polymorphism is P, Derived polymorphism is S
  VARIANT 103: note = Ancestral polymorphism is H, Derived polymorphism is Q
  VARIANT 100: note = Ancestral polymorphism is R, Derived polymorphism is C
  VARIANT 96: note = Ancestral polymorphism is R, Derived polymorphism is C
  VARIANT 67: note = Ancestral polymorphism is W, Derived polymorphism is R
  VARIANT 57: note = Ancestral polymorphism is G, Derived polymorphism is S
  VARIANT 44: note = Ancestral polymorphism is R, Derived polymorphism is H
  VARIANT 15: note = Ancestral polymorphism is R, Derived polymorphism is Q
MRATASFPAHVALLRLLPVAVGSSVEVVEVLLKTQDLAYLDRPRMACGKHTVYNYSGMLWSHYGPYRRQLRELWVTELLSARQLRLTERVRVEEVRAMLRDLHPATSTSTTAVVLKERLLMVTLNVISRMVLGKKYVGEDGARPSAATTSEEFRWMIEEIFFLNGALHVGDMVTWLGWLDAHGYVGRMKRLAAKFDRLIEHVLREHGERRRREGDAFVPGDMVDLLLYLCLIITYFAVTIVLTPPVVRALRKKTKPLPVHSLGPENIRWTNLSTGRKGNIVAIASTQKSGLHKKVYIMADVLRT

SEQ ID NO: 7054 - protein, 590 aa, Zea mays
  VARIANT 244..590: note = Ancestral polymorphism lacks residues 244 to 590
MFVLRIQSVDFPDAAVAAVAADEVGTSSGGVTTSRPLSSHPPPSTTTSSILTLELPGANPVAPSRSPRILHTRGVIHLYHSSSSTSTSSSYASAVAATSSSSSGPATPQPASDSHLPLCRGTRLLVLAVPTRVSPEDFVRFCGPHLECAADIRFIRDDGVEDRYSVLVEFEDQSSAEWFYADLNGWRFSTSESEVCHVLFIAAVQYTPSSEVATTPPAGSTELPMCPVCIATLHLLFSLFIFCWLFKLSALFLVHLTIFCHLNMLICQKDWIRTSVGFWQLLVITLSVAHVFQCGPIHPVRKWTARKNIEFGHVNHVCQFCQKQSENSTCSVCQTTGNLWICVICGFVGCGRYQEGHAKQHWKDTQHCYSLDLETQRVWDYVGDSFVHRLNQSKSDAKHAKFKSKSKYSGDECVNCSCNDDSDMGGAMFSSKAETIVDEYNRLLASQLETQREYYEGLLSEAKRNKEHQISEAADKAVSDKLEEMQLKLENLIVEKKKVADMNEKLTRSQDMWRQTLRDIEERERAQLKSKDEMILDLEEQIKDFKFSIKLQKSIEKNDGVKGGTLVPLPTVSDSGGKGKRSSRTSKRRN

SEQ ID NO: 7055 - protein, 448 aa, Zea mays
  VARIANT 214: note = Ancestral polymorphism is V, Derived polymorphism is A
  VARIANT 229: note = Ancestral polymorphism is L, Derived polymorphism is V
  VARIANT 230: note = Ancestral polymorphism is R, Derived polymorphism is S
  VARIANT 332: note = Ancestral polymorphism is E, Derived polymorphism is D
MERARARAPALALAPVEVPKFFVCPISLEVMRDPVTLSSGITYDRDSIERWLFTDGHGDCPVTKLPLGADDLEPTPNHTLRRLIQSWCAAHAVERFPTPRPPVDADRVAAIVGCAKKGGQQEVLAALRELADIIGESDRNRRCVEGVPEAVEFLVSVVKKHAAGTSSSKPLGGCRSQEEPMCGVPDSPKACSPEEAALSILHSLKLSEASLKRALESSDGFVDTLASVLRWPPNYRARTYAMHLLKAALSAMQPSQLSSASTDLVEGVVRVVADRTLSPKAIKVALHVLCRLCPWGRNRVKAVEAGAVAAVVELLLNVGCGCGGSNGKRAVELAVVAIDHLCGCAEGRLELVAHPAGLAVVARAATRLSPTATESAVRALHAVARHSATPAVLQEMLAVGVVARLLYLVQAGASGERPRERAREMLKMHARVWRGSPCLASHMASYPC

SEQ ID NO: 7056 - protein, 180 aa, Zea mays
  VARIANT 23: note = Ancestral polymorphism is A, Derived polymorphism is T
  VARIANT 25: note = Ancestral polymorphism is W, Derived polymorphism is G
  VARIANT 28: note = Ancestral polymorphism is R, Derived polymorphism is H
  VARIANT 34: note = Ancestral polymorphism is C, Derived polymorphism is Y
  VARIANT 66..180: note = Derived polymorphism lacks residues 66 to 180
  VARIANT 86..180: note = Derived polymorphism lacks residues 86 to 180
  VARIANT 93..180: note = Derived polymorphism lacks residues 93 to 180
  VARIANT 97..180: note = Derived polymorphism lacks residues 97 to 180
  VARIANT 100: note = Ancestral polymorphism is S, Derived polymorphism is L
MAPASSSRAARDPLIFARFDLPAGWGCRKPLAFCREAQDTDNAPIASEPAATAASTEGVKDSDGTRSPTRAAAMVQQAPAAGEVAQEAPRKQWNLRERTSWRDYSNREDDLRARQARKLGSADAGGSRRLSLSVKLTRKAPRRPTNWSKTVQCKIEMLCPGSSLVHVTLDRYKVNEKGRF

SEQ ID NO: 7057 - protein, 195 aa, Zea mays
  VARIANT 99..195: note = Derived polymorphism lacks residues 99 to 195
  VARIANT 72: note = Ancestral polymorphism is G, Derived polymorphism is R
  VARIANT 70..195: note = Derived polymorphism lacks residues 70 to 195
  VARIANT 69: note = Ancestral polymorphism is N, Derived polymorphism is Y
  VARIANT 36..195: note = Derived polymorphism lacks residues 36 to 195
  VARIANT 24..195: note = Derived polymorphism lacks residues 24 to 195
  VARIANT 11: note = Ancestral polymorphism is V, Derived polymorphism is I
  VARIANT 7: note = Ancestral polymorphism is D, Derived polymorphism is V
MSEAPKDSMEVDLVQKTEKVKVTGELSSEEVETARQTSQVEAADNTFVSEVDRLEKAGNIDAELIVHVNQIGEGAEVASVSEESSQQVGDIEQAYTQKEASVSDLPTEIETLHSDAIIKELPRKAPDNMQTDIATAPKQSHNPGDNVVFEAVTEVPSTAQDHSEDDVRDEVPEEHTVSPVLQSQTPGEKLVRSRF

SEQ ID NO: 7058 - protein, 225 aa, Zea mays
  VARIANT 170: note = Ancestral polymorphism is H, Derived polymorphism is N
MSKEKHHRDWILRRCCGSIAACILTLAVVVGFIVLVIYLALRPSKPSFYLQDVQLRSIDLSDPALSLDLQVTIASRNPNERVGVYYKTLDAFTTYRDEAVTVPVSMPAIYQGHKDVSVWSPVMSGDAVPVAQYVADAMKQDIEAGYVLLHVRVDGRVKWKVGSWVSGSYHLFVNCPALLATSGSAGAAAGGGVFAASAASGVVPAGVNTTVSLKFTHPADCTVDV

SEQ ID NO: 7059 - protein, 89 aa, Zea mays
  VARIANT 18: note = Ancestral polymorphism is P, Derived polymorphism is R
  VARIANT 27: note = Ancestral polymorphism is D, Derived polymorphism is N
  VARIANT 33: note = Ancestral polymorphism is S, Derived polymorphism is F
  VARIANT 42..89: note = Derived polymorphism lacks residues 42 to 89
  VARIANT 49: note = Ancestral polymorphism is K, Derived polymorphism is E
  VARIANT 69: note = Ancestral polymorphism is G, Derived polymorphism is S
MAIVDYRGHKVVAQSIIPGILQGDKSDSLLYGSVDNGKKISWNETFHSKVVEAAKQLHLKEHVVLDGSGNPVKLAATVECKGIVGSDDR

SEQ ID NO: 7060 - protein, 865 aa, Zea mays
  VARIANT 161: note = Ancestral polymorphism is G, Derived polymorphism is R
MRAGGCTVQQSLTAEAAAVVKQAVSLARRRGNAQVTPLHVASAMLAAAPAGQLLRAACLRSHSHPLQCKALELCFNVALNRLPASASSPLLGGNHHCYHPPSLSNALVAAFKRAQAHQRRGGSVESQHQQPVVAAVKIELDQLVVSILDDPSVSRVMRDAGFSSTQVKANVEQAVCSSSTMATAAAAPSKNPNPSSSATTTSPPPKEAKAKPPLALHHQARDEDVAAVLDCLASRSKRRVVVIAESAAAAEAMAHAAVDKIKRGEVKHEHDALRGAQVVSLRVSSFREMPREEAERRLGELRCLVKQGRRQRVVLVVEDLKWAAEFWAGHDGQSGRRGGYYYCAVEHVVNELRALASGGSLCWLLGFGTYQAYTKCRVGQPSLESLWGLQTLTVPAGSLALSLTCAFDDSALGTVNQSLKAGSDADGNGPASCWPLLGGSQLSLSSRCCGDGDCSAARIDTKAALPRPSVSSSNLPSWLQHCRDHQEPTTSHLTDLSKSKTWSSICSRPSQRMTLHFSAPVSPASSISSYEHGGDQSSQTPPQHSWLLAGLDAAHHRWEPKRETSGNKAASRSHDSGASNGGSVEVECRARFKELSAENLKLLCGALEKEVPWQKEIIPEVASAVLQCRSGIAKRRDKSRSADAKEETWMLFLGGDADGKERVARELASLVFGSRDSFLAIRPGASSSSPPRSGSSEGHRSNKRPRMSPPPPGEESAPACLERLHDAVSENPHRVIFMEGVEQAGRDCQLGIKEAIESGVVRNRAGVEVGVGDAIVVLSCEGFGSTGRSRACSPPSKKVKVEMEEAKEERTGDIEHNGDGGSSSSPSCIDLNVDMESDQADEGSLDDDVCLLTAVDRTLFFRRQG

SEQ ID NO: 7061 - protein, 563 aa, Zea mays
  VARIANT 124..563: note = Derived polymorphism lacks residues 124 to 563
MSTPSVPPPCPHLAAHRLSSRPLRFLRRCLRVRPLGRPEIRRDPRELPRCSPCSAASPSPTSRLYACLSCAAVFCPSHAATHASASAGPGHQIAVDVDRAELFCAACGDQVYDPDFDHAVFLAQSSSLLPSTSTSSASASASPALRKRRRVDYRAWAPDPAEFALMTSADPTTSASASAPAGLRGLNNLGNTCFMNSVLQALLHAPPLRNYFLGDRHNRFLCPRRTPVRHRASDADRVACLACDLDEIYSAAFSGDRTPYSPAKFLYSWWQHASNLASYEQQDAHEFFISILDHIHENIKDDQQKSYAQGHGDCCIAHRVFSGILRSDVTCTSCGFTSTTFEPCMDISLDMDAGDNSSFGVANTKSHVRNGERGLAGVNSKVLTLMRCLERFTRSERLDAEQKFFCEHCNERQESLKQMSIRRLPLVSCFHIKRFEHSSVKKVSRKVDHCLQFPFSLDMAPYLSSSILRSRYGNRIFPAEASDADAVSEVSSEFEIFAVITHSGKLEAGHYVTYLRLNNHWYKCDDAWVTRVEEHTVRTSQAYMLFYVQKTFYYKACERAATV

SEQ ID NO: 7062 - protein, 367 aa, Zea mays
  VARIANT 78: note = Ancestral polymorphism is N, Derived polymorphism is I
  VARIANT 198..367: note = Derived polymorphism lacks residues 198 to 367
  VARIANT 224..367: note = Derived polymorphism lacks residues 224 to 367
MSESARPAVARKIVKSLQRCTRHSLERPPFETALGEYCQFPRPSLSPAAAAAATSGGRGEVDEGIFVRTPPKCSRLPNYLSGRIIMWIRALACSGSPGNPPTPAGCRYDNSLALLTKKFINLLNEAQDGILDLNSTAEMLGVRKRRMYDITNVLEGIGLIKKKLKNRICWKGLGELGTNLDNDLSVLKIDFENLNLQEQALDEHISKIREKLKDLTEDEGNQRWLFLTEDDIKGLPCFQNKTLIAIKAPHGSSLEVPNPDVMTGDSLQRRYRIVVRSTMGPIDLYLVSKTEEEMEGKLDDAAAPAGHTNVAKHGSIKCPRTKRAWQRSRKEEVVPKAQKIQKTPDLNAPCHSEGVLRKINPSDVEVS

SEQ ID NO: 7063 - protein, 119 aa, Zea mays
  VARIANT 89: note = Ancestral polymorphism is G, Derived polymorphism is E
  VARIANT 24: note = Ancestral polymorphism is G, Derived polymorphism is V
  VARIANT 14: note = Ancestral polymorphism is V, Derived polymorphism is L
MRVLSVAVALVVVVAAACLAAPRGADGAGECGATPPDTVALRLAPCASAAEDPGSAPSGSCCSAVHAIGKQSPRCLCAVMLSNTARSAGIKAEVAITIPKRCNLADRPVGYKCGDYTLP

SEQ ID NO: 7064 - protein, 104 aa, Zea mays
  VARIANT 7: note = Ancestral polymorphism is R, Derived polymorphism is H
  VARIANT 9: note = Ancestral polymorphism is N, Derived polymorphism is S
  VARIANT 20..104: note = Derived polymorphism lacks residues 20 to 104
  VARIANT 27: note = Ancestral polymorphism is A, Derived polymorphism is V
  VARIANT 33..104: note = Derived polymorphism lacks residues 33 to 104
  VARIANT 47: note = Ancestral polymorphism is C, Derived polymorphism is F
  VARIANT 49: note = Ancestral polymorphism is R, Derived polymorphism is I
MAGSPTRLNPMIWLRCIIIQTFMYFHARYFFQQLICGVSYCHHMEICHRDLKLENVLLDGSPAPRLKICDFGYSKSSVLHSRPKSAVGTPAYIAPEVLSRKILN

SEQ ID NO: 7065 - protein, 106 aa, Zea mays
  VARIANT 18: note = Ancestral polymorphism is S, Derived polymorphism is Y
  VARIANT 20..106: note = Derived polymorphism lacks residues 20 to 106
  VARIANT 76: note = Ancestral polymorphism is P, Derived polymorphism is L
  VARIANT 86: note = Ancestral polymorphism is S, Derived polymorphism is F
MKVIFGNGVAIGKYAMGSIETLGSPFDFAKSSMKIEPDVITTEEGLTKVQGPRDAIRETKVEDVHLDLHKAAIFMPGFSEEALTISYEHMLDHNTHVAFVNMNHSH

SEQ ID NO: 7066 - protein, 115 aa, Zea mays
  VARIANT 32: note = Ancestral polymorphism is P, Derived polymorphism is R
MKGLLLLVIALVASAACLVTVRGAGECGATPPDRMALKLAPCASAAQNPSSAPSNGCCTAVHTIGKQSPQCLCAVMLSKTAKKSGIKPEVAITIPKRCNLVDRPVGYKCGDYTLP

SEQ ID NO: 7067 - protein, 167 aa, Zea mays
  VARIANT 75: note = Ancestral polymorphism is R, Derived polymorphism is H
MEMAPAGAGKAAAAAPASRMPMMHMSFFWGNRAVVLFPGWPGARGAGAYLLCLLLVLALAALTEALAAASRCVARRGAGAGAGRVPASSAALLTAAHAARMGTAYLVMLAVMSFNGGVLLAAVAGHALGFLIARSRVHNRGGSAAAAAARDRELGGMDVHPPDVSKA

SEQ ID NO: 7068 - protein, 131 aa, Zea mays
  VARIANT 110: note = Ancestral polymorphism is V, Derived polymorphism is D
  VARIANT 67: note = Ancestral polymorphism is P, Derived polymorphism is S
MSRSNRKSSRGLDLKLNLSLPATGDSSRRAMADEESSPSSCLSSENEHGLQWSNSPEATSMVLAACPRCFIYVMLPQDDPRCPQCKSPVLLDFLQDNNNRASNPSFQVSDSISTLEEGDNIGRQSTPEMGC

SEQ ID NO: 7069 - protein, 144 aa, Zea mays
  VARIANT 40: note = Ancestral polymorphism is T, Derived polymorphism is S
MAASASTVSGLAGASLASRPAFSTSFTRGSRVSARNPLMSRNLERNGRITCMTFPRDWLRRDLSVIGFGLIGWMGPSSVPAINGNSLTGLFFSSIGQELAHFPTPPPVTSQFWLWLVTWHLGLFIVLTFGQIGFKGRTEDYFEK

SEQ ID NO: 7070 - protein, 100 aa, Zea mays
  VARIANT 16..100: note = Derived polymorphism lacks residues 16 to 100
  VARIANT 47: note = Ancestral polymorphism is S, Derived polymorphism is C
  VARIANT 63: note = Ancestral polymorphism is R, Derived polymorphism is H
  VARIANT 67: note = Ancestral polymorphism is C, Derived polymorphism is R
  VARIANT 70..100: note = Derived polymorphism lacks residues 70 to 100
MGGGGGMHDPFDIFQSFSGGGSPFGGGSSRGRRQRQGDDVVCPLKVSLYDLYNGTSKNLSLSRNVLCSKCNGKGSKSGASSRCAGCQGSGFKVHGSWDLE

SEQ ID NO: 7071 - protein, 163 aa, Zea mays
  VARIANT 3: note = Ancestral polymorphism is T, Derived polymorphism is I
  VARIANT 5: note = Ancestral polymorphism is I, Derived polymorphism is T
  VARIANT 16: note = Ancestral polymorphism is A, Derived polymorphism is T
  VARIANT 18: note = Ancestral polymorphism is R, Derived polymorphism is P
  VARIANT 36: note = Ancestral polymorphism is R, Derived polymorphism is Q
  VARIANT 42: note = Ancestral polymorphism is P, Derived polymorphism is L
  VARIANT 43: note = Ancestral polymorphism is E, Derived polymorphism is D
  VARIANT 44: note = Ancestral polymorphism is T, Derived polymorphism is M
  VARIANT 46: note = Ancestral polymorphism is R, Derived polymorphism is H
  VARIANT 49: note = Ancestral polymorphism is C, Derived polymorphism is Y
  VARIANT 50: note = Ancestral polymorphism is L, Derived polymorphism is Q
  VARIANT 56: note = Ancestral polymorphism is L, Derived polymorphism is M
  VARIANT 66: note = Ancestral polymorphism is L, Derived polymorphism is P
  VARIANT 67: note = Ancestral polymorphism is L, Derived polymorphism is I
  VARIANT 71: note = Ancestral polymorphism is P, Derived polymorphism is R
  VARIANT 73..163: note = Derived polymorphism lacks residues 73 to 163
  VARIANT 79: note = Ancestral polymorphism is A, Derived polymorphism is E
  VARIANT 87: note = Ancestral polymorphism is T, Derived polymorphism is N
  VARIANT 100: note = Ancestral polymorphism is S, Derived polymorphism is F
MVTTIEDLHADVLGCTLRRLDGQSLAVTSCATAALQALATDPEMWRALCLAEWPSLALAGERRLLLLATLPPQRLFADAPPFPSADNGCPGAGGRGALVFFLSGLVSAVDVYYHRGAPLLSRVAETPTRHRRRGSSPRSSAWRPSTERGQRLPHGARAELAGR

SEQ ID NO: 7072 - protein, 75 aa, Zea mays
  VARIANT 9: note = Ancestral polymorphism is A, Derived polymorphism is T
MAMAALRETSRCLASRGRSAAWRPVLLAQSRGITYKLFVGGLSQFATEASLAEAFSRYGQVIEGLSSSLARTHPY

SEQ ID NO: 7073 - protein, 201 aa, Zea mays
  VARIANT 14: note = Ancestral polymorphism is A, Derived polymorphism is V
  VARIANT 21..201: note = Derived polymorphism lacks residues 21 to 201
  VARIANT 35: note = Ancestral polymorphism is G, Derived polymorphism is R
  VARIANT 97: note = Ancestral polymorphism is D, Derived polymorphism is G
  VARIANT 99: note = Ancestral polymorphism is K, Derived polymorphism is N
  VARIANT 114: note = Ancestral polymorphism is V, Derived polymorphism is M
  VARIANT 129: note = Ancestral polymorphism is T, Derived polymorphism is P
  VARIANT 156..201: note = Derived polymorphism lacks residues 156 to 201
MNPSSKDNPPITFAVAACETQDVNVIVLPVIGLSGDTTMFGVGCFDSKKSTFLSERYGSRSPYSNTRYIRMWTQVMLKTLGNNLYVTVLSPCVTDQGLKKHFSTEGEVIDASIVYDPWTREPRGFGFVTMAATKEADHCIKYLDCSVLQGQVIIVEKNILLFCLHHRESEIASHSLHIHKVLLDCDDVQADALIVDRLASL

SEQ ID NO: 7074 - protein, 353 aa, Zea mays
  VARIANT 290: note = Ancestral polymorphism is F, Derived polymorphism is S
  VARIANT 285: note = Ancestral polymorphism is G, Derived polymorphism is R
  VARIANT 67: note = Ancestral polymorphism is P, Derived polymorphism is H
MNPVFQAPSGTNKDQSVQGSVEPDPFDSSTKGAAKPQSSSSSLIFLGTGCSGSLPDTRCLLKPSTPPCGVCSMGVSLPPERNPNYRLNTSLLIDYCHDETHKYILIDIGKTFREQVLRWFVHHKVPSVNSIILTHEHADAVLGLDEVWVVQPRNGRNDIEQIPIFLTQFTMDSIARRFPYLMEQKPEDGDEDAQAAKIDWKIIEDDVDKPFVASGLEFVPLPVTATSVVMHGEGYICLGFLFGRRARVAYLSDVSRFLPKTENVISKSGAGQLDLLILEANALHGVGDSSSTHLTLSESLDAIKRIRPKQALLIGMRHFFEHERENQMLAEWSIREGISTQLAHDGLRVFIDL

SEQ ID NO: 7075 - protein, 758 aa, Zea mays
  VARIANT 256..758: note = Derived polymorphism lacks residues 256 to 758
MRVLRLRAPCRLIENDVFKQDWRARGRGHILRYVALKWALCFLVGALAAAAGFVANLGVENVAGAKFVVTSDLMLDGRHGSAFAVFLASNFALTMLAAVLTVYVAPAAAGSGIPEVKAYLNGVDAPNIFSLKTLIVKVPVPVSFVSIKVQSGIDILVLHVIVGCIAAVSSSLHVGKAGPLVHTGACIASILGQGGSRKYRMTCRWLRYFKNDRDRRDLVTCGSAAGIAAAFRAPVGGVLFALETVSSWWRSALLWRAFFTTAMVAVVLRALIDFCQSGKCGLFGKGGLIMFDVTADYVTYHLIDLPPVITLGVFGGILGSLYNFFLDKVLRLYNLINEKGKAYKLLLAATVTVCTSCCLFGLPWIAACKPCPTDTREACPSIGRSGNFKKFQCATDEYNDLASLFFNTNDDTIRNLYSAGTDDEFHISSILVFFIASYFLGIFSYGLALPSGLFVPVILTGAAYGRLVGMLIGSQSTLDHGLFAVLGSAALLGGSMRMTVSVCVIILELTNNLRMLPLVMLVLLISKVVADAFNANVYDLLVRLKGFPHLEGYAEPYMRQLSVSDVVTGPLQTFNGIEKVGHIVHVLKTTGHNGFPVVDEPPFSDTPTLYGLILRDHLLVLLRKKDFIRSCTASTLNALNHFSHAEFAKRGSGKHDRIEDIELCPEELEMFVDLHPFTNTSPYTVLETMSLAKALILFREVGLRHLLVLPKSSKRAPVVGILTRHDFMPEHILGLHPFLFKSRWKKVRLGKVKVTNIF

SEQ ID NO: 7076 - protein, 248 aa, Zea mays
  VARIANT 136..248: note = Derived polymorphism lacks residues 136 to 248
MDEYQTRRSPAGERFIGMFSSPSTPSSSPTEPSFVAGDELHEDDFLFSSPDAAAPQPDGPRSPGRGAPQGHLGLLAALALHEGDRRLLVRGGHGGGVAAAASAGTLLRRKATIAAAAASASATVASGNGGALSPTQSPTSSARAIPATAKPQNAGPARPYHQSAPVKVPVRPLRKPATGRWDEFDDDADFGRGDAAMLPPHEMVARASAGGAGPAAPFSMLEGAGRTLKGRDLRRVRDAVLRQTGFLD

SEQ ID NO: 7077 - protein, 141 aa, Zea mays
  VARIANT 14: note = Ancestral polymorphism is L, Derived polymorphism is P
  VARIANT 24: note = Ancestral polymorphism is A, Derived polymorphism is V
  VARIANT 40: note = Ancestral polymorphism is T, Derived polymorphism is M
MATRRRQATAAATLAFLLLLSVSAASPSSSPPAVLTAAATSRKVLHWKQLGYPATSLFCPWNAVKFGACVGVLGAAGLQGGAQLGSKCCDVVQGLAAAEAGACFCTTVKEAVLGVPTEWDVGVGVLASACKTELPDGFKCV

SEQ ID NO: 7078 - protein, 521 aa, Zea mays
  VARIANT 35: note = Ancestral polymorphism is N, Derived polymorphism is D
MYYKGWYHFFYQYNPKGAVWGNIVWAHSVSRDLINWVALEPALRPSIPGDRYGCWSGSATVLPDGGGPVIMYTGVDHPDINYQVQNVAYPKNVSDPLLREWVKPSHNPVIVPEGGINATQFRDPTTAWRGPGPEQWRLLVGSAAGSSPRGVAYVYRSRDFRRWRRVRRPLHSAATGMWECPDFYPVSKGGAPRAGLETSVPPGPRVKHVLKNSLDLRRYDYYTVGTYHPRAERYVPDDPAGDEHRLRYDYGNFYASKTFYDPAKRRRILWGWANESDSAADDVAKGWAGIQAIPRTVWLDPSGKQLLQWPIEEVEALREKSVTLKNRLIKAGHHVEVTGIQTAQADVEVSFEVSPAALAGAETLDPALAYDAEKLCGVKRADVRGGVGPFGLWVLASANRKERTAVFFRVFKPAAGSDKPVVLMCTDPTKSSLNPNLYRPTFAGFVDTDISNGKISLRSLIDRSVVESFGAGGKTCILSRVYPSLAIGKDARLYVFNNGRAHVKVSRLTAWEMKKPVMNGA

SEQ ID NO: 7079 - protein, 134 aa, Zea mays
  VARIANT 129: note = Ancestral polymorphism is R, Derived polymorphism is W
MADDAVAGGAAVRCAGPAPASLSSSRKQQQQPDDAGCGSSDDHYQHDVIMLRRTRSGRAFPPPISVIGKGGRPWLCLRAHREGGRLVLRQMRLPSQELLQPCKEDGRFKLLMHPEARARPCGGGTLQERQGNDS

SEQ ID NO: 7080 - protein, 447 aa, Zea mays
  VARIANT 364: note = Ancestral polymorphism is A, Derived polymorphism is V
MGCISSKLLPPGPGGDGRRATVRGRVEHVVSLTSTTYGVLDLHPKHGGAVLPASAAADEEAENEQQQQPPPPPPQDKPISKEWKRASMRPPPIAVPSADKKPAGKPESGLEVINAWEIMAGLEESYAAGSPAKKPSKPGRWSPARVIAMALPSPKRSATRRKNTPGKENSPLQRCSGNTSSRGRDKDKPGDVDTDRVLRPYNSIDNSKLSMASKRFSPGSARIVRKPSAAAAETTGGGGGGMSSSRRSLSPLFDPELLASIERELSEEGAHVKRMVGSEKPKHPKAAPPAIVAEGKCPPGGADAVVLYTTTLRGIRRTFEECNAVRAAMEVHDVKLIERDVSMDSGYREELRLLLGGREVRVPAVFVRGRHVGGAAEVAKLEEEGKLKPLLEGLPRARVWCAGCAGVRFVMCRDCNGSRKVLDADRKETVKCGECNENGLVRCPICS

SEQ ID NO: 7081 - protein, 269 aa, Zea mays
  VARIANT 136: note = Ancestral polymorphism is A, Derived polymorphism is V
MSKAACECETATVLPDAGAVQLCARGGAGSASPRADDAGAPAESVLLRVPDGVGLGHLFGAALRRDASTKGSSNPKAAAEAAARKGAPSADSRRLLPATTAAASSKTAVVIGVLPASKVKVAVAKERRAPGRAVVARAWRRPAAGARVFASEAVGPEPVSPKVSCFGAVLSERSAAARREGGEEGEESGAGGCWASLGAALLGLCCSGDGREGRHLCRASEPNPKATALEPHRRQCVAVTSPPRPVAGLGDVKRLASRRWPETMARETV

SEQ ID NO: 7082 - protein, 55 aa, Zea mays
  VARIANT 53: note = Ancestral polymorphism is A, Derived polymorphism is T
  VARIANT 43: note = Ancestral polymorphism is P, Derived polymorphism is L
  VARIANT 28..55: note = Derived polymorphism lacks residues 28 to 55
  VARIANT 20: note = Ancestral polymorphism is A, Derived polymorphism is V
  VARIANT 14: note = Ancestral polymorphism is L, Derived polymorphism is V
  VARIANT 6: note = Ancestral polymorphism is P, Derived polymorphism is L
  VARIANT 2: note = Ancestral polymorphism is A, Derived polymorphism is P
MALHAPVLVMKDSLKRESGAKVHKANIQAAKAVADIIRTTLGPRSMLKMLLDAGR

SEQ ID NO: 7083 - protein, 88 aa, Zea mays
  VARIANT 9: note = Ancestral polymorphism is E, Derived polymorphism is K
  VARIANT 48: note = Ancestral polymorphism is R, Derived polymorphism is K
  VARIANT 49: note = Ancestral polymorphism is R, Derived polymorphism is H
  VARIANT 52: note = Ancestral polymorphism is T, Derived polymorphism is M
MAKAKRYLEDIIAHRQSIVFRRYCVKDLVVDNLYVSLIQVNLAQKQHKRIDTYMSSPCHSELFLLEKEDPMKKEVRKRAKRSESRRGR

SEQ ID NO: 7084 - protein, 264 aa, Zea mays
  VARIANT 55: note = Ancestral polymorphism is R, Derived polymorphism is C
  VARIANT 64: note = Ancestral polymorphism is S, Derived polymorphism is N
  VARIANT 88..264: note = Derived polymorphism lacks residues 88 to 264
  VARIANT 107..264: note = Derived polymorphism lacks residues 107 to 264
  VARIANT 108: note = Ancestral polymorphism is G, Derived polymorphism is E
  VARIANT 109: note = Ancestral polymorphism is A, Derived polymorphism is G
  VARIANT 206..264: note = Derived polymorphism lacks residues 206 to 264
MLRSSLLALFSESLFSSVLFLESKGGKHNEQRFDYLFKLLLIGDSLVGKSCFLLRFADDSYVDSYISTIGVDFKIRTVEVEGKTVKLQIWDTTGQERFRTITSSYYRGAHGIIVSKSLSLRNTFPKIIYLHFSEHTLVAPPLQNVYDITDMESFNNVKQWLDEIDRYANDSVRRLLVGNKCDLAENRAVDTSVDSSTGQNFKAYAEEVGIPFLETSAKESINVEEAFLAMSAAIKKSKAGSQAALERKPSNVVQMKGRPIQQEQ

SEQ ID NO: 7085 - protein, 382 aa, Zea mays
  VARIANT 66..382: note = Derived polymorphism lacks residues 66 to 382
  VARIANT 53..382: note = Derived polymorphism lacks residues 53 to 382
  VARIANT 23: note = Ancestral polymorphism is P, Derived polymorphism is L
  VARIANT 21: note = Ancestral polymorphism is E, Derived polymorphism is D
  VARIANT 20: note = Ancestral polymorphism is T, Derived polymorphism is I
MPNNIGLQPLPSSNVQSNQIEYLSLFYPSSLLQSSSSMAGRKSQQKVASPKVQMLKSLSFQSSNKWSAQKEPPSKVQHHQLESVRSKFRESLIVALSLDSDQQNRSQSPDNVQSDGSTDKFKPTAGDVVHDLVANTSKDVCTTNSGIATTVAPSRCEETEKLISDLASEMTMSINDGMQQPSNQVSSEDDLLGQCMVAEELLQGHGLSWVSDHVVGISKPNAEPNDLKSLRTSDVESESKRIKSANELAMDEENFNQRAESLAFRIEEELFKLFRGVNKKYKEKGISLLFNLKDKSNPELRERVSSGDIAPERLCSMTAEELASKELSEWRLAKAEEFAQMVVLPNMEVDPRNLVRKTHKGEFQVEVEEPDGTEMYIYNKLI

SEQ ID NO: 7086 - protein, 205 aa, Zea mays
  VARIANT 58: note = Ancestral polymorphism is K, Derived polymorphism is N
MDWHAWLSGARLEPALVYEYALVFARNELEADDVAFLDHEFLHSMGISVAKHRLEILKLAWRDRRSRGRAGAGRPAAALARLLLGRVARYVRSLVRREGDCSSTALVLVPPTTQPQQQQQRPGDGRSPPCVGVGGVCVSKHSQQRRGGNKALRRARSEPKGTPPRASVVGGRAAAAVHAVGDDVEGGSGSEMVRWDRLFQDLKPN

SEQ ID NO: 7087 - protein, 82 aa, Zea mays
  VARIANT 78: note = Ancestral polymorphism is E, Derived polymorphism is K
  VARIANT 56: note = Ancestral polymorphism is A, Derived polymorphism is V
  VARIANT 55: note = Ancestral polymorphism is R, Derived polymorphism is H
  VARIANT 51: note = Ancestral polymorphism is V, Derived polymorphism is I
  VARIANT 38: note = Ancestral polymorphism is S, Derived polymorphism is F
  VARIANT 34: note = Ancestral polymorphism is A, Derived polymorphism is V
  VARIANT 31..82: note = Derived polymorphism lacks residues 31 to 82
  VARIANT 20: note = Ancestral polymorphism is S, Derived polymorphism is L
  VARIANT 9: note = Ancestral polymorphism is V, Derived polymorphism is M
  VARIANT 6: note = Ancestral polymorphism is V, Derived polymorphism is M
MKGKTVMFVGDLLGRNQWESLVCLLHAAAPQSPAQLVSADPLYTYKFLVTVSFYRAPYLVDIDVVQGKRVLMLDDISENAES

SEQ ID NO: 7088 - protein, 268 aa, Zea mays
  VARIANT 138: note = Ancestral polymorphism is D, Derived polymorphism is Y
  VARIANT 219: note = Ancestral polymorphism is P, Derived polymorphism is L
MEHMRFDIMSGSIRILVVLCLKLLRTRKSPAKQTARNLFRGGDDEDDSADADTNDPAVPRSLGRVGVGHMVYISGLTCALSSTNILEVSWREKEPGSLFVNLSLLPALLNSSCLHNLSPLSDLPRSTNRTHISHVRLDGIDCDSLKVSLFHNICGSVVNEHSGVLQCSFCKCACESVCVCGFQLHLTIADDSADVLAWCVGQTAVEFLQISPDEYLELPEDERAMYLYTLQNESFVVAIANTRKRVDGCAVGDEAVPAWEITRAQKCE

SEQ ID NO: 7089 - protein, 124 aa, Zea mays
  VARIANT 35: note = Ancestral polymorphism is E, Derived polymorphism is Q
MKMRTPAVAFAALLLLLLQITTRAHGIRMDRQLHEAINSKKKMMADPKSGGGGEAASIAAAGDSVRKHCAPDGRRRCSGTTKQMTPTTVVGSRYSEVAMIISAHAAPRFHEDYYGPSGHEPNHH

SEQ ID NO: 7090 - protein, 920 aa, Zea mays
  VARIANT 12..920: note = Derived polymorphism lacks residues 12 to 920
MTCGEVAASLHQSLAKFIVPDNPEKILSLVAAKASHHRALGSADLTCALQACRGRGNRWPLVLEIHATSVVRGLGADRLIGNLLIDLYAKNGLVWQARQVFKELSARDHVSWVAMLSGYPQSGLGKEAFRLYSQMHWTAVIPTPYVLSSVLSACTKGKLFAQGRMIHAQVYKQAFCSETFVGNALIALYLGFGSFKLAERVFCDMLFCDRVTFNTLISGHAQCGHGECALQIFDEMQLSGLRPDCVTVSSLLAACASVGDLQKGKQLHSYLLKAGMSFDYITEGSLLDLYVKCGDIETAHDIFNLGDRTNVVLWNLMLVAYGQISDLAKSFEIFGQMQATGIHPNQFTYPCILRTCTCTGQIELGEQIHSLSIKNGFESDMYVSGVLIDMYSKYGCLDKARKILEMLEKRDVVSWTSMIAGYVQHDFCEEALATFKEMQDCGVWPDNIGLASAASACAGIKAMRQGLQIHARVYVSGYAADISIWNTLVNLYARCGRSEEAFSLFREIEHKDEITWNGLISGFGQSRLYEQALMVFMKMGQAGAKYNVFTFISAISALANLADIKQGEQVHGRAVKTGHTSETEVANALISLYGKCGSIEDAKMIFSEMSLRNEVSWNTIITSCSQHGRGLEALALFDQMKQEGLKPNDVTFIGVLAACSHVGLVEEGLSYFKSMSNVYGLNPIPDHYACVVDILGRAGQLDRARRFVDEMPITANAMIWRTLLSACKVHKNIKIGELAAKHLLELEPHDSASYVLLSNAYAVTGKWANRDQVRKMMKDRGIRKEPGRSWIEVKNAVHAFFVGDRLHPLSDQIYKFLSELNDRLSKIGYKQENPNLFHEKEQEQKDPTAFVHSEKLAVAFGLMTLPPCIPLRVIKNLRVCDDCHSWMKFTSEVTRREIVLRDVYRFHHFNSGSCSCGDYW

SEQ ID NO: 7091 - protein, 442 aa, Zea mays
  VARIANT 176: note = Ancestral polymorphism is G, Derived polymorphism is S
  VARIANT 162: note = Ancestral polymorphism is D, Derived polymorphism is H
  VARIANT 113: note = Ancestral polymorphism is L, Derived polymorphism is R
MLFLVRRHRRLALPFSSLHAPAPAPAPTLPSSLDASAVLKTLSLYANDWRRALDFFHWSASPAGANLPPTAATLARAVDILGKHFEFPLATSLLLSHHDPGDPTFLRPALRALLNRLAAANLIDDALHAFESTAASIGLCDEVSFHILVDALCDHRRVDEADHLCFGKDPPPFPPGTKTHNLLLRGWAKAHAWARLRQLWFDMDRRGVAKDLHSYSIYMDALAKSGKPWKAFKVFKEMKQRGIRIDTVAYNTAIHAVGMAQGVDSAVRLYRQMVDAGCKPNIATYNAIIKLFCKEGRFKEGYAFVQQMRKTGCKPDVLTYHCFFQYLSRPQEVLGLFEKMLERGCQPRMDTYVMLIKRFGRWGFLRPVFIVWKAMEEQGLSPDAFAYNALIDALLQKGMVDLARKYDEKMLAKGLSPKPRKELGTKLPEAESDSDNTLDGVL

SEQ ID NO: 7092 - protein, 122 aa, Zea mays
  VARIANT 39..122: note = Derived polymorphism lacks residues 39 to 122
  VARIANT 19: note = Ancestral polymorphism is S, Derived polymorphism is F
  VARIANT 15: note = Ancestral polymorphism is A, Derived polymorphism is T
  VARIANT 12: note = Ancestral polymorphism is D, Derived polymorphism is N
  VARIANT 8: note = Ancestral polymorphism is R, Derived polymorphism is H
  VARIANT 6: note = Ancestral polymorphism is N, Derived polymorphism is I
  VARIANT 5: note = Ancestral polymorphism is R, Derived polymorphism is C
MLWVRNIRRFVDTGAGLGSEAIMELETKRILLEIFKERQRKSAEAGSIPSFYKKPEEGSISSRVQRLAKYRFLKKQSELLLNADDLDAMWVCLRENCVIDDATGAEKMNYEDFCHIATVCTE

SEQ ID NO: 7093 - protein, 723 aa, Zea mays
  VARIANT 640..723: note = Derived polymorphism lacks residues 640 to 723
  VARIANT 636..723: note = Derived polymorphism lacks residues 636 to 723
  VARIANT 631..723: note = Derived polymorphism lacks residues 631 to 723
MFDSTQKAQYMDGHRERFIRLDESSPRSSVPSEVGGRSTLRSSMPGFGYGPFNALRSFLSGGSGRLKSLRQSLTSGAPKTAFAEDLKSYKRTIFDPQDKLLFRMNWVFFSSCLFAVAVDPLFFFLPIINDSNCIGIDKKLAVTSTIIRTVIDFVYLIRVCLQFRTAYVAPSSRVFGTGELVIDPMLIAKRYIKSYFAMDFVALLPLPQIVVWRYLHIPDGPDVLTTKTALVWVVLIQYIPRLLRIFPVITDLKRTAGVFIETAWAGAAYYLLWFMLAGHNVGTLWYFLTIEREDDCWHLYCDDPNFGLGCNSSYLYCNNHHHGSYDSWLTNNSAQVFNMCNGGQDNPFNFGIYEQALVSKILSPGNFISKLCYCFWWGLQNLSTLGQGLLTSTYPGEVLFSIAICVLGLILFALLIGNMQSYLQSVAIRLEEMRVKKRDAEQWMHHRSLPLDIRHRVRKYERYRWLETRGVDEETLVQTLPKDLRRDIKRHLCLGLVKRVPLFENMDERLLDAICERLRPALYTENEFILREGDPVDEMHFILHGCLESVTTDGGRSGFFNKVQLKEGSFCGDELLTWALDPKSAANFPVSSRTVQALTEVEAFALCAEELKFVASQFRRLHSRQVQHTFRFYSQQWRTWAACFIQAAWRRYYKRKMAEQRRKEEEAASRPSSSHPSLGATIYASRFAANAMRGVHRLRSKAVPTIVRLPKPPEPDFGVDDAD

SEQ ID NO: 7094 - protein, 177 aa, Zea mays
  VARIANT 132: note = Ancestral polymorphism is R, Derived polymorphism is H
  VARIANT 110..177: note = Derived polymorphism lacks residues 110 to 177
  VARIANT 100: note = Ancestral polymorphism is R, Derived polymorphism is Q
MASSFSDDVEALPEAGEEVDQQAKGACAVTEENEAALQEQHDDDKAPVPDEHKETMSSAPEQATEAPAPEDQHGDEKGQVVVEPKAAADDQESTRERLKRHRREMAGRVWVPEMWGQEKLLKDWVDYAVFDRPLVATGLLTARRALIAECCTRRPDRAAAASSSTSSNPLRVRNGCS

SEQ ID NO: 7095 - protein, 236 aa, Zea mays
  VARIANT 6..236: note = Derived polymorphism lacks residues 6 to 236
  VARIANT 33: note = Ancestral polymorphism is Q, Derived polymorphism is E
  VARIANT 35..236: note = Derived polymorphism lacks residues 35 to 236
  VARIANT 36: note = Ancestral polymorphism is Q, Derived polymorphism is H
  VARIANT 83: note = Ancestral polymorphism is P, Derived polymorphism is A
  VARIANT 90: note = Ancestral polymorphism is R, Derived polymorphism is G
  VARIANT 148: note = Ancestral polymorphism is G, Derived polymorphism is D
  VARIANT 212..236: note = Derived polymorphism lacks residues 212 to 236
MAASGELPVVDLAPFFTEDGKGCIAGASEAVLQACQTHGFFSVVNHRVPVELMARALELSAAFFALPNEEKAKVRAAEGSKVPLPGGYGRQPAHVADKNEYLVVFDPKLGLNAYPAGPAGFRETVEECYSKFTELGLLIQEILNGCMGLPPGFLKNYNDDRSFDLMTVRRYFPAAAEESTSIGFSEHEDASCITLILQDDVGGLEVLKDGHWVPAEPLDGSIIVNIGDAIQAAHDN

SEQ ID NO: 7096 - protein, 123 aa, Zea mays
  VARIANT 26: note = Ancestral polymorphism is L, Derived polymorphism is I
  VARIANT 20: note = Ancestral polymorphism is P, Derived polymorphism is Q
MCLVPHAQLLVLLVQEPPVQRRLADIGRELRQRFDPPISVRVEEEGEGVPVRGLPHHPLSCAACMASPMLTMMLPSRGSAGTQWPSLRTSRPPTSSCKMRVMQLASSCSLKPMLVLSSAAAGK

SEQ ID NO: 7097 - protein, 571 aa, Zea mays
  VARIANT 43..571: note = Derived polymorphism lacks residues 43 to 571
  VARIANT 228..571: note = Derived polymorphism lacks residues 228 to 571
MPHVTKELRNGASECDAVGSRRRALRSSLHLIPFPCSPSHDVWRSEDRPWHQRPRCLEQCREEREKRQERSRHEADDRSGEGSSEDEREHEQEKEEKQKDRRPYVFDRRSFRRVVRSEQGSLRVLRPFDEVSRLLRGIRDYRVAVLEANPRSFVVPSHTNVHCICYVAEGEGVVTTIENGERRSYTIKQGHIFVASAGAVTYLANTDGQKKLVIAKILHTISVPGEFQVIIIIIKLETRHLLLTVPSSSAPAGGTQNRSCRASARASRELRTRYNTCAAAAAATYCRHVCVLTSIALRVQTSSDRLERLFGRHGQDKGIIVRATEEQTHELRRHASEGGHGPHWPLPSFGESRGPYSLLDQRPSIANQHGQLYEADARSFHDLAEYDVSVSFANITTGSMSAPLFNTRSFKIAYVPNGKGYAEIVCPHRQSQGGESERERDKGRRSEEESSEEQEEAGNEKVFLAGADNVLQKLDRVAKALSFAAKAEEVDEVLGSRHEKGFLPGPEESGGHEEREQEEEEREERHGGRGVRERHRREEREKEEEEREGRHGRGRREEVVETLMRMVTARM

SEQ ID NO: 7098 - protein, 445 aa, Zea mays
  VARIANT 232: note = Ancestral polymorphism is T, Derived polymorphism is I
  VARIANT 220: note = Ancestral polymorphism is T, Derived polymorphism is I
MVAASGLALPRVSAPCPVRTRGGLRPAFLRVAQPVTLPPPQLRCCASTVDDGVVSAAASKPRLPRVVGMGSKLVGCGSAIPTLSVSNDDLSKIVETSDEWIAARTGIRNRRVLSGNDSHSFSWNKKKKSSAGRGKTTRFSCDRFFVLLLFLIFPLNVTGDETLRGLSIQAAQRALEMAGVKAEDVDLVLLCTSTPDDLFGGAAQVLSEVGCTKAFGFDITAACSGFLVGLITATRFIKGGGFQNVLVIGADALSKYVDWTDRGTCILFGDAAGAVLVQACSADEDGMLGFCVQSDGNGQKHLSAIAANDESILSNTNGVPGFPPKKATYSCIQMNGKEVFRFAVRCVPQSIEKALQEAGLPASSIDWLLLHQANQRIIDAAASRLDIPSDKVISNLANYGNTSAASIPLALDEAVRSGKVKTGDIIAASGFGAGLTWGSAIVKWG

SEQ ID NO: 7099 - protein, 409 aa, Zea mays
  VARIANT 219: note = Ancestral polymorphism is G, Derived polymorphism is R
MLRLSLMVIDCDFGLNAALDFDKAQAAEASPFRSVAAAGPWTQLAHQPMAGTDVAGSARGSDAALGKTGEPPAAARSGAAKKVTLALLASFSALLYSQIQPPPSKIPGTPGGPPVTAPRTRLKDGRHLAYLESGVPKEKAKYKIIFVHGFDCCRYDVLNVSQGLLEELGIYLLSFDRPGYAESDAHPARTEKSVALDIAELADNLQLGPKFHLIGFSMGGEIMWSCLKYIPHRLAGVAILAPVGNYWWSGFPPDVFKEAWRVQFPQDQRAVWVAHHLPWLTHWWNTQKLFRGSSVKDGDPAMLSKEDRLKQVRQQGEHDSLHRDMMVGFGKWDWSPLEMENPFAGGQDEVKVYLWHGVEDLYVPVQLSRYISERLPWVIYHELPTAGHLFPVADGMPDAIVRSLLLGDE

SEQ ID NO: 7100 - protein, 159 aa, Zea mays
  VARIANT 135..159: note = Derived polymorphism lacks residues 135 to 159
  VARIANT 112: note = Ancestral polymorphism is T, Derived polymorphism is M
  VARIANT 101: note = Ancestral polymorphism is R, Derived polymorphism is Q
  VARIANT 81: note = Ancestral polymorphism is F, Derived polymorphism is I
  VARIANT 47: note = Ancestral polymorphism is A, Derived polymorphism is T
  VARIANT 46: note = Ancestral polymorphism is T, Derived polymorphism is M
MMGFTNLWALIMDAGTGFCSQVYELSPVFLHKDWIMEQWEKSYYITAITGSSNGSSLVVMSKGLDLTFSCHCSGLHIDLPFPHYFPVVELDFLYPNEGIHRRWESGYRITSTAATNNQAAFILSMPKRKPMDETQETLRTSAFPSSHVKEKWAKNLYIA

SEQ ID NO: 7101 - protein, 420 aa, Zea mays
  VARIANT 374: note = Ancestral polymorphism is G, Derived polymorphism is V
  VARIANT 216: note = Ancestral polymorphism is T, Derived polymorphism is M
  VARIANT 162..420: note = Derived polymorphism lacks residues 162 to 420
MLGSNDTVVSQRRCSHSTPPHRRLFKGGLLHTVPASHISASAFTYYHHRLHLRPGTQTEMASVRRSAVALIASFLVVAAVGAQPMDPKNPISSDPNVIPVYMSPGSPPTYVSCYNSTHGQQGSEPTCSILARQCPRGCRDTCYVHCPSCKLVCLCELTGSECYDPRFVGGDGNKFLFHGRRDADFCLVSDANLHINAHFIGKRNDARAAAPARDFTWVQALGIRFGGHRLYLGVRRTAVWDDAEDRLAITFDGVPVALDAVAGASWSPAAAPALSVFRTGPANGVVVRLDGRFRAVANAVPVTAEDSRVHGYGLRPGDGSLAHLNVAFKFYALSADVHGVLGQTYRPGYVSAAGVDAGARVPVMGGAGRFQVYGGIFDTSCEVGRFAGEDHGPVGGVTVEEPTDALCGSGKASTGLVCKK

SEQ ID NO: 7102 - protein, 176 aa, Zea mays
  VARIANT 32..176: note = Derived polymorphism lacks residues 32 to 176
  VARIANT 29..176: note = Derived polymorphism lacks residues 29 to 176
  VARIANT 24: note = Ancestral polymorphism is C, Derived polymorphism is G
MAYKTCGYENCPRKTFEKKGSLTGASFIQKRENSYKSQLIFASHRDISNPGECLKQTWRRSDRGEGDNRLGGGHQLPPGTPHTWYPSNTTGFRFALAGVYDKIQALLDHDTAINGATPTVALIEERDSDAEWHLQEERCIPCPKREAWDPAAGHGDDGDLRDARSGAACLRRSRWR

SEQ ID NO: 7103 - protein, 179 aa, Zea mays
  VARIANT 135..179: note = Derived polymorphism lacks residues 135 to 179
  VARIANT 146: note = Ancestral polymorphism is R, Derived polymorphism is K
MLAEELLRTGGGTTTDTSQKPSSGRERVQSEALRQELEGAKRQIGALKSEKSQIEAEANNQRNFSVKLESDLKSLSEAYNSIEQANYRLDAEVKALRQGGSVPYPDVEAIKAQAKEEAEKESEAELNDLLVCLGQEQTKVEKLSTRLTELGEDVDTLLQGIGDDTAIPDDDDEDEDDEE

SEQ ID NO: 7104 - protein, 191 aa, Zea mays
  VARIANT 99..191: note = Derived polymorphism lacks residues 99 to 191
  VARIANT 140: note = Ancestral polymorphism is S, Derived polymorphism is G
  VARIANT 151: note = Ancestral polymorphism is S, Derived polymorphism is L
  VARIANT 154: note = Ancestral polymorphism is F, Derived polymorphism is L
  VARIANT 160: note = Ancestral polymorphism is W, Derived polymorphism is R
  VARIANT 167: note = Ancestral polymorphism is C, Derived polymorphism is R
MTLSGSAKPNLLQWYYSTLDNSPLQKDSRQATKIPRKIDSKHGKNGLIHPSIHSKMPAEFGWLCILVLTGTNLNSGLLNVITFTANFAVRNGQKPRDIQAIVPSRATAAARTFSTILLEFPSSDSLLPHVWEVQNKRLSGMLSIRDTGGSSVCLCPWGRRAGLRILCGRRIWTVEIVGRQNQAEAAYPLEP

SEQ ID NO: 7105 - protein, 143 aa, Zea mays
  VARIANT 140: note = Ancestral polymorphism is P, Derived polymorphism is L
  VARIANT 133: note = Ancestral polymorphism is S, Derived polymorphism is I
  VARIANT 106: note = Ancestral polymorphism is R, Derived polymorphism is C
  VARIANT 104: note = Ancestral polymorphism is R, Derived polymorphism is C
  VARIANT 101: note = Ancestral polymorphism is R, Derived polymorphism is H
  VARIANT 96: note = Ancestral polymorphism is P, Derived polymorphism is L
  VARIANT 43..143: note = Derived polymorphism lacks residues 43 to 143
  VARIANT 41: note = Ancestral polymorphism is S, Derived polymorphism is L
  VARIANT 35: note = Ancestral polymorphism is S, Derived polymorphism is F
  VARIANT 14: note = Ancestral polymorphism is A, Derived polymorphism is T
  VARIANT 3..143: note = Derived polymorphism lacks residues 3 to 143
MEEQFILRVPPSVAERIERLMNESTASSSNPHEASLDLSFSGQVQWGFQALGTREAGNRLYVGASKALATHEMIMVREENDPAPEGVEYKHGLTPPMRDARRRRFRREPDLNAELVNQVEKHLISIMHGVSVSILLFSSLATC

SEQ ID NO: 7106 - protein, 226 aa, Zea mays
  VARIANT 28: note = Ancestral polymorphism is R, Derived polymorphism is M
MTSLLNSLFHGFILLGRAYALVPCFVARIILLGCAYALACACSMFIDWINVWRGKIVSLLFGLRYGALAPECHWCGTWKGDKICSSSKKARYCSEKHQALHWRTGHKNDCLQIISSAASNLVLPAVGIGFVRWFAKASNVHRLLVLDPSGIIKAYGGTMYRLQRSIRSIFIAEAKCSDDFVFSIVFSVIGSACAYIDMIYGMASVIFVIFMTSFLIDVCDMNDGSF

SEQ ID NO: 7107 - protein, 176 aa, Zea mays
  VARIANT 9: note = Ancestral polymorphism is R, Derived polymorphism is H
  VARIANT 19: note = Ancestral polymorphism is A, Derived polymorphism is D
  VARIANT 94..176: note = Derived polymorphism lacks residues 94 to 176
  VARIANT 110..176: note = Derived polymorphism lacks residues 110 to 176
MVERYRARRNFGASRKHLASRSTLTSVHDEPYSNHHRKEVKLMHYYEEDNEEEEEKEDIFHCTKELVYGDIVWAKLGKRQPMWPGVVKYVWVRQGLIFPFSDYMNRFQGQTELSSCKPANFRRVVEEAFLADQGFSEVVVHCSTKGQSMVCHSFPDDLHEVTGSNELEYQPQIKAS

SEQ ID NO: 7108 - protein, 1086 aa, Zea mays
  VARIANT 138..1086: note = Derived polymorphism lacks residues 138 to 1086
  VARIANT 229..1086: note = Derived polymorphism lacks residues 229 to 1086
MARNALSAVGSRSAAAPPQRHVSVRCHLRPSGAGARGRRRPRFSTGPPPWRLFPFHIPMQMQRQCLLPPPPHTLLPHSFPPHSPAQPCSLPRANNISRRSSSSASAAATPHTRFPWAARVKERARAYVRAGGWTRICCWVGRGMASFAVSGARLGVVRPGGSARSGGERRSAVDLPSVLFRRKDAFSRTVLSCAGAPGKVLVPGGGSDDLLSSAEPVVDTQPEELQIPEAELTVEKTSSSPTQTTSAVAEASSGVEAEERPELSEVIGVGGTGGTKIDGAGIKAKAPLVEEKPRVIPPPGDGQRIYEIDPMLEGFRGHLDYRYSEYKRLRAAIDQHEGGLDAFSRGYEKLGFTRSAEGITYREWAPGAYVCSPQSAALVGDFNNWNPNADAMARNEYGVWEIFLPNNADGSPAIPHGSRVKIRMDTPSGVKDSIPAWIKFSVQAPGEIPYNGIYYDPPEEEKYVFKHPQPKRPKSLRIYESHVGMSSPEPKINTYANFRDEVLPRIKKLGYNAVQIMAIQEHSYYASFGYHVTNFFAPSSRFGTPEDLKSLIDKAHELGLLVLMDIVHSHSSNNTLDGLNGFDGTDTHYFHGGPRGHHWMWDSRLFNYGSWEVLRFLLSNARWWLEEYKFDGFRFDGVTSMMYTHHGLQVTFTGNYGEYFGFATDVDAVVYLMLVNDLIRGLYPEAVSIGEDVSGMPTFCIPVQDGGVGFDYRLHMAVPDKWIELLKQSDEYWEMGDIVHTLTNRRWLEKCVTYCESHDQALVGDKTIAFWLMDKDMYDFMALDRPSTPRIDRGIALHKMIRLVTMGLGGEGYLNFMGNEFGHPEWIDFPRGPQSLPNGSVIPGNNNSFDKCRRRFDLGDADYLRYRGMQEFDQAMQHLEGKYEFMTSDHSYVSRKHEEDKVIIFERGDLVFVFNFHWSNSYFDYRVGCFKPGKYKIVLDSDDGLFGGFSRLDHDAEYFTAVSPGSEYCGSLGSEYCSTQSASLILLPPYNILVDNDPFTDSYYRTGRMTTGRVLSRSMHPAEQPSYMHLQVQRTNRAQQRLLGKNFRGMCCWWTDTTATRDAARCCPRDHVAGRSAIQVDRLAYR

SEQ ID NO: 7109 - protein, 443 aa, Zea mays
  VARIANT 19: note = Ancestral polymorphism is C, Derived polymorphism is R
MPDGYRHKRLYGEYIVSICMVLNKDNIDKSMLTEYFRANQLFDWASNYLYREFPEVARWWPGAKKWTARQQRVQVGRIVSAHPEEGERYYLRVLLNHVRGATSFESLRTYDDNSIDECLTEASGFHMPPSLRRLFTMILDFCEPTDVVGLWDKHLEAMSDDFYRTHSNSHVVEQLVLMDIRDMLQTMGKDIRLFPLPAIKDEHDNMADVVREIFEKMSILEDLEAEFVVSSLNHEQRHAYDVILSSMENISGGVFFVDGLGGTGKTILYKALLATVRRSGKIAIATATSGVAASIMPGGRTAHSRFKIPLNIKEGDVRRFTKQSGTSKMLRRSSLILWDEATTTKRQAIEALDKRMRDIMDRPDLPFGGKTVVFGGDFRQVLSVVRKGTRAQIINSTLHRSSLWDSMQHLRLVRNMRAQSDQWFSNYLLRIGNGIEETCNDAN

SEQ ID NO: 7110 - protein, 128 aa, Zea mays
  VARIANT 6: note = Ancestral polymorphism is C, Derived polymorphism is R
  VARIANT 19: note = Ancestral polymorphism is G, Derived polymorphism is E
  VARIANT 40: note = Ancestral polymorphism is V, Derived polymorphism is I
MFRVSCGLWMVNYMEYWTGSSLSNNITQNDITKFRFKLPVILWNSRLNTKKGHQETDHHAVEDGGSSYDVEIIETPCELPISLNASSQVQPFISSCALPATLTSTNTQELMSALCTYIMEIDDTGYLE

SEQ ID NO: 7111 - protein, 529 aa, Zea mays
  VARIANT 292: note = Ancestral polymorphism is P, Derived polymorphism is L
  VARIANT 160: note = Ancestral polymorphism is A, Derived polymorphism is T
MEASLSLSSLQLAFTAVAAIAALGVAVTVTRYNRRYMGLRLPPGPPGWPVVGNLFQVAFSGKLFIHYIRELRKEYGPILTLRMGERTLVIISSAELAHEALVEKGREFASRPRENTTRNIFSSNKLTVNSAVYGPEWRSLRRNMVSGMLSTSRLREFRHARRRAMDRFVSRMRAEAAASPDGASVWVLRNARFAVFCILLDMTFGLLDLREEHIVRIDAVMKRVLLAVGVRMDDYLPFLRPFFWRHQRRALAVRREQIDTLLPLINRRRAMLRDMQQRQSSSPPPDPSVAAPFSYLDSVLDLRIEGRDDGALTDDELVTLCAELLNGGTDTTATAIEWGMARIVDSPSIQARLHEEVMQQVGDARPVDDKDTDAMPYLQAFVKELLRKHPPTYFSLTHAAVQPGCKLAGYDVPVDANLDIFLPTISEDPKLWDRPTEFDPDRFVSGGETADMTGSAGIRMIPFGAGRRICPGLAMGTTHIALMVARMVQAFEWRAHPSQPQLDFKDKVEFTVVMDRPLLAAVKPRNLAF

SEQ ID NO: 7112 - protein, 266 aa, Zea mays
  VARIANT 185..266: note = Derived polymorphism lacks residues 185 to 266
  VARIANT 136..266: note = Derived polymorphism lacks residues 136 to 266
MAASIGIMDGAYFVGRGEILHWINATLQLSLAKVEEAASGAVQCQLMDMVHPGVVPMHKVNFDAKTEYDMIQNYKVLQDVFNKLRIGKNIEVNKLVKGRPLDNLEFLQWLKRYCDSVNGGIMNENYNPVERRSKGCKERVSKGSNKPSKSLQANRLSGADPTDGGHGVGKVCNTFSEEHYIEQIQKLSEKIADLKVSVDSTEKERDFYFSKLRDIEILCQRPELEHLPMTKAVRKILYAADAKDSPLPEANDIITKSPSLFSNETE

SEQ ID NO: 7113 - protein, 237 aa, Zea mays
  VARIANT 22..237: note = Derived polymorphism lacks residues 22 to 237
  VARIANT 51..237: note = Derived polymorphism lacks residues 51 to 237
  VARIANT 76: note = Ancestral polymorphism is T, Derived polymorphism is M
  VARIANT 82: note = Ancestral polymorphism is L, Derived polymorphism is S
  VARIANT 99: note = Ancestral polymorphism is P, Derived polymorphism is T
  VARIANT 100: note = Ancestral polymorphism is R, Derived polymorphism is W
  VARIANT 101: note = Ancestral polymorphism is A, Derived polymorphism is T
  VARIANT 106: note = Ancestral polymorphism is A, Derived polymorphism is T
  VARIANT 125: note = Ancestral polymorphism is P, Derived polymorphism is L
  VARIANT 139: note = Ancestral polymorphism is P, Derived polymorphism is T
  VARIANT 151: note = Ancestral polymorphism is R, Derived polymorphism is C
  VARIANT 167: note = Ancestral polymorphism is A, Derived polymorphism is T
  VARIANT 173: note = Ancestral polymorphism is S, Derived polymorphism is P
  VARIANT 179: note = Ancestral polymorphism is A, Derived polymorphism is V
MYNPCFPQYDTLQGLHRHLPASPRLLRSSPISSSASISSSASISCLPVTLQHQYPKRRCVALSLSPSLARIPGAPTPSLDSLTDELLFLVLDRVAHADPRALKSFALASHACHAAESRHRRTLRPLRADLLPAALARYPTVTRLDLTLCVRVPDAALASVAVSALHAVNLSCSRGFSAAGVSELAIAYLGLVDLDLSNVVDLGDAAAAEVVRARALRRLSLAPGSRSSTWASDASPS

SEQ ID NO: 7114 - protein, 63 aa, Zea mays
  VARIANT 9: note = Ancestral polymorphism is M, Derived polymorphism is R
  VARIANT 1: note = Ancestral polymorphism is M, Derived polymorphism is K
MGGCLAPQMTGVAKCWQVAQLVCRWKPTKPLLCPVLTLMVTTLSIVNLASSEVHLILCNVRNY

SEQ ID NO: 7115 - protein, 344 aa, Zea mays
  VARIANT 294..344: note = Derived polymorphism lacks residues 294 to 344
  VARIANT 173: note = Ancestral polymorphism is A, Derived polymorphism is V
  VARIANT 17: note = Ancestral polymorphism is D, Derived polymorphism is N
MKDLVSCFSEHAVRISDVACSGSSAANAAAAAAGAPEAAGGRAPAVSAVTTAYRSRLAASGKELLIDVTWSRAPDGPALSVAVHEAAAAAAPRSRAAAPRHLHRKKGSGTFTAGSCVVGVFWDYGAARYAGGAGPEPASGFYVAVVADAEFVLLLGDLSRGYVDRLHGGIPVAASRLARRRERFVGRGRWATKARFLESGDEHEIGVVLRDADADAEAWVTVDGLRVVQLRRLRWNFRGCHTIFLDGGAPVDMTWDLHGWLFHAHAPAAELPHSSSSCAVFTFQARGASEAKLWTDDDCFHYGEEPDKLPVTPTRRRQKAAAGGASGQGFCLLIQGFRGFSKNT

SEQ ID NO: 7116 - protein, 1266 aa, Zea mays
  VARIANT 310..1266: note = Derived polymorphism lacks residues 310 to 1266
MAESAAADGKSDKVANGGGGGGDAAGEGKKRGDQAVAFHELFSFADKWDLMLMAAGSMGALAHGAAMPFFFLLFGDLINGFGKNQTDLRTMTDEVAKYALYFVYLGLVVCVSSYAEIACWMYTGERQVIALRKAYLDAVLRQDVGFFDTDARTGDIVFGVSTDTLLVQDGIGEKVGNFMHYIATFLAGLVVGFVSAWRLALLSVAVIPAIAFAGGLYAYTLTGLTSKSRESYANAGVVAEQAIGQVRTVYSFVGESKALNSYSEAIQNTLKLGYKAGMAKGLGIGCTYGIACMSWALVFWYAGVFIRNGQTDGGKAFTAIFSAIVGGMSLGQAFSNLGAFSKGKIAGYKLLEVIRQKPSIVNDHKDGKWLAEVHGNIEFKEVTFSYPSRPDVIIFRDFSLFFPAGKTVAVVGGSGSGKSTVVALIERFYDPNEGQVLLDNVDIKTLQLRWLREQIGLVNQEPALFATTILENILYGKPDATIAEVEAAATASNAHSFISLLPNGYNTMAGERGIQLSGGQKQRIAIARAMLKNPKILLLDEATSALDADSESIVQEALDRLMVGRTTVVVAHRLSTIRNVNMIAVIQQGQVVETGTHDELIAKGTSGAYASLVRFQETARNRDLGGASSRRSRSIHLTSSLSTKSLSLRSGSLKNLSYQYSTGADGRIEMISNADNDRKYPAPRGYFFKLLKLNAPEWPYAVLGAIGSVLSGFIGPTFAIVMGEMLDVFYYRDPNEIEKKTKLYVFIYIGTGIYAVVAYLVQHYFFSIMGENLTTRVRRMMLSAILRNEVGWFDEEENNSSLVAARLGVDAADVKSAIAERISVILQNMTSLMTSFVVGFIIEWRVAILILATFPLLVLANFAQQLSMKGFAGDTAKAHARSSMVAGEAVSNIRTVAAFNAQSKILSLFSHELRVPEQQILRRSQTSGLLFGLSQLCLYSSEALILWYGSHLVRSHGSTFSKVIKVFVVLVVTANSVAETVSLAPEIIRGGESIRSIFGILNRATRIEPDDPESERVTTIRGDIELRHVDFSYPARPDIQIFKDFNLKIQAGRSQALVGASGSGKSTVIALIERFYDPCGGKVAIDGKDIRTLNLKSLRLKIGLVQQEPVLFASSILENIAYGKEGASEEEVVEAAKTANVHGFVSQLPDGYRTAVGEQGMQLSGGQKQRIAIARAVLKDPAILLLDEATSALDAESECVLQEALERLMKGRTTVLVAHRLSTIRGVDRIAVVQDGRVVEHGSHSDLLARPEGAYLRLLQLQHHRV

SEQ ID NO: 7117 - protein, 167 aa, Zea mays
  VARIANT 136: note = Ancestral polymorphism is P, Derived polymorphism is S
  VARIANT 133..167: note = Derived polymorphism lacks residues 133 to 167
  VARIANT 124..167: note = Derived polymorphism lacks residues 124 to 167
  VARIANT 110..167: note = Derived polymorphism lacks residues 110 to 167
  VARIANT 106: note = Ancestral polymorphism is H, Derived polymorphism is Y
  VARIANT 89: note = Ancestral polymorphism is D, Derived polymorphism is Y
  VARIANT 61: note = Ancestral polymorphism is G, Derived polymorphism is R
  VARIANT 59: note = Ancestral polymorphism is P, Derived polymorphism is A
  VARIANT 57: note = Ancestral polymorphism is D, Derived polymorphism is V
  VARIANT 45: note = Ancestral polymorphism is F, Derived polymorphism is V
  VARIANT 39: note = Ancestral polymorphism is G, Derived polymorphism is D
  VARIANT 23: note = Ancestral polymorphism is M, Derived polymorphism is I
MSIDTYLIESYISLGYVEVVPPMDKQRRLEQILRDQERGSKIIIFCSTKKIVVINYDFPTGIEDYVHRIGRTGRDGATGVSYTFFSEQDWSHAGDLVKLLQGANQHVPPQLRDMAAHSASGGPRNEAAGMSRWDGPGGSHFEPGVGGSVGYGGVREGPGGFGGREGP

SEQ ID NO: 7118 - protein, 104 aa, Zea mays
  VARIANT 6: note = Ancestral polymorphism is R, Derived polymorphism is W
  VARIANT 75: note = Ancestral polymorphism is V, Derived polymorphism is M
  VARIANT 84: note = Ancestral polymorphism is E, Derived polymorphism is D
MSSGRRSSRTRRAGSSSLSSSTSRSISEDQISELLSKLQALLPESQARNGGAHRGSAARVLQDTCSYIRSLHQEVDNLSETLAELLASADVTSDQAAVIRSLLM

SEQ ID NO: 7119 - protein, 204 aa, Zea mays
  VARIANT 86: note = Ancestral polymorphism is S, Derived polymorphism is T
MPPLAPPHGEKGGRQRQGAAAAPAPAQRSASFHGRGTEQRHHQPQKQRPKTLPDLLAGVRGASFRSGSPPPDGDAGRRTPSKVLVSVAVQQSMWPLHVMAPAEWTVADLVAAAVALYVKEGRRPLLPSTDPAAFGLHYSQFSLDSLNPKEKIMELGTRSFFLCPRSWAAGQDASSSSGTANGVTSAASGKTPAWLSYMPFWPTM

SEQ ID NO: 7120 - protein, 249 aa, Zea mays
  VARIANT 38: note = Ancestral polymorphism is E, Derived polymorphism is Q
  VARIANT 107: note = Ancestral polymorphism is R, Derived polymorphism is T
MTSRIMSETGHTVQVTNLSSRVSESDLHEFFSFSGPIEHIELIRSEGYGATAYVTFKERFALETAVLLSGATIVDQPVCITYWGQPEGTFNFWDRPTWEVEEEIEYRNYQTCQYNTTPQEAFTVAQDIMKTMLEKGYVLSKDALAKARAFDESYGLTAAAAARAAELSKRIGLTDRVNAGVGAMRSVDETYRVRETTKTVATATGRTAAKVVNGIVTSSYFSAGAMILSDALTRAAKAAADLAAHGRQN

SEQ ID NO: 7121 - protein, 424 aa, Zea mays
  VARIANT 16: note = Ancestral polymorphism is A, Derived polymorphism is T
MGCATSTEARRDMVRTGAGAPPRRSFSLPSVDRQRLRLKTVSMLGNLGLAGSSARHSSSCRHATLSVEDLMKSDNDHAADAVLLGDDAAKRSLKPRTPTLTPPNEPEVINAWELMAGLEDDAPTPRATYRCSLLNELPQELGLEAPPLPEWMQADMDMPVALDFDPEVLSGFRDALEATAPSPEHVVSSAEADTETPREQERKGADACDMPTSPATGNMPELSGLVRARIIAFQEKIERRGSKGRDAKVSSRWPPGGERKAVVYYTSLRGVRKTFVDCCAVRSILRSYGVRLDERDVSMHAVFKAELAELLGPGFAAAALPRVFVDGRYLGGAEDVHFLHEAGELGRVLEGCEAAPSRKLGYMEACAACGDVRFVPCETCYGSCKVFVEDDDADDMYQYHDVGEFRRCPDCNENGLVRCPVCCC

SEQ ID NO: 7122 - protein, 270 aa, Zea mays
  VARIANT 20..270: note = Derived polymorphism lacks residues 20 to 270
MEKAGQKRRPLTVMASSSSQVAAARGMGMTNPLAEWTDRVRSLEAGVRAWLAKQPTHVEAAVVTAVGAVQGAALGGLMGTLAPDGGAALPVPPPPPGTDPKVLASFKQAQALAGGPLVQARNFAVMTGANAGISCVMRRIRGVEDVQGSMAAAFGSGALFSIVSGMGTPNPVANAITTGVGFAVFQGGFFMISQKFSQPQSGDTYYSRGRSMLQKLGLQNYEKNFKKGLLTDQTLPLLTDSALRDVKIPPGPRLLILDHIKRDPELTKAN

SEQ ID NO: 7123 - protein, 179 aa, Zea mays
  VARIANT 111: note = Ancestral polymorphism is S, Derived polymorphism is F
  VARIANT 1: note = Ancestral polymorphism is M, Derived polymorphism is I
MDRAKLTKSGKKASVLADAKAKANAIIVSKEESAAEVGIEEDVVLTKQTEEGTDDLISEFRDLSSQLQETLMPDLERLSQHSKAYLSATNAGIADGVRLILGGRWAVVASSAASVAVLLLLPLFMLIALAYLAIYFATLVLTAATTGLEPLRFVHATSPAAYAWTQAARSLGFMAYLVL

SEQ ID NO: 7124 - protein, 424 aa, Zea mays
  VARIANT 324: note = Ancestral polymorphism is D, Derived polymorphism is Y
  VARIANT 180: note = Ancestral polymorphism is W, Derived polymorphism is S
MGQMISGDKSDEQTARDDGIIKNGREILFQAFNWESNKHNWWSILEEKVTDLAESGFTSVWLPPPTQSLSREGYLPQNLYCLDSCYGSLHELKLLLHKMSEHNVRAMADVVINHRIGTTQGSNGMYNRYDGIPVSWDEHAVTSCSGGKGNKSTGDNFDGVPNIDHTQPFVRKDIIEWLIWLRKSVGFQDFRFDFTKGYAAKFVKEYIEESKPLFAVGEYWDSCEYSPPDYRLNYNQDVLVSFCLPDIHRQRIINWIDNTGGLCAAFDFTTKGILQEAVKGELWRLRDSEGKPPGVMGWWPSRSVTFIENHDTGSTQGHWPFPSDHIMEGYAYILTHPGIPTVFYDHFYDQGVPLHDEIAKLMQIRKCQDIHSRSSIKILEVGSDLYSAIIDDKLCMKIGDGSWCPSDPEWRLAVSGDRYAVWHK

SEQ ID NO: 7125 - protein, 330 aa, Zea mays
  VARIANT 97: note = Ancestral polymorphism is R, Derived polymorphism is L
  VARIANT 287: note = Ancestral polymorphism is G, Derived polymorphism is V
MAVQGRHLSHDLAAQAAGGYLFLDEYAGCAPAAAPAPARIGDATTALSDFPRVEVAWCNYDGFLPRKRPRLETAAPAAGGGLSEDQRAGLPPAGTERLLPLPVAVAPFVNARSRRAVAASGTASTSGRVASGATVAASRGLLSSWTHRHGVEIDALVRLEAERMRAALEEARRRHARALLAAVGRAASGRLRASETDLERALRRGAELEEKARQAGAECQAWMAVARRHEAAAAGLRATLDQLLQSPYGAGGGREEGGEAEDAESCCFEDGGASCASRSKLACRSCGAGEASVLLLPCRHLCLCRACEAGVDACPVCAAAKNGSLHVLVS

SEQ ID NO: 7126 - protein, 247 aa, Zea mays
  VARIANT 143..247: note = Ancestral polymorphism lacks residues 143 to 247
  VARIANT 134..247: note = Ancestral polymorphism lacks residues 134 to 247
MQNGVLHTWNITTSPCGYLIMSYVKCMLKYLEMDASCVCGERYLKCHHRHHESIVDKCGYKQVMQIIVPLIYSKLCSARPLSFSLHTLFFFFSLVCVCPLKLYNFQPTLCGSVFFLDIDNCTTHKLHFQFFPFKILNFFQYIERINIIIKFIILTTTRLEMTHVFPREGASSSSTSMSSQRSETDDDRMIAMVLSEEYAKLDGAMAKRLTNLTSIPVRCLMNFMLLVFSFAFSFSSLHRRIFVLVTH

SEQ ID NO: 7127 - protein, 448 aa, Zea mays
  VARIANT 1: note = Ancestral polymorphism is M, Derived polymorphism is L
MEVKVMSSRLVKPSYPPGVPQPDTTQHVPCSVFDKITYHIQMAIIYAFSPPVPSIADIEHGLAAVLGVYRAFAGQVRPGPDGELGVLLNDHGAQLTEAFVDAHLIVVAPARPSPELQQLHPGLHVEIEEVVQVQLTTFTCGSLVVGFTANHAVADGRATSSFLVAWGRTMRGFPIGLPPPPLHHHPGLFPPRDPPRFEFEHRGVEYRARPTPPASSSSSSHLVTAHGETTHRHDIVIHKAHFTGEFITALRAKASEGRGHPFSRFETIVGHVWRAMTRARGLRDPCQASAIRISVDGRPRLGVPQEYFGNLVLWAFPRTTVGNLLTQSLTHAAQVIHDAVKQVDRAYFQSFLDFASSGVVEEEGLETTAVLSSDVLCPDLDVDSWLTFPFQELDLGTGGPSYFMPPYIPIEGMFFLVPSCLGDGSVDAFVPVFKHTLEAFMQCCCSVE

SEQ ID NO: 7128 - protein, 534 aa, Zea mays
  VARIANT 166: note = Ancestral polymorphism is P, Derived polymorphism is S
  VARIANT 145: note = Ancestral polymorphism is H, Derived polymorphism is Y
  VARIANT 130: note = Ancestral polymorphism is T, Derived polymorphism is N
  VARIANT 112: note = Ancestral polymorphism is R, Derived polymorphism is L
MGGRALLLLLLVSALVFQIHASDPLLYEPFDEDFEGRWVVSKKDEYQGVWRHAKSDGHEDYGLLVSEKARKYAIIKELDEPVTLKDGTVVLQFEVRLQNGLECGGAYIKYIRPQDAGWDAKEFDNETPYTIMFGPDKCGSTNKVHFILKHKNPKTGKYVEHHLKFPPSVPYDKLSHVYTAILKPDNEVKILVDGEEKKKANFLSADDFEPALIPSKTIPDPDDKKPEDWDERAKIPDPDAVKPDDWDEDAPMEIVDDEATKPEGWLDDEPEEIDDPEAAKPEDWDDEEDGEWEAPKIDNPKCEEAPGCGEWKRPMKQNPAYKGKWHAPMIDNPNYKGIWKPQEIPNPEYFELDKPDFDPIAAIGIEIWTMQDGILFDNILIADDEKVATSILEKTWKPKYDVEKEKEKAEEEAAAGADGLSEFQKKIFDVLYKIADVPFLAPYKTKIIDVIEKGEKQPNITIGILVSVVVVFVTVLFKILFGGKKPVAPVKPAAEAKKPKATVTDGAGSSGDKDEKEDEKEETAGPRRRTRRET

SEQ ID NO: 7129 - protein, 658 aa, Zea mays
  VARIANT 274..658: note = Derived polymorphism lacks residues 274 to 658
  VARIANT 214..658: note = Derived polymorphism lacks residues 214 to 658
  VARIANT 101..658: note = Derived polymorphism lacks residues 101 to 658
MDLNRTNLWFHGKEHIATASFSQAQPSAINCRNEELSMSAVNLGYIRSSEIAQNSRKSFQHGDQSLTAPDDSCRLALGLGPTPNLYSADSHSFGGNKAYQSATLLSQHCATTDPGLMLGLSRCSSRNLQSTRASGSKNYSPARKTGIILPLIDEGSTSAKRKKGGYLLPLLFVPRSEDLCLNGTSTDTDAQQHIGTECDTESGHNRSLNLHEIQPSADLSITAGCSFAATSDVVADTSDEQRSHQRHPKKCRFNGCSKGARDASGLCISHGGGQRCQKPGCNKGAESRTAFCKAHGGGRRCQELGCTKSAEGKTEFCIAHGGGRRCGIEECPRAARGKSGFCIKHGGGKRCRIEGCTRSAEGHPGLCISHGGGRRCQYPNCDKGAQGSTIFCKSHGGGKRCMFDGCTRGAEGSTSFCKGHGGGKRCLFEGGGMCPKSVHGGTSFCVAHGGGKRCSVPGCTKSARGRSDCCVKHGGGKRCRFDGCDKSAQGSTDFCKAHGGGKRCAWSTGCDKFARGRSGLCAAHTTLMASKVVHHPGHARSMVGPCHFSGGVSGSSAADSNMDHAISSSGHGAWSDCVDSSRDMQSAGRLLIPRQVLVPGSLKDAPSCGLAGNGQDDGGSRNQSCGLVVPEGRVHGGGLMSMLGVGGNLGSNPDGSKA

SEQ ID NO: 7130 - protein, 277 aa, Zea mays
  VARIANT 202: note = Ancestral polymorphism is P, Derived polymorphism is S
  VARIANT 23: note = Ancestral polymorphism is R, Derived polymorphism is W
  VARIANT 20: note = Ancestral polymorphism is L, Derived polymorphism is P
  VARIANT 11: note = Ancestral polymorphism is E, Derived polymorphism is G
MAALDAGLPAEAVRHFTKILEARRGVLPHPFAAAFQAGGRPADAIADCNRSLALDPAYIPALRARADLLQSVGAVADCLRDLDLKLLQGGVRMPSGLRLLTKIEALPRISKKDAEKMQLQRMHKLEHLALRCNTNEEQNDKNKIPEINSGDFDLDALAEALEQSATLASNSKKKNKSKHANAPVKRPVLKAQACDLSIPVLSCFTYIMIIDKGTVGSNISELVLDKETMDAANDGEEKWEGEKYEYHKAIGADRTFSKFEKRLLDKIEYEHIIEEFI

SEQ ID NO: 7131 - protein, 403 aa, Zea mays
  VARIANT 82..403: note = Derived polymorphism lacks residues 82 to 403
  VARIANT 130..403: note = Derived polymorphism lacks residues 130 to 403
MQRRRRLTRAMVTASMVMASSALVKAAAVAQPSSPFRHRRRGVVAPLVFPVPYFSSSLGIIYVLAKPAIYAMISGEVLSTDQGKAQGFIATVQSVAILLAPQFMSPLTCKHLTFCLLHFRGSALRLQRFQLYCGEFLLGQSSSSHGHFRGSALRLQGFAIGSAALVSLALFGAFISRAGVKVVHVLSPKVFIGLIVGAMLPYWFSAMTMKSVGSVALKMEEEVRRQFNTIPGLMEGTAKPDYATCVKISTDASIKEMIPPGALVMLTPLIVGTLFGVETLSGVLAGALVSAGACFAFLCTSMCLLVLGFMDFCLMFAIFAPNTGGAWDNAKKYIEAGASEHARTLGPKGSDCHKAAVIGDTIGDPLKDTLGPSLNILIKLMAVESLVFDPFFATHGGLLFKYL

SEQ ID NO: 7132 - protein, 452 aa, Zea mays
  VARIANT 43: note = Ancestral polymorphism is P, Derived polymorphism is L
MVMQRFSWPYGGRSASLCGSFTGWREYPMGLVGAEFQVVFDLPPGVYQYRFLVDGVWRCDETKPFVCDEYGLISNEVLVENNVQPVVQPEPSIRGTNLDEGTVLTTMPPESSSQNPGVQIAVFRHVVSGILLHNTIYEVVPLSSKLAVLDTQLPVKQAFKIMHDEGLALVPLWDDHQGTITGMLTALDFVLMLRKLQRNIRVTGNEELEMHPISAWKEAKLQFYGGPDGAAMQRRPLIHVKDSDSLADVALTIIRNEISSVPIFKCMPDSSGVPFLNLATLQGILKFLCSKLQEQAGGCSLLHNQLLSIPIGTWSPHTGRSSSRHLRTLLLSSPLNTCLDFLLEDRVSSIPIVDDKGALHDVYSLSDIMALAKNDVYARIELEQVTVQNALDVQYQVHGRRQCYTCLQTNTLLEVLEGLSIPGVRRLVVIEQSTRFVEGIISLRDIFTFLLG

SEQ ID NO: 7133 - protein, 310 aa, Zea mays
  VARIANT 162: note = Ancestral polymorphism is R, Derived polymorphism is T
MEAIVGVRAPPRGRAWAGLEKPPRAACRARVPTARLAVAADRPRRLVLLGADTRRAADPALRCAAQSAGGTGKVHYSADDALILQQKAQDVLPYLDGRCVYLVGMMGSGKTTVGKILSEVLGYSFFDSDKLVEKAVGISSVAEIFQLHSETFFRDNESEVLTDLSSMHRLVVATGGGAVIRPINWSYMKKGLTVWLDVPLDALARRIAAVGTASRPLLHQESGDPYAKAYAKLTSLFEQRMDSYANADARVSLERSTMLQNQLTDQILYDADIALKQGHNDVTILTPSTIAIEALLKMESFLTEKTMVRN

SEQ ID NO: 7134 - protein, 740 aa, Zea mays
  VARIANT 347..740: note = Derived polymorphism lacks residues 347 to 740
  VARIANT 341..740: note = Derived polymorphism lacks residues 341 to 740
  VARIANT 313..740: note = Derived polymorphism lacks residues 313 to 740
  VARIANT 7: note = Ancestral polymorphism is S, Derived polymorphism is N
MLLLQPSAVPAPALRGRPRPRRRLVPPPLASAPASIVVSSDEDAFTRCSGYLFEEGAATESELPTAYDLPGIAAVYRRRPLLVLRRSLQIGTSFGRWFALRYLDRVNERADDMFELRAAQLRRILLELGPAFVKIAQAVSSRPDVVPPAYLDELSLLQDRIAPFSNDVAFNIIEKELGLPLDMVFSEITPEPVAAASLGQVYQARLRSSGKIVAVKVQRPGVQAAISLDIYILRFLASLARKAAKLNTDLPAVLDEWASSLFRIFTLNTGKSHLMQEMDYREEARNGLKFRELFGKFRDVSVPEMYLEQTRRRVLIMEWIEGEKLSEVRDQYLVEVGVYCSLSQLLEYGFYHADPHPGNLLRTVDGKLAYLDFGMMGEFRQELRDGFIEACLHLVNRDFDALAKDFVTLGLLPPTAQKGEVTKALTDQESCHITCPIGISLGIPLSYFALGVFENAVNRGVQNISFGDLSGNLGRTMYKFKFQIPSYFSLVIRSLAVLEGIAISFNPKYKVLGSSYPWIARKVLTDSSPKLRSTLQTLLYKDGTFQIDRLESLLTESLRARTEQSLVRNEQDVDSTRYAIKQVLSFTLADQGAFVKDLLLQEIAKGIDALGVATLSSATSAAASRLPFGGGPSPLTSLDDEDATNLRNLYRLLLLLSKVSQKENPSPIPEYNSAIEKEGGSTDELALALYGMTSLPEFLPVLSVIPELPPESQQQLLLLPADLTNRILSRALARTIRRLM

SEQ ID NO: 7135 - protein, 271 aa, Zea mays
  VARIANT 60: note = Ancestral polymorphism is E, Derived polymorphism is D
MNFSSYFFSSSSSDKKSSSKRQQQQAAQPQTDANTTRYLGVRRRPWGRYAAEIRDPATKERHWLGTFDTAEEAAVAYDRAARSLRGARARTNFAYPDLPPGSSVTPYLSPDLTSGDNATQLLQPFYAADAAAASLPPALPAANGAAGYGAAAGDYASYGYSAEDMSALMDDLTIPDDLTADYGAEDAGGSVDMSSMYGGGGSSANASSASSGGGGWCDASEFSAYGASAASHGVYFEEGYVHSPLFSPMPAVDDACADGFQLGGSSSSYYY

SEQ ID NO: 7136 - protein, 398 aa, Zea mays
  VARIANT 302..398: note = Derived polymorphism lacks residues 302 to 398
  VARIANT 37..398: note = Derived polymorphism lacks residues 37 to 398
MNVHGDSPIAADCPSSSNQDGLPVPSSNQNGSHVHFSSLKADEDESETSDEIVPVVVRPGHIRFEPAGREPDKSPAKELQGTFQWSGTLSKKKGQKWGINSSNKKNADVGYHAGIAGSNTEVNNLVMDIKVTENGFCAVSNRRIDEGSNVEMSSVKAVANEEKSRGVPFDFESLYPLTQLPKEGDLIAYRLVELSSMLCPELSSFRVGKVVLYDPISLRIILLPVQEYPITTEENEDKDEPDMLVDLSPYKEDGSLEIEYSSLLDVRLLKGIEPVPGAFSTPLAETCNEVGSALAKGRPVTLHKNEGNIESQKSPLVANNTNGKEHKLGKSEKTVWEKNDEPGDEVDVQQNGWGTWKQNSTSAWSYRALRSSALGPTMALLRGKNNQRGKPPYRKKGK

SEQ ID NO: 7137 - protein, 67 aa, Zea mays
  VARIANT 51: note = Ancestral polymorphism is G, Derived polymorphism is S
  VARIANT 10: note = Ancestral polymorphism is D, Derived polymorphism is N
MANFAAQIKDKFLGLVDRVAGRGRAGGGKDDVQEPTTKLHTVQRVEVRSRGRAAEPVVDGGSTAGPN

SEQ ID NO: 7138 - protein, 236 aa, Zea mays
  VARIANT 111..236: note = Derived polymorphism lacks residues 111 to 236
  VARIANT 100: note = Ancestral polymorphism is A, Derived polymorphism is T
  VARIANT 96: note = Ancestral polymorphism is A, Derived polymorphism is T
  VARIANT 82: note = Ancestral polymorphism is L, Derived polymorphism is Q
  VARIANT 77: note = Ancestral polymorphism is A, Derived polymorphism is V
  VARIANT 60: note = Ancestral polymorphism is R, Derived polymorphism is Q
  VARIANT 27: note = Ancestral polymorphism is R, Derived polymorphism is H
  VARIANT 8: note = Ancestral polymorphism is E, Derived polymorphism is K
MVLASTDERGRRETKALVLSLLKDSTRGHVGGGADGSPPGIISSSETLYGSCRGCLDRLRRLLAEASSEPAYSTAVARRIALEADNLVWLVEMLVASQHACDGFVALWSGQAELAPRFRAKENATARYFVGHGLTMDENYFTNSSWYKLLEALALASLIDDEKKLDNCQFDLWKQYYVAACVAVFGKLRRSRRLDAVQSGCTALSISNRGPHGRHQRRRLLGCSGHRIRQWHCHTV

SEQ ID NO: 7139 - protein, 426 aa, Zea mays
  VARIANT 191: note = Ancestral polymorphism is N, Derived polymorphism is T
  VARIANT 49..426: note = Derived polymorphism lacks residues 49 to 426
MSRGSAASVFLGVDVGTGSARAGLFDENGKLLGSASSPIQIWKEKDCIEFDKNRMLLAVAVDADGSPVSVSLSGDTRRNIIVWMDHRAVNQAERINATNSPVLQYCGGGVSPEMQAPKLLWMKENLLDSWSMWKESDSRDMEACGWDNVFWEEIGLGDLLEGNCAKIGRSVAFPGHALGSGLTPTAAKASNFLVFSIFEVELGLLPGTPVGTSLIDAHAGGVGVMESIPDAGSKAGSMIPEFWLTEGGQSATGALLDYIIENHVASPLLSNHAASQRVIYGLTLDTSEKHLALLYLATIQGIAYGTRHIVEHCNAHGHKIDTLLACGGLAKNSLYIQEHADITGCPIILPRESESVLLGAAVLGAVAGKKFPGVRDAMKALNAAGKVVNPSSDPKVKKYHDAKYQIFRSLYEQQLSHRATMAQALQ

SEQ ID NO: 7140 - protein, 167 aa, Zea mays
  VARIANT 24: note = Ancestral polymorphism is A, Derived polymorphism is V
MASIPATTFAVILSVLFCAAAGTAVDNDLPDYVIQGRVYCDTCRAGFVTNVTEYIAGAKVRLECKHFGTGKLERSIDGVTDGNGTYTIELKDSHEEDICEVVLVESPRKDCDQVQADRDRAGVLLTRNVGISDNLRPANPLGYLKDVPLPICASLLKQLDSDDDDDQ

SEQ ID NO: 7141 - protein, 428 aa, Zea mays
  VARIANT 263: note = Ancestral polymorphism is S, Derived polymorphism is L
MRSPYLTMDSAVRPLWTVSKRRLRRSLPYTAAHAATQDCFQSNYETVGSAGDVLEDNPVGRLKVFIYDLPRKYNKKMVTKDSRCLSHMFAAEIFMHRFLLSSAVRTLNPKEADWFYTPVYTTCDLTNAGLPLPFKSPRVMRSAIQYISNKWPFWNRTDGADHFFVVPHDFAACFHYQEEKAIERGILPLLRRATLVQTFGQENHVCLKEGSIIIPPYAPPQKMQAHLISPDTPRSIFVYFRGLFYDTGNDPEGGYYARGARASLWENFKSNPLFDISTDHPATYYEDMQRAVFCLCPLGWAPWSPRLVEAVVFGCIPVIIADDIVLPFADAIPWEEIGVFVEEKDVPKLDTILTSMPIDDILRKQRLLANPSMKQAMLFPQPAQPRDAFHQILNGLARKLPHPEGTFLQPGDQRLNWTAGPVGDLKPW

SEQ ID NO: 7142 - protein, 312 aa, Zea mays
  VARIANT 201: note = Ancestral polymorphism is A, Derived polymorphism is T
MADVDVDANNEAEQRTRSEPGTSMSPSSEADDDTASSTPNESPARAFAGHTLEEPPRRRAPSRRSRPVRMLQSVCRSLPLLNPRCGRPMMQAGACRIAAPSSRPAAAAAAPSSDSSSSLLTQLIASSSFGGAASSRRRLTGTLFGYRDGRVSLSLQQNARCQPTLVVELALPTHALLRELGAHAGARIVLEVEKRAEQGTADGNEAIATTDHDGWVLEELMWTMFCNGKRVGYAVRRDPTEEDIAVLETLWAVSMGGGVLPGRSDMDGPDGEMAYMRGSFEHTVGSRDSESLYMVGPPGGDCPELAIFFVRL

SEQ ID NO: 7143 - protein, 248 aa, Zea mays
  VARIANT 175..248: note = Derived polymorphism lacks residues 175 to 248
  VARIANT 165: note = Ancestral polymorphism is M, Derived polymorphism is T
MSSAPRPTNSRRSRPPACTAPPARRSCGRERETIRNRKRLRTTIPVATSPPRRSKDAAIAYDEAALRFKGTKAKLNFPERVQGRTDLGFVVTRGIPDHHRHPRAAAVNLAAMPQAQAQPHLQHGRPTVMPYPYPYPDLMQYAQLLQGGRGGGDHAAAVQQQLMMMGGRGGNLPFSFSPPSSWSAPPQILDFSARQLITQPGPPSSPAAPGGAAPSTPSSTTTASSPSASASGSAWPYGGEHHRNKKDA

SEQ ID NO: 7144 - protein, 358 aa, Zea mays
  VARIANT 317..358: note = Derived polymorphism lacks residues 317 to 358
  VARIANT 309: note = Ancestral polymorphism is A, Derived polymorphism is G
  VARIANT 308..358: note = Derived polymorphism lacks residues 308 to 358
  VARIANT 280: note = Ancestral polymorphism is P, Derived polymorphism is L
  VARIANT 275: note = Ancestral polymorphism is G, Derived polymorphism is W
  VARIANT 254: note = Ancestral polymorphism is M, Derived polymorphism is K
  VARIANT 33: note = Ancestral polymorphism is R, Derived polymorphism is W
  VARIANT 32: note = Ancestral polymorphism is A, Derived polymorphism is T
  VARIANT 18..358: note = Derived polymorphism lacks residues 18 to 358
MGVRNNVSWCSMVVAYAQNGAEEEAFLVYLGARRAGEEPTDFMVSSVLTTCAGLLGLDLGRALHAVAVRSCIDSNIFVASALVDMYGKCGGIKDAEQVFFEMPQRNLVTWNAMIGGYAHIGDAHNALSVFDKMIMGQETTPNYITLVNVLTACSRGGLTKEGYELFQTMKLRFGIEPRIEHYACVVDLLCRAGMEERAYEIIQGMPMRPSISVWGALLGGCKMHGKTELGRIAAEKLFELDPQDSGNHVLLSNMLASAGRWAETTDVRKEMKNVGIKKDPGRSWITWKNVVHVFQAKDTTHDMNREIQALLAKLKGQMQAAGYMPDTQYALYSCCGNLMVCQCFMLWKTLHKIAAVNR

SEQ ID NO: 7145 - protein, 142 aa, Zea mays
  VARIANT 71: note = Ancestral polymorphism is Y, Derived polymorphism is H
MDERGEKEEEHGVVEEETAAVVLKEVEVEMEMVGGSEEASAAPLLLAHPCSLLQLLLRACAGCLVRLLHGHCSDGANDDPKAAADDDDAAPEAAAAAAAAAGDGGDKAATYLYMQEVWAVRRRPTTPGRPREGSGGNGGNHH

SEQ ID NO: 7146 - protein, 146 aa, Zea mays
  VARIANT 19: note = Ancestral polymorphism is D, Derived polymorphism is Y
MDQRVSQESSSDRRRKRKDVAAAVPEGVHGESTDNGGYDDTDETAGVLTKEQQAVDVVEEQASAPLQLLLRACAGCLVGLLRGYRSDPKPAAAAAAASVAAESPQEGDKPFGSEEVGTQVLAATRTPPWPPCPPEEGSGGNGGSHN

SEQ ID NO: 7147 - protein, 438 aa, Zea mays
  VARIANT 10: note = Ancestral polymorphism is E, Derived polymorphism is D
MAAEGSGVQETFEARVKRLFGSRLFDAVPDSSFPTASWSVAAGDVERHRWSKPSEARDAEEEAAGEAGRGDTPCVSAFYDANGCLRGRRRRSRQEEFEGNLDDLDEDEEEDSERERNAAEQDEEEGVRVNIGLDPTLDREEEEDKYDREAFGREEAADRVYMHDIMDAGINMSINSIVPDLLDDSIEEVYRFRKDPRADMRAASARLREDGSTKDCDSHCPTQAKDFPSVVHTKKAVEEDNVKPILKRKESQADLKPRKRVRFDANVKDSELDTFEHDEDSPTVPQSMDVITEVESTSTLSASPGVPDYVRNPSKYTRYNLDVPESNDGSNRTALADMHDLLARSYPNMIHSETPVEIPSSVTFIPRKKSVDTMAVDEGPRAIDSNSSAIGMVAGASDEPDQCEMDEDDSKSPSMPQMHTNSKASSRRYRSSRTDDDE

SEQ ID NO: 7148 - protein, 575 aa, Zea mays
  VARIANT 29: note = Ancestral polymorphism is S, Derived polymorphism is F
MNSAFSEDILAGKLAKLNNTQQCIESILSLLFSVHNFGFWSVCGAFKEFWKNLQPARVVSRFLCCLDFCSLWPLALSHWCIYHRKNAEQIVQTWDKQFHSFGKEQKIPFLYLANDILQNSKRNGTEFVEEFWKVLPGALKDVSENGDDRGKKVASRLVDIWQERRVFGSRAGGIKDVMLGAAPLPVLDMTKKRSRSSAIRIVKRDSRSVKLRLGIGGTAERIISALHTVLSEQADEDDDLEKCKTSMRHVGKMEKDVDSACSKAEDPRREVLCTELKDEEANMKKCIEKLKAVEKNRAAIVFELKEALQEQESELEKVRTQLQLAEAMVHEASNMQRRLKNEPTIPLPRSASLVEPGKVVSNGQVKEQHKTAAAILADKIAASSNSQQILQSALSKFAAEEAKNSSETRSDKRQKAEQLSQVPSVANAAAFVPMPQVVATTAQQQPQAILVQQAPMQSQATASQPQYNIYQAPPQQFVPQPGGVMMGMPYNMSSMTPPPPPPPQMMSLGRPSPSAPQPQMAVMPQTQPPAPPMLQQQMPMNLGPQMQFTLQPPGVPPFRPMQPPPGMQYFHPQSQ

SEQ ID NO: 7149 - protein, 166 aa, Zea mays
  VARIANT 85: note = Ancestral polymorphism is A, Derived polymorphism is S
MPPKLDPSQVVEVFVRVTGGEVGAASSLAPKIGPLGLSPKKIGEDIAKETAKDWKGLRVTVKLTVQNRQAKVSVVPSAAALVIKALKEPERDRKKVKNIKHSGNIGLDDVVEIARTMRNRSMAKELAGTVKEILGTCVSVGCTVDGKDPKDLQQEIDDGEVEIPSA

SEQ ID NO: 7150 - protein, 337 aa, Zea mays
  VARIANT 279: note = Ancestral polymorphism is S, Derived polymorphism is L
  VARIANT 273: note = Ancestral polymorphism is L, Derived polymorphism is F
  VARIANT 242..337: note = Derived polymorphism lacks residues 242 to 337
MVPARNLQPLARDAHATPCAAAAGLGVTPTAPMAQEPIDKHHSEPTKPPPPPQERQADQDTRRHAHAYGEQQQRTLRPLQPAGVHHQEAAGSSGSSSNGGAGDWLRLGLSPASPSAGGTQPGLVFADRAAGPPLLLSSQPQTRTASEALRPGMGVAPGPFLHQAAPGIPQASITLPVPRAGPPWLPPWSPSAVAPPLVPFGNRAFYTPGAASGLDAIRVVLPPSAVAGVWFALQAAPHQGREPFLPQIPRSYLRIKDARVTVRLLSKYLAGRLGLEDESEVEITCRGRQLPAFLTLQHVRDGIWCQGDAAAASPSVVPDMSAANHHHLMVLQYGRRS

SEQ ID NO: 7151 - protein, 239 aa, Zea mays
  VARIANT 223: note = Ancestral polymorphism is V, Derived polymorphism is M
  VARIANT 215: note = Ancestral polymorphism is I, Derived polymorphism is S
  VARIANT 172: note = Ancestral polymorphism is A, Derived polymorphism is V
  VARIANT 171: note = Ancestral polymorphism is I, Derived polymorphism is T
  VARIANT 161: note = Ancestral polymorphism is L, Derived polymorphism is F
  VARIANT 111: note = Ancestral polymorphism is P, Derived polymorphism is L
  VARIANT 104: note = Ancestral polymorphism is N, Derived polymorphism is D
  VARIANT 9: note = Ancestral polymorphism is R, Derived polymorphism is C
MAVPRPRICALRRGTLLLFLLVPLIYSGLRALNKIGLSSEENYSGEHVPFVTVFTTYNSVSAGDGNVPPDSVTVGNSSYSKIERSMTILNTFISFIKVSMPRSDVIILTDPGSKFSVNQGSATLLPIEGNYSRGNLMLQRIKTYIAFLEQKLVEFDRTERLNHFVLTDSDIAVVDDLGHIFEKNPHFHLAVTFRNNKGQPLNSGFVAVRASKLQIKLCFFRAVEFLKQVLETYSLRYTR

SEQ ID NO: 7152 - protein, 600 aa, Zea mays
  VARIANT 381: note = Ancestral polymorphism is L, Derived polymorphism is F
MALRSPDLRWLGSLTRPGRLAPSPLAALASPRRRRRAPSPSPSPSDSSTPSTAPTSDSGPGAEGMEGLEWKKISAKRFGIKESMIPPEAWNVLHRLRSRVRLLGNFIFKFFNRTQVHTEQSLAILRFQCILMLPFDGSDKSFISDNPEYFTKVKDTFLGSAVIVGRRFPICHVHENNSIVEVSSFNTCARGSSGSQIYNSKSQNCSKNDFVRWKNCQRRDFTINGLMFNPYSEKIYDYLGGIEDIKKAKVRTVIPAGTSFQEDCARILRAIRIAARLGFSFPKETAYYVRTLACSVARLDKARILMEMNYMLAYGSAEASLRLLWRFGLLEHLLPFQAAYFSSTRFKRKDKGTNMLLVLFSKLDNFLAPNRPCHNSLWISLLAFHEALARKPCDPLIVATFALAFYLGGDMSLAVDIGKSINRQHDTGFRELLEPKVWTDKHLAGEVQSFAALMKQALTEMTDEYHVANAMAKIPQAPSSDLVCLLGIKGFVVVFYSKNGTDTKLVHTVENNLDTYDNALGFHFISKVFIPLQAYLKVLKFIECVQYGKKERGHEPKRDGMINYHNLSNGTHAEIRNLFTLVVFDTLYPTDTEDENDCSS

SEQ ID NO: 7153 - protein, 439 aa, Zea mays
  VARIANT 272: note = Ancestral polymorphism is A, Derived polymorphism is V
  VARIANT 356: note = Ancestral polymorphism is A, Derived polymorphism is T
  VARIANT 367: note = Ancestral polymorphism is Y, Derived polymorphism is C
MMELYSGYLEDHFNLHKLSSASPPQYMTPAASPAQFAPAPLRMGYGRPAPVMGMWSSEPFKVDSGGHATCSASTVMEADTKLETSRVSALVHPSVLCLPIDSKVKNNVHDAMHAGDLRAATRCSTGSTRAREEYGSGNEQAAREGHEKARAEQGGCSEESPAEKGGHKAYIQQLETSRMKLAQLELELQRARRQQGAYANGSMGDPALGYTGSIDPGVAAFEIEYRHWVDEQKRHTAELMSALQGQQTSELELRLLVETGLSNYEHLFRIKALAANADVFHVMSGVWKTPAERFFLWIGGFRPSEVLKILSPQLEPLAEAQRMLVGGLQHTSTQAEDALSQGMEKLQQNLAEILTAEADPFGAPDAYMLQMATAVEKLKELVNFVTQADHLRLMTLQQMHKILTTRQAARGLLALGDYFQRLRTLSSLWAARPREAAIS

SEQ ID NO: 7154 - protein, 217 aa, Zea mays
  VARIANT 180: note = Ancestral polymorphism is N, Derived polymorphism is K
  VARIANT 178: note = Ancestral polymorphism is V, Derived polymorphism is M
  VARIANT 168: note = Ancestral polymorphism is S, Derived polymorphism is I
  VARIANT 143: note = Ancestral polymorphism is R, Derived polymorphism is T
  VARIANT 140: note = Ancestral polymorphism is G, Derived polymorphism is R
MAIAESCVDAVVMEMVAVYCGGLYTAKPELAARRIEAIGFQVGHQLSERYTMERPRFSDHLEAIKFICKDFWSELFKKQIDNLKTNHRGTFVLQDNRFRWLTRVSLDPRTENTDSTENDSAALGDTAAQTTTMLLYFPCGLIRGALTNLGISCSVSADMSNLPACKFSYAFSMTFWHMVNFHLLMICFISYINHWSQTSTQVWCLFPIDCHDVGSSI

SEQ ID NO: 7155 - protein, 575 aa, Zea mays
  VARIANT 45: note = Ancestral polymorphism is V, Derived polymorphism is I
MTYFPEEVVEHIFSFLPSHSDRNTVSLVCKVWYEVERLSRRAVFVGNCYAVRPERVVLRFPNIKALTVKGKPHFADFNLVPPDWGGYAGPWIDAAARSCVGLEELRMKRMVVFDENLELLARSFLRFKVLVLISCEGFSTDGLAAIASHCKLLRELDLQENDVEDRGPRWLSFPDSCTSLVSLNFACIKGEVNSGALERLVARSPNLRSLRLNRSVSVDTLSKILLRAPNLEDLGTGNLTDEFQAESYSRLTSALEKCKKLRSLSGFWDASPICVPYIYPLCHQLTGLNLSYTPTLDYSDLAKMVSRCVKLQRLWVLDCISDKGLQVVASSCKDLQELRVFPSEFYVPGASAVTEEGLVAISSGCPKLTSLLYFCHQMTNEALITVANNCPNFIRFRLCILEPKKPDAMTGQPLDEGFGAIVRECKGLRRLSISGLLTDKVFMYIGKHAKYLEMLSIAFAGDSDKGMMDVMNGCKNLRKLEIRDSPFGDVALLGNVAKYETMRSLWMSSCNVTLKGCQVLASKMPMLNVEIMNELDGSSEMENHGDLSKVDKLYVYRTTAGARDDAPNFVKILQS

SEQ ID NO: 7156 - protein, 93 aa, Zea mays
  VARIANT 34: note = Ancestral polymorphism is C, Derived polymorphism is Y
  VARIANT 22: note = Ancestral polymorphism is S, Derived polymorphism is N
  VARIANT 20: note = Ancestral polymorphism is C, Derived polymorphism is Y
  VARIANT 1: note = Ancestral polymorphism is M, Derived polymorphism is T
MPTASPSSEDVLLVCAAAAYWSDAASKEDGVQCCCLEHACMQQCGGDIIIIIISCCGSRDDGSCVDGAIHVKPRSSLPSSCLSSSLVFNSSYL

SEQ ID NO: 7157 - protein, 239 aa, Zea mays
  VARIANT 9: note = Ancestral polymorphism is R, Derived polymorphism is L
  VARIANT 14: note = Ancestral polymorphism is A, Derived polymorphism is T
  VARIANT 20: note = Ancestral polymorphism is A, Derived polymorphism is S
  VARIANT 21: note = Ancestral polymorphism is R, Derived polymorphism is G
  VARIANT 167: note = Ancestral polymorphism is A, Derived polymorphism is V
  VARIANT 204: note = Ancestral polymorphism is A, Derived polymorphism is P
  VARIANT 219: note = Ancestral polymorphism is G, Derived polymorphism is R
MAAVAGTERVDDAAERRRRARALLDATTPGRSLAVGRCKLALETFRSDRDGGLEEARTLLGDALVCSNVHHPAIYRAWIGMELEAGTDASGVRELFEGWHIWYLRSAFKNGDDEENRRPSQDEGGFWCHYIDFELRHGTAARVRCVAERAVATCPRDPAVHAKYAKAELRLGCPDRANAVLLSALDAFAADAGTREWLEKEVTAYRDSIGHGSWRRLRGLLSLCRRSRPAPGYELLGVV

SEQ ID NO: 7158 - protein, 71 aa, Zea mays
  VARIANT 10: note = Ancestral polymorphism is A, Derived polymorphism is V
  VARIANT 29..71: note = Derived polymorphism lacks residues 29 to 71
  VARIANT 56: note = Ancestral polymorphism is S, Derived polymorphism is I
MLPCVAALEAVLLPCLPARSLQSVDRSLQSSHQIDVERHARDFMEAAKKLQSYFISLQREDQPTAEEMLRK

SEQ ID NO: 7159 - protein, 300 aa, Zea mays
  VARIANT 2: note = Ancestral polymorphism is D, Derived polymorphism is H
MDDKNKVKKEIDGPLGPPPRKGGLKFAPKVPQKKPAKVVPKKEPVEERKEDALDKELLMKLKMSQNKYPSRIKSDEKPRSGTQVAFGQGNSYYARNFPMPKKDSSAGGASKLPKEYAEPWDYSHDYPVTLPLRKPYSGNPEILDEEEFGESSASRTQDDELSAAEQLGLMDMSSESQFLFFQLPSSLPLPRQPQSGADPNEVRDEKREDMRPSSHNGSKLKEVPEGYMGKMLVYKSGKVKMKIGDTLFDVSFGSNCMFSQEVAAINIREKHCCTVGEISKRAIITPDINYMLGSVDKMEE

SEQ ID NO: 7160 - protein, 620 aa, Zea mays
  VARIANT 370..620: note = Derived polymorphism lacks residues 370 to 620
  VARIANT 338..620: note = Derived polymorphism lacks residues 338 to 620
MAAPATRVIGSKPADCFQFQDPNTWTCVSELASDVVVEVGDTSFHLHKIPLTSRSGTLQKLVNESTGDGSKPCTVRLDDVPGGAEAFLLAARFCYDVQTELNAGNAVPLRCAAERLAMTEDYGEGNLVEQAESFLSEVLAGWSDTVRALGTCDDAVLPAAEDLLIVQRCIDSLADKACADPTLSGWPMLEYFTAKSLEETAIWTGIGAAGRPRSPGAGWWYDQASSLPLPLYKRLIAAVRSRGMSPENVAGSLMHYARRHLSGLRRLGDNSDGSSRGGAAAVLSGGDQRTLLEEIVAMLPVEKGVAPTRFLLGLLRVATVLHAAAACRDALERRAGDQLEEAALEDLLIPNTGYSAETLYDVDSVQRMLEQFMMTTPPAFAVLPETTDEGQLVDAPPGELMPVSSVGKLVDGYLAEVGTDANLKPSKFQTIAALVPDYARAIDDGLYRAIDIYLKAHPWLTDSEREQLCRLMNCQKLSLEACTHAAQNERLPLRVVVQVLFFEQLRLRTTVSGWFFVSDNADQGSSSDNCVLPRRPDDDLDLAARSEVTTDEDGSAAAQHEPSPAMSVAEIHRPGKPKSTLSRLLGKLGLGGRSSSRQRQQQPPLPGASDKRRRSFDFGC

SEQ ID NO: 7161 - protein, 451 aa, Zea mays
  VARIANT 362: note = Ancestral polymorphism is A, Derived polymorphism is V
  VARIANT 370..451: note = Derived polymorphism lacks residues 370 to 451
MTATASCFSSPVAWARPRAGPAGASAALRVGRCPAAAVAAHDVAFHPDVSRAADSLQAEFRAVDRAIALNSSRVAAAFRRARVAPHHFGGSTGYGHDDGGGREALDSVFADIVGAEAAIVRPQFFSGTHAIACALFALLRPGHELLAVAGPPYDTLEEVIGIRGSANVGSLKDFGVTYREVPLVADGGLDWDALACSIRPETGCAFIQRSCGYSWRKSLSVADIHKAIGLIKMQNPNCMVMVDNCYGEFVEISEPAMVGADLIAGSLIKNPGGTIAPCGGYVAGKEHLVEAAAARLSAPGLGVEFGSTPGHVMRALFQGLFLGPQMVGEAVKGGLLIAEVMSAKGYKVEPLPRVPRHDIVQAVELGSRERLIAFCEVVQQTCPVGSFIKPTAGETPGYASEVIFADGTFIDGSTSELSCDGPLRDPYAVFCQGGTHWTQWALVLGNVLKVI

SEQ ID NO: 7162 - protein, 138 aa, Zea mays
  VARIANT 128..138: note = Derived polymorphism lacks residues 128 to 138
  VARIANT 120..138: note = Derived polymorphism lacks residues 120 to 138
  VARIANT 87..138: note = Derived polymorphism lacks residues 87 to 138
  VARIANT 76: note = Ancestral polymorphism is E, Derived polymorphism is G
  VARIANT 74..138: note = Derived polymorphism lacks residues 74 to 138
  VARIANT 48: note = Ancestral polymorphism is P, Derived polymorphism is L
  VARIANT 41..138: note = Derived polymorphism lacks residues 41 to 138
  VARIANT 32: note = Ancestral polymorphism is I, Derived polymorphism is T
  VARIANT 11: note = Ancestral polymorphism is L, Derived polymorphism is V
  VARIANT 9: note = Ancestral polymorphism is P, Derived polymorphism is L
  VARIANT 1: note = Ancestral polymorphism is M, Derived polymorphism is T
MEQLAKIEPVLEDLRRRRDERVNEFKAIQSKIVRLQAEISGAIVHGDPAAPVVDENDLSLKRLGELKEHLNDLQTEKNGGLQKIDIQTNSIHEMCNIMSIDLKMALKDVHPSYAELGGSKPMSISNNSLDRLSKKYMC

SEQ ID NO: 7163 - protein, 231 aa, Zea mays
  VARIANT 9: note = Ancestral polymorphism is M, Derived polymorphism is I
MASSSDPWMKEYNEASRLADDISSMIADRGSLPQSGPEIMRHTSAIRRKITILGTRLDSLESLFGRIPPKSITDKEMHKRQDMLSSLKSKAKQMATSFNMSNFANREDLLGQSKMPDDMSRVAGLDNQGIVGLQRQIMKEQDEGLEKLEETVLSTKHIALAVNEELTLHTRLIDDLEDHVDVTNSRLQRVQKRLAILNKRTKGGCSCTCLLLSVVAIVILAVIVWLLVKYL

SEQ ID NO: 7164 - protein, 555 aa, Zea mays
  VARIANT 110: note = Ancestral polymorphism is Y, Derived polymorphism is H
  VARIANT 109: note = Ancestral polymorphism is T, Derived polymorphism is M
  VARIANT 108: note = Ancestral polymorphism is K, Derived polymorphism is R
  VARIANT 25: note = Ancestral polymorphism is V, Derived polymorphism is M
  VARIANT 24..555: note = Derived polymorphism lacks residues 24 to 555
  VARIANT 20..555: note = Derived polymorphism lacks residues 20 to 555
  VARIANT 19..555: note = Derived polymorphism lacks residues 19 to 555
  VARIANT 9..555: note = Derived polymorphism lacks residues 9 to 555
MRRRPFLDQRRPSFKRRWQQRPWWVRLLLSLLLALACVLLLAVLLGSPDPDTSPSTSAASSGSEATSSPLLSQRTYLEGITDALNMTDEMLSAGSFSRQLMDQIYLAKMYVVVAKEANNLQFVVELSAQVRRAQSILAHAAAHGGTVMEQEAEKAIRDMSVLLFQAQQLRYDISITIMKLKGQIQSLEDKSKAEAEKSTKYGQIAAEELPKGLYCLGVRLTMEWFKNPDLQRKFSDRSPAAQSNLRDNGLYHFCVFSDNILAVSVVVNSTAINSRHPDKVVFHLVTDDLNYAPMKAWFAMNNYRGVTVEIQKVEDFTWLNASYVPVLKQLQNAATQKFYFSGSGNRGTPIKFRNPKYLSMLNHLRFYIPEIYPELQKVVFLDDDIVVQKDLSELFTINLNGNVMGAVETCMETFHRFHKYLNHSHPLIRAHFDPDACGWAFGMNVLDLVEWRNKNVTGIYHYWQERNADHTLWKLGSLPPGLLAFYGLVEALDPKWHVLGLGYTTVDLATIKEGAVLHYNGNMKPWLKIGMEKYKSFWDNYVDYSHPLIQQCFMR

SEQ ID NO: 7165 - protein, 420 aa, Zea mays
  VARIANT 290: note = Ancestral polymorphism is E, Derived polymorphism is G
MAQLKAARATDVPPAMPDPDPDVVAADLGACVRHGRVDGLAAGSGRAEATATATTTAAAADQGRRRPPLVVVGHRGKGMNALASPDPRLRGDIRENTLRAFNAAAASHPAVAYVEFDVQVTRDGCPVIFHDNFIYTQQDGQVSAKRVTELNLDEFLSYGPQRDQGKAGKPLLRKLKDGRILKWDVQSEDALCTLREVFEGVHRRVGFNVELKFDDDLFYTEERLTCILKSVLKACGVVFEHANDRPIIFSSFQPDAAQLIRKLQDKYPVLFLTNGGTQVYADPRRNSLEEAVKLCVAGGLQGIVSEVRAILRQPSAVAKIKEANKLSLMTYGQLNNVAEVVYVQHLMGVDGVIVDLVQEIAEAVSAFTVVTAVQASGSQDGGGIVVGERMETAAVAVAGTPSFSPREVSFLLRLIPELVQ

SEQ ID NO: 7166 - protein, 486 aa, Zea mays
  VARIANT 181: note = Ancestral polymorphism is L, Derived polymorphism is P
  VARIANT 166: note = Ancestral polymorphism is L, Derived polymorphism is R
MGCFPCFGSTREEELKYYGSKGPGGGNGGGGRATASSSSSAAAGGGGGRVEEAVVAPPRAQRGPAGADKTRAKGNAGSKKELSVLRDASGNVISAQTFTFRQLAAATKNFRDECFIGEGGFGRVYKGRLDMGQVVAIKQLNRDGNQGNKEFLVEVLMLSLLHHQNLVNLVGYCADGDQRLLVYEYMPLGSLEDHLHDLPPDKEPLDWNTRMKIAAGAAKGLEYLHDKAQPPVIYRDFKSSNILLGEGFHPKLSDFGLAKLGPVGDKSHVSTRVMGTYGYCAPEYAMTGQLTVKSDVYSFGVVLLELITGRKAIDSTRPASEQNLVSWARPLFNDRRKLPKMADPGLEGQFPTRGLYQALAVASMCIQSEAASRPLIADVVTALSYLANQIYDPSLAHASKKAGGSDQRNRVGDSGRALSKNDDAGSSGHRSPSKDRADSPREQFPGAANRGQDRERMVAEAKMWGENWREKRRAAQGSLDSPTGGG

SEQ ID NO: 7167 - protein, 890 aa, Zea mays
  VARIANT 64..890: note = Derived polymorphism lacks residues 64 to 890
  VARIANT 153..890: note = Derived polymorphism lacks residues 153 to 890
  VARIANT 653..890: note = Derived polymorphism lacks residues 653 to 890
MAASPSLHAVAHRGPSLTALLFLVAAMVLVPPAVAEIRETAIRADPRSIIPLDEFGFSHSGVLELNVSGIAFDPQASAELDLSQLGFFLSTLDAWVHVLRQLQDLDVTCALQSELVKLAFSFDRLRPPSNPTDVEVARSSSFSTAFRVSEPGQYTLVFANCLGGGRDVRVTRARWTLKAKFYRRARFARGPTPRSREFPSESTRQELNQPYNSFSPIPPPSVPFGNSMASPDDESAQPPSKRPRRDAEPEVDAAEPSPRVVLNPADCDLDFDVGGGGLRGSALHEGGFAYCWSGARATVGARGGGRYCFGCRIVAEQPVEMDPTTSGERHLCRIGVSRGDDPVGALGESQHSFGFGGTGKFSHQRRFVNYGVKFGVGDTVVCAVDLDSKPMASIGFARNGEWLGIARHFDAGEKGLGLVDAPLRPMRWGSALFPHVLLKNVIVEMQFSREDGLLPVDGYEPWASAFSQRNSVFGPSFEQNKCEVMMMVGLPASGKSTWAEKWVKEHQEKRYILLGTNLVLEQMKVPGLLRKNNYGERFERLMDYATWIFNKLLTRAANTPRNFIIDQTNVYKNARIRKLRPFANYRKTAVVMFPTPSELKSRAAKRFNEMGKEIPAEAVNEMTANFVLPLSKDMPHSKEPFDEVIFTELSRDEAQRTLDDMQRVLPRNVTPSYGNSGNQKHYSSTYAGTAAPLDPSARSSMPGFYPPTANSYGVGDLRSSAATFSTGVHTEGNTTHGQTPCSVRSFRSPTGNQHGIHSSYPSAPNQYQMPSSYLSNSNQYEVRASYRSTPLPGYGQSTYASRRNPSPYNSEMHQGIQAPMSSRNLYRAPGSAEAYVAPCYAAGNLIGRPHQVLSPSTFPAHGPQPAAQWVPNQGSSRSWSSDSYRPYYGQ

SEQ ID NO: 7168 - protein, 748 aa, Zea mays
  VARIANT 315: note = Ancestral polymorphism is S, Derived polymorphism is Y
MSEPAQPSGGEGDVNTLRILVATDCHLGYMEKDEIRRFDSFQAFEEICALADKNKVDFILLGGDLFHENKPSRSTLVKTIEILRRYCLNDQPVKFQVVSDQTVNFPNRFGKVNYEDPNFNVGLPVFTIHGNHDDPAGVDNLSAIDILSACNLVNYFGKMDLGGSGVGQIAVYPVLVKKGMTSVALYGLGNIRDERLNRMFQTPHSVQWMRPGTQDGESASDWFNILVLHQNRIKTNPKSAINEHFLPRFLDFIVWGHEHECLIDPQEVPGMGFHITQPGSSVATSLIDGEAKPKHVLLLEIKGNQYRPTKIPLRSVVLKDEADVNSNDQDSVLEHLDKIVRNLIEKSSQPTASRSEPKLPLVRIKVDYSGFSTINPQRFGQKYVGKVANPQDILIFSKSAKKRQTTGDHIDDSEKLRPEELNQQTIEALVAESNLVPFELHILCPFAPCTFTAHYLDMRMMFCEDHFIFLGFALLYFFCRSKMEILPVDDLDIALHDFVNKDDKMAFYSCLQRNLEETRNKLSSEADKSKFEEEDIIVKVGECMQERVKERSLHSKDGTRLTTGSHNLVFNYLSLNIFSFSQSNQNSFSDDEDTREMLLGARSTDVGRKSSGFTRPSKDTADVAKRGTSKRGRGRGTSSMKQTTLSFSQSRSATVIRSEDVASSEEEADANEVVENSEEESAQQVGRKRAAPRGRGRGRGGGSTAKRGRKTDIASMQNMMSKDDDDSEDEPPKKTPRVTRNYGAVRRR

SEQ ID NO: 7169 - protein, 197 aa, Zea mays
  VARIANT 25: note = Ancestral polymorphism is E, Derived polymorphism is Q
  VARIANT 45: note = Ancestral polymorphism is V, Derived polymorphism is I
  VARIANT 67: note = Ancestral polymorphism is E, Derived polymorphism is V
  VARIANT 77: note = Ancestral polymorphism is A, Derived polymorphism is V
  VARIANT 80: note = Ancestral polymorphism is R, Derived polymorphism is C
  VARIANT 90..197: note = Derived polymorphism lacks residues 90 to 197
  VARIANT 94: note = Ancestral polymorphism is A, Derived polymorphism is T
  VARIANT 95: note = Ancestral polymorphism is A, Derived polymorphism is T
  VARIANT 98: note = Ancestral polymorphism is A, Derived polymorphism is T
  VARIANT 109: note = Ancestral polymorphism is S, Derived polymorphism is C
  VARIANT 111: note = Ancestral polymorphism is H, Derived polymorphism is Y
  VARIANT 114..197: note = Derived polymorphism lacks residues 114 to 197
  VARIANT 132: note = Ancestral polymorphism is H, Derived polymorphism is Y
  VARIANT 153: note = Ancestral polymorphism is R, Derived polymorphism is Q
  VARIANT 154..197: note = Derived polymorphism lacks residues 154 to 197
  VARIANT 158..197: note = Derived polymorphism lacks residues 158 to 197
  VARIANT 159..197: note = Derived polymorphism lacks residues 159 to 197
MVCIRQATIDDLLAMQACNLMCLPENYQMKYYLYHMLSWPQLLFVAEDYGGRIVGYVLAKMEEDPSEPCHGHITSLAVLRSHRKLGLATKLMSAAQAAMDQVFGAEYVSLHVRRSNRAAFNLYTSTLGYQIHDIEAKYYADGEDAFDMRKPLRQPQPKKHHHHHHHGPGGCCSHDAPTATTGSSPQSFSSPDKKANT

SEQ ID NO: 7170 - protein, 640 aa, Zea mays
  VARIANT 317: note = Ancestral polymorphism is V, Derived polymorphism is A
MRRYCHVPRGRRPAAAPNDHQTLPPPEWIEPYPDLADPSPYASASAATPAPSPWLPRVISLVLRSPPAALAADLRAFCRTFLLRLSPAFVAAALRSPQLAPHPLPSLHFFRSLPNATDLRAHPQHLLSCYVSLLHSFARSRETDAAGQARQLVAELRAHGDAVLSHLTPASSASLIRSLAAFGLSEELLWAWQAMRLAGVEPSRLTYNCLLDGLVNADLLDTAINVFDAMSTEHRVRPDVVSYNILIKGYCRAGRTQDAMARLADMREHAELAPDKVTYLTLMQRHYSEATFPQCIALFQEMEERGMGKEIPQHAYVLVIGALSKDGKPFEALAVFERMSKRGCPANAAMYTALIDSMGKFGREKEAMALFERMKATGIELDAVTYGVVVNCLCRFGNLEEALACFRSCVEKGVAVNAIFYTSLIDGFGKTGMVDQAKELFEEMVAKGFVPDSYCYNVLIDALVKAGRTDDACAFYKRMEDDGCDQTVYTYTILIDGLFKEHKNEEALKFWDSMIDKGITPTAAAFRALSNGLCLSGKFSRAWRILDELAPMGVIPETAHEDMINVLCKTGRFKQACKLADGIVQKGREIPGRVRTMMINALRKAGNTDLAFKLVHSKIGIGYERSGSVKRRVKFQTLFE

SEQ ID NO: 7171 - protein, 88 aa, Zea mays
  VARIANT 5: note = Ancestral polymorphism is A, Derived polymorphism is V
  VARIANT 6: note = Ancestral polymorphism is K, Derived polymorphism is R
  VARIANT 10: note = Ancestral polymorphism is M, Derived polymorphism is V
  VARIANT 25: note = Ancestral polymorphism is A, Derived polymorphism is G
MAGAAKASWMVAMSVGAVEALKDQGGLCRWNYALRSVHRTAKANVRSSLAAQRDKELAPAAESKRRPGKAAAEEGMRTVMYLSCWGPN

SEQ ID NO: 7172 - protein, 80 aa, Zea mays
  VARIANT 6..80: note = Derived polymorphism lacks residues 6 to 80
  VARIANT 36: note = Ancestral polymorphism is S, Derived polymorphism is A
MAAAAKASWMVAMSVGAVEALKDQAGLCRWNYALRSVHRAAKANAPSFAQARKLAPPAADKAAAEEGMRTVMYLSCWGPN

SEQ ID NO: 7173 - protein, 106 aa, Zea mays
  VARIANT 26: note = Ancestral polymorphism is K, Derived polymorphism is N
MASGSGKAKASSWAAAMSVGTVEALKDQAGLCRWNYAFRQAAQQRARRPAAGASGSVGPGSGSGSAHAPPASAPSGCAAAARRRARQQQEEELRTVMYLSNWGPNN

SEQ ID NO: 7174 - protein, 137 aa, Zea mays
  VARIANT 50: note = Ancestral polymorphism is M, Derived polymorphism is L
MQYGAAAAEQAWSYMPVVAPSSAVETAAERVERLASESAVVVFSVSTCCMCHAVKRLFCGMGVHPTVHELDHDPRGRELERALACLLGASGASAAGAPVVPVVFIGGRLVGAMDRVMAAHINGTLVPLLKDAGALWL

SEQ ID NO: 7175 - protein, 398 aa, Zea mays
  VARIANT 298..398: note = Derived polymorphism lacks residues 298 to 398
  VARIANT 206: note = Ancestral polymorphism is G, Derived polymorphism is W
  VARIANT 40: note = Ancestral polymorphism is F, Derived polymorphism is C
MQQQKPQGFLVAGGIPPAQGSGRIVTAVAARTRAAEQMAFEDVWKALNPDFRTPFASVEDAISRLLPYHIFADYEEDDDVVDPISGISSSICTTTEKSSAHNWEDGMVTQMEGFLEHFEKQVLTFNVMTQQHAAGFNRAEEQLILQMSMVEDERRQLELLRAAIVQHQQQEAARARLALAQPQAALPAASCQALVAAGRGEGASRGQALAPSLVMQQQETMMTAGAWQALAAAASRGQGASNEQALMQAIMAQHMQRQRQQEIMAAASRGDGATCGQAEALPLAAVTQLMQQRNQQRQQEEMTTTAFRCDVAPGYLALASAGMMRQQQQHQQEVMAAGGWQLDLGLRHTDIAPRVDGSSSSQAALPPAMLQQPGQGQASTAGSGMALPWRGVADGREQ

SEQ ID NO: 7176 - protein, 495 aa, Zea mays
  VARIANT 351: note = Ancestral polymorphism is P, Derived polymorphism is L
MELHRNSTNGSCLSACGPLTDYYIPDYILKPAYEPVTVDNVPCCPVVVFINSRSGGQLGSSLIKTYRELLNEAQVFDLSEESPDKVLHRLYSNFERLKSSGDHVATQIQKSLRLIVAGGDGTASWLLGVVSDLKLSHPPPVATVPLGTGNNLPFSFGWGKKNPATDQAAVKSFLDQVKGAREMNIDSWHIIMRMRIPQEGPCDPIAPLDLPHSLHAFHRVSACDSLNLEGYHTFRGGFWNYFSLGMDAQVSYEFHSERKRNPEKFRHQLRNQGTYAKLGFKHSLNHLSSRNISQLAKVKIMKRPGSQWEELKIPRSIQSVICLNLPSFSGGLNPWGTPGTRKAQDRDLTAPYVDDGLIEVVGFRDAWHGLILLAPNGHGTRLAQAHRIRFEFHKGAAEHTFMRIDGEPWKQPLPKEDDTVVVEISNLRQVAMLANDPCRSKSVNEPSSPSCHGHEDDDSNSLEDEDEDEWEDGRKKFGAAATFKIPDEVDIAHLS

SEQ ID NO: 7177 - protein, 131 aa, Zea mays
  VARIANT 89: note = Ancestral polymorphism is G, Derived polymorphism is S
  VARIANT 77: note = Ancestral polymorphism is V, Derived polymorphism is M
  VARIANT 62: note = Ancestral polymorphism is Y, Derived polymorphism is H
MAAEPIRTALLFLVLLALASSVAAASTAPAPARAPTATGCRRGDLVVRQRATGRVVEGKPEYAVEVRNACRCAQSRVLLRCYGLSSVGGRGPARHPRRGRPALPPRGGAVRFTYAWMTPQDFPLLSSRPHC

SEQ ID NO: 7178 - protein, 380 aa, Zea mays
  VARIANT 51: note = Ancestral polymorphism is P, Derived polymorphism is T
  VARIANT 74: note = Ancestral polymorphism is T, Derived polymorphism is I
  VARIANT 217: note = Ancestral polymorphism is G, Derived polymorphism is S
MLAISTTFDVVERTSKDNNKTLQRTSNNTRCLNLGSYNYLGFAAADEYCTTRVIESLKKYSASTCSVRVDGGTTKLHNELEELPARFVGKPAAILFGMCYVTNSAIIPCLIGKGGLIISDSLNHNLIVNRVRGSGATVRVFQHNSPAHLEEVLREQIAGGQPWTHRPWKNIIVIVEGIYSMEGELCKLPEIIVVSKKYKAYTYLDEAHSIGAVGQSSRGVCELLGVDRADEIIQHLKHSCPPHLYATSMSPPGVQHVISAIKVILGEDGSNRGAQKLARIRENSNFFRSELKKMGFEVLGDNDSPVMPIMLYNPAKIPAFSRECLRQKQSACSPYPSLFAPTGFVLPICHGYQQSWRPCGHQIFHAEPPKIAGAGHDKLE

SEQ ID NO: 7179 - protein, 371 aa, Zea mays
  VARIANT 165..371: note = Derived polymorphism lacks residues 165 to 371
MVSDPAPPSAPSVLAAVDPPPRRGHPLLHRRRPRGPRQDEVRCRGVLGSTSTASPQSVGADGAPTVGSIEPWLKCKDQPPQQGKEIPQTKADRAKLDGMYKCILCACCSTSCPSYWWNPEEYLGPATLFHANRSMYNFPILPIKFTKTGGACPAVPDYDLGWVKYTDCGVSPQDLHHVFTKFAHRQSGGNRGFNGSGLGLAICKSCSTQQVYEEGAKEVALLVVSGINLTLIAGEIKIKGIELQESCSLSFFSMVEGIFIGFIHLFSVDVYKKIVSKNKMSLFHEGVIETETMGTRVKESKTVLVEKELELIDEPQIQESPPVRALLHDEVDFAESSLAIRESDIPVKKVLIIVTITFVWPQQPYYLKPMF

SEQ ID NO: 7180 - protein, 212 aa, Zea mays
  VARIANT 193: note = Ancestral polymorphism is A, Derived polymorphism is S
  VARIANT 150: note = Ancestral polymorphism is P, Derived polymorphism is L
MHPVPVPSQPFTATPAKKLVSRSTAVRKAIHFVNLWTAGRSSGNLAMNSVPKPAPGSETSGREDFAVGDKDAVVIVDHGSRRQESNLMLNDFVEMFRAKTSYRIVEPAHMELAEPTIKDAFGKCVQQGASRVIISPYFLSPGRHWKQDIPALAAVASKEHSNIPYIVTAPLGLHELMVDIMNDRIKYCLRHVAGDVDECTVCAGTGKCRMYS

SEQ ID NO: 7181 - protein, 129 aa, Zea mays
  VARIANT 34: note = Ancestral polymorphism is P, Derived polymorphism is L
  VARIANT 41..129: note = Derived polymorphism lacks residues 41 to 129
  VARIANT 45: note = Ancestral polymorphism is R, Derived polymorphism is Q
  VARIANT 46: note = Ancestral polymorphism is V, Derived polymorphism is F
  VARIANT 47: note = Ancestral polymorphism is P, Derived polymorphism is S
  VARIANT 53: note = Ancestral polymorphism is A, Derived polymorphism is V
  VARIANT 65: note = Ancestral polymorphism is R, Derived polymorphism is H
  VARIANT 68: note = Ancestral polymorphism is A, Derived polymorphism is V
  VARIANT 75: note = Ancestral polymorphism is A, Derived polymorphism is V
  VARIANT 82: note = Ancestral polymorphism is G, Derived polymorphism is E
  VARIANT 93..129: note = Derived polymorphism lacks residues 93 to 129
MRAATLAQQPCAPAPAPTPAAMRAAAPDHARSSPPRDGSQWRQKRVPTGKSCAWASLEVDANDRRRAASPSSRMAVVGTARGKGLLRRAWCFLAVLGDTMATAVMARTGEWNGRRGRAVLSTRSEAIIG

SEQ ID NO: 7182 - protein, 228 aa, Zea mays
  VARIANT 76: note = Ancestral polymorphism is A, Derived polymorphism is V
MSTSDAAATVIPIDDVPRQHGKAPAVDTVTAAPPPLAAAAPPAATTAPRKTRVPFFRRADRGSRCVALLDLVLRVAAFGPALAAAIATGTSDETLSVFTQFFQFHARFDDFPALLFFMVANAIAAGYLVLSLPFSAVVVLRPQAIGLRHLLLICDLIIAALLTAAAAAAAAIVDLAHSGNQRANWVPICMQFHGFCQRTSGAVVASFLAVLVLLFLVILAAFTIRKRC

SEQ ID NO: 7183 - protein, 384 aa, Zea mays
  VARIANT 80: note = Ancestral polymorphism is G, Derived polymorphism is S
  VARIANT 97: note = Ancestral polymorphism is R, Derived polymorphism is S
  VARIANT 167..384: note = Derived polymorphism lacks residues 167 to 384
MYFCVFGFLKRHIIKQIGSRRIRKPFQIVGEDRSTAAADDYIYEDDSVKRSILSSPLVEFSSVYSATNNFSEKLGEGGFGPVFKGILPDGQEIAIKRLSKTSAQGLEEFKNEVTVLSKLQHRNLVRLFGCCVHGEEKMMVYEYMPNKSLDSFIFNESKRLVLGWSLRYKIIQGIGRGLLYLHQDSRLKIIHRDLKASNVLLDDDFSPKISDFGMARIFGEHQLQDLTRRIVGTYGYISPEYAMEGKFSDKSDVFSFGVLVLEIVSGRRNSSLLDDEWSMNLLGYAWTLWKEGSVSELIDPLMGATYAYDEACRCVQVGLLCVQEVPAERPAMPLVLRMLSGDAAIPSPKQAAFFVGRAPRLPPADDSSNTESGNQLTCTDLQGR

SEQ ID NO: 7184 - protein, 833 aa, Zea mays
  VARIANT 19: note = Ancestral polymorphism is I, Derived polymorphism is T
MDTIFVHLLLLSFMILRPIAIAADVPESDTLGKGRNITDGETLVSADGTFTLGFFSPGASTKRYLGIWFSASSVAVCWVANGGRPVNGNSGVLVVRDTGSLLLLDGSGQTIWSSNSTSSSSSAEAQLLNSGNLVVRDGGSSSSSDAILWQSFDHPSNTLLSGMKLGKNKWTGAEWYLTSWRSADDPSPGAYRRALDTSGLPELVVWEGNVRTYRTGPWNGRWFSGVPEVSAYRNLIWYQVTTSPAEVSYGYTSNPGAALTRVVLTDAGVAKRLVWDAGARTWQTFFQGPRDVCDAYGKCGAFGLCDAGAASTWFCTCLTGFSPASPPAWSLRDTSGGCKRNVKLDCANNGSGTTTTTDGFLLVRGVKLPDTHNATVDMSITVEDCAARCLANCSCLAYAAADIRGGDVRSGCVMWTDDIVDLRYVDKGQDLYLRLARSELPAAAGPSPQRPFRTAPVVGASAAAVAVVLIVLSVVLVIRRRRRPIIPAAQSASPSVPSTELRRPPSVPSVDLSSLRRATNDFSADNVIGRGGFSTVFEGNLADGTKVAVKRLTQSYLTDGGGETFMREVEVMSELKHENLARLLAYCKDGNERILVYEYMENRSLNLCIFARDANQRAVLNWERRLEIIVGVARGVAYLHGLSKVVIHRDLKPSNVLLDGNWRAKIADFGTAKVFVDGQTNPTLVQTEGYRAPEYTARGPSLTLKCDVYSFGVVLIEIVSGQRNSSNQTLVSDARESWSQNKIKENLLDPAVGQPGPEILLRLERCVQVGLLCVQQSPADRPSMAEVVAMLTVNGTSSSQIRSHRSAAAAAAATPLATQDASSGAHGDSIYLT

SEQ ID NO: 7185 - protein, 1046 aa, Zea mays
  VARIANT 687..1046: note = Derived polymorphism lacks residues 687 to 1046
MGLFRAASGLARLALRRNLSRAAASPFAGSGGAVPGAMPARYFHSTRPRRFAAPAPRAVPLSRLTDSFLDGTSSVYLEELQRAWEADPNSVDESWDNFFRNFVGQAAATSPGLSGQTIQESMRLLLLVRAYQVSGHLKAKLDPLGLEERPVPDVLDPGFYGFSEADLDREFFLGVWMMAGFLSENRPVQTLRSVLERLEQAYCGTIGYEYMHIPDREKCNWLRDRIETVNPREYTYDRRQVMLDRLIWSTQFENFLATKWTTAKRFGLEGAETLIPGMKEMFDRAADLGVESIVIGMPHRGRLNVLGNVVRKPLRQIFSEFSGGTKPVNEGEGLYTGTGDVKYHLGTSYDRPTRGGKHIHLSLVANPSHLEAVDPVVAGKTRAKQYYSNDRDRTKNLGVLLHGDGSFSGQGVVYETLHLSALENYTTGGTIHIVVNNQVAFTTDPRSGRSSQYCTDVAKALDAPIFHVNGDDLEAVVHVCELAAEWRQTFHSDVVVDIVCYRRFGHNEIDEPSFTQPKMYKVIRNHPSALEIYQRKLLESGKISKEDIDKLNKKVSTILNEEFQNSKDYVPNKRDWLSAYWTGFKSPEQISRIQNTGVKPEILKRVGEAMTTLPENFNPHRAVKKIFYQRRQMIETGEGIDWAVGEALAFATLIIEGNHVRLSGQDVERGTFSHRHSVLHDQETGEQYCPLDHLVMNQDEELFTVSNRYEQYTNDLFQLGMCMGHGLTASLSEFAVLGFELGYSMENPNSLVIWEAQFGDFSNGAQVIFDQFLSSGESKWLRQTGLVVCLPHGYDGQGPEHSSARLERFLQMSDDNPYVIPEMDPTLRKQIQQCNWQVVNVTTPANYFHVLRRQIHRDFRKPLIVMSPKNLLRHKDCKSNLSEFDDLAGHPGFDKQGTRFKRLIKDQNNHKDLEEGINRLVLCSGKVYYELDEERRKTERTDVAICRVEQLCPFPYDLIQRELKRYPNAEIVWCQEEPMNMGAYSYINPRLLTAMKALGRGGIEDIKYVGRAPSAATATGFYSVHVQEQTELVQKALQRDPINYPF

SEQ ID NO: 7186 - protein, 513 aa, Zea mays
  VARIANT 115..513: note = Derived polymorphism lacks residues 115 to 513
MGACVSKAACCCRQPHNGVTNERTDTGLQSFSMEFGVFFLTATLVFLSIVTEDEEAYDLPAFQEFTFEQLRLATSGFAVENIVSEQGEKAPNVVYKGKLDAQRRIAVKRFNRSAWPDPRQFLEEARSVGLLRSKRLANLLGCCCEGDERLLVAEYMPNDTLAKHLFHWESQSMKWTMRLRVVLCLAEALEYCTNRGRALYHDLNAYRALFDDDCNPRLSCFGLMKNSRDGKSYSTNLAFTPPEYMRTGRITPESVIYSFGTLLIDVLSGKHIPPSHALDLIRDRNFNMLLDSCLEGQFSNEEGTEMVRLASRCLHYEPRERPNVRSLVQVLTPLQRDVETPSYVLMGIPRGGASSTEPLNLSPLAEACSRKDLTAIHEILEKTGYKDDEGTANELSFQMWTNQMQDTLNSKKKGDNAFRQKDFTAAIDCYSQFIEVGTMVSPTIYARRCLSYLMNGMPQEALNDAMNALVISPTWSTAFYLQAAALLSQGMENEAQEALKDGCNLEQSSSGGH

SEQ ID NO: 7187 - protein, 595 aa, Zea mays
  VARIANT 367..595: note = Derived polymorphism lacks residues 367 to 595
MAMGKLEERTRAFWTNRWLVFVGAMWMQSMAGTTYIFGAISPVVKARLGYDQPQVAALGVAKNVGGCLGLLAGALSATWPPWALLAIGAAQNFLGYGWLWLVVSGNAPALPLWLMCVVIFIGTNGQTYFITASLVTSIQNFPKSRGPTVGILKGFMGLTSAILTQVYTVMHTPDHAALIFMVAVGPSLVAIGLMFVIRPVGGHRQIRPSDKNSFMFIYTVCLLLASYLVGAMLVQDFLQPSYDVVVFLTVILFVLLISPIAIPVIVSFMPEKAQHLMEDALLSEPLTGEASSSRQKEDQPEVILSEVEEEKSKETDSLPPSERRKRIAELQAKLVEAAARGGVRIKRRPHRGDNFTLMQALVKADFWLIWLSLLLGSGSGLTVIDNLGQMSQAIGYKNAHIFVSLVSIWNFLGRVGGGYFSEIIVRERTYPRHIALAVAQIVMAAGHFLFAMAWPGTMYIASLLVGLGYGAHWAIVPAAVSELFGVKHFGAMYNFLILANPAGSLIFSELIVSNLYEHEAEKQASQHQMSALLSPRLLRDTGFLADDALKCEGPACFFFSSLIMSVFCAVAAGLSLLVVQRTRQVYPRLYSSVRT

SEQ ID NO: 7188 - protein, 614 aa, Zea mays
  VARIANT 3: note = Ancestral polymorphism is R, Derived polymorphism is P
  VARIANT 2: note = Ancestral polymorphism is T, Derived polymorphism is A
MTRLLCLTALTIFPIILCLTTSAAVTASDTLDSGSNITDGATLVSAGGSFTLGFFSPTGVPTKRYLGIWFTASPEAICWVANRETFLSNTSGGVLVIGSTGSLRLLDGSGRTAWSSVDSTSSSAPPVVAQAQLLESGNLVVRDQSGRDVLWQSFDHPSNTLLAGMRFGKDPRTGAEWFLTSWRASNDPTPGGYRRVLDTRGGLLDSVSWKGSVKKYRTGPWNGLWFSGIPETASYKDMYSTQLVVRPDEIAYVFNTAAGAPFCRLVLNEVGMVQQLGWDPVSRVWNVFTQAPRDVCDNYAKCGAFGLCDVKSGSTLFCSCAVGFSPVNPSQWSMRETRGGCRRNVPLECGNGTTTDGFKMVRAVKLPDTDNATVDMGATLEQCRARCLANCSCVAYAAADIRGGGGGHGCVMWTDAIVDVRYVGKGQDIYLSMHISAVEKKRNVVIIILPLVTACLLALMGMLLVWIWRKHKLRGKRRSMDDIQHKTIVRHLDETNTLGDENLDLPFFSFGDIVSATNNFAEENMLGEGGFGKVYKGILGEDRVVAIKRLSQGSGQGIDEFRNEVVLIAKLQHRNLVRLLGCCIHGDEKLLVYEYLPNKSLDSFIFGMYKLVAL

SEQ ID NO: 7189 - protein, 89 aa, Zea mays
  VARIANT 79: note = Ancestral polymorphism is T, Derived polymorphism is I
  VARIANT 45: note = Ancestral polymorphism is G, Derived polymorphism is R
  VARIANT 16: note = Ancestral polymorphism is C, Derived polymorphism is Y
  VARIANT 15: note = Ancestral polymorphism is L, Derived polymorphism is P
  VARIANT 13: note = Ancestral polymorphism is G, Derived polymorphism is D
  VARIANT 4..89: note = Derived polymorphism lacks residues 4 to 89
MILQLLIRSEKDGILCPIPQYPLYSASIALHGGSLVPYFLDEETGWALEVDELKKQLEEARSKGISVRALVVINPGNPIGQVIIYLFVT

SEQ ID NO: 7190 - protein, 176 aa, Zea mays
  VARIANT 2: note = Ancestral polymorphism is A, Derived polymorphism is G
  VARIANT 6: note = Ancestral polymorphism is A, Derived polymorphism is G
MASEAARRRQEVAVEGQRHLEETIAAAFQILVSMNDELCNAGLWSSSSVSAAAAAAASAGSQHHQSATPPPPHSADSDAADAGGAPGPGGSLDEARHRYKSAVVALRDSISAVSSCPQDIGSTESEVDQAEIERLEEHASALRKEIESKNKQVKLLMDQLRDLITDVAMWQSPCSV

SEQ ID NO: 7191 - protein, 655 aa, Zea mays
  VARIANT 83: note = Ancestral polymorphism is V, Derived polymorphism is A
  VARIANT 116..655: note = Derived polymorphism lacks residues 116 to 655
  VARIANT 151..655: note = Derived polymorphism lacks residues 151 to 655
  VARIANT 274: note = Ancestral polymorphism is R, Derived polymorphism is I
MATSKKGLMAMVYIRSAFILIFLSSPCQSNDQLTQTKPLLLEDTLISEGGDFALGFFSPTNSSKKLYIGIWYHRVTERTVVWVANRDNPITTPSAMLAITDNLELVLSDSQGHTLWMATGNTSGDAGGAASAVLLNSGNFVLRLPNGTEVWHSFDHPTDTILPTMRILLSFKTQPATRLIAWKGPDNPSTGDISSGMDSTNLQMFIWKGALPYYRFPVVNDMAVAGAMYQQSNGNAAIMYETRVNAGDALYYTYTVSSGSPYTRFSLDYTGKGRLLSWNSTTSSWTVIIEHPHSCDLYASCGPFSYCDQMGPLPTTCQCPDGFELLNSLNFSRGCRRKEELKCGVGNYFMAMSSMKLPDKFLHIKNRTFDQCADECTRNCSCMAYAYANLSSIGAVGDTSRCLVWSGDLIDMEKNSFSEVLYIRLGGSGKRQKKRVQKRRMLEYLSSTDDAGDKNINFPFISFENIVTATDNFSESNLLGKGGFGKVYKGMLEGTKEVAVKRLSTGSGQGKEEFKNEVVLIAKLQHKNLVKLLGCCIHEDEKLFCKKINASVANKAWNMWKDGKPEDFLDSSVTESCSLDEVSRCIHIGLLCAQDNPSCRPLMSTVVSMLENKATPLPTPKQPKDFALRDYNPGNEGVHRELSVNDTSLTMVEGR

SEQ ID NO: 7192 - protein, 70 aa, Zea mays
  VARIANT 42..70: note = Derived polymorphism lacks residues 42 to 70
  VARIANT 16: note = Ancestral polymorphism is L, Derived polymorphism is V
MLDWAPVVVGVVLFVLLSPGLLIELPGMHRWVDFGSLRVTGKAATVHTIIFFVLFLIVTMACKLHIYTGA

SEQ ID NO: 7193 - protein, 69 aa, Zea mays
  VARIANT 28: note = Ancestral polymorphism is R, Derived polymorphism is W
MADWGPVIVATVLFVVLTPGLLCTLPGRGRVAEFGSMHTSGLAILVHAVLYFALITIFLIAIGIHVYAG

SEQ ID NO: 7194 - protein, 110 aa, Zea mays
  VARIANT 44: note = Ancestral polymorphism is R, Derived polymorphism is W
  VARIANT 43: note = Ancestral polymorphism is S, Derived polymorphism is L
  VARIANT 40: note = Ancestral polymorphism is A, Derived polymorphism is T
  VARIANT 29: note = Ancestral polymorphism is V, Derived polymorphism is M
  VARIANT 28: note = Ancestral polymorphism is A, Derived polymorphism is V
MCNFGGRITPRPTDKSLCYLGGETRIVAVDRHASLADVHARLSRSLLGGHPFMLKYQLPNEDLDSLISVSTDEDLDNLVDEYDRIAVTSSGSGSSRTSRIHSSGWTPGSR

SEQ ID NO: 7195 - protein, 111 aa, Zea mays
  VARIANT 90: note = Ancestral polymorphism is Y, Derived polymorphism is S
MDMGFYKRASRGGGIKHKAAAMPFYPRKPAQVAPAAPAAQQAVSKAKQPSATTMWSIPAPPSSTVVAMEVAGNGMVLDGDSDVDSRAASYISRVQERLRRERMAEDWRMYY

SEQ ID NO: 7196 - protein, 450 aa, Zea mays
  VARIANT 67..450: note = Derived polymorphism lacks residues 67 to 450
  VARIANT 73: note = Ancestral polymorphism is A, Derived polymorphism is V
  VARIANT 83: note = Ancestral polymorphism is N, Derived polymorphism is Y
  VARIANT 103: note = Ancestral polymorphism is A, Derived polymorphism is T
  VARIANT 118: note = Ancestral polymorphism is R, Derived polymorphism is G
  VARIANT 121..450: note = Derived polymorphism lacks residues 121 to 450
  VARIANT 203: note = Ancestral polymorphism is L, Derived polymorphism is Q
  VARIANT 222: note = Ancestral polymorphism is L, Derived polymorphism is Q
  VARIANT 299..450: note = Derived polymorphism lacks residues 299 to 450
  VARIANT 306..450: note = Derived polymorphism lacks residues 306 to 450
  VARIANT 339..450: note = Derived polymorphism lacks residues 339 to 450
  VARIANT 375..450: note = Derived polymorphism lacks residues 375 to 450
MFFSKKGPYPFLLTTFTFPSPAKDDQNSPPTLSSRLLTTADKSSPLPPLNLALPLVRLLSHADPLLQEHGVTALLNLSICDENKATIVEAGAIRPLVHALKSAVSPAARENAACVLLRLSQLDGASTAAIGRAGAIPLLVSLVETGGARGKKDAATALYALCSGARENRQRAVETGAVRPLLDLMADPESGMVDKAAYVLHSLVSSSEGRAAAIEEGGIPVLVEMVEVGTSCQKEIATLSLLQIYEDNIVYRTMVAHEGAIPPLIALSQSSSARPKLKTKVHTTSQCPHSTKKRGVADRDAAAAAESEPTHAASGSRCHSRPPGTTIPNTVYDPIRRDSLPLEEIKDVYLLDFVGPPGFVEDIAPKVERNKLLTEVSTLRGNESGKDVGEVKYVPDNKAETVHKLFKFIEDGDLWRWKIPNSKAFISGLKDLDIEFNVNANNKLFDQGLD

SEQ ID NO: 7197 - protein, 897 aa, Zea mays
  VARIANT 21: note = Ancestral polymorphism is F, Derived polymorphism is S
MAHPASSGILGCVTLLCIFSSAAAVGSNATGSGQIRLDCGASSSTSTDADGRSWDSDASSKFAPSLNGVAATASSQDPSLPSPTPYMTARVFTSNYTYSFPVTPGRMFVRLYFYPTIYGGNHAPADAYFGVTAANLTLLQSFNASQTSLSLGVAFFVREYSVNVTEGSLDLTFSPSTHHNGSYAFINGIEIVPTPDLFTTPTPTLSNGGNPDPFPILAGTGFETMYRLNVGGQAISPGGDTGFYRSWVNDVPYIYAAGFGVAFGKDDNLTISYTPTVPNYTAPVDVYATARSMGPNAQINLNYNLTWILPVDAGFYYLLRFHFCEIQYPITKVNQRSFFIYINNQTAQQEMDVIAFSGGIGRTVYTDYVTVTAGSGQTYLWVALHPDLTTRPEYFDAILNGLEVFKLQNYGNNSLNGLNPPLPSVQPNNNGNGEPSVRRKGAAPAPAAIAGAVGGFAVLLIAAFGACIVCRRKEVANKESRKPDDGHWTPLTDYSKSRSNTSGKTATTGSRTSTLPSNLCRHFSFGEIQAATKNFDQASLLGKGGFGNVYLGEIDSGTMVAIKRGNPTSEQGVHEFQTEIEMLSKLRHRHLVSLIGYCDDMNELILVYDYMANGTLREHLYNTKRAALSWKKRLEICIGAARGLHYLHTGAKHTIIHRDVKTTNILLDDKLVAKVSDFGLSKTGPNNVDNTHVSTVVKGSFGYLDPEYFRRQQLTEKSDVYSFGVVLLEVLCARPALSPSLPKEQVSLADWALHCQRKGVLGQIIDPHLQGQVSPQCFLKFAETAEKCVADRSVDRPSMADVLWNLEFALQLQGSAEDSGSVVVVTDGTTSSSSNRSSPLIVSGLHSDEPPTDSTTTTTTTSSTTTLSMMGRSLASVESDELTPSSVFSQLMHPGGR

SEQ ID NO: 7198 - protein, 150 aa, Zea mays
  VARIANT 34: note = Ancestral polymorphism is E, Derived polymorphism is K
  VARIANT 42..150: note = Derived polymorphism lacks residues 42 to 150
  VARIANT 62: note = Ancestral polymorphism is E, Derived polymorphism is K
  VARIANT 81..150: note = Derived polymorphism lacks residues 81 to 150
MKSVASPGRGILAIDESNATCGKRLSSIGLDNTEVNRQAYRQLLLTTAGLGEYISGAILFEETLYKSTTDGKKFVDCLKDQNIMPGIKVDKGLVPLPGSNNESWCQGLDGLASRCAEYYKQGARFAKWSVHTSLIHVSTNLICASFLKLL

SEQ ID NO: 7199 - protein, 162 aa, Zea mays
  VARIANT 135..162: note = Derived polymorphism lacks residues 135 to 162
  VARIANT 128: note = Ancestral polymorphism is G, Derived polymorphism is R
  VARIANT 127: note = Ancestral polymorphism is L, Derived polymorphism is P
  VARIANT 55: note = Ancestral polymorphism is R, Derived polymorphism is C
MKRSGGTAGRNAGCSCRNRRSPNVVHAFSVCDDPEYFYDYVQGLIDGLNSGLDSRDIVSIENAKGLGYAMNTAEELKFVKDIAASTGIVLDPVYSGKAVYGLLKDMAGNPAKWKGRKVLFIHTGGLLGLYDKADQLSSLAGSWRRMDLEDSVPRKDGTGKMF

SEQ ID NO: 7200 - protein, 185 aa, Zea mays
  VARIANT 8: note = Ancestral polymorphism is G, Derived polymorphism is S
  VARIANT 35: note = Ancestral polymorphism is G, Derived polymorphism is V
  VARIANT 40: note = Ancestral polymorphism is A, Derived polymorphism is D
  VARIANT 51: note = Ancestral polymorphism is A, Derived polymorphism is T
  VARIANT 69: note = Ancestral polymorphism is R, Derived polymorphism is C
  VARIANT 85: note = Ancestral polymorphism is S, Derived polymorphism is Y
  VARIANT 143: note = Ancestral polymorphism is C, Derived polymorphism is Y
  VARIANT 171: note = Ancestral polymorphism is R, Derived polymorphism is I
MVTFFQQGTIPCVCHDGRFIMETPYKVAKAPDGNGGVYAALKSKRLLDDMAAKGVNYVDCYGVDNVLVCVADPTFLGYFIDRGVYAAAKVVRKAYPQEKVGVFVQRGKGGPLSVVEYSEMDAAMTTGINQTTGRLRYCWSNVCLHMFTLDFLNQVKNSLEKDSIYHLAEKRIPSVHGYTSGLKLE

SEQ ID NO: 7201 - protein, 128 aa, Zea mays
  VARIANT 57: note = Ancestral polymorphism is V, Derived polymorphism is E
MHIKAAVDARKESGSDIVIVARTDSRQAISHDEALWRVKAFADAGADVLFIDALASVEEMKAFCAVAPEVPKMANMLEGGGKTPILSPAELEEIGFRLVVYPLSLVGVSMRAMQLTTFSVPLYPLLVE

SEQ ID NO: 7202 - protein, 737 aa, Zea mays
  VARIANT 15..737: note = Derived polymorphism lacks residues 15 to 737
  VARIANT 48: note = Ancestral polymorphism is M, Derived polymorphism is R
MALSYRQKFFCQNRQDKNHISVKSGRKNLIPTGMAYLYLPVFIFLLSMACSCQSDDRLTPAKPLLPGDMLISHGGVFALGFFSLTNSSSSSYVGIWYNNIPERTYVWIANRDNPITTDVPGTKLAFTNSSDLVLLDSTGHTIWMTRSSISAGGGGTAAVVLLDSGNLVIQSIDGTAIWESFDHLTDTVIPGVSLSLSSSDAAASARRLVAWKGPDDPSSGNFSMGGDSSSDLQIVTWNGTRPFWRRAAWGGEVTFGTFEDNTSFTMYETITGGTGDDYYIKLTVSDGAPIIRVSLDYTGLFTYRRWNLKTSSWTVFVQFPSSACDRYAFCGPFAYCDSTETVPSCKCLDGFEPIGLDFSQGCRRKEELKCGDGDTFLTLPTMKTPDKFLYIKNRSFDQCTAECSNNCSCTAYAYDNLQNVDSTIDTTRCLVWMGELIDAEKFGNTFGENLYLRVSSSPGKHQTGNVQNNLLCLNPPNEFGNENLDFPSFSFEDIIIATNNFSDYKLLGEGGFGKVYKGVLEGGKEVAVKRLSKGSVQGIQEFRNEVVLIAKLQHRNLVRLLGFCIHEDEKLLIYEYLPNKSLDAFLFGIGYMSPEYAMQGSFSVKSDTYAFGVLLLEIVSSLKISSSLINFPNLIAYAWSLWKDGNAWELVDSSISVSCSLQELVRCIQLGLLCVQDHPNARPLMSSIVFMLENETAPLPTPREPLYFTVRNYETDRSNESVQRYLNNMSITTLEAR

SEQ ID NO: 7203 - protein, 182 aa, Zea mays
  VARIANT 1: note = Ancestral polymorphism is M, Derived polymorphism is L
MACRALALRSLLLPDPLHRLPAAAPPVWRASRGGRRPHLRCCSGGGGGEPGQPPQEAVLEAISKIARSKGRVALTTNMVMGGTVTDDASDEWLVLDQKVNSYPTDRGFTAIGTGGDDFVQSMVVAVESVLQESIPKGRVSQKLSSRGKYVSVNIGPIRVVSSEQVQAVYRAMRRDNRMKYFL

SEQ ID NO: 7204 - protein, 756 aa, Zea mays
  VARIANT 23: note = Ancestral polymorphism is T, Derived polymorphism is I
MESLYFKLSLRLRVLIPCVLLVTSIVAEELTRTAGDDELRTFIVYVQPPEKHVFATPDDRTSWYRSFLPDDGRLLHAYHHVANGFAARLTQRELDEVSVMPGFLAAQPNVAYELLTTHTPRFLGLDVAPQEGASATNHSATGFGDGVIICVIDTGVFPYHPSYSGDGMPPPPAKWKGRCDFNGSACNNKLIGARSFQSDASPLDKDGHGTHTSSTAAGAVVHGAQVLGQGRGTASGIAPRAHVAMYNSCGDECTSAEMLAGVDAAVGDGCDVLSISLGDTSPNTPFYQDSLAIGTYGAVEQGVFVSISAGNSGPNASTLFNDAPWMLTVAASTMDRLIGARLRLGSGLSFDGESVYQPEISAAVFYPLVYAGDSSTADAQFCGNGSLDGFDVRGKIVLCDRDDIVGRVDKGAEVKRAGGIGMVLANQFSNGYSTIADAHVLPASHVSYVAGVAIKKYISSTANPTAQISFRGTVLGTSPAPAITSFSSRGPSQRNPGILKPDVTGPGVSVLAAWPTQVGPPSSSVSPGPTFNFESGTSMSAPHLAGVAALIKSKHPYWSPAAIRSAIVTTADPIDRSGNPIVNEQLLPADFFATGAGHVNPVKAVDPGLVYDIAAEDYVSFLCSVYASRDVSIIARRAVDCSAVAVIPDHALNYPSISVVFPQAWNSSANPVAVVHRTVRNVAEAQAVYYPYVDLPSSVGLHVEPRSLRFTEANQEQSFTVSVPRGQSGGAKVVQGALRWVSEKHTVRSPISITFE

SEQ ID NO: 7205 - protein, 274 aa, Zea mays
  VARIANT 8: note = Ancestral polymorphism is A, Derived polymorphism is V
  VARIANT 56: note = Ancestral polymorphism is G, Derived polymorphism is S
  VARIANT 67: note = Ancestral polymorphism is A, Derived polymorphism is V
  VARIANT 68: note = Ancestral polymorphism is C, Derived polymorphism is Y
MATAGCFARIWWELAQLIGGGARAARYLWVAVAVLGRAVARAAELVGRRLRPRRPGVAEPRREDVVACLRASLEDLLRSPLSCAVGGGLGDVELCFCEAEAVDVCVSGQICAGRQCPHARVAVAGQRRRHPHVRLARCGGGVACLCLPRSGALTVAGSAAVSGAFCRGGLLRALGCVVGGPLAKAMPACGRTAVTPAGATPTLLRVPSLVLSPPCGNPRLGLLGVSRWCSSDVRALRVGASADDSRSSEETLLGWYQAGGDDSFLLLEGAAQKT

SEQ ID NO: 7206 - protein, 215 aa, Zea mays
  VARIANT 153: note = Ancestral polymorphism is P, Derived polymorphism is T
  VARIANT 144: note = Ancestral polymorphism is P, Derived polymorphism is L
  VARIANT 99: note = Ancestral polymorphism is R, Derived polymorphism is G
  VARIANT 73..215: note = Derived polymorphism lacks residues 73 to 215
  VARIANT 47: note = Ancestral polymorphism is G, Derived polymorphism is R
  VARIANT 37: note = Ancestral polymorphism is S, Derived polymorphism is C
  VARIANT 25: note = Ancestral polymorphism is V, Derived polymorphism is I
  VARIANT 23: note = Ancestral polymorphism is I, Derived polymorphism is T
MVQQQVSARFGKCLLELSGNNATIVMDDADIQLDVRSVLFAAVGTAGQRCTTCHRLILHENIYQTFLDQLVEGGKILFGGSAIESEGNFVQPTIMEITRSAPVVKEELFGPVLYVMKFQTLKEAIEINNSVPQGLSSSIFTKRPNIIFKWLGPHGSDCGIVNVNIPTNGAEIGGAFGGEKAAGGGREAGSDSWKQYMRRATWREVLEVVSHLFTP

SEQ ID NO: 7207 - protein, 455 aa, Zea mays
  VARIANT 436..455: note = Derived polymorphism lacks residues 436 to 455
  VARIANT 317..455: note = Derived polymorphism lacks residues 317 to 455
  VARIANT 75: note = Ancestral polymorphism is P, Derived polymorphism is R
  VARIANT 61: note = Ancestral polymorphism is P, Derived polymorphism is S
  VARIANT 58: note = Ancestral polymorphism is P, Derived polymorphism is L
MTTFSKASRLCGAVTMQSKQLWSLLLSRILPKLLGFPGILLKKFRKEGVMELDAAALPELPQDVLMDIFGTLEVPDLIRAGSVCSSWHATYKCLLDLRQYKQPQTPCLFYTCESAGSNVGFLYSLKENRSYKLTLPEPPIRSRLLIGSSNGWLITADERSELHLMNPITGEQVALPSVITIEHVKPIFDASGTIHMYELSYETPPDLFDLGDLRDELYFKAFVFPDPSTTGSYIVVLIHEPYSRLSFARPGDDKWTWVGQGSQYKDCTYVDGLLYTVNYSGEIDAFDFTASPVKMTVIMKELKYPVCENMYIIQAPWGDLLHVWRTLGVPPNAPPWVPGKCLFETLKIQVHKVDLEAKQRVEINRLQCDSVLFLGHNDSLCLSAQVHPELKSNHAYFTDDFKEVTVLFKNCIRDMGVMDLENSVNKEIVSQIWSNWPCPTWITPNLMKLNQAFNR

SEQ ID NO: 7208 - protein, 783 aa, Zea mays
  VARIANT 377..783: note = Derived polymorphism lacks residues 377 to 783
MAKNHKSKAYYQHRGMVPGVLDSKSPSHRHAHFLLCSIFILISSNTATLSSAQASNRSEDDRQALLCFKSGLSGNSAGVLGSWSNDSLNFCKWEGVTCSTAIPIRVASLKLRSVQLRGKLSSCVANLTSLVQMDLSNNSISGEIPDEIGSLPLLQTLILSKNLLSGTIPPEIGKLVSLTKLAMDQNMLSGIIPWTIGNLSNLVVLALSTNSLSGEIPARIGYLPQLIQLYLDDNTLSGRIPAQLVQCTRLAMLNLSVNSLNGSIPSEILSISSLSLGLDLSNNNLIGTIPSQIGKLINLGLLNVSSNKLSGEIPSELGQCVLLLSLQMEGNMLDGVIPQSLNTLKGIQHMDLSENILSGQIPDFFENFSTLDYLNLSYNRLEGPIPTSGIFTNSNAVMLEGNKALCQQIDIFALPICHITSARERKINERLLLITVPPVIIALLSFLCVLTTVTKGRITQPSESYRETMKKVSYGDILKATNWFSPVNRISSSHTASVYIGRFQFDTDLVAIKVFHLDEQGSLNSFLAECEVLKHTRHRNLIQAITLCSTVDFENNEFKALVYEFMANGSLDMWIHPRQDQRSPTRVLSLGQRISIVADVASALDYMHNQLTPPLIHCDLKPSNVLLDYDMTSRIGDFGSAKFLSSSLNSTPEGLVGASGTIGYIAPEYGMGCKISTGGDVYGFGVLLLEMLTAKRPTDTLFGNDLSLHKYVDLAFPNKINEILDPKMPHEEDVVSTLCMQRYIIPLVEIGLMCSMESPNGRPGMRDVYAKLEAIKEAFVETF

SEQ ID NO: 7209 - protein, 569 aa, Zea mays
  VARIANT 463..569: note = Derived polymorphism lacks residues 463 to 569
MAYLPVFVFLFMVVLCQSDDRLTPAKPLLPNEVLISGGGVFALGFFSLKNSSRSYVGIWYNNIPERTYVWIANRDNPITTNVPGKLVFTNSSDLVLLDSTGRTIWTTTNNYTAGGGGETASILLDSGNLVIRLPNGTDIWESFSYPTDTIVPNVNFSLNVASSATLLVAWKGPDDPSSSDFSMGGDPSSGLQIIVWNGTQPYWRRAAWGGELVHGIFQNNTSFMMYQTVVDTGDGYYMQLTVPDGSPSIRLTLDYTGMSTFRRWNNNTSSWKIFSQFPYPSCDRYASCGPFGYCDDTVPVPACKCLDGFEPNGLDSSKGCRRKDELKCGDGDSFFTLPSMKTPDKFLYIKNRSLDQCAAECRDNCSCTAYAYANLQNVDTTIDTTRCLVSIMHSVIDAAVTLAFSKNKKSTTLKIVLPIMAGLILLITCTWLVFKPKDKHKSKKSQYTLQHSDASNRFENENLEFPSIALEDIIVATNDFSDFNMLGKGGFGKVYKAMLEGGKEVAVKRLSKGSTQGVEEFRNEVVLIAKLQHRNLVRLLDCCIHKDEKLLIYEYLPNKSLDAFLFGTF

SEQ ID NO: 7210 - protein, 309 aa, Zea mays
  VARIANT 251..309: note = Derived polymorphism lacks residues 251 to 309
  VARIANT 226..309: note = Derived polymorphism lacks residues 226 to 309
  VARIANT 201: note = Ancestral polymorphism is S, Derived polymorphism is R
  VARIANT 200: note = Ancestral polymorphism is G, Derived polymorphism is R
  VARIANT 190: note = Ancestral polymorphism is A, Derived polymorphism is V
  VARIANT 175: note = Ancestral polymorphism is E, Derived polymorphism is K
  VARIANT 129: note = Ancestral polymorphism is R, Derived polymorphism is M
  VARIANT 116: note = Ancestral polymorphism is G, Derived polymorphism is S
  VARIANT 89: note = Ancestral polymorphism is A, Derived polymorphism is V
  VARIANT 81: note = Ancestral polymorphism is G, Derived polymorphism is V
  VARIANT 68: note = Ancestral polymorphism is I, Derived polymorphism is N
MATFSKASRSCGAVTMQPKQLWSLLLSRILPKLLGLPGILLKKFRKEGVMELDAAALPELPQDVLMDIFGTLEVPDLIRAGSVCSSWHATYKCLLDLGQYKQPQTPCLFYTCESAGSNVGYLYRLKENRSYKLTLPEPPIRSRLLIGSSNEHVKPVFDASGTIHMYELPYETPPELFDLSDLCDELYFKAFVFPDPSTTGSYIVVLIHKPYSQLSFARPGDDKWTWVGQGREYKDYTYVDGLLYAVNYFGEIDVFDLTASLVKMIVIMYRLKYPVCETMYIIQAPWGDLLHVWRTIDVHPMLRRGSLKN

SEQ ID NO: 7211 - protein, 409 aa, Zea mays
  VARIANT 39..409: note = Derived polymorphism lacks residues 39 to 409
  VARIANT 50: note = Ancestral polymorphism is P, Derived polymorphism is H
  VARIANT 83..409: note = Derived polymorphism lacks residues 83 to 409
  VARIANT 204: note = Ancestral polymorphism is A, Derived polymorphism is T
  VARIANT 205..409: note = Derived polymorphism lacks residues 205 to 409
  VARIANT 208: note = Ancestral polymorphism is P, Derived polymorphism is L
  VARIANT 267: note = Ancestral polymorphism is N, Derived polymorphism is K
MSPGYANAGSSPVPTPPSGKGLKASTKPKATKGQKSGPQTPLGFGSPGNPSTPVGGCRYDSSLGYCCLLGLLTKFLNLLKAKRPVAQGGSSMAPRYAPSRSLVAYFNSYWLLAVARGVDDSRHGEVSDDMSILQMGRVGEKLDIDFVISTGDNFYKNGLKGVHDQAFKESFMDIYTAQSLQKPWYSAILFAVLGNHDYRGNALAQLSPVLRKIDDRFICMRSFIVNAELVDFFFIDTTPFQLEYWTHPGKHRYDWRGVAPRGKYIANLLKDMDVAMKRSTARWKIVVGHHTMRSVSEHGDTEELLELLLPVLKDNGVDFYINGHDHYLEHISSRDSPLQYFTSGGGSKAWRGVFHPNKDKLRFFYDGQGFMSLQLNQDQAHFIFYDVFGNILYRWSSRHPQSSTYLDEE

SEQ ID NO: 7212 - protein, 378 aa, Zea mays
  VARIANT 75: note = Ancestral polymorphism is D, Derived polymorphism is N
  VARIANT 91: note = Ancestral polymorphism is F, Derived polymorphism is S
  VARIANT 214: note = Ancestral polymorphism is W, Derived polymorphism is R
MGAELGEAGVPARDMVDALEGVRSILLKPSERLDDKRFTRIAGADFDDAGLGLAGLLGSLASTGFQASNLGDAIDVVNQMVPNYVFVLTLSAVVRFAGWKLDWRLSHEKPSDDCAEAELDPAYRESVKCKIFLGFTSNLVSSGVREIIRFLVQHRMVDVIVTTAGGIEEDLIKCLAPTYRGDFTLPGALLRSRGLNRIGNLLVPNDNYCKFEHWIMPILDKMLLEQSTQNVWTPSKNNIPVFCPALTDGSIGDMLFCHSVHSPGLVVDIVQDVRLMNAETIHASPRKTGIILLGGGLPKHHICNANMLRDGADYAVYVNTAQEFDGSDSGARPDEAVSWGKIKSSARTVKVHCDATIAFPLLVAATFARKVHGTKSTN

SEQ ID NO: 7213 - protein, 378 aa, Zea mays
  VARIANT 364..378: note = Derived polymorphism lacks residues 364 to 378
  VARIANT 352..378: note = Derived polymorphism lacks residues 352 to 378
  VARIANT 251..378: note = Derived polymorphism lacks residues 251 to 378
  VARIANT 204: note = Ancestral polymorphism is D, Derived polymorphism is V
  VARIANT 182: note = Ancestral polymorphism is T, Derived polymorphism is K
  VARIANT 179: note = Ancestral polymorphism is A, Derived polymorphism is T
  VARIANT 162: note = Ancestral polymorphism is L, Derived polymorphism is F
  VARIANT 146: note = Ancestral polymorphism is R, Derived polymorphism is M
  VARIANT 130..378: note = Derived polymorphism lacks residues 130 to 378
  VARIANT 125..378: note = Derived polymorphism lacks residues 125 to 378
  VARIANT 100: note = Ancestral polymorphism is V, Derived polymorphism is A
MVGRRPRHQHRCQRPALPLLAPCTHLAARALLGRVLVVAVLIVMEGGSVRGKGKEPYIGESSSAAACEWVVTTDGTHNLLTTHGVMVRNGRNRDSSVLIAGVLRRVESFWDRQDKFQAWMVSSDWKNNDWRDEKDHKFTYGCLIDRIWWEKIEMVLKTVTPLYYVLRFVDQQKNGTISAFLTKMLSAQAEIFAKLKHDKNVKRDFMKKVNEIIRKRTQYLLNDTLMLEDVATFKRNLGLGKNSRGKKLMSQLDEEEEFEDDYESGSPHGSPLYDEPWDICSDDEGNNSGGFDWLKDKSGGDVGKNKSDCTKAEIVVVEGVPLVPVRLLLLGQRPVFHNRPIFVQDQLEKGSQHTRVFMIYKRMWKRNGHRNMAHFWTA

SEQ ID NO: 7214 - protein, 143 aa, Zea mays
  VARIANT 71: note = Ancestral polymorphism is R, Derived polymorphism is S
MLRMLNATILIRDPSPPLLSITPAYKVLVAASRTMGGKPLTYIPQSSSVATGPPVSPASSASSTSSASLQRSLTSAAASKMKKALVLRSSASSKGVGSPGSGGKAAPPRRPATVGELMWVQMRISEPADARIHRGSSASPPAR

SEQ ID NO: 7215 - protein, 104 aa, Zea mays
  VARIANT 65: note = Ancestral polymorphism is H, Derived polymorphism is N
MHPHMWYPKAQEKKCNVFLQVGPTNSGKTYSAVNRLEASSSCVYCGPLRLLAREVAKRLNKVNVHCNLITRQERNEIEGAKHSSVTFEMADMTTNYQCVVIDEI

SEQ ID NO: 7216 - protein, 153 aa, Zea mays
  VARIANT 11: note = Ancestral polymorphism is R, Derived polymorphism is I
  VARIANT 18: note = Ancestral polymorphism is G, Derived polymorphism is R
  VARIANT 61..153: note = Derived polymorphism lacks residues 61 to 153
MLSTHQHIPYRENKNLTGTARYASVNTHLGIEQSRRDDMESLGYVLMYFLRGSLPTVSLPWQGLKAGNKKQKYEKINERKIAFNTPNIWEGFQFDYVFNRTILKYQQAQMTTAPPRAIAPAVGKSSGMAPVLQGREATRVRLLQSGKRVQHAP

SEQ ID NO: 7217 - protein, 423 aa, Zea mays
  VARIANT 101: note = Ancestral polymorphism is G, Derived polymorphism is D
MESPRSPEAEIGHRVEDLWEVAEPQLSPSEKLNSCFEDIPVASFPRTHPSQVIEIPSDASLAETVEILSKNKILSAPIRNVEAPEDASWMDKYIGIVEFAGIAMWLLSQSDAAVNGTVGSGPGSPVSSLVSRLGSFTFRRTSSGRLETATDSESDEAASVGGSFFETLTSSEFYKNTKVGDISGSFRWAPFLALQTSDTFLTMLLLLSKYRMKSLPVVEVGGDKIENIITQSSVVHMLAECVGLSWFENWGTKKLSELGLPVMKPSKLVKVSEDQPVLKAFQLMREKGVGGLPVMDTSGANAIGNISIRDVQYLLTAPKIYKEHRSITTKDFLSAVRHHLQEQREASPLLHDVITCKKDDTIKDIILKLDSEKIHRIYVVDDKGNTEGVITLRDIISKLVHEPRHYFGDFFDGVVPLPANSTV

SEQ ID NO: 7218 - protein, 358 aa, Zea mays
  VARIANT 339: note = Ancestral polymorphism is W, Derived polymorphism is S
  VARIANT 321: note = Ancestral polymorphism is V, Derived polymorphism is G
  VARIANT 267: note = Ancestral polymorphism is G, Derived polymorphism is A
  VARIANT 12: note = Ancestral polymorphism is H, Derived polymorphism is R
  VARIANT 11: note = Ancestral polymorphism is E, Derived polymorphism is G
MDMEHQLLHLERFMASSPGFFTVDSGQDPAHFPNGGLFVEQVGATGGVGGDDGGWVEDLMQLGEELFGGRGDANGTDDGMGDDHYYQQWQCDDGGSPDGGPPPSVSLDGDASPPSGEQEQGTVELASERHPHREAEDGDDDVLGATRKRRDRSKTIVSERKRRVRMKEKLYELRALVPNITKMDKASIIADAVVYVKNLQAHARKLKEEVAALEARPRSPTGQHSGPAGAGRRRHQQQQQERRRDAGRSAGSGARVTHVGAVQVGEGRFFVTVECERRDGVAAPLCAAAESLACFRVETSSVGGRSGPDRVVSMSTLTLKGRGQLGDAAAIGEASVKLWMMAALVKEGFRPAATVQIS

SEQ ID NO: 7219 - protein, 301 aa, Zea mays
  VARIANT 83: note = Ancestral polymorphism is L, Derived polymorphism is P
  VARIANT 136: note = Ancestral polymorphism is A, Derived polymorphism is T
  VARIANT 158..301: note = Derived polymorphism lacks residues 158 to 301
  VARIANT 167: note = Ancestral polymorphism is A, Derived polymorphism is T
  VARIANT 257: note = Ancestral polymorphism is T, Derived polymorphism is I
MDSSAADDPMADEAGVEDAFTQEITDYSYVPRYHVLSWMETVEGMVAGVAALPPVYLILNRAFLCAEQKPDPFGWIIAEKSALIAAAKLLPINLHHCKNNQNAFQCLKMEKALLRYCASFLTPDDKRMILGIKDQAKQMIQSEVLQAMVQMGVLVPTGDMTVVRRTAQFFLNSFQECLIAQRKEREMATAELGFKKQLTKEEKFEKRKQRLAAIGEDLLAIAADQPFRFPATFTFVVRAFSVLDGTGKGLHPRFHITEIAKPNAKELLRFNDAGVEIVVKASFNIWSKLLTYLYDSTSPKG

SEQ ID NO: 7220 - protein, 343 aa, Zea mays
  VARIANT 40: note = Ancestral polymorphism is D, Derived polymorphism is G
  VARIANT 62: note = Ancestral polymorphism is R, Derived polymorphism is C
  VARIANT 168: note = Ancestral polymorphism is E, Derived polymorphism is V
  VARIANT 175: note = Ancestral polymorphism is T, Derived polymorphism is I
  VARIANT 190: note = Ancestral polymorphism is I, Derived polymorphism is N
  VARIANT 292: note = Ancestral polymorphism is M, Derived polymorphism is T
  VARIANT 295: note = Ancestral polymorphism is L, Derived polymorphism is S
MASASAPVAGAVAGNDDELADLVRRLVDALARYADRLPFDLDRQLPSQELLNFFVAMLQKLRSLTTLAAISITLLFAWKMLRGPQEQPPRPRRRIAPSSSNTSTRSRPGALTTTDACSSADSRAHEAVNQLFQPVNLTLEQLVKHKLSGGRRFTCRLLGVILEETAPEELQNHVTVKPSVVEVLLEIAKICDVYLMECVLDDESEAKVYQISTAHFTAATGKNSIQCLQRSKPGTIFWRPRPEIEVKLHPAKCWQRLSENGGHHCFFFPSFVSSARVMELIFPVPCVKACAMYTLLCDMQCPHNLCREMTNVILAYLANQPVVLMYKYNQNSCKCQPAAIAIR

SEQ ID NO: 7221 - protein, 104 aa, Zea mays
  VARIANT 54: note = Ancestral polymorphism is V, Derived polymorphism is A
  VARIANT 83: note = Ancestral polymorphism is R, Derived polymorphism is T
MAPAANDSLVTAHVIGDVLDPFYTAVDMMILFGGAPIISGMELRAQAVSDRPRVEIGGEDYRDAYTLVMVDPDAPNPSNPTLREYLHWMVTDIPASTDNTHDMQ

SEQ ID NO: 7222 - protein, 496 aa, Zea mays
  VARIANT 17: note = Ancestral polymorphism is P, Derived polymorphism is L
MDASSVSPCDLDREFALQIAQLLATPPLQSAQEYYGELIRSKKLDGIRVSYSGKHGKGVYANRDFGEDDLVLKDQMLVGAQDSLNKIDCVVCSYCFHFIGSIEYQIGRRLYLQSLGGSGDGTTERHCHGSDVGSSTGCSGASNGNSNAVPQEVLLSLMDGNTLLPLTDQFCLPPVVACPGGCEGELYCSQSCADSDWDSYHSLLCAGSKTEPLRKSALQKFVGHANETNDIFLVAAKVSGRSCNPITLLDSHSQTSAFICQAITFTLLRYRKLKRQHVSHESSSSLLLEAWKPLSMGFKKRWWECVALPEDVDSSEEELFRQQIRDLAFTSLQLLKDAIFDPDFLNNGLVFSLDIYGHIIGMFELNNLDLVVASPVEDYFIYIDGLPESDKEEAEKVTGPFLDALGEDYLVPCEGTAFFPLQSCMNHSCRPNAKAFKRDEDKDGHAVIIALRPISKDEEITIAYIDEDLPYEERQAQLADYGFTCTCLKCQEERPV

SEQ ID NO: 7223 - protein, 466 aa, Zea mays
  VARIANT 22: note = Ancestral polymorphism is H, Derived polymorphism is P
MESVAVVAVPFPAQGHLNALLHLSLQLAARGVPVHYAAPMEHVRQARSRVQGWGDDTLCRVHFHELSVSAYASPPPDPAAESAFPSHLVPMWEAFTTDAPAPLAALLGGISASCRRFVVLYDIANGFAAEEAARLPNGEGFGLVCTAVSCIVGRTDAGSRLVRERGLDFFPVNSFVTEEFLATVGKRARWAQSIPCSVGILANTCRALEGEFIDIFAQQLAAAGKNLFVVGPLNPLLLPDARSPKHGISKERHECLDWLDLQPPASVVYVSLGSTSSLRDEQVEELASALRDSKQRFIWVLRDADRANIFADHGESPRHAKFLPEFAEHTQDRGLVITGWAPQLEILAHGATAAFLSHCGWNSIMESMGHGKPILAWPMHSDQPWDAELVCKHHKAGILIRPMEKQREVISAAAIQEAIEKMMVSDEGYKIQQRAMALGQAIRASAAVGGGSENKDLDKFIAHISR

SEQ ID NO: 7224 - protein, 397 aa, Zea mays
  VARIANT 66..397: note = Derived polymorphism lacks residues 66 to 397
  VARIANT 74..397: note = Derived polymorphism lacks residues 74 to 397
MDPTNQRSSGAGRRRSVAAAKGHGQQHVPAPTSLRSPSSPDSQQVQSPNPPWNFYPPNGFVNLINQPYMPMPSQPLGENFHFVGLTQNFNTSPPPPPPPNAKRTQKPSRLAKGTIQIDGDGDATTEESKAVKKRYWTHDEEVRLASAWLNCSNDPIHGNDKKGETFWKEIAEYFNKHAPADRQRDVNQLKIHWTRLKTVINNFNGCWSAVSKMHTSGYSDDQLMDEAQKMYANGNNGKPFTLVHWWKTLRNEPKFCAQISQMDKEKGQSHTIDITEDRDLLPSQRPIGRDAAKAQRNGKRKAEEVLDGIARLGDSINKIVEVQQDRKQEREKVAETQLEISRLQLKAAQEQKEAKLLEVYSSLLQQDTSQLSDQGKINRERTLQKMELKLFGDNAED

SEQ ID NO: 7225 - protein, 392 aa, Zea mays
  VARIANT 99..392: note = Derived polymorphism lacks residues 99 to 392
MALRVSPVSHGAAAAPLPPLARRRMARGVVVAMASTINRVKTVKEPYTPPREVHRQITHSLPPQKREIFDSLQPWAKDNLLNLLKPVEKSWQPQDFLPEPSSDGFYDEVKELRERANEIPDEYFVCLVGDMVTEEALPTYQTMLNTLDGVRDETGASPTTWAVWTRAWTAEENRHGDLLNKYMYLTGRVDMKQIEKTIQYLIGSGMDPGTENNPYLGFLYTSFQERATFVSHGNTARHAKEYGDLKLAQICGTIAADEKRHETAYTKIVEKLFETDPDYTVLAFSDMMRKKITMPAHLMYDGKDDNLFEHFSAVAQRMGVYTAKDYADILEFLVQRWKVADLTGLSGEGRRAQDFVCTLAPRIRRLDERARARAKQAPVIPFSWIYGRKVQL

SEQ ID NO: 7226 - protein, 436 aa, Zea mays
  VARIANT 280: note = Ancestral polymorphism is R, Derived polymorphism is I
MAEAQALVPAQGPDEAPLDASAIHSRVEQLSLKRLEVEPEAEVAEDEVALGLDSTHKAAQDAMDEWDSATAAVSIDDLDASLLSIVFLLRMHHLQITMPLLWSDAYLEQLRKDVAMAEQGNQKVSGEISVTAETTFNDMIQLDVGIEMLESLISNLGPKALNHFDESSVLGLSDSTDSCRNRSIADKDYIYELELDHQIEKSTMELEILQHLQRDDEMFQLESKLLPFGAKILDFKDDCLRMFLKAPILTSDCEIYGQKFNCSIDSFISDHELLIEIDKINMEPKKVQIIPDDMSVDILIERMESSRDTVCSPTLIWLIQQCQHQSIINALRRSLVNDANSSRHCFEYLNKKEMIVAHLDRGIDVSIKMSSDWPLCSYGLKLISIRNAGDRPTNIASTILCKTKELANELEPQIRQHLLTLVDAVEDIIIRELRSR

SEQ ID NO: 7227 - protein, 190 aa, Zea mays
  VARIANT 171: note = Ancestral polymorphism is A, Derived polymorphism is V
  VARIANT 146: note = Ancestral polymorphism is N, Derived polymorphism is Y
  VARIANT 101: note = Ancestral polymorphism is P, Derived polymorphism is S
  VARIANT 99: note = Ancestral polymorphism is G, Derived polymorphism is C
  VARIANT 84: note = Ancestral polymorphism is E, Derived polymorphism is K
  VARIANT 66: note = Ancestral polymorphism is P, Derived polymorphism is S
MVAYKHLQQSTDEVALFYCDLLAAFSSRGLKDRATEFHLELRSMPPLSGRKAYAAMVKSLCLLGMPAEAETALSEMVSRGHRPEAAQFGAVARCYGRVGSPADMERVIASMADAVLSCYSACHARTLAWLKRMRKLRVAVTAKGYNLVLNSCPSLASVVRELGPELPLSTVGLVGRLRACTHFQFIVSFT

SEQ ID NO: 7228 - protein, 307 aa, Zea mays
  VARIANT 51: note = Ancestral polymorphism is A, Derived polymorphism is V
  VARIANT 53..307: note = Derived polymorphism lacks residues 53 to 307
  VARIANT 89: note = Ancestral polymorphism is N, Derived polymorphism is I
  VARIANT 115..307: note = Derived polymorphism lacks residues 115 to 307
  VARIANT 169..307: note = Derived polymorphism lacks residues 169 to 307
  VARIANT 243..307: note = Derived polymorphism lacks residues 243 to 307
MSVASPASPTSPPAPASPRRVIVSHRLPLRASPDPAAPFEFAFSVDTGTVAYQLRSGLSANAPVLHIGTFPAAAAEAASDELSDYLLANFSCLLVYHPTDLHHCFYHGFCKHYLWPLLHYLLPLTSSSLGGLPFQRTLENPVNYQQQEDLLGQSKKADDMSRVAGLDNQGIVGLQRQIMKDIDLVGTDLEQDLSMCFKEDSSGRIFFGDQGVPSQQSTLFVPLYGKLQTYAVNVDKSCIGHKCLEGTSFKALVDSGTSFTSLPLDVYKAFTMEFDKQMNATRVPYEDTTWKYCYSASPLEMPDVPTI

SEQ ID NO: 7229 - protein, 213 aa, Zea mays
  VARIANT 207: note = Ancestral polymorphism is L, Derived polymorphism is I
MYSDQISTGRKRSIHDRLDGDLPAGTGAGGRVRHTVSKRQRQIDEKWKHDLYREDDEPASKSTDPKDLRLKLQRRSFQQDFTSTRSSGVRDLREKLSGIMNPQPSNADPPKPKPKPVSEVVNISRRQIADEMHARQNKKPPKQTSSKKTSQPKAESPLDSFLSSLGLEKYSITFQAEEVDMAALRHMTDSDLKALGIPMGPRKKIILALESRA

SEQ ID NO: 7230 - protein, 90 aa, Zea mays
  VARIANT 1: note = Ancestral polymorphism is M, Derived polymorphism is I
  VARIANT 8: note = Ancestral polymorphism is S, Derived polymorphism is L
  VARIANT 12: note = Ancestral polymorphism is P, Derived polymorphism is L
  VARIANT 14: note = Ancestral polymorphism is A, Derived polymorphism is V
  VARIANT 21: note = Ancestral polymorphism is V, Derived polymorphism is A
  VARIANT 26: note = Ancestral polymorphism is R, Derived polymorphism is H
  VARIANT 30: note = Ancestral polymorphism is R, Derived polymorphism is H
  VARIANT 38: note = Ancestral polymorphism is P, Derived polymorphism is L
  VARIANT 44: note = Ancestral polymorphism is S, Derived polymorphism is F
  VARIANT 45: note = Ancestral polymorphism is V, Derived polymorphism is I
  VARIANT 51: note = Ancestral polymorphism is A, Derived polymorphism is V
  VARIANT 56: note = Ancestral polymorphism is S, Derived polymorphism is L
  VARIANT 63: note = Ancestral polymorphism is P, Derived polymorphism is H
MSVASLASPTSPPAPAPPRRVIVSHRLPLRASPDSAAPFEFAFFVDTGTVVYQLRSGLPVNAPVIHIGTLPAAAAEAASDELSDYLLANF

SEQ ID NO: 7231 - protein, 278 aa, Zea mays
  VARIANT 177..278: note = Derived polymorphism lacks residues 177 to 278
  VARIANT 23: note = Ancestral polymorphism is R, Derived polymorphism is H
MCHATVIEGGFLHLPPSACLDIRAFYLCLSSCSATTPMELTLAYHPAIRSTTQGLNDRALPPATPTKVTLHHVAVDPYASADRVAAAEGARFEVLAAAGEEVAAEGIFSTRREGVARGVRRALASPEVCVVEVVVLMEGGVLMQDRAHAAGRGQMRCGTTRLEGIPEEDATTGLYGWCHCECDNDEWEVVGDAEEEEQEVEMETESGANSIVCVAADPRRRIGVGEQFLEFERVAEPNASMGTLHVTETRSRSQAMRAMRQHDEDHLSSALALLVVIL

SEQ ID NO: 7232 - protein, 337 aa, Zea mays
  VARIANT 4: note = Ancestral polymorphism is R, Derived polymorphism is L
  VARIANT 7: note = Ancestral polymorphism is G, Derived polymorphism is V
  VARIANT 43: note = Ancestral polymorphism is Q, Derived polymorphism is E
MALRNGGGGGGACPAAVVLVAAAVAALLGAGVAAATKFDDVVQPSWANDHVVYDGDLLKLRLDSSSGGGFVSRTKFLYGKASADLKLVPGDSAGVVTAFYLSSAGDKHNEFDFEFLGNVTGEPYLVQTNLYIDGVGNREQRIDLWFDPTADFHTYAVLWNPSQVVFMVDDTPIRVYENATLHQGHGHGHHRHGGAAAEANGTNTTTTTLAAAPAPFPGPQPMAVYSSIWNADDWATQGGRVKTDWSHAPFEATFREVRVDGCAWAGNATDGDAAEARRCSESSWGKEGRYWWKEKEMSELSVHQSHQLVWARAHHLVYDYCVDTDRFPVQPPECAGR

SEQ ID NO: 7233 - protein, 341 aa, Zea mays
  VARIANT 4: note = Ancestral polymorphism is R, Derived polymorphism is L
  VARIANT 7: note = Ancestral polymorphism is G, Derived polymorphism is V
  VARIANT 43: note = Ancestral polymorphism is Q, Derived polymorphism is E
MALRNGGGGGGACPAAVVLVAAAVAALLGAGVAAATKFDDVVQPSWANDHVVYDGDLLKLRLDSSSGGGFVSRTKFLYGKASADLKLVPGDSAGVVTAFYVTVVGRGQAQRVRLRVPGQRDRRAVPGADQPVHRRRGQPGAAHRPVVRPHGRLPHVRRAVEPQPGGVHGGRHAHPGVRERHAAPRPRPRPPPARRRGGGGQRHQHHHHHAGCCPGAVPRAAADGRVQLHLERGRLGDAGRAREDGLVARAVRGHVPGGARGRVRLGGQRHGRRRRGGAPVQRVLVGQGGPLLVEGEGDVGAERAPEPPARVGARAPPRLRLLRRHRPLPRAAARVRRPLSS

SEQ ID NO: 7234 - protein, 653 aa, Zea mays
  VARIANT 500..653: note = Derived polymorphism lacks residues 500 to 653
MASQKSCLLITFSQEIVDGVPLFVSSNCLPVKALKYEPAGYSFHAAAMKLLGLAEHEDIETDDHSVSSDDKSQDFNTASDTFSSKGKKKSSGSQQQDHYALLGLGHLRFLATEDQIRKSYREMALKHHPDKQAALILAETTEEAKQAKKDEIESHFKSIQEAYEVLIDPTKRRIYDSTDEFDDDVPTDCAPQDFFKVFGPAFMRNGRWSVTQPIPSLGDDTTPVEEVDKFYNFWYNFKSWREFPDDDEYDLEQAESREHKRWMERQNAKLQEKAKKVEYARVRTLVDNAYKKDPRIQRRKEEEKAEKQRRREAKYLAKKLQEEEAAKAVEEERLRKEEESKKAAEAALHQKKLKEKEKKLLRKEKTRLRTLAAPVIADSHFGLSEANVESACASLDMEQLKKLCDGMDGKDAAGKAWLLSNVLPNESSSKEAKKIEGNGVEPSAPKSNSTGGRATEGSSSILNSYEKKERPWGKEEIEMLRKAIQKYPKGTSRRWEVVSEFIGTSRSVEEILKATKTVLLQKPDSSKAFDSFLEKRKPTQSIASPLSTRDEISSTEGAGTASSKSAAQSASSQTANEKAAADPVTDGGPSVSDPDAWTDAQVLALVQALKAFPKDASQRWERVAAAVPGKTVVQCKKKVAAMRENFRSKKSGE

SEQ ID NO: 7235 - protein, 268 aa, Zea mays
  VARIANT 122..268: note = Derived polymorphism lacks residues 122 to 268
  VARIANT 85..268: note = Derived polymorphism lacks residues 85 to 268
  VARIANT 70: note = Ancestral polymorphism is R, Derived polymorphism is C
  VARIANT 36: note = Ancestral polymorphism is S, Derived polymorphism is N
  VARIANT 6: note = Ancestral polymorphism is E, Derived polymorphism is G
MQGRYEIMRNYMPKVGTLDLDMMFRTCTVQVNLDFSSEHDMIRKFRVGLTLQPVCPVLLVDEEPDKCCIRLVSCKLERSLLMKAQNDKLSGKSNGNSHVIYAKTVSKMIITPTKVRVLDPNERGSMEQGLEVEEVEVVERVVADERLVEWEVSREDGGDGEVDTVLEAEQKIEVEEAGVDYDGWEAMAREGCGEAGGCGGLSDAGLAGGTQLHPSDVPSRRPSRTQQVIKEARGGGEREGQAGPAVEEVCVGGGGGGGECDMTDVRRE

SEQ ID NO: 7236 - protein, 303 aa, Zea mays
  VARIANT 146: note = Ancestral polymorphism is N, Derived polymorphism is I
MDPSYHGGGAAGGSADDHGQILWDWTEQHCEPNDSSHADATKFVWDCLNQDDNELLGLLGNQTPLRYCRDFFADLDDITCKETLDLEESRESKRRRTLEYPLESSQSEVGTHETGSPFVTPEVAEISLLCTDKPQSLNCGMHHTLNNLDEAPYQQEDILLEHCSYGTAVYLEPDQTPCSQQSIACTNDQAGISGTSEIAPMTESFIMQETRKLSTLKVSNGASSSLVTKDNLTTSVAYPFTLIKPSWQEGDVTLQDINRRIRPPKKAPEILGTSAFSGKPVINKTRIRTEGGKGSITILRTKG

SEQ ID NO: 7237 - protein, 493 aa, Zea mays
  VARIANT 116..493: note = Derived polymorphism lacks residues 116 to 493
  VARIANT 160: note = Ancestral polymorphism is N, Derived polymorphism is T
  VARIANT 216: note = Ancestral polymorphism is A, Derived polymorphism is T
MAGRLRAPVHRLPPVHAAQCSVDAAEGPLPDLSRGRRRRLESDIAVDAGDGVCTEPHFAPTRIIPWSPSFNQRTEVLDRAIVLTVTVAINEAVEEAILDSFARRLALVHDSLSMCRLGPACLLLILPSLEMADRAFDGGRIVNLSPTTKIHVMRWSRTLNSSAAASLPFQVEIEVSGIPAHAWELETVHALLNQWCWIADLHPDCERQREVFKVTAWCSSPGSIPKEFKLEIVDPVTTDGGMLRRSLVYPIRVSVKVLDRPDMLQSLQPSPPPAEDDLDQGRRRRRRRSRRSSFGINAPGKGSTTAVLPRVSVHQRLGPRVQACGKEGVRVPSLAVHKRLGPLGIFNADKGAVKKMKRVWIPKRKLESSVSVWIPKTSSALVSPLPVAVDDAFLEATSSTVVTEDTLAGSPEVIPVDGGICSEAAIISDAPARFPMVESNLQDVNVLSEGVGLPLVESDLQNIHLMESSLSRKHLMSPSLCYNFFSFGDWFGC

SEQ ID NO: 7238 - protein, 45 aa, Zea mays
  VARIANT 19: note = Ancestral polymorphism is D, Derived polymorphism is G
MGYMDPECMVTGRANAESDVYSFGVVLLEIACGRRPLVPRHGVGM

SEQ ID NO: 7239 - protein, 234 aa, Zea mays
  VARIANT 52: note = Ancestral polymorphism is S, Derived polymorphism is I
  VARIANT 176: note = Ancestral polymorphism is M, Derived polymorphism is T
MELKRVLVAPTAARRAPTVPPTTSGATALPPAGLGLLPPLPEAIPWPSSVLSKLLSAGVQTHVAAVEQAVVKDATKLEAPVVVVTGASRGIGKATALALGKAGCKVLVNYARSSKEAEEVSKEALDKWGTIDVLVNNAGITRDTLLMRMKKSQWQDVIDLNLTGVCLCTQAATKVMMKKKKGKIINIASVVGLTGNVGQANYSAAKAGVIGFTKTVAREYASRNINVSTFIFSL

SEQ ID NO: 7240 - protein, 124 aa, Zea mays
  VARIANT 100..124: note = Derived polymorphism lacks residues 100 to 124
  VARIANT 81: note = Ancestral polymorphism is R, Derived polymorphism is W
  VARIANT 75: note = Ancestral polymorphism is G, Derived polymorphism is S
  VARIANT 53: note = Ancestral polymorphism is E, Derived polymorphism is K
  VARIANT 22: note = Ancestral polymorphism is V, Derived polymorphism is M
  VARIANT 7: note = Ancestral polymorphism is V, Derived polymorphism is A
  VARIANT 6: note = Ancestral polymorphism is M, Derived polymorphism is I
MAVEVMAMVTAVISIIHMEGVVHTDAEYKLKTRSLKTMIVRKDLMRIPLQMMKCLVGVIITDMLTLKIETVIMGSVIEMTWTILPKSSWMFLNLLGKKVQMNILIGLSSVIKFLELTIFQINIE

SEQ ID NO: 7241 - protein, 202 aa, Zea mays
  VARIANT 45: note = Ancestral polymorphism is A, Derived polymorphism is V
MRTRTPAWGREAKPSSARADHHMTMEPAADGNDVHGKRRDGGQHAPVVSLRALGLADADAFMAWASDREMRHLKQPLCATREQAMAHIRDTVLGHPWFRAVCVSDSPVGQVSVWPYADEGGRRANLGYALAHDQWGWGIAVAAVRMVVGRVFDDLPGLERLEAVTDVVNVRSQRVLEKVGFHREGCCAGTSPDAAAAGPEMR

SEQ ID NO: 7242 - protein, 262 aa, Zea mays
  VARIANT 184: note = Ancestral polymorphism is P, Derived polymorphism is L
  VARIANT 187: note = Ancestral polymorphism is L, Derived polymorphism is F
  VARIANT 188: note = Ancestral polymorphism is P, Derived polymorphism is S
  VARIANT 191: note = Ancestral polymorphism is L, Derived polymorphism is Q
  VARIANT 198: note = Ancestral polymorphism is A, Derived polymorphism is D
  VARIANT 217..262: note = Derived polymorphism lacks residues 217 to 262
  VARIANT 225: note = Ancestral polymorphism is T, Derived polymorphism is I
  VARIANT 226: note = Ancestral polymorphism is G, Derived polymorphism is R
  VARIANT 227: note = Ancestral polymorphism is H, Derived polymorphism is Y
  VARIANT 230: note = Ancestral polymorphism is C, Derived polymorphism is Y
MAHVLPSPHAAAAPTAHPAPSLHTPRDPPASSSPRPQHPPPMAAATPAQGKLLPKSAHGYKISSVQPLAWHKCSDLDPADKISQIPQTSSSERISQPHARIPQPRRSRSFHPRGSPSRSFRPREDPPAVPFILADPSALDRIPLIAATINALLPHEIDGARVEGVGRRCAAAINDVLPICSVILAILPGCQSVFGSPAEAQIYLNGFPMKHHLVAHWHHLCSVETGHLLCWLLTLRTFLVRNCYLVGCSPMQWCCRNFILLQ

SEQ ID NO: 7243 - protein, 322 aa, Zea mays
  VARIANT 279..322: note = Derived polymorphism lacks residues 279 to 322
  VARIANT 224..322: note = Derived polymorphism lacks residues 224 to 322
  VARIANT 221..322: note = Derived polymorphism lacks residues 221 to 322
  VARIANT 184: note = Ancestral polymorphism is P, Derived polymorphism is L
  VARIANT 112: note = Ancestral polymorphism is T, Derived polymorphism is N
  VARIANT 95..322: note = Derived polymorphism lacks residues 95 to 322
MALSISSLAADLSHLSLPSTSTPKPHPAPLLRLRSTYRRAVSLVLRASTGKAAEAFEAGLPAEEVMAVEEEEEDALSGIVLQKYVKQRCRAGGHRQGLHQLSRLCNVRGRSTLWALIHQDDRQRVRDGTAFAAFPVSSFTVVVALAAEVLPPPQPPPPPPPACVLEMFSEEEIAVAEDSDEIVPVMEPVSIVGTSGQMEKEVSAARDVRAMKDHIDLEASQSQQPRKLPPKDLKEIARSFWLTASMFSKKWQKWRGKQKLKAGGKENRGSDPPPRHEVQGRRVRCHRPRVFSEPWPDLRVRGYNGRMQRSFCLTWFSTIVAL

SEQ ID NO: 7244 - protein, 152 aa, Zea mays
  VARIANT 38: note = Ancestral polymorphism is R, Derived polymorphism is S
  VARIANT 45..152: note = Derived polymorphism lacks residues 45 to 152
  VARIANT 70: note = Ancestral polymorphism is C, Derived polymorphism is W
  VARIANT 72: note = Ancestral polymorphism is E, Derived polymorphism is K
  VARIANT 77: note = Ancestral polymorphism is G, Derived polymorphism is V
MAGVYVGNLDSRVTSGELEDEFRVFGVLRRRDAEDAISDLDGKNGWRVELSRNSSGRGGRDRYGGSESKCYECGETGHFARECRLRIASGGLGSGRRRSRSRSRSRSGSPRYRRSRSRSRISVDEAHAFIYMNIFLTMFFFFLFSCHANQWV

SEQ ID NO: 7245 - protein, 563 aa, Zea mays
  VARIANT 190: note = Ancestral polymorphism is G, Derived polymorphism is W
MLRCGARPDAFTLPLLNRASAPLTSLVGAAHCFGIRVGFGGNVYFGNTLLKAYAQHGMVAAARLVFDEMRARDVVSWTTLVSAYVNAEDIWEVSRLLTAMRTHGRCEPSAVTLSVVFRLCTALRDTASGKQLQCYAVKRGWAGDFLVLNSMLTHMSRTSSLGDAEMLFKQSPSRDMVSWNIIISEYSSEGNVSKVISLYVAMIEEEVCPSSETLTAVVSVFARHKFLPHGKKLHSFAIRSGLMDTILVASFVDLYAKCGELVSSIQLFEEFNGGSKYLWSAMIWAFIYHGMFLDAIHLFERMMGSFYFPNADILRGLLVSYTEIDALRCGKATHGYIIRNNYAAESESCALDTALVKLYARCGDIHLAERCFSRTLQKDIVSWSSMIEAFTIHGHGKQALTLFNQMLKEGVKPNEVTFLSLLSACSHSGLVSEARELFDCMTKKFRFAPELGHYTCMVDVLGRSGNLEEALQVISNMKVKADGRIWGALLGSCRIHSNSKLAYFAAQKLVELEPSNVGYHVLLSNIQAGGDRWAEVEDIRSSMEVMNMEKSPAWSCISDIGVP

SEQ ID NO: 7246 - protein, 283 aa, Zea mays
  VARIANT 127: note = Ancestral polymorphism is R, Derived polymorphism is W
  VARIANT 213..283: note = Derived polymorphism lacks residues 213 to 283
MMRRWTPLTTASTTATSSASGTTVTSARPPVTPPPSPCPGPAAGRSVCRKTTLHRLRHATETEEAMRRRLARQPTVAPMSSTPPRCTFLIVGVLLEPGHLTSKSDVYSFGVVLLEMLTGRRSMDKKRPTGEQNLVAWARPYLNDRRRLYQLVDPRLGLNYSVKGVQKVAQICHYCLTRDSKSRPSMDEVVKQLTPLQDLNDMASASPRPRSTQRDGLTYSIRILLELAIRNCDNFLGLGEKCTETSQNLIQARLYPLACYLIRLLGIVDDDHVELNNLHRQVK

SEQ ID NO: 7247 - protein, 633 aa, Zea mays
  VARIANT 254: note = Ancestral polymorphism is Y, Derived polymorphism is D
  VARIANT 452: note = Ancestral polymorphism is V, Derived polymorphism is E
  VARIANT 552..633: note = Derived polymorphism lacks residues 552 to 633
MRPAEGAARLVCLLLLAAVAAGHAGVQPLARIAIHRARFALDASAAVRASPELLGTKGEDTAWVKVDLVTPHPGADDWVGVFSPSKFNASTCLGSHGSGPGPVICSAPIKYQFANYSSGYGESGKGALQFQLINQRQDFSFALFTGGLSNPKLIAVSNAIAFANPKAPVYPRLAQGKSWNEMTVTWTSGYESDEAYPFVEWGMKWSPPVRSAAGTVTFDRESVCGEPARSVGWRDPGFIHTAFLTDLWPNKEYYYKIGHMLPDGSVVWGKLSSFKAPPFPGQKSLQRVVIFGDMGKAERDGSNEYSNYQPGSLNTTDTLVKDLDNIDMVFHIGDITYANGYISQWDQFTQQVEEITSRVPYMVASGNHERDWPNSGSFFNGTDSGGECGVVAETMYYTPTENRANYWYSADYGMFRFCVADSEHDWREGTEQYEFIESCLATVDRKKQPWLVFIAHRVLGYSSGFFYGVDGSFAEPMSRQSLQKLWQKYRVDLAFYGHVHNYERTCPVYEEQCMSSEKSHYSGTMNGTIHVVVGGGGSHLSNFTAQRRPGVRQLHDAQGVQGLAGVRQGQLPSDFASDVTCIAAAREEQRGDRGRFCDSGLGSTSACNCNCLIRWSSETHIINPTLNKEHVDP

SEQ ID NO: 7248 - protein, 97 aa, Zea mays
  VARIANT 80..97: note = Derived polymorphism lacks residues 80 to 97
  VARIANT 77: note = Ancestral polymorphism is P, Derived polymorphism is L
  VARIANT 50: note = Ancestral polymorphism is G, Derived polymorphism is R
  VARIANT 40: note = Ancestral polymorphism is M, Derived polymorphism is I
  VARIANT 36: note = Ancestral polymorphism is S, Derived polymorphism is L
MGLYWWRTPAYVLMRSKAYQDPTCLNNLLKAYEDKSAFAMCIFSLALGPGEEPITFVGKTVGKIVPARGPNDFGWDPVFQPDGFEQTYAKMPKSVKN

SEQ ID NO: 7249 - protein, 85 aa, Zea mays
  VARIANT 66: note = Ancestral polymorphism is M, Derived polymorphism is R
  VARIANT 60: note = Ancestral polymorphism is M, Derived polymorphism is V
  VARIANT 59: note = Ancestral polymorphism is M, Derived polymorphism is I
  VARIANT 45: note = Ancestral polymorphism is D, Derived polymorphism is G
  VARIANT 44: note = Ancestral polymorphism is T, Derived polymorphism is I
  VARIANT 43: note = Ancestral polymorphism is K, Derived polymorphism is N
  VARIANT 37: note = Ancestral polymorphism is A, Derived polymorphism is T
  VARIANT 36: note = Ancestral polymorphism is R, Derived polymorphism is K
  VARIANT 35: note = Ancestral polymorphism is H, Derived polymorphism is R
  VARIANT 18..85: note = Derived polymorphism lacks residues 18 to 85
MLASEFPLLMNSRSSLPRLVTLCDQTPSTPFDVVHKARLKLSKTDVAVKVQHPGAEHLMMVDIRNRQAMALFCKISKQLFYIISC

SEQ ID NO: 7250 - protein, 270 aa, Zea mays
  VARIANT 66: note = Ancestral polymorphism is R, Derived polymorphism is K
MDIWFQICSSIISSCQLGRRHVYFHSCAPILASSIVSFWCTADLVCVKCIRLSQVGDFRLCSLQPRRRRRRRSVHGGHLLHGRIDATARYGYLELAIEQMAKTADASNALNHGLHYLRSTGNACAARVLLWWGWENSDAHAGMSSSVELSLFLPPSVNFLDSCLLRQLHVLTANVAATHRLLCSSSGEHPLLEPPWRSATGRHDNSSPSDASRLFDEMYKLNFIVTDGTCEAEFFCFDSIARKIVGKPCHNLVTAVTTSQGPPADLAAVM

SEQ ID NO: 7251 - protein, 216 aa, Zea mays
  VARIANT 13: note = Ancestral polymorphism is D, Derived polymorphism is V
  VARIANT 15: note = Ancestral polymorphism is A, Derived polymorphism is V
  VARIANT 43..216: note = Derived polymorphism lacks residues 43 to 216
  VARIANT 56: note = Ancestral polymorphism is E, Derived polymorphism is K
  VARIANT 60: note = Ancestral polymorphism is V, Derived polymorphism is A
  VARIANT 71: note = Ancestral polymorphism is A, Derived polymorphism is G
  VARIANT 82: note = Ancestral polymorphism is E, Derived polymorphism is K
  VARIANT 119: note = Ancestral polymorphism is T, Derived polymorphism is N
  VARIANT 127: note = Ancestral polymorphism is A, Derived polymorphism is T
  VARIANT 134: note = Ancestral polymorphism is R, Derived polymorphism is H
MVGMGQKDAYVGDEAQSKRGILTLKYPIEHGIASNWDDMEKIWHHTFYNELRVAPEEHPVLLTEAPLNPKAKREKMTQIMFETFNTPAMYVAIQVVLSLYASGRTTGIVLDSGDGVSHTVPIYEGYTLPHAILHLDLAGRDLTDCSFALDCVCSKDIIQNLTERFYLLHNYCIALFVEYYLLGDGLLLLLAGLRTDGLQSIVGAWYQRVHLFTILR

SEQ ID NO: 7252 - protein, 113 aa, Zea mays
  VARIANT 25..113: note = Derived polymorphism lacks residues 25 to 113
  VARIANT 39: note = Ancestral polymorphism is R, Derived polymorphism is M
  VARIANT 66: note = Ancestral polymorphism is Q, Derived polymorphism is R
  VARIANT 73: note = Ancestral polymorphism is L, Derived polymorphism is F
MRSLFECSKSENQEDSCTFELPLTWRTFSVSSICRNVLRRLGAFMLVNLPKKKGVLRLQMLVVCLRLSVIVNLFLLFSINLCLWSCSRNSSQLNMLTCYCGWSRLRIQSRRYT

SEQ ID NO: 7253 - protein, 190 aa, Zea mays
  VARIANT 109: note = Ancestral polymorphism is V, Derived polymorphism is M
  VARIANT 115: note = Ancestral polymorphism is W, Derived polymorphism is S
MARTRVPSHLSILLLLAVLSMCAHSSASAGDDGSSGTGVDDGEGRHARAAATVAELLSAHNAARQAVGVPPLTWSPQIAGYAKDYARSRRGDCTPRRSPLFYFGENLFVGRGRHWNATAMVASWVAEAQWYDYGSNSCAAPPGAGCLRYTQVVWRNTTQLGCARIVCDSGDTFLACDYFPPGNYGTGRPY

SEQ ID NO: 7254 - protein, 343 aa, Zea mays
  VARIANT 276: note = Ancestral polymorphism is L, Derived polymorphism is F
MAPAPEPTAAAAGRKRKKPHGPSKIIAKKSADPKRAYAKKKKEKHKQKEKKSRLKPAEPDQIAATIGDGVAGATVLLSALMQPSRQLEFLLRSFERASKMRLSPLELDSYSEGCMVQLAEGAAQDVESFGDHVKGVFGSSWKEELCEGNHIDGEIAVGSPTLLVISSSALRSLDLLRGLKMFTKECRPVKLFAKHLKVEEQVAMLNARVNIACGTPSRQAILTIPILSYLSFLLCLVHINWAYLDCGTKTIFVSFSKVQNGGSWIKKLIDMEALSLSRLKLVVLDMQKDAKSFTLFTLPQVSNEFWDLYKGYLDPKIREGNMKICFYGAVSERDITKTFSLAE

SEQ ID NO: 7255 - protein, 307 aa, Zea mays
  VARIANT 139..307: note = Derived polymorphism lacks residues 139 to 307
  VARIANT 137: note = Ancestral polymorphism is Q, Derived polymorphism is L
MEADSMVAMGCGGFYWQSPPRFLLEPLDLADIVDSSMYVPTNEADEPVSGLCSSNRPAEDYSSSAEGANSCSAAVVPSPPPPPGVTTTTTRNMDMERTRRRKLNERLYALRSVVPNITKMDKASIVRDAIAHIEHLQEQERRLLAEISVLQSSDDGTAAAAAVKTEDAAATGGAAYDVDSVPWRKKPRAVPLPSVYFTDNPTSSISSSPPVRILEVQVSQAGERVAVVSLWCSRGRDAVGKICLALEPLRLRVVTATITARGDTVFHTLFVETGETGGARLKEAILAALARLNVLANADQVVHELLG

SEQ ID NO: 7256 - protein, 162 aa, Zea mays
  VARIANT 153: note = Ancestral polymorphism is T, Derived polymorphism is I
  VARIANT 126..162: note = Derived polymorphism lacks residues 126 to 162
  VARIANT 114..162: note = Derived polymorphism lacks residues 114 to 162
  VARIANT 109: note = Ancestral polymorphism is A, Derived polymorphism is T
MLHQPAEAFICWPHASRELLSGQLSIRNPNRDIAFFYDRFYLSVEYRGADVVKGQALTAAPLYQPPKTTSALAFQGVAASAASGDMARDAVEAGSRVELTVKVRSRIRARLAFWGNRHWHPLHVGCEVAVGLDGQLLAEYMQKQRSSLGVAATVLCRATDAR

SEQ ID NO: 7257 - protein, 316 aa, Zea mays
  VARIANT 281: note = Ancestral polymorphism is G, Derived polymorphism is D
  VARIANT 261..316: note = Derived polymorphism lacks residues 261 to 316
  VARIANT 196: note = Ancestral polymorphism is A, Derived polymorphism is T
  VARIANT 195: note = Ancestral polymorphism is S, Derived polymorphism is F
  VARIANT 170..316: note = Derived polymorphism lacks residues 170 to 316
  VARIANT 137: note = Ancestral polymorphism is T, Derived polymorphism is R
  VARIANT 133: note = Ancestral polymorphism is G, Derived polymorphism is V
  VARIANT 106: note = Ancestral polymorphism is G, Derived polymorphism is R
  VARIANT 80..316: note = Derived polymorphism lacks residues 80 to 316
  VARIANT 36: note = Ancestral polymorphism is T, Derived polymorphism is I
  VARIANT 31: note = Ancestral polymorphism is E, Derived polymorphism is K
  VARIANT 19..316: note = Derived polymorphism lacks residues 19 to 316
MRKGILTGAAAGVEEVDIQGLGMQERKNLIERLVRTAEEDNERFLLKLRDRMERVGIDNPTVEVRFENLNIDAEAYVGNRGVPAMTNFFSNKVMDVLSAMHIVSSGKRHVSILHDISGVIRPGRMSLLLGPPGSRKTSLLLALAGKLDSNLKVSGRVTYNGHDMDEFVPQRTSAYIGQHDVHVGEMTVRETLAFFARCQGVRTRYDMLTELSRREKEANIKPDPDVDVYMKVKIHLILTKSCVYIGSDKGYSKLFVLLCKQAISVEGQESVVTDYILKILGLEICADTMVGDSMIRGISGGQKKHVTTGICNLQLN

SEQ ID NO: 7258 - protein, 209 aa, Zea mays
  VARIANT 110: note = Ancestral polymorphism is E, Derived polymorphism is A
  VARIANT 71: note = Ancestral polymorphism is V, Derived polymorphism is D
  VARIANT 58: note = Ancestral polymorphism is E, Derived polymorphism is K
  VARIANT 49: note = Ancestral polymorphism is L, Derived polymorphism is P
  VARIANT 35: note = Ancestral polymorphism is D, Derived polymorphism is N
  VARIANT 33..209: note = Derived polymorphism lacks residues 33 to 209
  VARIANT 10: note = Ancestral polymorphism is R, Derived polymorphism is W
  VARIANT 7: note = Ancestral polymorphism is E, Derived polymorphism is K
MVSVASETLRVLELVGCQALKQLCVDAPALESWLDPFKDMPNLEELQLLMNYEGYCLEAVSAFFKLIPLPVLQRLFVRLHIDHKREGEGSSSAAVWSVENDDSEDMAPKEEIVLDQLTFVKFVNFSGTWCQLQLLSFFLDKSPVLHQLVLVTPEGEGALGDDRLKVIHERVAALEKASSEASITVCRPKEDDTPNHPHTRYFHEEYETM

SEQ ID NO: 7259 - protein, 527 aa, Zea mays
  VARIANT 216: note = Ancestral polymorphism is R, Derived polymorphism is M
MEPLPIPHPPAPPPALTSALAHLRSLLSAASSALAALPSPLQPHPITPIACIPSPQSTTTKPPLPPPVTAINLPLPAAPAPYSDCPAVVRLRPSPTSTAISLPAFLAAVCADFSSSTTGPSPSHPPRILPSELSLLRRELDSWATGGHHLPGSYSYAVARVGASFCSDVMPRWEAELRQWVLENSPRYGVKVNVTDADHILVLLCLLLKAMALEARYLLEGMQNVDNEGLGFDPRAMRFECPRLVEGVSWLGAQLGVLYGESNGKLFMLASVKEAVLQMAYCLALCAGDGAASVGGSDAGDVVAGPVFLSQVAASIVALHERFYLEKTKALQAQRPSKYQLLLEYSQALERGILERSNRPNYRAVLEYDGILSRRVENKESARAKTKEELLAEERDYKRRRTSYRGKKVNRNPTEILRDIIDEHMEEIRQAGGIGCLVEAPADIAWNELKGNSHSGAYHGSYDFASSSSHDKTALASRSSNCDNSCAESLGRFSSRSSDTRDSYNNSGCETHRNHYQYISEKEMGGI

SEQ ID NO: 7260 - protein, 191 aa, Zea mays
  VARIANT 134: note = Ancestral polymorphism is M, Derived polymorphism is K
MESKSPSTSCVISPAATPTMSAGESSWAMHIANFLASTPQDGTRVTDGQQPPAVPGGSGSSFSSSSSFDSFSDDASFITSEFMCNDDEDDDESVKDTACSSSAAAQQKATMENFHMKQMAATDAKQFNDRPQLMAKYLEAMSSKQQVTTGADHQAPISSSSAEEKAIHESNELRKRGLCLVPISMLINYLG

SEQ ID NO: 7261 - protein, 469 aa, Zea mays
  VARIANT 37: note = Ancestral polymorphism is G, Derived polymorphism is V
  VARIANT 40: note = Ancestral polymorphism is G, Derived polymorphism is D
  VARIANT 76..469: note = Derived polymorphism lacks residues 76 to 469
  VARIANT 156..469: note = Derived polymorphism lacks residues 156 to 469
  VARIANT 312..469: note = Derived polymorphism lacks residues 312 to 469
  VARIANT 324..469: note = Derived polymorphism lacks residues 324 to 469
  VARIANT 325..469: note = Derived polymorphism lacks residues 325 to 469
  VARIANT 329..469: note = Derived polymorphism lacks residues 329 to 469
  VARIANT 332..469: note = Derived polymorphism lacks residues 332 to 469
  VARIANT 405..469: note = Derived polymorphism lacks residues 405 to 469
MPPRLLLNNVSCMRNAQTVLRDINLSVHDGTALVLTGANGSGKTTLLRMLAGFSRPLAGEILWNGHDITSPGVFQQYKLQLNWMSLKDAVKEKLTVLENVQWFELLEGKDGSRSGPAIQLMELGRLINEKARRMLSMGQRKRLQLARLLAIDRPIWLLDEPSVALDAEGTRLLEHIIAEHREKGGIVFVATHLPIQNLFERSRLPGIWNVDLVALPSVITIEHVKPIFDASGTIHMYELSYETPPDLFDLGDLRDELYFKAFVFPDPSTTGSYIVVLIHEPRSRLSFARPGDDKWTSVGQGFSRPSAGEILWNGHDITSPGVFQQYKLQLNWMSLKDAMKEKLTVLENVQWFELLEGKDSSRSGPAIQLMGLGRLMNEKARRMLSMGQRKRLQLARLLAIDRPIWLLDEPSVALDAAGTRLLEHIIAEHREKGGIVFVAMHLPIQVEDSMSLRLPQRFPRRKTLVDLVH

SEQ ID NO: 7262 - protein, 368 aa, Zea mays
  VARIANT 306: note = Ancestral polymorphism is D, Derived polymorphism is Y
  VARIANT 298: note = Ancestral polymorphism is C, Derived polymorphism is W
  VARIANT 278..368: note = Derived polymorphism lacks residues 278 to 368
  VARIANT 258: note = Ancestral polymorphism is R, Derived polymorphism is H
  VARIANT 153..368: note = Derived polymorphism lacks residues 153 to 368
  VARIANT 133: note = Ancestral polymorphism is F, Derived polymorphism is S
  VARIANT 125: note = Ancestral polymorphism is S, Derived polymorphism is L
  VARIANT 62: note = Ancestral polymorphism is N, Derived polymorphism is S
  VARIANT 40: note = Ancestral polymorphism is A, Derived polymorphism is V
  VARIANT 34..368: note = Derived polymorphism lacks residues 34 to 368
MLMAKCRTLQEENEDIGAMASEGKDFEFWCMSLQACVLPAPRRSFCGNYARVVNQILQGLTNMHLWIRLPLENSKPMDDDLDKIKNNSHTSEIIDSWELWNSFRLLCDHSSQLCVVLDILSTLPSINSLARWFGEPVRAAILQTEAFLTNAKGYPCLSKRHHSLLTGFFKHSIQYKNTLPSSVTLRILMALTFLLVQPLMDNLEVQTYEIFEKDVVKYTQIIASADGCGSRTGTSSMSIVAVDLNKTLTLQAAEETGRKLKVYDVEKNPNAVITLHSLIKLEGCESLVTVISTSDMRCWDAPEKADVLFVYCCNKLGLDSSKVNVNGGAIALGHPLGATGARCVATLLNEMKRRSRDCRFGVVTMCIG

SEQ ID NO: 7263 - protein, 123 aa, Zea mays
  VARIANT 91..123: note = Derived polymorphism lacks residues 91 to 123
MSLRPSEREQMRKGNYKQTVDAEESRHRREGQMMDMRKAKCEESLQKKRRDGFPASAAGMPPMVHSTALQQKRDGFPAMAHAVHSNDPSVQLEATTQFRKLLSIARSPPNRRGDQHRSGAAIH

SEQ ID NO: 7264 - protein, 67 aa, Zea mays
  VARIANT 21: note = Ancestral polymorphism is V, Derived polymorphism is I
  VARIANT 27: note = Ancestral polymorphism is L, Derived polymorphism is F
MVWFGWHLVLRSLPFPCHPFIIYIHFLEIKFDVKRNLSFFHSPTHLRSLILMGGPCFHHAASFYLIK

SEQ ID NO: 7265 - protein, 376 aa, Zea mays
  VARIANT 103..376: note = Derived polymorphism lacks residues 103 to 376
  VARIANT 104: note = Ancestral polymorphism is D, Derived polymorphism is V
  VARIANT 110..376: note = Derived polymorphism lacks residues 110 to 376
  VARIANT 133..376: note = Derived polymorphism lacks residues 133 to 376
  VARIANT 258..376: note = Derived polymorphism lacks residues 258 to 376
  VARIANT 286..376: note = Derived polymorphism lacks residues 286 to 376
MCAPIPPRTAQLLVLLSTSHPSTPRRLAAVSPKRPSQRSRDGEGRRAQRRVAGTSIGCTISWWSATVTQTAWLVSTACDIIARKERHGMVVSCPFLLYLVSSQDKAAQVRSICKPLKPLGIHSVSLHPGASIEHQISGLKTCEPEFLIATPERLLNLVSLKAIDISGTLRDVRSHSAKNHPTARAPVDLPPLHSLTVGGCLAEATQPAHPRWRRATGAEEGRGDFDRLSKFLVVCLNAIRDAVAPEEGGNSIHGTGDWGVEFWRCCSAQASSDVLDASGACATVTQTAWLVSTACDIIARKERHGMVVSCPFLLYLVSSQDKAAQVRSICKPLKPLGIHSVSLHPGASIEHQISGLETCEPEFLIATPESFLILFR

SEQ ID NO: 7266 - protein, 685 aa, Zea mays
  VARIANT 357: note = Ancestral polymorphism is R, Derived polymorphism is W
MAAAEENSSLFLIFILTMIALPLVPYTILRLCRAASEKAKTIHCRCSGCHRSGKYRKSIYKRISNFSTCSNLTILLLWIVMIFLVYYIKLVSREVQVFEPFSILGLEAGASESDIKKSYRRLSIQYHPDKNPDPEAHKYFIEYISKAYQALTDPISRENYEKYGHPDGRQGLQMGIALPKFLLNIDGASGGIMLLGIVGFCILLPLMIAVIYLSRSSKYTGNYVMHQTLSTYYYFMKPSLAPSKVIDVFIKAAEYMEMPVRRSDDEPLQKLFVAVRSELNLDLKNIKTEQAKFWKQHPSLVKMELLIQAHLTCESFALTPALLKDYRHMLELAPRLLEELVKIAVLPRNPHGFGWLRPALSVIELSQNIIQAVPLSARKASGANSEGIAPFLQLPHFTEATVKKIARKKIRAFQELCDMPVEDRAALLTQVAGLSEEQARDVEFVLEMIPSIEVDMKCETEGEEGIQEGDVVTMYAWVSLQRRNGLTAALPHCPNFLFHKEENFWLLLANVASNDVWLSQKVSFMDEATAITAASKAIQETQEALGASAKEIGNAVREAVDRVKKGSRLVMGKFQAPAEGTHNLTSFCLCDAWIGCDTKTSFKLKVLKRSRAGTRGHVPEEGPVAAAEDGIEEEEEEEEEEYDDYESEYSDDEEDAKNKGEGKGKVVNGSAHQGAESDIDSGSDE

SEQ ID NO: 7267 - protein, 144 aa, Zea mays
  VARIANT 5: note = Ancestral polymorphism is R, Derived polymorphism is Q
  VARIANT 7: note = Ancestral polymorphism is P, Derived polymorphism is S
  VARIANT 10: note = Ancestral polymorphism is R, Derived polymorphism is W
  VARIANT 22: note = Ancestral polymorphism is A, Derived polymorphism is T
  VARIANT 24: note = Ancestral polymorphism is T, Derived polymorphism is M
  VARIANT 38: note = Ancestral polymorphism is T, Derived polymorphism is I
  VARIANT 54: note = Ancestral polymorphism is R, Derived polymorphism is C
  VARIANT 77: note = Ancestral polymorphism is P, Derived polymorphism is L
  VARIANT 81..144: note = Derived polymorphism lacks residues 81 to 144
  VARIANT 82..144: note = Derived polymorphism lacks residues 82 to 144
  VARIANT 89..144: note = Derived polymorphism lacks residues 89 to 144
  VARIANT 101: note = Ancestral polymorphism is T, Derived polymorphism is I
  VARIANT 107..144: note = Derived polymorphism lacks residues 107 to 144
  VARIANT 109: note = Ancestral polymorphism is F, Derived polymorphism is S
MPPLRPPPPRLLLNNVSYMRNAQTVLRDINLSVHDGTTLVLTGANGSGKTTLLRMLAGFSRPSAGEILWNGHDITSPGVFQQYKLQLNWMSLKDAVKEKLTVLENVQWFELLEGKDDSRSGPAIQLMGLGRLMNEKARRMLSMG

SEQ ID NO: 7268 - protein, 222 aa, Zea mays
  VARIANT 90: note = Ancestral polymorphism is S, Derived polymorphism is L
MAGASLLSPSCTLLRLIPSASHFKRFDRVRRFAPAAMATSSGPKEAPANNPGLQTEVDPATKGYFLQQTMLRVKDPKVSLDFYSRVMGMSLLKRLDFEEMKFSLYFLGYEDVTLAPDDHIKRTEWTFRQKATLELTHNWGTENDPEFKGYHNGNSDPRGFGHIGVTVDDVHKACERFERLGVEFVKKPDDGKIKGIAFIKDPDGYWIEIFDQTIGTVTSSAS

SEQ ID NO: 7269 - protein, 454 aa, Zea mays
  VARIANT 53: note = Ancestral polymorphism is A, Derived polymorphism is V
  VARIANT 61: note = Ancestral polymorphism is Q, Derived polymorphism is R
  VARIANT 115: note = Ancestral polymorphism is G, Derived polymorphism is D
  VARIANT 150: note = Ancestral polymorphism is G, Derived polymorphism is S
  VARIANT 239: note = Ancestral polymorphism is E, Derived polymorphism is G
  VARIANT 256..454: note = Derived polymorphism lacks residues 256 to 454
  VARIANT 271: note = Ancestral polymorphism is G, Derived polymorphism is S
MATFSKASRLCGAVTMQPKQLWSLLSRILSKLLGLPGILLKKFRKEGVTELDATALLELPQDVLMDIFGTLEVPDLIRAGSVCSSWYATYKCLLDLRQYKQPQTPCLFYTCESAGSNVGFLYSLKENRSYKLTLPEPPIRSRLLIGSSNGWLITADERSELHLVNPITGEQVALPSVITIEHVKPIFDASGTIHMYELSYETPPDLFDLGDLRDELYFKAFVFPDPSTTGSYIVVLIHEPYSRLSFARPGDDKWTWVGQGSQYKDCTYVDGLLYTVNYSGEIDAFDFTASPVKMTVILKELKYPVCENMYIIQAPWGDLLHVWRTLGVPPNAPSWVPGKCLFETLKIQVHKVDLEAKQRVEINRLQCDSVLFLGHNDSLCLSAQVHPELKSNHAYFTDDFKEVTVLLKNCIRDMGVMDLENSVNKKIVSQIWSNWPCPTWITPNLMKLNQAFNR

SEQ ID NO: 7270 - protein, 666 aa, Zea mays
  VARIANT 218..666: note = Derived polymorphism lacks residues 218 to 666
MASPDLAAGDGSYDFHLRSLSAASRDSAAASDPASDPNLLQSVRRVCEMCRTAKEAKDEMVARAFPVMGKLFQRCAAAPTQAVASTGVLLLTILQFFLDFGEAVLHDADGSLKTFFRSCLSREFADPIVAERTVEFLVTNKTKILSSFPNLIPQVPTLEIFTYLELTIPTSYLSIFYVNGGGGPYMYFFTNRSKEIFTIQEAVGQKEYLSSLPIFHIRLNLVNTCQCLCILVYTQFYPLLLKLIASNGERLENKFSEVLPLMMSAGSFLPLFLSLMDLPMLVVALEKVERSSGTLIGSSIATIQKSAAPEMLLALMDEAYTGSAVEEPSGNSGSDDSGPLDLTDPMFLDLLKDENDGIAAKHWISPTISSTLQAAFNSPQSDRLKQSLEMAPRFLTLYFATALRDVNDSLLCALIPVVMSRYAAMFPDKVFSFKVRERLSDFILAAFQRSPNIIAVLKKPITDRLGEAHDNLAKASISFKFVLLISMQTELALHLCWAIGEHGAGGVGHKDVARELFENLELLLYENLATSRLGLSQEPGSDSMGASSRKSSQARLLCFVVTAIAKLATCHSELLPRARVSLGKVARSRTSDRRVWQRACDYLGLMNEPAICLSVLGPSTAQGNGPGIVNWSEGGTKMVHRLIIFHLPTSSQQNEENICMSALVQA

SEQ ID NO: 7271 - protein, 1070 aa, Zea mays
  VARIANT 1020..1070: note = Derived polymorphism lacks residues 1020 to 1070
  VARIANT 914..1070: note = Derived polymorphism lacks residues 914 to 1070
  VARIANT 489..1070: note = Derived polymorphism lacks residues 489 to 1070
  VARIANT 372..1070: note = Derived polymorphism lacks residues 372 to 1070
  VARIANT 285: note = Ancestral polymorphism is E, Derived polymorphism is V
MTSLVPLFQAILATNIEEAKKDILQYHMISRQKKNIYFDGWDGFGASAVLNSIANELSSQKMDAPHELRFDKVLYIDCSEWKSRREMQRAIAEELKLDHGTMAMFDNQDEEDDYDGKDKESRDVIRSIAMDIYRRLADCKFMMIFLNGSDNEIDVTRFGIPHITEFGKNTIIWTFKRKLLTINSRHDEIAEKLRYSHLFLYGSIVAGPNLVSEQDFCALVHGEATTIVARHQCMLDMDATMVTECCLFELSLHYNFHNITRLGWDAHSSNYWICAGIIAGNKKMEIANALHGEIRWECDAPLLQRLLEELSPTFSVKKITKPLVVSMRCLVKDRHWISITSQEHGLDGVQDIPAGASAVFLAFQRTGQLEPYARSGHPTSLEGQYSPPILPPGIFKYSRSIAVLVLSYCAFSFASPPFLMCNSLRFLGLDKCKHKPSEQYCDTDAEWTFLLSLWVLEIRYTEWDEILSKEKIDLMSNLKELNIEGVWSWQCINQLRKLIPHLYRLRITNARIYQAETVDVDDSFMDKGKLQLLDLSGNREMKVVPGSLSKASSLEVLLLDGCLGLEYVGALPPSLNSFSLDGYGVASHWTPSINNLLPPENLRPASIDVRDAKISRICLEGCTGLENLFLRGLPNLVELDLSGTGIKILDFTTMVIQVPCLKRLFLLGCERLVAIILEEKWPYDIDTQLELLCIDTRAETGYSRPCIDHTKKSFKLQIHAILSDSRLARSLFSIIDYHICNNIVDIYFNILVTDVPTVYSGEDVQPEAAHRVVALAQYGDVPATAGDVPMQDFPPAPTRDLDRHVGIAKVSRCLDWVQFIELSNSLHLHDNDISTGVNITLAGEFYYLRQCRVERCPKLDTVFPRTDDFRALETIWASDLLMARCIWGKGRPSYMSNLFDALRHLNLRACPRLQFVLPVWVSSFPRLEMLHIADCTDLRHVFVLDEEHREERIAFPNLKAMHLHNLPSLWQICEASMLMLAPALMTIKIRGCWSLRRLPSMEGRGVHMEKPTVEIEKYVWDALEWDGVEAGHHPSLFQQPRHSRYYRKKSLRGSVLRYSFPASILCPDAR

SEQ ID NO: 7272 - protein, 440 aa, Zea mays
  VARIANT 398..440: note = Derived polymorphism lacks residues 398 to 440
MPSPPCASYTKLGQCCARQLQLRVADTLFNSSNTRSAFKVGKLANLLLCLVSTVSGKLDFAPNPMQMIFHYFFLQEFKLIESVELAPLRKLIDPLTGVQIDRKHRSGSSQGADRSSDRLIEALMIVLNDKENLSALGKHKNENHSGGSESIEHILQMLRQLPTKNISDKISHDEITNDSISNVNNSFADRKALHVKRTKNGLSKQLLAIHSSEKVRNAVVSGVKGLLSSCSSTLKRTKMLLLECLCVLACDDAAAVSEAAQDALDHLFNQGHNLVTENEISDTFTRLVERLPQVVLGSEETTTLSHARMLLALTFYAGHSSQFSGSMDKLIVSKPLSIGYLYSVAELKSGAYSKDTTNISLHATSTFAASKISVIHDNALPIALLGTVEYELPHVPPWFFHAGSQKLYGVLAGIIRLVGLSTVSVDGFDSLKLTVVVTSP

SEQ ID NO: 7273 - protein, 246 aa, Zea mays
  VARIANT 175: note = Ancestral polymorphism is S, Derived polymorphism is R
MTPPVSEPTNPPQLKDPVVVDVSVTASKSNDDAQDDVSLVGLGGTGSSTSATDKNRLLQVADPPAPMKTSGGVDVSMSRMNDDQGDVLGLNAFMAKKRLLSTHAASLAADADAEEEAKAAARKKTRLGWGQGLAKYENRYNKKDYENTHKFLAHDGATREAASSHGSCTPPPGRSKGRHGKNKSLDMAEMRVSRATTASAFSKWSSPLTGDLNDSGKNGSIGSLTGKVVFPSEVSGSCGKHSPTPA

SEQ ID NO: 7274 - protein, 323 aa, Zea mays
  VARIANT 28: note = Ancestral polymorphism is T, Derived polymorphism is I
MDSATVALASPASDDRRFWDRLRTRVDTILEDRRGLPPAAAAGAPMRGVESERGKRLREDSLMLVRGLDSVAESLAQLSDTLTAAQKGVSALATCSSQARGCEGGACPCPEEVKAEEEEPRAKRMCGGSTEDSPRNGLDSNSPAAGEETAAGPDGLGKGNVQASAEIAQSTNLKRARSLAVSMASRAAALARELKNIKSELHFMQERCGLLEEENKRLREGCDNGVAPEEDDLVRLQLEALLAEKSRLAQENANLTRENQGLMQLVEYHQLASQDLDESYEDVMQGIRLDFSSPLGKISDDEEGERDDEVPVTPAEVPCSPDE

SEQ ID NO: 7275 - protein, 571 aa, Zea mays
  VARIANT 478: note = Ancestral polymorphism is G, Derived polymorphism is D
  VARIANT 150..571: note = Derived polymorphism lacks residues 150 to 571
MEGEVVHIAVGKNTRKEEPNIRWAAAAFPEAAIVLVHVHWPSEWMPFMGGNPSYKFADEKEKERHGDTEATHMMKMFSVYKSQCGTRKVSAYYLTHRDVGAGVVTLVKKLKIKRIVIGSRFELDILIHNSILTSMIAWRPMEILDMEAAQIFWHLYANELGNAEWEDDTTAEEFIEKPSTCETEDFSNGEKAAKIMRHGGKGSGGSPSTLCGAQHLETLVKEEIDRLEKKLKELQGEVHNHEECSSLPAQTAAVSPKKCLAEPRYPELKIPEHIVQFSASQIQKATSDFRSENIIGEGGYGPVYKGDLEGIPVAIKSLRPDGKQGFSEYQHEVMVLSKLEHPHIVRLVGVCHASCTLVYEYLPNGTLLDRLSKGRLLPWEDRVRILVELRSALAYLHSHRPNAIIHADLKLANILLDAGDAARLGDFGTARMVHVKPLEDEEETIVRRTNPMGTMGYIDPVFFTTGELTTESDVYAFGVVILQLLTGLHGLNIAEQVRGARSKLHGLLDVSAGPWPQVHSARLLKLALRCCSLERKQRPLMTCDAQWKSLLVLRNKAAPPKKARKWNCFVC

SEQ ID NO: 7276 - protein, 168 aa, Zea mays
  VARIANT 12: note = Ancestral polymorphism is F, Derived polymorphism is S
  VARIANT 32: note = Ancestral polymorphism is T, Derived polymorphism is I
  VARIANT 44: note = Ancestral polymorphism is S, Derived polymorphism is F
MGLVWNLIELISIVRFGPNWNENGPGLKFSFTLRPRTNPCVVTSGSKPGSTRPTRRRLHATGATAALTRPARRRRTAPTTTLPAAFSPHTITTTLEQARNHVCCCRTGQNCWSWKRSSWITSWAGKSERPGYTKSWPGTVTTLELILRCRTGPKETFSVPLQLLHRYL

SEQ ID NO: 7277 - protein, 406 aa, Zea mays
  VARIANT 231: note = Ancestral polymorphism is R, Derived polymorphism is G
  VARIANT 320: note = Ancestral polymorphism is I, Derived polymorphism is T
MRSLRAAQTLVSRSLFSARHLSGAASPATAAAAGARWCAAPAPPPRSPLPSSRVMPAGVAGAVSFSLTFATVAAAEAKAKERPQPDLLPQNVVLYQYQACPFCNKVRGVRSTIFKNIARLPPELTQLIPNRAFCCRIRHLNIQIILLVPDWVEELTATDATFLDYHDIPYKVVEVNPLSKKELKWSDYKKVPILTVDGEQLVDSSDIINILQSRINPNEELTSDEEAKWRRWVDEHLVHVLSPNIYRTTSEALESFDYIAKHGNFSFTERFAVKYAGAAAMYMVSKKLKKKYNITDERASLYDAANTWIDALNGRDFLGTLFIRLLTMDRERVEIISFLEAMLTMAVRPGGSKPNLADLAVFGVLRPIRYLRAGKDMVENTEIGDWYRRMEDAVGEPSRIQDAEGN

SEQ ID NO: 7278 - protein, 54 aa, Zea mays
  VARIANT 6: note = Ancestral polymorphism is G, Derived polymorphism is V
  VARIANT 17: note = Ancestral polymorphism is A, Derived polymorphism is V
  VARIANT 33: note = Ancestral polymorphism is I, Derived polymorphism is K
  VARIANT 35: note = Ancestral polymorphism is A, Derived polymorphism is T
  VARIANT 50: note = Ancestral polymorphism is V, Derived polymorphism is M
MLKNDVDFLFFLADAAAITFQYGNLDALCPPLIQAKKNRKNLVEAYAQFVFLDP

SEQ ID NO: 7279 - protein, 967 aa, Zea mays
  VARIANT 91..967: note = Derived polymorphism lacks residues 91 to 967
MKGGRLHRPEPPQTHLAMAAAAAAPPIPAPNPTDDWVDGSWTVDCSCGVTFDDGEEMVSCDECSVWVHTRCARYVRGVHTSFSCHKCRRSKRVPSSADEAEVAELLAELPTHRPPPLYRRWAEVPLPARVHVHGLPGGGDGALFRGAPAFSAALWRCTGYVPKRFGFRYCEFPSWADDNDGADALFALAREKPREMTDDVLISTEPKKEKHYVRSLSCRGKKIDSNQQAMTPLTKAKKREPDSWKNECQQSEGCGIQDSICDDGHAETNMVSSDLLTAKTKKKMEESLEPSGENNNCEQVEISSKDGKKVPMKLEVSSGVQTTSSIVEQEVHSGFVGVEVTMYKQQPEEDHIVCSRPDITSSGPIKVQDIQGLPKQPNQASNLQVVAGVPDLLIGQPKPQTIKTEPSSQENKAAHCVDLVSDDHESNKQGLGDAAVLSIVQKDSSNLKYGSVSHEHLKSEAQNPRHTVAENPNSTLGSAKVCTSFSGSVSTPPELSHSLASKEPSSGNSDCSKKEELLSPTVSKHDPVKFSEDSSQEVTRYSEKVQLKDSQPSAPKSSQASRIHLSTVKHRLPVSKEQSQKIALTGGTSARSFHGEVPSLQSRNKAAACSSSQKKDKIYQRIINVTQDSSNNSAPTELRASDSAAPLSDEQLALLLHQQLNSSPRVPRVPRCHQAAGAQMLHSTGSSVFSKRYSSHGGRDHAAVIKKRNREDSLKDSEDTKRTEKRHRVSSTEHAPVKNSCRSAENIASEQKIRGICPTGANAGLSKDDLMDTIVSHNLPGLIDEIVSKDRNITYVELCDAIHQHFRDSRKSNGGDSLYRSYADAIKGCLRKRREWAHLFDQASKMNSNKRRTGESNSLLPDVPDAENIRTGPDRDSEGSADLHQDNLPRGKRKCRKRRRLELKGRRVRDTRKRSSIDSSSEDAAAPLSDSSSDRNSNPRDDESKEDNSVAQEIGGYIDAKGAASST

SEQ ID NO: 7280 - protein, 268 aa, Zea mays
  VARIANT 198: note = Ancestral polymorphism is A, Derived polymorphism is P
  VARIANT 67..268: note = Derived polymorphism lacks residues 67 to 268
  VARIANT 54: note = Ancestral polymorphism is A, Derived polymorphism is S
  VARIANT 25: note = Ancestral polymorphism is S, Derived polymorphism is I
  VARIANT 11..268: note = Derived polymorphism lacks residues 11 to 268
MDKKEDGPGSQCGHTLTAVPLSAGSFLVSFSFHTANAEEDDSKVQAFLAEMESSIRDPSLRANATDQEIDHALEGLEKYVMTKLFDRTFGTSTEDAISDMDISEKIGLLQQFVKPHHSDIPKVLHNEPSWLLAVKELQNINSFKAPREKLLCIMSCYQVINNLLLNISMSNDRTLSGVDEFLPILICYYQGKQLLVLATVYSFYFFLLGTTAGSANVGKSVFISAMLRTMAYKELVAAAAQKYKPIQSDVPRTTLGPIQIEAYLGKGV

SEQ ID NO: 7281 - protein, 338 aa, Zea mays
  VARIANT 193: note = Ancestral polymorphism is S, Derived polymorphism is Y
  VARIANT 195..338: note = Derived polymorphism lacks residues 195 to 338
  VARIANT 199..338: note = Derived polymorphism lacks residues 199 to 338
  VARIANT 221: note = Ancestral polymorphism is A, Derived polymorphism is V
MQPPRDACPHPTPPTTVCASPPPHGRPSPSASTTMSRASSHPPPLPPPRRHGCPLRPSSTPMMTMNTAHSASSAARPHRWKVRHLLPRRQWKESLISSPAVLGRSTTSPPAAPQRQWKVCFPRIIVVLSISAAATNRIGYLLLKSAVPDMVVCSLSCSDCLQVVNNVDDVEFILVHGTEVFGSPSSNPLPKKSREAGAEELRRSDDGSTTIGDAKEEVVAAIIVVKSSTLFQSIIRGNLQYASLSALRRLSLDPAGYEVLYHGEDFDLLNMLKKEEEMLLAVKESKANRTSKELVEYGEQLLGIFREELAGYEVLYHAEVGRNFESPQIMTEIGSLKL

SEQ ID NO: 7282 - protein, 257 aa, Zea mays
  VARIANT 26: note = Ancestral polymorphism is G, Derived polymorphism is R
MPDEGTCVGVEETIGEVAAAAPGGGGEETTQGRDDVKNFVLFGDIHKSIYFLSWKEQGSQLSLLAKDFGSLDCFATEFLIDGSTLSLVVSDSDKNVQIFYYAPKMVESWKGQKLLSRAEFHVGAHVSKFLRLQMLPTQGLASEKTNRFALVFGTLDGGIGCIAPVDELTFRRLQSLQRKLVDAIPHVCGLNPRSFRHFKSNGKAHRPGPDNIIDFELLSHYEMMSLEEQLEIAQQIGTTRSQILSNFSDFSLGTSFL

SEQ ID NO: 7283 - protein, 174 aa, Zea mays
  VARIANT 58..174: note = Derived polymorphism lacks residues 58 to 174
MRGEGTVSAMGAMVWLGGLVDFSPPSEMRHISGTIGGLLGSGGGFILGPLLELGCIPQFVVEYRNRFWCVQVAGLQILPRIKCRMIIFKDAEWSVNWPIWKVDYVSNESGEEILADHVSKMGLEKRSGQSSVFVVSTLMEYGGVPQSATLESLLKEAIHVISYGYEDKTVWELR

SEQ ID NO: 7284 - protein, 87 aa, Zea mays
  VARIANT 64: note = Ancestral polymorphism is A, Derived polymorphism is P
  VARIANT 53: note = Ancestral polymorphism is E, Derived polymorphism is K
  VARIANT 44: note = Ancestral polymorphism is D, Derived polymorphism is N
  VARIANT 37: note = Ancestral polymorphism is G, Derived polymorphism is R
  VARIANT 32: note = Ancestral polymorphism is P, Derived polymorphism is L
  VARIANT 31: note = Ancestral polymorphism is R, Derived polymorphism is W
  VARIANT 27..87: note = Derived polymorphism lacks residues 27 to 87
  VARIANT 21: note = Ancestral polymorphism is G, Derived polymorphism is D
MNAKLFAIEASVFKKEKNGGDGGIKQQYDFRPIEPIRFSGAVRDDAVVDIPLKNMGDIKRRKEALKNGADPHLFLHNCCHSSTNCIS

SEQ ID NO: 7285 - protein, 774 aa, Zea mays
  VARIANT 479..774: note = Derived polymorphism lacks residues 479 to 774
  VARIANT 477: note = Ancestral polymorphism is P, Derived polymorphism is L
MSAEEGASAAASAPPEAEAPAAGAMGAEAAAARKRYESLVQVRAKAIKGKGAWYWAHLEPVLVPPPASGQQPKLARLRCTLCAATFSASNPSRTASEHLKRGACPNFASPLAASAPVSTAPPLAIAAASSVVPISSFPPSSQRRHSTGGGGRKRHVLAAAYAAVDAASSHHMVVGEPAIYSTPPTPPALPAPRQVLSGGRGDLTALARLEDSVKRLKSPVTSPGSMLPRHQAEAALALLADWFLESSGTVSLAAAEHPKLKAFLRQVGLPELSRADLTRGRLDARFAEARADAAARVRDARFFQLAADGWRDQVVTLAVNLPNGTSVFHHAVPMPAPPSSGYAEEVLLDAVSSVAASADVRHCAGIVADRFGSKALRDLESKHPWMVNLSCQAHCLARLAKDLVRELPVVHSAATNCAKMAAYFNATRAVRALLQRHQVQELGHAGLLRVAAPPSTGDNETSAVFAMLDDVLTCARPLQLSVLEEPFKLLCIDDSTAREIVDMVHSAAFWAEVEAAHSLVKMITDMVKEMETERPLVGQCLPLWEDLRGKVRGWCRKFNVDEAIAMSVLERRFRRSYHPAWSAAFILDPLYLIKDVSGRYLPPFKYLTPEHEKDVDRLITRLVSPEEAHLAMMELMKWRSEGLDPLYAQAVQVRQPDPTTGKMKIANKQSSRLVWETCLSEFKSLGKVAVRLIFLHATARGFRCTPTMARWLTAPGTSSRGIARAQRLVFVVANSKLERKDLRNDDDRDAELLMEGDDDMLTDPTTAIVVPSSV

SEQ ID NO: 7286 - protein, 415 aa, Zea mays
  VARIANT 31: note = Ancestral polymorphism is S, Derived polymorphism is L
MVDVAALTDDVLAEILLRVPSPRDLARASVSCSSFRRVISNPHFFRRFVALHAAPPLGVFCCYPALGGGVGGSQFQPALPSHPSAPLARALASSADFCFNFLPPPASDWLVRDSRDGRFLLDRVRDGSTAFTEVAICDPLFRRYRLLPPIPNDLAASVENPYFQRGGDGQLQSRSSEIFLVSRSNDSVSENDTTFTVIWMACCRGKLVAFFYSSESQQWCALSPPEHYALSTRRVMGVRLGQRNHAHGCFYWMLALTHRWLVLDTHKMDFSIVDISPILTGRAMMFSNQITTLESSNGWTTIVVSDVFRSDRRCILYFYAFLNFSDRWQLLNRITLPDEWGYRFRGIIGAADGYLFIKLDDPKENLNDQIERYVEYFSLDVKTMQLGSFCRTTLFTVTESYLYCGFPPSLSMPSI

SEQ ID NO: 7287 - protein, 85 aa, Zea mays
  VARIANT 57: note = Ancestral polymorphism is R, Derived polymorphism is H
  VARIANT 47: note = Ancestral polymorphism is A, Derived polymorphism is S
  VARIANT 34: note = Ancestral polymorphism is S, Derived polymorphism is Y
  VARIANT 19: note = Ancestral polymorphism is L, Derived polymorphism is Q
MKAIDELTAFKEKPSENVQSRVSWRKEEVVKEPSVGSFRNLLLYHPACVSVDEDGDRIFISDSNHHRIIISNSNGMILDYKNHAV

SEQ ID NO: 7288 - protein, 716 aa, Zea mays
  VARIANT 75..716: note = Derived polymorphism lacks residues 75 to 716
MVAATALSFSFLSLATTLFLLLLRSLINNKKRHCRLPPSPPSSLPVIGHLHLLKKPLHRTLSALAAQHGPVLLFRFGSRRVVHVADPAVAAECLSTHDVTFANRPRLPSARYLSNDYTTLGSSSYGPNWRNLRRIATVDVFSSHRVLCSADVRASEVRNMARQLFKAAAGADASRPARCDVKARAFEIALNTVARVIAGKRYYGDGSVASEEAERFRAMVREYLAMHGASNLQDFVPVLALVDIGGVNKRAIRLSKARNEWAQRLIDEHRAAAAAGREQGKTMVGDLLEKQASDPETYSDKVIRALCLCFEWRRTGDEEVDMTEASGLTMPKSVPLEAFYWPLPRADLHEDRNNYRQIGRFTSTATPPPLRVCGSRHMELLRDSISMVSLAVLVTAVCARAASSWLRPGLPRLASLLPMVAFLAAAPLAFSSAIIRGLAGFFLGWLGVFKVVLLAVGRGPLDPALPVLPFVFTTALPVKLRCSSTGAAAACRAKSVSLVSCAVKVAVIAAILHVYQYTDQLHLYTRLALYSVHIYCFLDFLLPCIAAAGGALGMDMEPQFDKPYLASSLRDFWGRRWNLVVSDILRPSVYGPVRARAGKAPAVLATFLVSGLMHEVMIYYLTLRSPTGEMTAFFLLHGVCCIAEESCARRWMQWGWRPPPRPVATLLVVVFVAGTAFWLFFPQICREGMEELLLEEWAAVGAFFNDAARKLLQMFT

SEQ ID NO: 7289 - protein, 201 aa, Zea mays
  VARIANT 11: note = Ancestral polymorphism is S, Derived polymorphism is P
  VARIANT 81: note = Ancestral polymorphism is T, Derived polymorphism is P
MCQVSLLIDVSNKKDVILGYVVVIMQQHIKHMCSRLKGMTYNVTPFAEAFLSYCFQIGIQLEMMSDVIDETLDKDEAEEETEELTNQSTFVYWRLEFSCSMWDFCIIRQEWTVVHIQSAFHAFLALVRGCRVRKQLAIMQKCMNTLLKVQPVWKSPGLRKANRNHMLLYLWCPCYWPKPRAVLAPKPSGKETFTSNGSHGP

SEQ ID NO: 7290 - protein, 633 aa, Zea mays
  VARIANT 37: note = Ancestral polymorphism is G, Derived polymorphism is E
  VARIANT 41..633: note = Derived polymorphism lacks residues 41 to 633
  VARIANT 175..633: note = Derived polymorphism lacks residues 175 to 633
MGCAPLGHVLFDEFLRFNPKNPAWFDRDRFVLSAGHGCMIQYALLHLAGYNGVKMDDLKTFRQWRSRTPGHPENFETPGVEVTTGPLGQGFANAVGLALAEKHLASRFNKTDMKVVDHYTYVILGDGCQMEGVSNEAASLAGHWGLGKLIAFYDDNHISIDGNTDIAFTEDVLARYEALGWHTIWVKNGNTGYDDIRTAINEAKGVKDKPTLIKVTTTIGFGSPNKANTYSVHGNALGSKEVEATRSNLGWFHEPFHVPDEVKRHWSRHIDEGASLEAEWNARFVEYEKKYNQEAAELKSIISGELASGWENALRNYTPEMSPDATRNLSQQCLNALAKVIPGFLGGSSDLATSNMTLLKKFGDFQRDTPEERNIRFGVREHAMGAISNGIAVHSPGLIPYCATFFVFTDYMRASIRLSALSESGVIFVMTHDSVGLGEDGPTHQPVEHLFSLRAMPNILMLRPADGNETSGAYKIAVLNRKRPSVIALSRQKLPQLRGTSVDAVSKGGYIVSDDSSGNKPDFILIGTGSELEIAENAAGELRKKGRTVRVVSLVCWELFEEQPEEYKESVLPSEVTSRISIEAGVTFGWEKYIGQKGKAIGIDRFGASAPAGKIYKELGLTVEHVIAAAEAL

SEQ ID NO: 7291 - protein, 180 aa, Zea mays
  VARIANT 22: note = Ancestral polymorphism is V, Derived polymorphism is M
  VARIANT 14: note = Ancestral polymorphism is R, Derived polymorphism is W
MLKNGEGADVQRRRPAVPCPPVHPGRTVRGVQGGALRRHEGEGRAAHRGPRHGAFNVRGAPALRLRGFLADDCDGDATENRNVLAMQHLLVAADRYGLDRLRLLCEAKLCRGIDAHTVATILALAEQHHCTQLRADCIGFIASTDVLGAVMKTDGFKHLIASCPSIMKEILDKVAAVWSD

SEQ ID NO: 7292 - protein, 213 aa, Zea mays
  VARIANT 51: note = Ancestral polymorphism is E, Derived polymorphism is K
  VARIANT 20: note = Ancestral polymorphism is G, Derived polymorphism is V
  VARIANT 4: note = Ancestral polymorphism is P, Derived polymorphism is S
  VARIANT 3: note = Ancestral polymorphism is I, Derived polymorphism is L
MVIPFETMFSGFEFSIPFSGLFSFPFSGEVEQQRTLATINLPSGAEGEEAKKRKESMELFPRSAGVKDDAAPREQEDKEKPKQLTIFYGGKALVFDDFSTDKAKDLMQLASKGSPVVQNAVLPQPSATAAVTTDKAVLDPVISLAAAKKPTHTDTSASVQRPYQTAPSDVAPVKETESQPWLGLGPNAVKSNLNLSCDSEIFANSFLLHHLQI

SEQ ID NO: 7293 - protein, 697 aa, Zea mays
  VARIANT 472: note = Ancestral polymorphism is F, Derived polymorphism is S
  VARIANT 386..697: note = Derived polymorphism lacks residues 386 to 697
  VARIANT 358..697: note = Derived polymorphism lacks residues 358 to 697
MTRHCAEAAAATAPSLLRVLLALHCGVLFLQCSAASAMGGDVSALMAFKRAIIEDPHSVLSDWTDADGNACDWRGVICSAPQGSVISLKLSNSSLKGFIAPELGRLSFLQELYLDHNLLFGTIPKLIGSLKNLRVLDLSVNRLTGPIPSELGGLSSVSIVNFHSNGLTGNIPSELGKLQNLVELRLDRNRLKGSIPGSNTASFSPASNIGSTAHNGLCPSSRLYVADFSYNFLVGKIPSCLKYLPRSSFQGNCFQDEYSVQQRPLQICTSVYFLFYHTTITVNYIVIYLAYCRGSTGQQGVIYGSKHPGHKHEKMEQPIWLLALEIATGVLLVVFVITGIVTASRSCKLKPSIRISSWNRSKSWSDEITVLIDSDMLKSLPKLSRQELEVACEDFSNIIGSTPETVVYKGTMKDGPEVSVISLCAFEGHWTSHHELFYQNKVIDLARLNHENIAKFLGYCRESDPFSRMLVFEYAPNGTLFEHLHYGEGGQFSWLRRMKIAIGIAQGLRYLHTELQPPFAISELNSNSVYVTEDFTPKLVDFECWKMMFSRHSISRDEKARGHLNSKSSFPGHGDSAADRQADDIQANTFAFGVILLEIISGRLPYCKDKGYLVDWASKYLQQAEEIGKLVDPELGSVRSEDLAVLCSVVSRCIDPDPSKRPSMQIITGVLENGIDLSAAAILKESSLAWAELALAL

SEQ ID NO: 7294 - protein, 145 aa, Zea mays
  VARIANT 85: note = Ancestral polymorphism is G, Derived polymorphism is D
MGAECRYEVAQAAYIKLALHALKHPATAVNGLLVGRLVEPSSSPAVVSVIDAVPLSHHPHHLPLLPTLELALTLVEDHFATQGEGLAVVGYYHANPRCDDTELPPVAKRVGDHIFRYFPRSAVLLVDNKKLEEAVKGKFSDAVIQ

SEQ ID NO: 7295 - protein, 352 aa, Zea mays
  VARIANT 141..352: note = Derived polymorphism lacks residues 141 to 352
  VARIANT 105..352: note = Derived polymorphism lacks residues 105 to 352
  VARIANT 103..352: note = Derived polymorphism lacks residues 103 to 352
MSAEVPHFHPCVLLDQGGFGFGLGNTAVVGGSGRALRGEQHRAGLLRQPAAQLLANAPAPPRDDRAGGRTPPDEMDDELYGVAGCDSRVAASLRCPSQSGAMSVWSSSKKPYGIWTSAGGPVPVPAHETYHLAGARLSDAGGLHYPLAACSGANASAAVVASEPTLCSNSIASSDSTLNATEWTSNQCLDKIQSTTAKFNTLMHSPPGGGGICAPFAHRAVSAMYRGLRRWLAGEIMATASRASCWGESSSSVTVAAGGDVEQSWESAFIQKHWSAQQLWRTEQQCWRPQCGLPEKSVAVLKAWMFENFLHPYPKDHEKDVLAARSSLTRNQAQIEIPPDSFQIRFFFGEMG

SEQ ID NO: 7296 - protein, 137 aa, Zea mays
  VARIANT 8: note = Ancestral polymorphism is G, Derived polymorphism is S
MVKFLKPGKAVILLQGRFAGRKAVIVRVFEEGTRDRPYGHCLVAGLAKYPKKVIRKDSAKKTAKKSRVKCFIKLVNFTHLMPTRYTLDVDFKDVASGGPDALSTRDKKVEACKAAKARLEERFKTGKNRWFFTKLRF

SEQ ID NO: 7297 - protein, 483 aa, Zea mays
  VARIANT 130: note = Ancestral polymorphism is W, Derived polymorphism is C
  VARIANT 100: note = Ancestral polymorphism is L, Derived polymorphism is I
  VARIANT 20: note = Ancestral polymorphism is H, Derived polymorphism is Q
  VARIANT 19: note = Ancestral polymorphism is G, Derived polymorphism is D
MVGTEHPVHVVLFPFMAQGHVAPFRFLAELVRRARPDASITIVATPWVSESLRATLAASNVDVHALPFNPADHGLPADAHNSASIGPDQLGSLFAASESLGPAFCRFVAGLRATDPAAHVHIMADMFLGWTVGVARDDAGVSHSIVFTCGSYGAAVYFSLWNSVPLGAFSAGSTDDAFVLPQFPQISVRRSQLSDQLAAADGKDTRSTFIRKQIAFFSRADALIVNTAENLEPKGLTMLQQWFNVPAYPVGPLLRTTVAASSSETKDTSSTIFAWLDKQLPGSVLYVSFGSQFNINATQMVELAIGLEQSAHKFVWVIRPPSGFDDNRECWSEWLPDGFSERLVVTGQGLVVPCWAPQVEILAHAANGAFLTHCGWNSVQESLAHGVPLIGWPLSAEQFYNAKMLVEEMGVCVEVARGSDGVRRERITEVVAMVLGDTLELAALRRNAAAEAEKLIRAAGENDRNGSSVKVMQMFFNEMSHLF

SEQ ID NO: 7298 - protein, 116 aa, Zea mays
  VARIANT 107: note = Ancestral polymorphism is P, Derived polymorphism is L
  VARIANT 83: note = Ancestral polymorphism is A, Derived polymorphism is V
  VARIANT 81: note = Ancestral polymorphism is A, Derived polymorphism is T
  VARIANT 78: note = Ancestral polymorphism is Q, Derived polymorphism is R
  VARIANT 67: note = Ancestral polymorphism is V, Derived polymorphism is A
  VARIANT 65..116: note = Derived polymorphism lacks residues 65 to 116
  VARIANT 62: note = Ancestral polymorphism is G, Derived polymorphism is R
  VARIANT 59: note = Ancestral polymorphism is P, Derived polymorphism is T
  VARIANT 58: note = Ancestral polymorphism is D, Derived polymorphism is E
  VARIANT 54: note = Ancestral polymorphism is A, Derived polymorphism is T
  VARIANT 52: note = Ancestral polymorphism is A, Derived polymorphism is T
  VARIANT 51: note = Ancestral polymorphism is S, Derived polymorphism is L
  VARIANT 45: note = Ancestral polymorphism is E, Derived polymorphism is K
  VARIANT 42: note = Ancestral polymorphism is Q, Derived polymorphism is P
  VARIANT 28: note = Ancestral polymorphism is A, Derived polymorphism is V
  VARIANT 11..116: note = Derived polymorphism lacks residues 11 to 116
  VARIANT 2: note = Ancestral polymorphism is A, Derived polymorphism is V
MAALLWLAAARSALPRCTLAPHRRLAAAAAVAMEEWWSDSEQDDEEEARASAPAAGLDPAGGGPWGVQWVVMGRPGSQKHAHAARLTEVLAVPYISMGALLRQELNPASQLYRKLL

SEQ ID NO: 7299 - protein, 555 aa, Zea mays
  VARIANT 497: note = Ancestral polymorphism is C, Derived polymorphism is F
MHSHKGRWHDDDDETWARRMRAWEQAPRRGISGRARGGTYRPEEDRAVVLTKALPATGLSQPATASRSRGCWPPLSEALWKDTAMAMRAAARQAILSPPLGPRSPRPFLCGCSLSIAPRLEPCRAASSTTAPAAGKHLPPLFSVAPMMDWTDNHYRTLARLISRHAWLYTEMVVAETIVHQKDNLDRFLAFPEEQHPIVLQIGGSNLENLAKATELANDYSYDEINLNCGCPSGKVAGHGCFGARLMFDPEFVGDAMSTIAANCDVPVSVKCRIGVDDRDSYEELCEFVDKVISKSPTRHFIIHARKALLSGLSPAENRKIPPLKYEYYFALLRDFPEIKFTLNGGITNVSQVSASMRQGAHGVMVGRAAYNNPWNMLGHVDGEIYGKQTRYISRRQILENYQAYGDSIIDQYGPSRPNVRQLVKLHFQMFIFYKTILVLIVFCLFQFYIHLRSLPFNPVNDRGNHLILIQPLLNLFHSEPGNSLWKRKADSALRHCKTVKTFLEETLDAISDSVLDKPVNREPSSDEEYFASVDSLLPPKYTTPMHERLVAAST

SEQ ID NO: 7300 - protein, 120 aa, Zea mays; identical to SEQ ID NO: 3788
  VARIANT 58: note = Ancestral polymorphism is T, Derived polymorphism is M

SEQ ID NO: 7301 - protein, 411 aa, Zea mays
  VARIANT 152..411: note = Derived polymorphism lacks residues 152 to 411
  VARIANT 138: note = Ancestral polymorphism is S, Derived polymorphism is I
MTPGGRRRNSSAVASLLVVLLSLGAAATAVRPAPQAARAAANNGTCLSRLEPFGYKCEEHTVTTADGYILSLQRIPGGRGRGSGQSAAGSKIPVLLQHGLLMDGVTWLMSSPDESLGYILADGGYDVWIANTRGTVYSRGHTTLSSSDPAYWDWSWDELASNDLSAVVQYVYAQSGQQRMHYVGHSLGTLIAFAALSQRQQLGMLRSAGLLSPIAYLDKVTSPLALAGADVFLAEAMYWLGLDEFDPTGEPVHKLLTDICSQPGIDCYSLMSVFTGDNCCLDNSSVQVFLAHEPQASATKNMVHLAQRTLAKYDYGNAADNTKHYGQATPPAYDLSAIPDDFPLFLGYGGRDTLSDPQDVSHLLQVLKSHHGDKLTVQYVDDYAHADFVMAANARERVYAPLMAFFKLQDK

SEQ ID NO: 7302 - protein, 139 aa, Zea mays
  VARIANT 75: note = Ancestral polymorphism is F, Derived polymorphism is S
  VARIANT 22: note = Ancestral polymorphism is E, Derived polymorphism is G
  VARIANT 15: note = Ancestral polymorphism is S, Derived polymorphism is C
MVVLQPDRFLSELTSMYERSTEKGSVWVTMKRSTLKGKAQLRKMENKGQEVEHRCLVRASNGKKNISTSLLAKSFIKVSLKEYTKFQASYATVLKAHMHALKKRERKDKKKTADAEKAIETAPKKQKKASSKKSSGSKS

SEQ ID NO: 7303 - protein, 476 aa, Zea mays
  VARIANT 387: note = Ancestral polymorphism is G, Derived polymorphism is V
  VARIANT 373..476: note = Derived polymorphism lacks residues 373 to 476
  VARIANT 338..476: note = Derived polymorphism lacks residues 338 to 476
MANSSPMGDSLQLQSVEFHSRTAGRTVLLQIYFEHREMALITNVSDYEELAKQKLPKMVYDFYAGGAEDQWTLKENKEAFSKILFRPRVLIDVSHIDMSTSILGYKISMPIMVAPTALHKLAHQEGEVASAQAAAAAGTIMVCKIAPLYRLSGRSHMNSFTGCIFRRCLHGHLAALRKLAQLHQDSVSSNFQYSRIGISCNSLSEGLKMLAIRQSPSLSTLHALVAGKPMSGTGHIVVLQSGLFVVPCVPRFRLPENVVLKCFEGLDLSKMDKTKGSGLAAYATSQIDSSLSWKDIKWLQTITGLPILVKGVITAEDARIAIECGVAGIIVSNHGGRQLDYLPATISCLEEVCKSITAQLPRTPLVHGLMLTYLGKGKLQVVREAKGRRVPVFLDGGIRRGTDVFKALALGASGVFIGRPVLFALAVDGRAGVRNALRMLRDELEITMALSGCASLKDITRDRVITERDMIRRSRI

SEQ ID NO: 7304 - protein, 399 aa, Zea mays
  VARIANT 133..399: note = Derived polymorphism lacks residues 133 to 399
  VARIANT 110: note = Ancestral polymorphism is P, Derived polymorphism is L
MRPLCSNPPLHSKSHGGSHRSLARLRFPCSLGMELITNVTEYEKLAKERLPKMVYDYYASGAEDQWTLKENREAFSRILFRPRVLIDVSRIDMATNILGFSISMPIMIAPSAMQKMAHPDGELATARAAASAGTIMTLSSWSTSSVEEVNSVGPGIRFFQLYVYKDRNIVRQLVKRAEMAGFKAIALTVDTPILGRREADIKNRFALPPHLVLKNFQALDLGTMDKTNDSGLASYVAGQVDRTLSWKDVKWLQTITSLPILVKGIVTAEDTRLAIEYGAAGIIVSNHGARQLDYVPATISCLEEVVREAKGRLPVFLDGGVRRGTDVFKALALGASGVFIGRPVLFSLAVDGEAGVRKVLQMLRDELELTMALSGCTSLREITRAHVITDSDRIGRSRL

SEQ ID NO: 7305 - protein, 232 aa, Zea mays
  VARIANT 10: note = Ancestral polymorphism is V, Derived polymorphism is M
  VARIANT 18: note = Ancestral polymorphism is T, Derived polymorphism is M
MASVPHSPPVIRKSGNLMVFVTPPAEPESPRSEFSTPPTSPRAEESPESPPAQMAPPPTPIYSVSVSTPPLVKTVSPPLHAEKLSRPSLVQVPPPLVKTVSPPLPAEKLSRPPLVQVPPQPVKSLSTSLQAPNLSSGSLPSVQVPPLQFAKVSAGSDGSLLAFFWDAVAHVQKGDVEENPSHSRLDKHISRWFGLDQSKYQWALNDYFERTGQEIDSSTLEHSCKNSESMTK

SEQ ID NO: 7306 - protein, 175 aa, Zea mays
  VARIANT 159: note = Ancestral polymorphism is R, Derived polymorphism is I
MPPPSVIPVGPLAVPPGGPLAAPLAAHPGGPLIAPSVIPHSDRSISEQSHSPLHPHTNPFSMEWQEISYEAQSRHVKGGNGRKRKQSQMGAAIESFVDFKRSATSKTLKGIEEVFMEKCLDKLDRIDGLTDEDRSYAMEVFESAINREVFMKSKNHNARLLWLKRKIRQVIILSF

SEQ ID NO: 7307 - protein, 112 aa, Zea mays
  VARIANT 91: note = Ancestral polymorphism is V, Derived polymorphism is A
MSGVWVFEDGIVRRADSEPPSGAGAGGSRPNKVLVHVPSGEVVTSYEVLERRLRELGWERYLYDPCLLQFHQRSTVHLITVPRDFARLKLVHMYDVVVKTRNVFEVRDAAAA

SEQ ID NO: 7308 - protein, 222 aa, Zea mays
  VARIANT 3: note = Ancestral polymorphism is A, Derived polymorphism is V
  VARIANT 31..222: note = Derived polymorphism lacks residues 31 to 222
MWAQLAVALFVALAVAPPARGSDVPSFPLSQAQSPSNSSSPSNAASRPCHLDLSAELFGGVAAACGAGGGPGSLDRGRCCPVLAAWLFAAHARTALSVPPAPPPSALVGDEGMGPDGDDDGPMVPYDNQRCVDTLGAALERRGVALPRPNATCDTVLCFCGIRLHQIGSLRCPAAFAVKTGAAARNATPTAAVKALEKSCRNASYAGCSRCVQSLQKVNLSC

SEQ ID NO: 7309 - protein, 188 aa, Zea mays
  VARIANT 147: note = Ancestral polymorphism is G, Derived polymorphism is S
MEDAVGTLCKHRFQVKSNRSSEAYTFNHDSMARRALKNTCLAYLASLNEPDFVELALHEYKSATNMTEQFAALAALSQNPGQVRDDALLDFYNKWQHEYLVVSKLFALQATSEIPGNVANVQKLLSHPAFDLRNPNKVYSLIGGFCGSPVNFHAKDGSGYKFLGEIVLQLDKINPQVNAKYLFSWVFT

SEQ ID NO: 7310 - protein, 99 aa, Zea mays
  VARIANT 22: note = Ancestral polymorphism is L, Derived polymorphism is P
  VARIANT 59: note = Ancestral polymorphism is G, Derived polymorphism is R
  VARIANT 81: note = Ancestral polymorphism is G, Derived polymorphism is R
  VARIANT 83..99: note = Derived polymorphism lacks residues 83 to 99
  VARIANT 84..99: note = Derived polymorphism lacks residues 84 to 99
MPLPAPPVTPHPAGRARPTTPLSISFTVISMLTGVTTLYNTGLAFGGPAIMTLDWFIAGAFTMAIGLSKAEICSAFPTSGRLYYWSARLSGRRWAPVAS

SEQ ID NO: 7311 - protein, 115 aa, Zea mays
  VARIANT 26: note = Ancestral polymorphism is D, Derived polymorphism is G
MSDLLSYISKVMCIKARSEATQAGEDSGCPADECRVCLSKIRLGEATRRLPCRHVFHRDCVDRWLSSCKRTCPLCRVYVADGNKQPVAAKHTSREAQALADDLVIWFSTVLVPGF

SEQ ID NO: 7312 - protein, 229 aa, Zea mays
  VARIANT 65..229: note = Derived polymorphism lacks residues 65 to 229
  VARIANT 108: note = Ancestral polymorphism is S, Derived polymorphism is Y
MQVEGKIDEDVPSVNVGESDEVTKNTSQETKAEVDLIDDVITESNFTSKNIVEVNSAAHEVNEIEHEKVEVPGGCQSHEIENSSALEPKKEFEMEVDGVVPLQGATTSMAYVVHHEPRSIDFLENDSGNHSSPTTALESCDHVRIKESISHEVTMATVDQPISVDQVELVNLNEDELVVDDDQPDFDPRCESDRLDKPRCISKKDDSNEIVEDSKSLENQLEICNAINY

SEQ ID NO: 7313 - protein, 85 aa, Zea mays
  VARIANT 70: note = Ancestral polymorphism is I, Derived polymorphism is T
  VARIANT 29: note = Ancestral polymorphism is E, Derived polymorphism is K
  VARIANT 27: note = Ancestral polymorphism is N, Derived polymorphism is D
  VARIANT 15: note = Ancestral polymorphism is T, Derived polymorphism is A
  VARIANT 9..85: note = Derived polymorphism lacks residues 9 to 85
MCFIDEQEKALQLLTSLQGLAILGFLNLEELPAVLHSLHSLERLDNIRGCPRISRLPETGLPPSLEALEINDCSVELQEQCRMLC

SEQ ID NO: 7314 - protein, 741 aa, Zea mays
  VARIANT 41..741: note = Derived polymorphism lacks residues 41 to 741
MEYRAAPPDDVIVQVNAAAVATVDERISTCQITEEEGGIVGHEQVPVGWLAHRSFSQSYRTRHRNPMEFTGWQLALLAYQSLGVVYGDIGTSPLYTFSSFALPNPGAADILGILSLILWTLTLVSLVKYVFVVLHADDHGEGGTFALYSLLRQHVNFSGKSVPVPVTRLASDVNLRFHSRKSSQQPRMLAFLEGSSIAQAVITYLVLVGTCMVMGDGALTPSISVLSAVQGIQSRSSSIKQGHVVLLCVVILVILFLFQQYGTSKVGFTFSPIMLVWFALIASTGLYNIIKHYPPILKAISPHYIYLFFARNKRVGWEQFGTVVLCITGVEAMFADLGHFNKKSIQMAYSCLVYPSLILAYAGQAAFLIKNPSKLSTTFYSSVPEPLFWPMFVVATLAAIVASQALISASFSIVRQSVALGCFPRVTMKHTSKKYEGRVYSPEINYFLMIACVLITVGFKGGPEIGQAYGVAVIWVMLITTHLITVVMVIIWQVHYAIAGTFYAIFAAIEGLMTISLLYKIAQGGWVPFAITAFFLIITLSWTYGRSKKHEYEVSNLMDRQDFIKIVNMSNRVPGICIFCTDLMNGIPPIVRHYVQHMGCLRELMVFVTVRHLPVTSVLPEERFLFDRLEPFGVYRCIVQYGYMDTQNMEDHEYVVSIIASLKEIAQSGDEILMMDSALANGTTFVLGRVILNMSPERGNCFKRFVINNLYRFLQKNFRSNISNLKIAPSKTLQVGMQYEI

SEQ ID NO: 7315 - protein, 116 aa, Zea mays
  VARIANT 33: note = Ancestral polymorphism is H, Derived polymorphism is Y
  VARIANT 44: note = Ancestral polymorphism is E, Derived polymorphism is K
MATPVVGQQGARASAAQVWGVGREESGHVRGLHRHIPEGPRRQEDHHRPWGWERARRHSAGLQERRRRRRVQARLRRRQPVHAAQTEEVGLLWLLNRSSLCCCADSKGERIVQQLK

SEQ ID NO: 7316 - protein, 799 aa, Zea mays
  VARIANT 501..799: note = Derived polymorphism lacks residues 501 to 799
  VARIANT 440..799: note = Derived polymorphism lacks residues 440 to 799
  VARIANT 403..799: note = Derived polymorphism lacks residues 403 to 799
  VARIANT 364..799: note = Derived polymorphism lacks residues 364 to 799
  VARIANT 44: note = Ancestral polymorphism is R, Derived polymorphism is L
MFWHVPGLSAASPVDTILDKENFKLECLLDEDEIIQECKALNTRLINFLRDKVQVEQLLRYIVEEAPEDAEKKRIFRFPFIACEIFTCEVDVIMKTLVEDEDLMNLLFSFLKPDHPHGTLSAGYFAKVLLCICFFLVVICLMIRKTLPLVSYVQGHPEIVSQLVDLIGITSIMEVLIRLIGADETMYSSYADSMQWLDDIQVLEMIVDKFSTSDSPEVHANAAEILCAVTRYAPPALAAKISSPSFVGRLFQHAFEDSRPKSVLVHSLSVCISLLDPKRLVSASYQAFRSQLSHGTLVTASPETVNGMLDSLGDLLKLLDVSSAENVLPTTYGSLQPPLGKHRLKIVEFISVLLSIGSAAAETRLIQLGAIKHAIDLFFEYPFNNFLHHHVENIIGSCLESKQDRLIGHVLDDCKLVTRILEAEKNSALSSDLTKHTMSSEGRSPPRIGIVGHMTRIANRLLQLVNTNIMVQSHLQQNSDWIEWHASTLTKRNALENVYQWACGSCIYQLFNTFKGQSVCLACSHEVYEVTTEYRLQLLWLTGMKGHMLNSALFSGYSRPTSLQDRGRDSDDEDFRDRDYDVAALASNLSQAFKYGIYSSEDIDEAQASLERDDEDVYFDDESAEVVISSLRLGDDQESGSLFTNSNWFAFDEDKALNDGLVSSEASPSPNSEISALKEDDEHDEVILGEIIDEIKGSEPTLPVFNKDANKESGSTGLANGTVDKFEDDIRPPTPDVKESQPEFVEWKEEEAEPGDIAEKDTAVPDIEVENEKQLDSMDDVMLCDAKLGEEKKSDELGI

SEQ ID NO: 7317 - protein, 151 aa, Zea mays
  VARIANT 1: note = Ancestral polymorphism is M, Derived polymorphism is R
  VARIANT 7: note = Ancestral polymorphism is R, Derived polymorphism is H
  VARIANT 66: note = Ancestral polymorphism is T, Derived polymorphism is I
  VARIANT 78..151: note = Derived polymorphism lacks residues 78 to 151
  VARIANT 116: note = Ancestral polymorphism is S, Derived polymorphism is R
  VARIANT 136..151: note = Derived polymorphism lacks residues 136 to 151
MLEDLRRRRDERVNEFKAIQSNIVRLQAENSGAIDQGDPAAPVVDENDLSLKRLGELKEHLNDLQTEKNGRLQKIDIQTNSIHEMCNIMSIDLKMALKDAHPSYAELGGSKPMSISNNSLDRLSEKVHALNHEKKQRLRKVRISLKLVISL

SEQ ID NO: 7318 - protein, 572 aa, Zea mays
  VARIANT 167..572: note = Derived polymorphism lacks residues 167 to 572
  VARIANT 35..572: note = Derived polymorphism lacks residues 35 to 572
  VARIANT 7..572: note = Derived polymorphism lacks residues 7 to 572
MPRRIAQWPASDQGPQYVCTSFSTFICTNCSGIHREFSHRVKSVSMAKFTSQEVSALQEGGNERAKEIYFKHWDLQGPVIDSRLRNFIKNVYVERRYLEQRISEHLAQAKGNQDSYGNSNADSSPGVLRSAYVRTYEDNHDLKRTKESLSENQNNSNGHPVSSTVDQNNNSTMAREKVDLRSHLRPDDLLKTDGKSENNQEVVISSASSAAQASKEINSNKVFLPIKLPDPPRSQKATSSNTSTEAQGKWLFGIKGDNSDLLLNTLIFTASYSASCNSIFLCLSCIAGEDDHDRRADDLKIFYKAYATEVLSDGIVDDKKKLQQFVADGEPSKKEVEALMAFQVRLCIPQETVDAHTEICGQLFEKVLDSSQNLLPPDELRKRFEQEGHAGAGGRACWGGTGHAAGRGARAGGAGHTVAGQNAGRAHAPRGAGGAGTGGAAADHAEGRGGDARARAGRRAAMADELGAGGAGRGRGRRAEGGARPGTASRGRASSGRGAAGADAAGAVRAKGGRGRGRAGVATPRGERRRAWGRRREGRGKRRGGGRGSPRAGIGAGGGFGRAGDRGANQRN

SEQ ID NO: 7319 - protein, 202 aa, Zea mays
  VARIANT 29: note = Ancestral polymorphism is D, Derived polymorphism is H
  VARIANT 119: note = Ancestral polymorphism is A, Derived polymorphism is V
MVSSSSPVVNVYPLANYTFGTKEPKMEKDTSVADRLARMKVNYMKEGMRTSVEAILLVQEHNHPHILLLQIGNTFCKLPGGRLKPGENEIEGLKRKLCSKLAVNSPSFPPNWQVGECVAVWWRPNFETVMYPYCPPHITKPKECKKLFIVHLSEREYFAVPRNLKLLAVPLFELYDNVQRYGPVISTIPQQLSRFQFNMVSS

SEQ ID NO: 7320 - protein, 156 aa, Zea mays
  VARIANT 62: note = Ancestral polymorphism is D, Derived polymorphism is G
  VARIANT 16: note = Ancestral polymorphism is E, Derived polymorphism is G
MAYCAFAPSAPPQYSELKMTLYTNKEVYRSGPDQNGVTITERSNMGTTWVFSWPVADGPTPDANIVGQLQGTSVQVANTPVVVYHYSLGLVFEDKRFNGSTLQIQGTSQINGEWSIVGGTGQLTMAMGTVKRTEVVYKDNTRISELKIHAYFAPVN

SEQ ID NO: 7321 - protein, 1629 aa, Zea mays
  VARIANT 1102..1629: note = Derived polymorphism lacks residues 1102 to 1629
MGFDPLEWYCQPVKDGVWSHVVENAFGAYTPCGTDTLVVCISYLALFGVCFYRIWRTTRDYTVQRYKLRSPYYNYLLGLLVVYCIAEPLYRIITGTSIMNLDGQPGLAPFEIVSLIIESVAWCCMLVMILLETRIYINEFRWYIRFVVIYMMVGEAAMFNLVLSVRQYYSSRYTTSVASTFLMGPFLFLFGILMVVYLPSLDPYPGYTPIRNEVLVDNTDYEPLPGGEQICPERHANIFARIFFSWMTPLMQQGFRRPITDKDIWKLDSWDETETLYSQFQKRWNDELQKPNPWLLRALHSSLWGRFWLGGFFKIGNDASQFVGPLVLNLLLESMQKGDPSWSGYIYAFSIFAGVSLGVLAEAQYFQNVMRVGFRLRSTLIAAVFRKSLRLTNDSRRKFASGRITNLISTDAESLQQVCQQLHSLWSAPFRIVISMVLLYAQLGPAALVGALMLVLLFPIQTVIISKMQKLTKEGLQRTDKRISLMNEVLAAMDTVKCYAWEQSFQSKVQDIRDDELSWFRRAQLLAALNSFILNSIPVVVTVVSFGVYSLLGGDLTPAKAFTSLSLFAVLRFPLFMLPNLITQVVNCKVSLKRLEDLLLAEERLLLPNPPIDPDLPAISIKNGYFSWESEAQRPTLSNVNLDVPVGSLVAIVGSTGEGKTSLISAMLGEIPPVSGSGTSVVIRGSVAYVPQVSWIFNATVRDNILFGSPFQPPRYEKAIDATSLRHDLDLLPGGDLTEIGERGVNISGGQKQRVSMARAVYSDSDVYIFDDPLSALDAHVGRQVFDKCIKGELQHKTRVLVTNQLHFLPYVDKILLIHDGVIKEEGTFDELSNSGELFKKLMENAGKMEEQVEEDESKPKDVAKQTVNGDVTIADEGSQKSQDSSSKTKPGKSVLIKQEERETGVVSARVLSRYKNALGGIWVVSILFFCYALTEVLRISSSTWLSIWTDEGSLKIHGSGYYNLIYGILSFGQVLVTLSNSYWLIISSLRAAKRLHDAMLRSILRAPMVFFHTNPLGRIINRFSKDMGDIDRNVAVFVNMFMAQISQLLSTFVLIGFVSTMSLWAIMPLLILFYAAYLYYQATSREVKRLDSITRSPVYAQFSEALNGLSTIRAYKAYDRMANINGRSMDNNIRFTLVNMGANRWLAIRLETLGGIMIWFTATFAVMQNQRAENQKAFASTMGLLLTYTLNITNLLTAVLRLASLAENSLNAVERVGTYIELPSEAPPVIEDHRPPPGWPSSGVIKFEDVVLRYRPELPPVLHGISFVINGSEKVGIVGRTGAGKSSMLNALFRIVELERGRILIDDCDTSKFGIWDLRKVLGIIPQAPVLFSGSVRFNLDPFNEHNDADLWEALERAHLKDVIRRNSLGLDAEVSEAGENFSVGQRQLLSLARALLRRAKILVLDEATAAVDVRTDALIQKTIREEFKSCTMLIIAHRLNTVIDCDRLLILSSGQVLEFDSPENLLSNEGSAFSKMVQSTGPSNAEYLKSLVFASGEERSRREEIKLQDIQRRWVASNRWAEAAQFALARSLTSSHSDLLALEAAEGNNILRRTKDAVITLQSVLEGKHNTEIDESLTQYQVPADRWWSSLYKVIEGLATMSRLGRNRLQQPSYNFENNNSIDWDQM

SEQ ID NO: 7322 - protein, 121 aa, Zea mays
  VARIANT 2: note = Ancestral polymorphism is T, Derived polymorphism is A
  VARIANT 106: note = Ancestral polymorphism is P, Derived polymorphism is S
MTTKAIIQLLFFALVFATFTAHGAWGEKGCYDEKERFKRECSTSYERPSKSCCDTVRSVDMACVRRTMTSEEETGLSVQKISFLSMACNNSVRVVGKKYGDIPKRPMWQSFSPPPPHRAHP

SEQ ID NO: 7323 - protein, 268 aa, Zea mays
  VARIANT 152: note = Ancestral polymorphism is R, Derived polymorphism is T
MAWVMHRSSSDGGSSSGWSDAAAAVVAAAEERAGWEVRPSGMVVQARDDAAGSGGAPPRPPPPPEIKVRVKYGGARHEVSVSPIATFGQLKKLLAPRTGLQPADQQLSYRGRARGNAEYLDACGVKNKSKVALAEDPASVERRYIERQRNATAESANRAIGAVALEVDKLADQVTSIEKSISRGNKVPEVQITTLIELLMRHAVKLESIPAAGDSSSQKNIQAKRVQKCVETLDVLKVSNARLQAVVVTTKWETFDAAATTTKWELFD

SEQ ID NO: 7324 - protein, 707 aa, Zea mays
  VARIANT 353: note = Ancestral polymorphism is R, Derived polymorphism is M
  VARIANT 373..707: note = Derived polymorphism lacks residues 373 to 707
MEKEGHQNNSSSNEQDHDGFTMDEIPDLSWSSHTEYDVDALLGAVDQVNTTQTDDDEDQSSHVSEQTPSNRTKRFTMDQIQQLEAQFRVCRHPNLDARQELAAKTGLEERQVKACGDENKGIRQELGKLKAENEELKQRMLNPICFRCRNPTLATQPTSEKRRLLNENARLRDEYVRAKAYLDRLIREGAERRASPSAHLHLGGSATLVSHAERAMEELVMLATKGEPMWLPAMDGETLNHQEYVLQTFPGLLGLCPPGFVEEATRESDTIRGTAMYLVSVLTDANQWCEMFPGTVAYMDAELWVQSPRLLNRSVKFLRFSKKLSNRRWAMADVSVVDGVCGVEPGGSSTGCRLLPSGCLLEDMSGGYCKVTWVVHAEYDETSVPSLFRPFLQSGQALGAYRWLRCLQRQCEYITVLRSSLVLPSSSSSFSAISTLGVGRRSVMELARRMTASFYAAVSGPVTVPATSSVDEWRVSSGSGAERVEAVVRLAVWNCADIMPGEPAVTVLSATTTVWLPGTPPMRVREYLFDLQRRGEWDAHADGGEVQELGSVATSSRLHGNAVSVLQSTSSVDTDGTDSKVLILQETTTDVSCSLVVYSLVEENLMRGIMDGRERSNVFVLPSGFAILPDGHGRAHAGDTAATNSSASAAIDDDHSSNAAGSLVTVAFQTPLPGNPDTGAFEDACLQLCHAIAKIKAAVGASDIIPV

SEQ ID NO: 7325 - protein, 189 aa, Zea mays
  VARIANT 77..189: note = Derived polymorphism lacks residues 77 to 189
  VARIANT 39: note = Ancestral polymorphism is S, Derived polymorphism is L
MPAGCLLFCAAPISSSFTPDVSKKVSGSDGVSAKRSTRSRFSQDHAAKSKAKLKGAFSLLGLNNDTFKGPRTSKRFQLKDMSWRSKDTTVNGKENHDKETVHEENTKSCEHEYGSYCLWSTEHREVMKDANVKKLKDQLFMARAHYPSIAKLKQHEAFTRELKQNIQEHERMLSDTITDVDLPPLLVLS

SEQ ID NO: 7326 - protein, 306 aa, Zea mays
  VARIANT 2..306: note = Derived polymorphism lacks residues 2 to 306
  VARIANT 10: note = Ancestral polymorphism is C, Derived polymorphism is Y
  VARIANT 25: note = Ancestral polymorphism is A, Derived polymorphism is T
  VARIANT 32: note = Ancestral polymorphism is G, Derived polymorphism is S
  VARIANT 39: note = Ancestral polymorphism is M, Derived polymorphism is I
  VARIANT 40: note = Ancestral polymorphism is W, Derived polymorphism is S
  VARIANT 48: note = Ancestral polymorphism is I, Derived polymorphism is T
  VARIANT 64: note = Ancestral polymorphism is D, Derived polymorphism is H
  VARIANT 95: note = Ancestral polymorphism is G, Derived polymorphism is E
  VARIANT 107: note = Ancestral polymorphism is S, Derived polymorphism is L
  VARIANT 109: note = Ancestral polymorphism is R, Derived polymorphism is I
  VARIANT 124: note = Ancestral polymorphism is R, Derived polymorphism is K
  VARIANT 155: note = Ancestral polymorphism is R, Derived polymorphism is I
  VARIANT 163: note = Ancestral polymorphism is R, Derived polymorphism is W
  VARIANT 176: note = Ancestral polymorphism is V, Derived polymorphism is A
  VARIANT 181: note = Ancestral polymorphism is S, Derived polymorphism is Y
  VARIANT 221: note = Ancestral polymorphism is W, Derived polymorphism is R
MGRFNVDILCGHNEDVRDVFLLVSANLIFTSGRDSVVRMSKMEEGLLIDTSRALGGTIRAIAADSRLLVSGGTNAYIQCWMWKAMINYFTSLDVGHEGPVTCLALDSLRIYSGYLDMTVRVWYRAQMECVQKFMHADWVWALALRGNTIASTTGINAYVWDIRDDNLTSLISNAHVGSTYSIAWTHLADVLFTGGEDGAIRLFNVSDVSDDEEDIKPVATWVPHSASSGGRIALIDLRKLPTPKRSSKDRIVSAGEDGSVRIWNFSEALDIERRAQALRSLRQENRMRRRKAQCVLIKSKIRPSNL

SEQ ID NO: 7327 - protein, 392 aa, Zea mays
  VARIANT 285: note = Ancestral polymorphism is P, Derived polymorphism is R
MTMQDVLSRMCQVWVVLSGKHISTSKDPVEHNRILGEEGSSSYFGTIQERALKCKEQIRDKLLSKLKLRQQEGCGSHGEDKLSQRKLSASLKENNFCIPEHVDQFSMSQIRKATRRLSSKNLIGQGGYGPVYKGNLGGMPVAIKILKPRGSQGFPEFLQEMVVLSRLEHPHIVKLIGVCPESCSLVYEHLCNGTLLDRLKQGGLQWEDRIRILTEQRSALVYLHSSRPNAIIHADLKLNNILLDAGDVSRLGDFGTARVVPVKPLEEETIIRRTVPMGTMGYIDPVFLMTGKLTTASDVYAFGVVILQLLTGLDDLNIVEQVRVAVKMHAVNTVLDPSAGTWPKKPTGQLLKLALRCCSWERKRRPAITSKTKWRSLHTLRAMSTSANKTQK

SEQ ID NO: 7328 - protein, 853 aa, Zea mays
  VARIANT 1: note = Ancestral polymorphism is M, Derived polymorphism is R
  VARIANT 6: note = Ancestral polymorphism is L, Derived polymorphism is P
MSPFVLAVVSVAFLSLRFLQAHGSGLLLSCGSNSTVDADGRRWIGDITPEGNFTLSSPGLAASLVGKSSSDEIFGPLYSSARFFNAATWYTISVLPGSYCVRLHFFPSTFGNLSANNSVFDVTANDFKLVSKFNASEEIAWRASVSNSVTSAVVKEYFLVVGARGLSIEFDPRPGSFAFVNAIEVMLTPDNLFNDTVSKVGSPVTQLPLGLRGRGVETMYRLNIGGPALKSPSDQYLHRPWYTDEAFMFSTNAAQTVSNASSIVYVSSNESTIAPIDVYETARIMGNNMVVDKRFNVSWRFYVHPNFDYLVRLHFCELVYDKPSQRIFKIYINNKTAAESYDVYARAGGINKAYHEDFFDNSTQQADTLWLQLGPDSMASASGADALLNGVEIFKLSKDSDLSYVLGHIDTGNQMDSSKGGKIKGLWEELGIGSASFVAVTSVVLFSWCYIRKKRKAVNKEAPPGWHPLVLHEAMKSTTDARAASKSSSARNASPIGHRMGRRFGIAEIRAATKNFDESLVIGTGGFGKVYKGEIDEGATVAIKRANTLCGQGLKEFETEIEMLSKLRHRHLVAMIGYCEEQKEMILVYEYMAKGTLRSHLYGSSLPPLTWKQRIDACIGAARGLHYLHTGADRGIIHRDVKTTNILLDDSFVAKIADFGLSRTGPTLDQTHVSTAVRGSFGYLDPEYFRRQQLTQKSDVYSFGVVLFEVACARPVIDPTLPKDQINLAEWAMRWQRQRSLEAILDPRLDGDFSPESLKKFGEIAEKCLADDGRSRPSMGEVLWHLEYVLQLHEAYRRNVVESESFGSGELGFADIPSFFSLPHVIREGEEEHHHRSKKPSSIREELDTRENF

SEQ ID NO: 7329 - protein, 488 aa, Zea mays
  VARIANT 346..488: note = Derived polymorphism lacks residues 346 to 488
  VARIANT 250: note = Ancestral polymorphism is R, Derived polymorphism is C
  VARIANT 110: note = Ancestral polymorphism is P, Derived polymorphism is L
MQAAGASRWPGSRWRRVSARSLPCSSILAALAILIRQIMEELQDCNSRSLVALPGSLVLRLFRLFGQQDQSSWQKYILAYFLLVRNEYFSGESKKHSDVFCDISELDFFLYATDLDSEELELKEQKPITKAQSGGDSSGNRSNDCYFPGLHDDLSQDCLAWASRSDYPSLSCLNKRFNLLINSGYLYRLRRKYDIVEHWVYLACSLMPWEAFDPSRKRWMRLPRMPCDECFSCADKESLAVGTQLLVFGREYTGLAIWMYNLLTRSWSPCTPMNLPRCLFASGSSGEIAIVAGGCDKNGQVLRSAELYNSEIGHWETIPDMNLPRRLSSGFFMDGKFYVIGGVSSQRDSLTCGEEYNLETRTWRRILDMYPGGTSASQSPPLVAVVNNQLYAADQSTNVVKKYDKANNAWNILKPLPVRADSSNGWGLAFKACGDRLLVIGGHRGPRGEVILLHSWCPEGGEDGADWEVLSVKERAGVFVYNCAIMGC

SEQ ID NO: 7330 - protein, 192 aa, Zea mays
  VARIANT 140..192: note = Derived polymorphism lacks residues 140 to 192
  VARIANT 122..192: note = Derived polymorphism lacks residues 122 to 192
  VARIANT 83: note = Ancestral polymorphism is R, Derived polymorphism is I
  VARIANT 62..192: note = Derived polymorphism lacks residues 62 to 192
  VARIANT 58: note = Ancestral polymorphism is C, Derived polymorphism is Y
MSPVEFEPSVSDDLVLEQKSGNGQHDVRGTHHHRTRMKPEKPIDLLRKVDGNNMCADCGASEPDWASLNLGALLCIECSGVHRNLGVHISMVRSLTHDVRVWEPSVINLFQSLGNMFVNSIWEETLPDDNSSADGSDTSQYLSISKPKHKDVFSAKEKFIHAKVFTTFTTAYIPLFFSNVWGVKNQIISSEE

SEQ ID NO: 7331 - protein, 163 aa, Zea mays
  VARIANT 80: note = Ancestral polymorphism is V, Derived polymorphism is G
MLDDPFPLSAYTMVTMGLLKLKEEDNAEERDFAVRDVQIGGTSSVQMALERSVGYSGRVEAARATLDQVRVEDIDTNVVGLKELLFPLIEIGKRLLALAGWEEPCKSYVFLLCFLYMAYSTREEHSPMKIIDFGLSDFIRPDINRFAEKHQEHSKTFMLTPDK

SEQ ID NO: 7332 - protein, 489 aa, Zea mays
  VARIANT 55: note = Ancestral polymorphism is R, Derived polymorphism is G
MGSLPPVDGQRRPPHVVMIPYPAQGHITPMLQFAKLLHTRGFHVTFVNNEFNHRRHLRARGPNALDGTDGFRFTAIDDGLPLFEADATQDIPALCHSTLTTCLPRFKDLIARINAEAEAEGQPTVTCVVGDSTMTFALRAARELGLRCATLWTASACGFIGYFHYRHLVERGMVPLKNEEQLTDGYLDTIVDWIPGAPKDLRLRDFPSFVRTTDPNDVMLNFFIHETEGMSQASAVVINTFDELDATLLAAMAKLLPPIYTVGPLQLTVRNNVQANSPVAAIGSNLWKEQEAPLRWLNGRAPRSVVYVNFGSITVMSNEQLVEFAWGLANTGYYFLWNVRPDLVKSGDSAGLPPEFSAATEGRSMLSTWCPQAAVLEHDAVGVFLTHSGWNSTLESICGGVPMLCWPFFAEQQTNCRYKCTEWGIGKEIGDDVQRGEVESLIREAMEGEKGQEMLRRVTELRDSAVAAAGPDGRSMRNVDRLIEEVLLA

SEQ ID NO: 7333 - protein, 1190 aa, Zea mays
  VARIANT 67..1190: note = Derived polymorphism lacks residues 67 to 1190
MASWKNTCSYSYTPVSNAVAMLALALLVLAAPAASAVPDASASVHLEALLAFKKAVTADPNGTLTSWTVGSGGGGGGGRYPQHCNWTGVACDGAGHVTSIELVDTGLRGTLTPFLGNISTLQLLDLTSNRFGGGIPPQLGRLDGLEGLVLGANNLTGAIPPELGGLGSLQLLDLSNNTLRGGIPRRLCNCSAMAGLSVFNNDLTGAVPDCIGDLTNLNELVLSLNSLDGELPPSFARLTRLETLDLSGNQFSGPIPPGIGNFSRLNIVHMFENRFSGAIPPEIGRCKNLTTLNVYSNRLTGAIPSELGELASLKVLLLYGNALSSEIPRSLGRCASLVSLQLSMNQLTGSIPAELGELRSLRKLMLHANRLTGEVPASLMDLVNLTYLSFSYNSLSGPLPANIGSLQNLQVLVIQNNSLSGPIPASIANCTSLYNASMGFNEFSGPLPAGLGQLQNLHFLSLADNDKLSGDIPEDLFDCSNLRTLTLAGNSFTGSLSPRVGRLSELSLLQLQGNALSGAIPEEMGNLTKLIALQLGGNGFVGRVPKSISNLSSLQKLTLQQNRLDGALPDEIFGLRQLTVLSVASNRFVGPIPDAVSNLRSLSFLDMSNNALNGTVPAAVGSLDHLLTLDLSHNRLAGAIPSALIAKLSALQMYLNLSNNGFTGPIPTEIGALTMVQSIDLSNNRLSGGVPSTLAGCKNLYSLDLSANNLTGALPAGLFPHLDVLTSLNISGNELDGDIPSNIGALKNIQTLDASRNAFTGALPSALANLTSLRSLNLSWNQFEGPVPDSGVFSNLSMSSLQGNAGLCGWKLLAPCRHGGKKGFSRTGLAVLVVLLVLAVLLLLVLVTILFLGYRRYKKKGGSTGANSFAEDFVVPELRKFTCSELDAATSSFDEGNVIGSSNLSTVYKGVLVEPDGKVVAVKRLNLAQFPAKSDKCFLTELATLSRLRHKNLARVVGYACEPGKIKAVVLEFMDNGDLDGAIHGPGRDAQRWTVPERLRACVSVAHGLAYLHTGYDFPIVHCDVKPSNVLLDSDWEARVSDFGTARMLGVHLTDAAAQSATSSAFRGTIGYMAPEFAYMRTVSAKVDVFSFGVLMMELFTKRRPTGMIEEEGVPLTLQQYVDNAISRGLDGVLDVLDPDLKVVTEGDLSTVADVLSLALSCAASDPADRPDMDSVLSALLKMSKVCGRD

SEQ ID NO: 7334 - protein, 214 aa, Zea mays
  VARIANT 189: note = Ancestral polymorphism is E, Derived polymorphism is K
  VARIANT 141: note = Ancestral polymorphism is P, Derived polymorphism is H
MTRKLIEIRWHKYCAGLKLVSNFVKPQELMEDGSAPRRSTPPTRRSRSAEFHNFSERRRRDKINEKLKALQELLPNCNKTDKVSMLDEAIDYLKSLQLQLQMLVMGKGMSPVVPLELQQYMHYITADPAQLPPLRPSGQQHRQFQITQANPQRQSNVESDFLSQMQNLHSSEPPQNFLRPPKLQLYTPEQRGGLPNTSHNTGWISGSSSYNFME

SEQ ID NO: 7335 - protein, 67 aa, Zea mays
  VARIANT 21: note = Ancestral polymorphism is L, Derived polymorphism is S
MATTMKTAKVVLLVIFLVQVLSVLAAAARPLAEGDAGTDSWLESGVGMLTQLLLGAKSGSNPRTHCC

SEQ ID NO: 7336 - protein, 152 aa, Zea mays
  VARIANT 115..152: note = Derived polymorphism lacks residues 115 to 152
  VARIANT 12: note = Ancestral polymorphism is R, Derived polymorphism is L
MSQSQIEAYTRRAGAAVALAAASALTTGFPALEPRAHVVLALHAILLLGCAAVLLSPAHGDGGPEAARGTTVLGSLRWLGFAGMALSALHVDAEEAPRGTVRDLLLFLVFLAGVWGVYLSMVRGRGEGVPRPRNRGWRWKKMLTARRPTPCP

SEQ ID NO: 7337 - protein, 455 aa, Zea mays
  VARIANT 144..455: note = Derived polymorphism lacks residues 144 to 455
MAFLLLAFDTMASIGFGGARVLGDAVVATGGGEADVRDQEAVAAKEGRGRSRQLFSGVGRRVFRGMAGDSKVGRRGGRVLVGFIPGRRLHMSTTPRSRSQGSRTTRPWILSGMDFAGSRRKPNLTGKIAVAAALTVMCIIVLKQSPSFSGTSVFSRHETGVTHVLVTGGAGYIGSHATLRLLSDKYRVTIVDNLSRGNIGAVRVLQRYYHNITSNTLTVLEAMAAHNVNTLIYSSTCATYGEPDTMPIVETTPQNPINPYGKAKKMAEDIILDFTKSKKQSNMAVMILRYFNVIGSDPEGRLGEAPRPELREHGRISGACFDAALGIIPGLKVRGTDYSTADGTCVRDYIDVTDLVDAHVKALGKAQPGKVGIYNVGTGQGRSVTEFVEACKKATGASIKVEYLARRPGDYAEVYSDPSKIHMELNWTAQYTDLGQSLAQAWKWQKAHPNGYGPA

SEQ ID NO: 7338 - protein, 263 aa, Zea mays
  VARIANT 2: note = Ancestral polymorphism is A, Derived polymorphism is V
  VARIANT 3: note = Ancestral polymorphism is S, Derived polymorphism is Y
  VARIANT 64: note = Ancestral polymorphism is F, Derived polymorphism is S
  VARIANT 151: note = Ancestral polymorphism is V, Derived polymorphism is A
MAYRAFATLLAVLAFVGFASVPRGLATDPTQLQDFCVADNKNPVLVNGVVCKNPNVVKATDFFFRIVPMAPNGQGSAVTPVAVNEIPGLNTLGISLARIDFVPGGQNPPHTHPRGSEILTVIQGTLLVGFVTSNQLLNNTLFTMQLNMGDVFVFPQGLIHFQLNNGKTPAVAIAALSSQNPGTVTIANAVFGAKPPILDDILARAFMLEKATVDWVQQAFGAAPVAGGGGGLPGGGGYPGSGGGLPGGGGYPGSGFPGYPGRS

SEQ ID NO: 7339 - protein, 310 aa, Zea mays
  VARIANT 230: note = Ancestral polymorphism is Y, Derived polymorphism is S
  VARIANT 115: note = Ancestral polymorphism is A, Derived polymorphism is V
MTTARLVSTSPARLPSTSASPIPRTSLCVVGRAPAFSARALGFSLRLKPSPAMAAAGPPTAHGDSIGSSRIGEVKRVTKETNVHVKINLDGTGVAECSTGIPFLDHMLDVSSLSVQLASHGLFDVYVKAIGDTHIDDHHSNEDIALAIGTALLEALGDRKGINRFGHFTAPLDEAAVEVILDLSGRPHLSCGLDIPTQRVGTYDTQVNCEICKPFVICINIFNLQKSFIYSFWSQLVEHFFQSVVNTSGMTLHIRQLAGKNSHHIIEASFKAFARALRQATEYDLRRQGTVPRSVFPYSELFSKGVLSRS

SEQ ID NO: 7340 - protein, 597 aa, Zea mays
  VARIANT 73..597: note = Derived polymorphism lacks residues 73 to 597
MGQLEATQIDTNTKLANVEMTVAHIDKSLVALLRRFDEMHANINGGRDEGAEDNPSSVASSSITQSTAATIKSDDPAWKHCYCPDLKKKHSLKCNYCDKLINAGITRVKYHLANIGGFNVSKCKKVPTPVKEDMVALLTKNCDAKEKKRKEKQRERDEIDLDNSGGDNSSEEESEHGNDVIVLKSTKGGSSSRLATTGGTIDKFYKPESIEESVQKNKRGLSTSQKIQTQLTTQKREERRDRACEYICQFFYEAGIAHNTVTLPSFAHMVEAIGAFGRANVLRRMDSDVPAMGFLHGCMLEAKKEIAMRFDNNENSFKVAWDIIDKRWDNKLKTPLHLAGYYLNPYFYYPNKSEIELDGSFRAAVIACITKTVEDEETQDNIIEELNVYQEQQGTFGHDIAVRQRRNKNFNPAKWWLNHGTSTPNLRLLATRILNLTCSSSGCERNWSDFEQVHTKKRNKLLHDRMRDLVFIKYNSRLRQKRENKSKDPLEREMNDVLEDDANEFITGLVPNANSDKDEEHGGAQVGETIHESQLSQPQPKRKRLVRPRKKKIRSLHSLLYGGLENEAVASSSESEDNGDGDISMHQYSDSDDLGDE

SEQ ID NO: 7341 - protein, 326 aa, Zea mays
  VARIANT 120: note = Ancestral polymorphism is S, Derived polymorphism is L
MDYLRTVVPSQLLAERGSNLVVINPGSGNVRMGFASQDVPFNIPHCIARHINPQEGEEPRFSVRDQMLNCHATSSQNAERESAYDIIAALMKIPFLDDEEMPSPNQPLPPKMGRVDGFSSQQNRDDNKFTWTDVSERIIKPSTPFDRSVYKDAEEDTLPSTSDDDNGQDFKENKYKEMIFGEDALKIPPSESYCLSRPIRRGHFNVSHNYSVHQVLEDLRTIWNWILTEKLHINPRDRGLYSAILVLGETFDNRGIFLFIQQNFSVQEIKEMLSIVLHDLGFSTAVVHQEALSAAFGNGLSTTCVVNIGAQVTQVVCVEVITLVFF

SEQ ID NO: 7342 - protein, 216 aa, Zea mays
  VARIANT 33: note = Ancestral polymorphism is G, Derived polymorphism is V
  VARIANT 35: note = Ancestral polymorphism is G, Derived polymorphism is V
MLAADVSSVARLLRGEAVKKGGPEIVTMDLLGGCGGGVAAEDEVVDLDVTVPAGWERRLDLLSGKTFLTPRHQSVQGGHQDLNLPPPAAGSASAPNTNNSSAAVCTLDMVRSALERATAGRTAASPATSSTSSASTSSSSSAGKRNRRSPLPATPAMRAAACPSCLTYVLIAEADPRCPRCAARVPPLRGKAAGAATVGSGKKPRIDLNAAADEME

SEQ ID NO: 7343 - protein, 366 aa, Zea mays
  VARIANT 327: note = Ancestral polymorphism is A, Derived polymorphism is P
  VARIANT 294: note = Ancestral polymorphism is C, Derived polymorphism is G
  VARIANT 199..366: note = Derived polymorphism lacks residues 199 to 366
  VARIANT 197: note = Ancestral polymorphism is P, Derived polymorphism is L
  VARIANT 191: note = Ancestral polymorphism is R, Derived polymorphism is W
  VARIANT 162..366: note = Derived polymorphism lacks residues 162 to 366
  VARIANT 11: note = Ancestral polymorphism is A, Derived polymorphism is S
MPNCFSKTKQARMMIMYLLENKLSKTYLLLHFSKTIDHTQEVQIRKQAVATPVRFSDGSRQGLTMEKSTVVVSVPVVVMAETAETDYSSSFSLLVVDSHLLPGAPLQDAESQKDVGKGDKSRDKGTAEKFAIYQKHRSSLADTVQFRRPAAPTSSVNADIVGTSTLQSASLPKQEPSTATSKSYTFREGDRVRYMGPAQLSSLSQRCDINVRSFTGSSPFAGFAVGSETSCGREWLFTPIGLTKTPLSGRGSVTLTPSSSPRAPAVMLWKRKSSGRGGCGGDEMRERLIPAAGCVPPGCVAVLVGGGDEPERVVVDVRALAQPCVRALLEAAQREFGFDQKGVLRIPCAADEFRRAVTAGGHRCRR

SEQ ID NO: 7344 - protein, 113 aa, Zea mays
  VARIANT 113: note = Ancestral polymorphism is R, Derived polymorphism is W
  VARIANT 88: note = Ancestral polymorphism is K, Derived polymorphism is T
  VARIANT 40: note = Ancestral polymorphism is C, Derived polymorphism is Y
MNWKRKSSGSRCREEEQRERLIQQAAADPPDGLRSCKGCCVPRGCVAVLVGGGAEPEERVVVDVRALGQPCVRALLDMAARELGYDQKGVLRIPCAAAEFRRAVAADGHRCMR

SEQ ID NO: 7345 - protein, 428 aa, Zea mays
  VARIANT 372..428: note = Derived polymorphism lacks residues 372 to 428
  VARIANT 321..428: note = Derived polymorphism lacks residues 321 to 428
  VARIANT 306: note = Ancestral polymorphism is C, Derived polymorphism is G
  VARIANT 276: note = Ancestral polymorphism is P, Derived polymorphism is L
  VARIANT 5..428: note = Derived polymorphism lacks residues 5 to 428
  VARIANT 3..428: note = Derived polymorphism lacks residues 3 to 428
MLQLQWAPWLFSRVVVQGAGPGPRYGHCMDLAAQQYLVTVSGNDAHDVPVRVKNSYNPKAPGTLITRQRDMDKVVLTSIVLKSNVTMLDILSTQMLGQYGFPGKGLMEFLEQRILDEMMDNGFPLTTEPNILKEMITPPNIVNKMLNVVTGKSSTLGSKLPNAAASFVPWRRTTVKDASNEVYVNIVEELDACVNREEGVLVKCEAYDDVQVNCSLPGVPELTMSFANTAIINDVTFHPCVRFRPWDSNQILSFVPPDGQFKLMSYSRVQKLKKTPIYVKPQLTSDSGNCRVSVMVGILEAEHSTCTFTLLCFSDASLLMQTCLWTIGQIPKDKAPALSGNLRLEEGLAQLHALSTFQVRFTIMGVALSGLQIDKLDVKNTLNAPYKSFRAQTQAGKYEVRSSIGVLYLNQIILCGVKATEYCDPRPI

SEQ ID NO: 7346 - protein, 301 aa, Zea mays
  VARIANT 110: note = Ancestral polymorphism is R, Derived polymorphism is S
  VARIANT 112: note = Ancestral polymorphism is A, Derived polymorphism is V
  VARIANT 150..301: note = Derived polymorphism lacks residues 150 to 301
  VARIANT 151: note = Ancestral polymorphism is H, Derived polymorphism is Y
  VARIANT 155: note = Ancestral polymorphism is S, Derived polymorphism is L
  VARIANT 195: note = Ancestral polymorphism is R, Derived polymorphism is W
MTTPGSCPATTAATHPPMCAASAAGRSPPNLPLLSRLCVSLLLGRQTPKMSQFYFRAGGSQKMVRPRLVLFGDSITEQSFRPGGWGAALADTYSRKADVVVRGYGGYNTRWALFLVHHIFPLDGLAPPLATTIFFGANDAALLGRTGERQHVPVSEYKNNLKMIVNHLKDCSNSMVIVLITPPPIDEEGRERFARSLYGQNARKLPERTNEMAGVYAGYCVELAREMCIPCVNIWSKMQETEGWQKLYLSDGLHLTQEGNAVVHKEVVEALRNAGFKAEQMPYDFPHHSKIDGSCPEKAFQ

SEQ ID NO: 7347 - protein, 98 aa, Zea mays
  VARIANT 79: note = Ancestral polymorphism is G, Derived polymorphism is R
  VARIANT 64: note = Ancestral polymorphism is E, Derived polymorphism is K
  VARIANT 47: note = Ancestral polymorphism is R, Derived polymorphism is L
  VARIANT 46: note = Ancestral polymorphism is A, Derived polymorphism is V
  VARIANT 32: note = Ancestral polymorphism is A, Derived polymorphism is V
  VARIANT 17: note = Ancestral polymorphism is G, Derived polymorphism is D
MSGPAPVTAPPLTIFYDGRVVVFEDFLAEKAVEVMRLAAGDDLPIARKATLQRFLAKRKDRLVKRVALHPPIVPHGGAGEEDGQAGLGLGHMLDKMTV

SEQ ID NO: 7348 - protein, 482 aa, Zea mays
  VARIANT 431..482: note = Derived polymorphism lacks residues 431 to 482
  VARIANT 121..482: note = Derived polymorphism lacks residues 121 to 482
  VARIANT 110: note = Ancestral polymorphism is A, Derived polymorphism is T
  VARIANT 87: note = Ancestral polymorphism is T, Derived polymorphism is I
  VARIANT 14..482: note = Derived polymorphism lacks residues 14 to 482
MMQVHPSSYYKMKRRIRDMLLKKVEPSSKLQTIDAMQRLGISYHFEDEISNILYSISNESTKAQYTYDNIAFTALKFRLLRENGFPTILGPLGYHNYEKFITKTPSLEDANTLLLLYEASYLAFGDEEKLDVARTFSAKALKQLMPFMLPHLREGVAHSLELPLHWRASRLETRWFIDYYARDRNMCPLLLQFAELDFNQVQYEHQKDLAVVTRWWKKIGLGEKLPFARDRLMECFHYANGIVWDPKLGTCRQMLAKVSNLIVYLDDLYDVYGTIEELVLFTNAIARFDLLEWHLTCSWYDICLAFLVEAKWHHGNYRPSIQKYLENGWVSSSAPLLLLHAFAMLDSVVNMSTISPLQTKLRLVQHVSLILRLCNDSATHLDELGRGDAPSFIALHMIENGGNENDSRKAMQEHILKSWKVINEEAFDSCQYSMPFNKACIDLARISHCVYQGGDGFGTPNGLKKKQIRDLFLDPIDICNKQ

SEQ ID NO: 7349 - protein, 728 aa, Zea mays
  VARIANT 375..728: note = Derived polymorphism lacks residues 375 to 728
  VARIANT 220..728: note = Ancestral polymorphism lacks residues 220 to 728
  VARIANT 216..728: note = Derived polymorphism lacks residues 216 to 728
  VARIANT 111: note = Ancestral polymorphism is Y, Derived polymorphism is D
MAPVAIGEWMASACIAKMVSKVCSYLEDQYEYQRDDAKDKLTKLKNNLWKIPFVLDKASSLQTKDPSMKSWQGSIKDAAYQAVDVLDLFDYRFFEAKAEDIEKVLAESSDYATVNSSSSATTNTTASTSSSSTVKRSVRVLKRVLFSDEDLNKLIAILEKFDKISSEMQTFLELVNPRNKKPGKALQWRRTTSMLGTTRLIGRGDEETQLKKLLEQTNDWCRKPYSVIAIVGVAGVGKTALLQRVYSHFRDIGHFDIMAWLYVSEKFGVKRLTKEMVQSQKCRRHKRKRGGTSRVSWDGSISADLNSISNLDLVQRILEKKLNGSKVLVVLDDVWNEMSSKWETLCKPLQFASMGSKVVLTTRSEKVAKINGATEIIHLDGLKGKEYLDHFQQCAFDNATPSDFPRLVQIGEQLAMKLAGSPLAAKTVGAELKLKLQEDHWKAVLQLKLWQIEQTADDIMPALRLSYEHLPDHLKQCFVYFALFPKNYQHRDDVLIQMWRAHGYIQKETSDENAYRYINDLLQLSFIKKAANLDNHYVVHDLLHDLAESISNGEHFRIEDDFHVSIPRNVRHLYVNASNISKVCMSLVESQEGLAESPDLKKNLRSLIICKHHAPGERIPPDNFNDVLKETLHDLRSLRVLVLQHPDGILPDNIEHLVHLRYLDISESKIFTSIPKSLFRLYHLQGFILQSYCQHNLGKELQKHISRLTAEPVKILSPIQKSRHQNDR

SEQ ID NO: 7350 - protein, 266 aa, Zea mays
  VARIANT 29: note = Ancestral polymorphism is A, Derived polymorphism is V
MYASLCLVSCLFIHHRPAGDFPFIIDLPASLNFFCCVCWPGAEVATRIYSEEEIEMTSVWKTKVLPGLNKIFDKDGKKAAAAGFLKSFNKEEFDKEIEDKKTELEPKVVEAYEASPPEVKALFKDKKPVKVSKKNSAAVTKFLDELAKIDFPGAKVVSEAVAKSGTSPLLPAITFILDKVAPFIPKEEPKEEPAAEATSREVAVEEKKEEAEPAAATEAAPAPAETPSEAAVVEEKKEEEKKEEEDKPAAEEAAPPAAAAAAAEEK

SEQ ID NO: 7351 - protein, 135 aa, Zea mays
  VARIANT 48: note = Ancestral polymorphism is D, Derived polymorphism is Y
  VARIANT 79: note = Ancestral polymorphism is P, Derived polymorphism is H
  VARIANT 84: note = Ancestral polymorphism is E, Derived polymorphism is K
  VARIANT 103: note = Ancestral polymorphism is P, Derived polymorphism is S
MSYHLNQGTHLKHGLNMLQSMQNGNKSSKNSLKDVVTENEFEKRLLADVIPPNDIGVTFDDIGALENVKDTLKELVMLPLQRPELFCKGQLTKPCKGILLFGSPGTGKTMLAKAVATKVGANFINISMSSITLVW

SEQ ID NO: 7352 - protein, 139 aa, Zea mays
  VARIANT 118..139: note = Derived polymorphism lacks residues 118 to 139
  VARIANT 57..139: note = Derived polymorphism lacks residues 57 to 139
  VARIANT 45..139: note = Derived polymorphism lacks residues 45 to 139
  VARIANT 44..139: note = Derived polymorphism lacks residues 44 to 139
  VARIANT 31: note = Ancestral polymorphism is P, Derived polymorphism is L
  VARIANT 30..139: note = Derived polymorphism lacks residues 30 to 139
  VARIANT 15: note = Ancestral polymorphism is R, Derived polymorphism is C
MEFQVTLEESVDPRRTRCSRILIRDSEEFQPVVPVVKAEPLKNQWADEDVEEDDVKESWEEEEEEAPDCQKFDKINAKLGIRKEDLPKIEQELELEIAKSELTELKKECVEAMETQLKREEFQDEEMPDVRKQDIRNFL

SEQ ID NO: 7353 - protein, 634 aa, Zea mays
  VARIANT 16..634: note = Derived polymorphism lacks residues 16 to 634
  VARIANT 29: note = Ancestral polymorphism is V, Derived polymorphism is A
  VARIANT 50: note = Ancestral polymorphism is R, Derived polymorphism is W
  VARIANT 51: note = Ancestral polymorphism is S, Derived polymorphism is Y
  VARIANT 62..634: note = Derived polymorphism lacks residues 62 to 634
MECLFQLNAYLGNEASEGIRPIKQKLKEAGYKIEYRRYSRRYIEVALYLRSSFVVMCTASAWNCEFSPTKISVRHLSFFSDSGFCPARMESLFVGLSHNKPKTSVATAIVREVLSHDWLLLDYICTQGDLALIDFIEEIPCEPRVEVVLIDDAFVERKWMECLFQSNTYLGNEVFIPINIRETHWYLAVIHARNMEIQVLDSLGTSQDRKDLTDSIKGLQRQIDMISQRKELKDHRWPDLQVASWPLREIDMGYAKQTDSSSCGLFLLNYIEYWTGDELSDSFTQDDMSHFRKKMVAILLSSDLNKRRGCLLYKNEKEVDSGSPSDVEILENPTDSNKMKLLHMLDDSEVVYEDEEGPITQADLQRWFVDDWDKRAPVKVSTDGCTNDFLMVGLSTKDMPVTKADSIDVLCDYIMAIKDDAILEMTWVRSFNPFKIEISVKDLQNILTINQDMILRCFDMAVRLLANKESRRPKEEIINNRKHYMDMRFWRMVGFGKLPKYHQDPTTEELAKTLDCWPSMNYYITGCRYVLMPWKLNGCHALFVIDHVKKHVTFIDFTLTQDWCKHMPYKRFAEAIIMASKKYKIAYSKKRSGWAEDIFKWEHTIQTGVPIDLRGFNTSYLVLQAMSMGEMTDE

SEQ ID NO: 7354 - protein, 358 aa, Zea mays
  VARIANT 1: note = Ancestral polymorphism is M, Derived polymorphism is V
  VARIANT 19: note = Ancestral polymorphism is P, Derived polymorphism is L
  VARIANT 25..358: note = Derived polymorphism lacks residues 25 to 358
  VARIANT 77..358: note = Derived polymorphism lacks residues 77 to 358
MYIDNVTELAFDDVTPEDPDFPFIQGLAEAGLISSKLSRSDMNIPEDVHDNHILFSPESPLSRQDLVSWKMALDKRQLPEVDRNCLFKLSGYIDIDKINTAAWPALAADLDAGDQSITALAFGFTRLFQPNKPVTKGQAALAFSAGDSGEVVLEELARIEAEKIAEAAVNAHAALVAQIEKDLNASFETELKEERERVETLEKVAEEARVELDRLRAEREEEKNILLRSEVEEQPQNVLSKKVEVSFEKSRIEKLQKEIESDNSAVVQLQYELEVERKALSMARAWAEEEAKKAREHARALEEAQNQWEHQGIRVVVEGELKDDASAGVTWANAGKEHAVDESINQAEALLEAQDNVW

SEQ ID NO: 7355 - protein, 244 aa, Zea mays
  VARIANT 17..244: note = Derived polymorphism lacks residues 17 to 244
  VARIANT 32: note = Ancestral polymorphism is N, Derived polymorphism is K
  VARIANT 175: note = Ancestral polymorphism is T, Derived polymorphism is M
  VARIANT 197: note = Ancestral polymorphism is C, Derived polymorphism is Y
  VARIANT 203..244: note = Derived polymorphism lacks residues 203 to 244
  VARIANT 206: note = Ancestral polymorphism is G, Derived polymorphism is S
MDATQNHLSLVNKDENQQTMADLFQEVFNPTNMDGAMKSMRSTGAGNYGRMQQIMQMEKDWHVEFLRQYSREHNYSGGVVGSSWLHVHEIVHGQHMDEVVPKLNFLVPIPDQYINFLGETSNMFIFLSNCASSVNPPRHPGLHVLGRRLHRDNDTGGESIYGARFADENFKLRHTGPSVLSMANAGPDTNGSQFLICTVQTPWLDGKHVVFGKVVDGYAVVDKMEAVGSQSCATVETIRIEDCG

SEQ ID NO: 7356 - protein, 309 aa, Zea mays
  VARIANT 276..309: note = Derived polymorphism lacks residues 276 to 309
  VARIANT 177..309: note = Derived polymorphism lacks residues 177 to 309
  VARIANT 153..309: note = Derived polymorphism lacks residues 153 to 309
MTSAPSAFLKPKCALWDCLRPAVGSERWHDYCSMYHADLAVQEEGPPGTMPVIRPRGIDLKDGPLFTALSAKNIRKKMLGSLSVKELPLQSLRGMHLPFCTIAELFDLYIFEGESIREWLFFDKPRRAFVSGNRKQRSLLDYGGRGWHESRKQAMKDFGGLKRSYYMDPQPSNSYEWHLYEYEINECDAFALYRLEFKSSDAKKTVKSKLVCNPMNEIQQQMVRLSANSPVDNKRTARGRPHANPTDVDTNIYSVPNTTAQANVPNAFQPGSEVDQMTYLNGSVVYGPHLSYGYSTERSYFYWNSADGT

SEQ ID NO: 7357 - protein, 280 aa, Zea mays
  VARIANT 45..280: note = Derived polymorphism lacks residues 45 to 280
  VARIANT 198: note = Ancestral polymorphism is H, Derived polymorphism is R
  VARIANT 204: note = Ancestral polymorphism is A, Derived polymorphism is S
MAEDGADDGQGIYDPFLVPNDDFDDDVLYLLDMNDGGGMDPRPLQGAATQSAIVVAGPSGDDNNNLLEWPPTSTLDSVVVDNSAPTHNAVLASDPTTTATSGVQDDAGAAGTSSATAPRSSSSSLDCTGCQVLREVVHCNGLQATKLGIHGVAAGVFHHATLELYRIDSNGLAATMTTQLTHQSYVDFSGRDYVWVKHYLTDYARQRAAGGYMVLDDSISAFQDALCTSMVCAGHAREAVALEINGGRPAGDDGGGVVRAPAAMVEESSVPAVAGWLLNN

SEQ ID NO: 7358 - protein, 552 aa, Zea mays
  VARIANT 310: note = Ancestral polymorphism is N, Derived polymorphism is Y
  VARIANT 345: note = Ancestral polymorphism is R, Derived polymorphism is W
  VARIANT 347..552: note = Derived polymorphism lacks residues 347 to 552
MAGYRGGSSVSASTGGGGSAVAAAFSTRLLLLLTLLPLALAAFAFALQWRGGMRDPAGAAWPADAQRFPGMENSPLSSSHGGAGSYFAVSSSSSSPGADCAEILGRSAASSNGISLYRGWSFDSESAITPKICITGSTSASLHQILPWLYYHKVIGVSHFFLFVEGEAAKPAVTSVLESIRGVKIIYRTKELKEKQEKSRIWNETWLAGFFYKPCNYELFVKQSLNMEMAIIMARDAGMDWIIHLDTDELIHPAGAREYSLRRLLLDVPDNVDMVIFPNYVSCRSNMFESSIERDDIKDPFTEVSMFKKNYDHLPKDTYFGLYKEATRGNPNYFLTYGNGKSAARVQEHLRPNGAHRWHNYMKSPNEIKLEEAAILHYTYTKFSDLTSRRDRCGCKPTKEDVKRCFILEFDRLAFIIASTATEEEMRNWYKEHVVWTDRDTNLKLLRKSVLTRIYAPMAIIRGLKESGVFTNAVTSAKAQSKTKSSNMGLGNKDPIQPNGTAGQSTLEGSHGKLQATVRKILEMVDTQEEAAMPPMSPPGFLELTESVTAFS

SEQ ID NO: 7359 - protein, 565 aa, Zea mays
  VARIANT 441: note = Ancestral polymorphism is T, Derived polymorphism is I
MGNCCVSRPSSGKRRGACRGGAGGPNRGGRLGGANVRSSSTLSSISATAATQAWSPLTVLGKGLAAEVSAEELLRRYQLGEELGRGEFGVTRRCTDTASGEVVACKSISKRKLRSSVDIEDVRREAAIMRSLPEHPNVVRLREAFEDGDTVHLVMEVCEGGELFDRIVSRGHYTERAAAGVMRTIMEVVLHCHKHGVMHRDLKPENFLYANTSETSPLKVIDFGLSVCFKPGDRFSEIVGSPYYMAPEVLKRNYGKEIDIWSAGVILYILLCGVPPFWAETDEGIAQAIIRSNIDFQREPWPKVSENAKDLVRKMLDPSPYSRLTAQQVLEHPWIQNASAAPNIPLGEAVRSRLKQFTVMNKFKKKALLVVAEYLPAEELEAIRELFHMLDTNKDGHLTIEELRKGLRLIGHNVHDTDVDMLMEAADMDGNGTLDCKEFVTVSIHLKKIRSEDHLPKVFSYFDKNGSGYIEIEELKEALSPRGDQKAIDDIILDVDKDKDGKISYEEFELMMKAGMDWRNTSRQYSRAVYNTLSRKMFKDVSLKLDANNGPLAAAAVVVKEQAVD

SEQ ID NO: 7360 - protein, 266 aa, Zea mays
  VARIANT 31: note = Ancestral polymorphism is V, Derived polymorphism is I
  VARIANT 56: note = Ancestral polymorphism is P, Derived polymorphism is L
  VARIANT 70: note = Ancestral polymorphism is H, Derived polymorphism is N
  VARIANT 90: note = Ancestral polymorphism is R, Derived polymorphism is L
  VARIANT 91: note = Ancestral polymorphism is S, Derived polymorphism is L
MVDLARLLAGRGARVTVVTTPVNAARNRAVVESARRAGLDVEVAEIAFPGPGHGLPEGLENMDLLTRREHFLPFFQAAWKMDAPLEEYVRSLPRRPDCLIADSCNPWTAEVCARHGIPRLVLHCPSTYFLLAMHSLSKHGVHDRVADELETFEVPDFPVPALANRATFRGFFQWPGAEGFQRDVAEAEATADGLLLNTFRDIEGVSSADVEKAVGELMDEGPKGTARRGRAKDLAAKAKVTMMEGGSSYADLTDMIHHVAVLGSRQ

SEQ ID NO: 7361 - protein, 115 aa, Zea mays
  VARIANT 11: note = Ancestral polymorphism is S, Derived polymorphism is F
  VARIANT 26: note = Ancestral polymorphism is S, Derived polymorphism is L
  VARIANT 29: note = Ancestral polymorphism is P, Derived polymorphism is L
  VARIANT 32: note = Ancestral polymorphism is A, Derived polymorphism is V
  VARIANT 39: note = Ancestral polymorphism is A, Derived polymorphism is T
  VARIANT 43: note = Ancestral polymorphism is R, Derived polymorphism is C
  VARIANT 49: note = Ancestral polymorphism is S, Derived polymorphism is L
  VARIANT 50: note = Ancestral polymorphism is R, Derived polymorphism is W
  VARIANT 52: note = Ancestral polymorphism is S, Derived polymorphism is T
  VARIANT 54: note = Ancestral polymorphism is V, Derived polymorphism is A
  VARIANT 56: note = Ancestral polymorphism is T, Derived polymorphism is M
  VARIANT 87: note = Ancestral polymorphism is P, Derived polymorphism is L
MPKPSSGTSTSAPLLPTTTISVPKSSSHPAPAMLLNSLATFGRSLLSSSRRTPVAMLATTFFLLTLVMYDEDTRTNVELSIDDYLYLDADLYNVSDLLLLPGLAQDLHPHLAHRA

SEQ ID NO: 7362 - protein, 623 aa, Zea mays
  VARIANT 504..623: note = Derived polymorphism lacks residues 504 to 623
  VARIANT 393..623: note = Derived polymorphism lacks residues 393 to 623
  VARIANT 212..623: note = Derived polymorphism lacks residues 212 to 623
  VARIANT 89..623: note = Derived polymorphism lacks residues 89 to 623
  VARIANT 37..623: note = Derived polymorphism lacks residues 37 to 623
MRSSPGVIAKLMGIDVLPPSNVVNSRHQEFKDVFEVSEEAPEAVAKERYDTHDCHVDCTDGLGHLKSVEISNRLYEKHPHDMNYSANYQYGRDASSVCRTYPVGLANSSLSSFSFFSGGKNKDFKSIVVLEPPCLEKGHDPENVFSIPYLSPVNKNSRRGMKHKQSEFPVMENGRVWQHILGTDGNNMPRIRKERFLTRDPIDPLQIGQEASVHQFGNTDVSYSGSSQKYSCEMFALSDSGRLKLNSDSHAPIRRKLTGHDNGCSQDGCFIVLPKHPPLLCVRSSMDMNSCLEGSSEGKYNSNISNIYNNGDNLSTPDWLNEKVLFTTNEHLGQQPAESEASRLNLQVSRKQWVFMLYYTVINSESDVIPFLFFYAGEYLVTMLPLHSHVYESISVSGHTDGPKSCKGSTEVEQLSPMSILEPAIDEVTMSCDDEHSFYRSSCDETFQVEENRDFSYLLDILICSGIIVADWQLICKSWYLPGCPVGPHVFDRLEIKYNKIATWAKPERRLLFDLLNSILSEVLAPCVDVHPWMHPNRHCVARWGPEGPVEKVWQTIVNQREDCVTGHHDEMVLDTNWLEVGNDVNMVGKQMARMLHGNLLEEVIVDFLGECNTSTHLLRIIE

SEQ ID NO: 7363 - protein, 515 aa, Zea mays
  VARIANT 179: note = Ancestral polymorphism is T, Derived polymorphism is I
MDRFGNYKNYQTRRYEDGDDDAKQMLRPWEVPKGDWFPSDFIVGAATSAYQIEGGWNEGGKGPSTWDHFCHSFPSLIADGSNGDVAANSYHMYHEDVRLMKEIGLDAYRFSVSWSRILPKGTLEGGINQDGINYYKKLINLLLAEGIEPFITIFHWDTPQALVDKYGGFLDRRIVKDYTDFAMVCFENFGDKVKNWLTFNEPQTFSSFSYGIGLCAPGRCSPGQKCANPIGNSLIEPYIVGHNLLLAHAEAVDLYNKHYKDENGRIGIAFDVMGRVPYEKSAFVDQQAQERSWDINLGWFLEPLVRGDYPFSMRSLVRDRLPFFTVEEQERLVGSYDMLGLNYYTARFSKHIDISPNYSPALNTDDAYASQETYGPDDKPIGPWMGNPWIYMYPDGLKDLLMIMKNKYGNPPIYITENGMGDVDNGDLPMEDALNDQKRINYLQRHIAVIKDSMELGADVRGYFAWSLVDNFEWTAGYTERYGIVYVDRNDGYKRYMKKSAKWLKEFNTEKAGSA

SEQ ID NO: 7364 - protein, 72 aa, Zea mays
  VARIANT 19: note = Ancestral polymorphism is G, Derived polymorphism is R
  VARIANT 11: note = Ancestral polymorphism is M, Derived polymorphism is T
  VARIANT 2: note = Ancestral polymorphism is T, Derived polymorphism is I
MTARRQLLVPMTSQLSSTGVLDAFGAAKNMHVIVGSSSTDNFLRVSFIDSWVLSLIPMRRAFLKAMRKSNNH

SEQ ID NO: 7365 - protein, 160 aa, Zea mays
  VARIANT 53: note = Ancestral polymorphism is Q, Derived polymorphism is R
MGLDIITTLFFQKEDTLPLIFQKEDTQIIPFFGGSEIVHMRVMVLLLLPLLAQLQKVMLLGLLLLLMPRRAMLQAQHATNHALGPTVVHDASQIAHPVVRAAARAAISHIATQTAAAIHHAVNQTVALTTICHAANRTTAHVVNRTELLHGPRHVLIAGA

SEQ ID NO: 7366 - protein, 670 aa, Zea mays
  VARIANT 280..670: note = Derived polymorphism lacks residues 280 to 670
MDLLRHPFKGVVTDIKGRATWYKHDWVAGLHSGFRILAPTMYIFFASALPVIAFGAQLSTATNGILSTVETLASTAICGIIHSILGGQPLLIVGVAEPTIIMYTYLYNFAKNHQALGEQLYLAWTGWVCIWTAIMLFLLATFNASNVISRFTRIAGELFGMLITVLFLQEAIKGMISEFSVPEDADSSSPIYQFQWLYVNGLLGVIFSIGLLYTALRTRRARSWLYGTGWFRSFIADYGVPLMVIVWTGLSYLHPGKVPSGVPRRLSSPLPWESSSLGHWTTARDLFSVPPAYIFGAILPAFMVAGLYFFDHSVASQLAQQKEYNLKKPSAYHYDILVLGFVVLLCGLLGIPPSNGVLPQSPMHTKSLAVLKRQLLSKKMVDTAKESIGGSATSLEIYGKMEEVFIKMDSEQNTDSVDRELKNFKDAVLQEGDEEGRLAREFDPRKHIEAHLPVRVNEQRLSNLLQSILVGGCVGAMPVIRMIPTSVLWGYFAYMAIDSLPGNQFWERIQLLFITESRRYKVLEGPHASFVESVVPKTVTIFTIFQLVYLLICFGITWIPIAGILFPVPFFLMIVIRQYLLPKFFDPVVLRELDAAEYEELDGVPLEHKLEDEASEVGSCPSRPDAEILDELTTNRGELKHRSSSLREERPIQVTVSTHMVASSAVQPSL

SEQ ID NO: 7367 - protein, 417 aa, Zea mays
  VARIANT 94: note = Ancestral polymorphism is R, Derived polymorphism is L
MLLLELVATDTTCILHSLLCSPPLSFLSHSPHYMAAPVLLTIPTMDEEGAPPPAPASPSRTPPQQEPKPAVLRWRPPVRVTSEFDSERRLFSHRLSCRVLDGLAKLRLRISHGAGGGGILWGPTDVGLLARNFSVVVDPATRGAVLRGAADLAGSLRLRASHNTKNCQTGEQSYYIHVGCSALCLSMSCNYEYDKSIVSCIQLDRCFQFKYHSVKEQQGEVAITANLRDSPCKIELSSLVPPNGPPRATFFFPNGEVSIKEKILDERDRILSVNGLVKSRVLHGVCTAVYNDNVMSIKYRYKDDEVSFIPSISLPSNSLSFAFKRQLTPLDKLSYWYNFDTNYWGAIYKHKAHKHLKWKAGYESDNRLGWASLWVGDAGGSTKEAPLKAKIHLTLKVPQDNIQNSVVVFHVKKRWDF

SEQ ID NO: 7368 - protein, 528 aa, Zea mays
  VARIANT 275..528: note = Derived polymorphism lacks residues 275 to 528
MHIDAHYPKCFVYYLILGSWLLSCLLHFEYFHLSRSSFAAPRSAALIVLPIAPDASFLPTPTVEAYNRQRSTSSSVVASPSQSSSQPWCEGRYVFMLDVPSRFDMLRDCVAGSPLFDDMWSWCAITVNAGLGPKIGPVAGNGSDGDTDIIPSTGWYSTDQYSLEVIFHNWMRRYECLTDDQTAATAVYVPYYPALELHQHLCGFNTTVRDGPSEAFLRWLSSQPTWAALGGRDHFMVAAKTTWMFRREPGGRDEGCGNNFLGQPEARNITVLTYESNIWAPRDIAVPYPSYFHPSSAGEVVAWQARARAAPRPFLYAFAGARRIKGQLAIRDRVFDVCEAAARRGRCGMVDCSHGLEGSITCRSPRKLVSLFTSARFCLQPRGDSFARRSSIDSVMAGCIPVFFHRPSTLKAQYRWHEPEPGRTNSDDRRYYVLIDSNDVLEGRVDIEEELSRYTDDEVTAMREEVIKMIPRFLYKDPRVRFEGDMRDAFDIIIDEMIARMRRIKNGEQLIWKGDGEDRDEDLIASDS

SEQ ID NO: 7369 - protein, 119 aa, Zea mays
  VARIANT 4..119: note = Derived polymorphism lacks residues 4 to 119
  VARIANT 33: note = Ancestral polymorphism is G, Derived polymorphism is D
MAVSSGMVFSVRPPAPARPCACSATARARPVGDGAKWWAPLLGWSGQPDYIDARPASEDEPLPRGPASASASARRFGVLTEDKARRLRVQMMETESFHDAMYHSAIASRLASAAPDARP

SEQ ID NO: 7370 - protein, 221 aa, Zea mays
  VARIANT 1: note = Ancestral polymorphism is I, Derived polymorphism is M
MAIQYYRAFEKKVENGVQIKTMATDPAAADVLDKPTDGAPSHRHGPWPNPARHVIAGNGKISDPLADGFHRKTGGKPPTERGDMSDEDRYRDRVWLHGEKVGAGFKCKYCRETKSGGGGTRLKEHLTHRGKNVKKCPSVPPDIKTYFQLDIDKCKNGPMKQLVTPTLVSGRQDLVHQIGKEKGSKSLIKSKRKTRMKTVMITQPTLVLVMMAAMVMLDYMV

SEQ ID NO: 7371 - protein, 599 aa, Zea mays
  VARIANT 178: note = Ancestral polymorphism is G, Derived polymorphism is W
  VARIANT 192: note = Ancestral polymorphism is D, Derived polymorphism is Y
  VARIANT 272..599: note = Derived polymorphism lacks residues 272 to 599
MADSGGISADNAAAANDDDDTNTAPFPDTVQVGGSPEYKVERKLGKGGFGHVFLGRRLTAAHAARSAASAAQEVAIKFEHTSSKGCTYGPPAEWQIYTALGGTHGVPKVHYKGRQGDYYVMIMDMLGPSLWDSWNSLGQSMPSEMVACIAMESISILESMHSKGYVHGDVKPENFLLGQPSTPHEKKLYLVDLGLATKWRDTANGQHVSYDQRPDAFRGTVRYASVHAHLGRTASRRDDLESLAYTLVFLHRGRLPWQGYQGDNKSFLVCKRKMSTSPEALCGICPQPFKEFLEAVVNMKFDEEPNYSKLISLFDSLIGPIPSIRPINTDGAQKVGQKRARLLNDDDDHVKKKIRLGAPATQWISVYNSRQPMKQRYHYNVADARLAQHVEKGNEDGLLISSISSCANLWAIIMDAGTGFSAQVYELSSHFLHKEWIMEQWDKSFYISSVAGSNNGSSIVVMSKGTPYTQQSYKVSDSFPFKWINKKWKEGFHVTAMATSGNRWAIVMSRSAGFSEQVVELDFLYPSEGIHRRWDNGFRITAMAATMDQSALILSKPRRRPRDETQETLRTTQFPSQHVKDKWAKNLYLAGICYGRTVA

SEQ ID NO: 7372 - protein, 160 aa, Zea mays
  VARIANT 109: note = Ancestral polymorphism is V, Derived polymorphism is D
MACCYSKEEMIGSSDKVVKTTWHDVSCQITKINMYKDGRHVQDMLKMSDNAGGIAEMAGMSHKICERTDALGDTGNTTSAIRKGFAIGSGAIVSLVLFGAFVSRAGVKVVDVLPEARQPPPLAPIRDGGGSMFGGIGSTIVEGGMAFGMGSAIAHRGDGC

SEQ ID NO: 7373 - protein, 347 aa, Zea mays
  VARIANT 221: note = Ancestral polymorphism is L, Derived polymorphism is V
MATTVRLQLVFRPPAAASPCRRRPSSDHLILRRRPDHPRSSSSRRPQQPQSSSTAIRESRQQQVTLKLTYLEINSWVWEVQQQGQAPVRILVDPVLVGNLDFGAPWLFDGAKKNPKVKALGVDDLLLAPEARPDVLLITQSLDDHCHVRTLTQLSARAPDLPVVTTPNAQPVLESLPTPFRRVTYIEPGQSTAVNQQVRVLATAGPVLGPPWQRPENGYILMATGEESGPGLLYYEPHCVYDRSFLEEKQLRADIVITPVVKQLLPANFTLVSGQEDAVDLARLLRARYVVPMSNGDVDAGGLLATVLTKQGTTQSFQALLSEALPEAQVLHPTPGVPLQLQLDWTS

SEQ ID NO: 7374 - protein, 199 aa, Zea mays
  VARIANT 40..199: note = Derived polymorphism lacks residues 40 to 199
MPNNGRSLANMWGRASAKPKPPSTTNSTAVESVATTLDAQICAKEEADGDNSDDEQGIKYKREFTNANNRKRRAVFDFSDDDEVDNIISITSPEVPKQRIPDLVIETTEDAEVNQKNLENKDDVPNTEKGSSMGVDSNFTSECKTKTVNTMNHSGITLKENSSDPPVSNKKQDSAVEPTSTAPKRRKVLKTHIDERGRE

SEQ ID NO: 7375 - protein, 295 aa, Zea mays
  VARIANT 243: note = Ancestral polymorphism is H, Derived polymorphism is Y
  VARIANT 162: note = Ancestral polymorphism is A, Derived polymorphism is V
  VARIANT 159: note = Ancestral polymorphism is A, Derived polymorphism is T
  VARIANT 156: note = Ancestral polymorphism is R, Derived polymorphism is C
  VARIANT 128..295: note = Derived polymorphism lacks residues 128 to 295
  VARIANT 58: note = Ancestral polymorphism is T, Derived polymorphism is M
  VARIANT 52: note = Ancestral polymorphism is I, Derived polymorphism is V
  VARIANT 41: note = Ancestral polymorphism is I, Derived polymorphism is M
MRSTVVPLYQPARLAGLIPVMQSYVDTLAANIAACLDQDCIPFCQLSLRMAIDIIGRTAFGIEFGLSKNAVGTGSSSESPGGGGGSGSEGEGDVREFLREYKRSVEFVKMDLTSSLSTILGLSLPCVQTQCKRLLRRVPGTADYKMDQNERRLCSRIDAIIAGRWRDRATRRRCGPGAAPAPLDFIAALLDAMENGGSSGAGANKDFALADRHMCALAYEHLIAGTKTTTFTLSSVVYLVSCHLLVEAKLLREVDGFTPRARAGRRRAPERVPLPRPGHQGGQCSYHIEEGEKEI

SEQ ID NO: 7376 - protein, 240 aa, Zea mays
  VARIANT 29: note = Ancestral polymorphism is W, Derived polymorphism is R
  VARIANT 42: note = Ancestral polymorphism is A, Derived polymorphism is T
  VARIANT 51: note = Ancestral polymorphism is D, Derived polymorphism is G
  VARIANT 58..240: note = Derived polymorphism lacks residues 58 to 240
  VARIANT 85: note = Ancestral polymorphism is G, Derived polymorphism is E
  VARIANT 110: note = Ancestral polymorphism is D, Derived polymorphism is Y
  VARIANT 122: note = Ancestral polymorphism is C, Derived polymorphism is W
  VARIANT 174: note = Ancestral polymorphism is A, Derived polymorphism is V
  VARIANT 221: note = Ancestral polymorphism is A, Derived polymorphism is D
MTLSTDEERWVLIYSFSYGYVCTQERSDWVPNLVIFKLNRAALYVGGSQKDRNEKIFYKLLIDNVEELLPIVYTPTVREAYHKYESIFRRPQDVDDCDLLIHFYVDAHGDICKDHNKKAQGCQPFRVTRRAHHSSQNCCGNLFLSRLPFGLLENEYRHLEAAFKDDGTKYINWAAKMTISTNIGIPWIMSKQTKAPGDVISQAKKKTAARWLILVFPLSLATSGILCGLKIEWVQACYRR

SEQ ID NO: 7377 - protein, 697 aa, Zea mays
  VARIANT 5: note = Ancestral polymorphism is R, Derived polymorphism is Q
MKMLRRLMLSLSFILLLPSYLAYPLCTDARAPVLLNTTLKFCASPSRNSRGCCDATADAALSKQFDAMAISDAACAAVVKSILCAKCSPYSADLFGAGPKIRTVPSLCNSTSSANSAESKETTTTTTQDYCKLVWDTCKDVSIASSPFQPPLQGTAPPPTSPSKLTDAWQSQSDFCGSFGGRSSVCLSGDTVSFNAAGPSPSPRPEPRGVCLERIDNGSYLSLAPHPDGSSRIFLGSQAGKIWLATVPEQGSGGALQFEGAGPFVDLTDQVHFDSALGLMGMAFHPGFATNGRFFASYNCDRTKSPSCTGRCSCNSDVGCDPSKLGTDSGAQPCQYQVVVSEYSARGSAAANVSQATSAADPSEVRRIFAMGLPYTSGHGGQVLFGPADGYLYLMLGDGGKGDPFNFAQNKKSLLGKIVRLDVDSTPSSSGGDLGNTSLWGNYSIPKDNPYADDSELEPEIWALGLRNPWRCSFDSERPSYFYCGDVGQDAYEEVDLISKGGNYGWRALEGPLVYHPQWAPGGNTSLSSIDAIPPIMGYSHSDVNKNIGSASIMGGYVYRGSADPCLYGRYLYADLYASAMWTGAEAPESSGNYTSALIPFSCSKESPIPCDAAAGSPLPSLGYVYSFGEDNSKDMYVLASKGVYRVVRPSLCSYTCPAERQETSPPAAPSSNKASMAEMGMGMLLVSVIVVWVLVT

SEQ ID NO: 7378 - protein, 565 aa, Zea mays
  VARIANT 84..565: note = Derived polymorphism lacks residues 84 to 565
MGWGWTALAAAAMAYVAVKLMEVLWWRPRRLEQHFARQGIRGPRYRFFVGCVREMVALMVAASAKPMPRPYRSHNVLPRVLAFYHHWKKIYAGGMLLMWRNMASLPPIIGCLVALSRSRPCLILPLPPGSTFLIWFGPTPRLAVADPDLIREILLSRADHFDRYESHPMVRQLEGEGLVSLRGDKWAHRRKVLTPAFHMENLKLLLPFVGRTVVDVVDKWHDMAAAASGEVEIDVSEWFQVVTEDAITRTAFGRSYEDGKAVFKLQTQLMAFASEAFRKVFIPGYRFLPTKKNTTSWKLDKEIRKNLATLIGRRQEAADDEKLSGCAKDLLGLLINAGSNGGKVSPITVNDIVEECKTFFFAGKQTTSNLLTWTTVLLAMHPEWQELARQEVLQVCGARDIPSREQLTKLKTLGMILNETLRLYPPAVATVRRAKADVELGGCLIPRGTELLIPIMAVHHDARLWGPDATQFNPARFARGAAQAARHPTAFIPFGLGARMCIGQNLALLESKLTLAIVLQRFDFRLSPSYLHAPTVLMLLHPQYGAPVVFRPRPSEPSDRDSRDV

SEQ ID NO: 7379 - protein, 100 aa, Zea mays
  VARIANT 27: note = Ancestral polymorphism is E, Derived polymorphism is D
  VARIANT 39: note = Ancestral polymorphism is A, Derived polymorphism is V
MLENGCTPNLVTYNIMIALQVKARNYEKIVKLYKDMQVAGFHPDKITYIIVMEVLGHCGHQDEAEAVFIEMRCDWDPDELVYGLLVDLWGKAVNVYKAQG

SEQ ID NO: 7380 - protein, 96 aa, Zea mays
  VARIANT 59: note = Ancestral polymorphism is G, Derived polymorphism is D
  VARIANT 62: note = Ancestral polymorphism is E, Derived polymorphism is K
MAITGHPAHMFLLYLPDAEPGGHNVRDHIGYFLDMMHSEDRESKRGLIDVVIDFLHKYGLKEEAGLIWEVAAQKNVYPNSEGEELDVLAHQPSLDV

SEQ ID NO: 7381 - protein, 324 aa, Zea mays
  VARIANT 93: note = Ancestral polymorphism is A, Derived polymorphism is V
MQHSMDAGEVRHWNADVNGVSIHVAERGPEDGPAVLLLHGFPELWLSWRHQMAALAARGFRALAPDLRGYGDSSAPSDPAAYSIFHIVGDVVALLDHLQLTKVFVAGHDWGAHAAWLLCLFRPDRVRAAVVLGVPYSARHAHARPITEAFAAFGEGFYINQFQEAGRAESAFARYDVATVLKKFYSIEIDDVTAPPGVEIIDFLEASPSPLPWISEEELGQYAEKFHKSGFTGPLNYYRMSETNSRLLAPWNGAKITVPVKFIAGDKDIGAQSFGTGEYIKSAEFKSTVPDLEVTVIEGHHFLQQEQAERVNSEMVSYLVRFTS

SEQ ID NO: 7382 - protein, 313 aa, Zea mays
  VARIANT 6..313: note = Derived polymorphism lacks residues 6 to 313
MSMLLQPQPYQQQQPPSPSSHSHPASMAAAAAYWLAEHPAIVGFRWSPTHLWFSTWAFLLGSLAAYVALCLALDVALALAAQRLRRRLAVPLGPVPAAHALLMAGASSAIFAGTLLSAVAEIRDTRWSWRGRSRSTPLRWLLCFPPGTRSSGRVFFWSYAYYLSRYLHAARGVLAVLRRRRSAAPRVFAHAASVAMAFLWLEFSQSFQVLAILASTLTHAVALGYRFWVGAGLPARGAAHVALACQLGLLGCNLACHVGVVWMHFGAVGGGCSGIGAWVFNTLLNAALLWVFFHCYGKRGVDEGSGAASTKDL

SEQ ID NO: 7383 - protein, 396 aa, Zea mays
  VARIANT 280: note = Ancestral polymorphism is V, Derived polymorphism is D
  VARIANT 175: note = Ancestral polymorphism is L, Derived polymorphism is H
MAQGAATAVDGSGSGSTARPPAALPGLKLLRRLLLVAVVGTGFLAVVVLLSSSWRYSSSMLPRVPAPDVRLPAPAGGGKVPLERWARGSASAWHNLTDEELLWAASWRPGVRRYPYRRTPKVAFMFLTRGPLPLAPLWDRFFTGAGDARLFSVYVHATPGYRPGFPPASAFYRRLVPSQVARWGEASMCDAERRLLANALLDPANERFVLLSESCVPLYGFPAVYSYLTRSRESFVGAFDDPGPHGRGRYRAGLGPEVTAGQFRKGAQWFELDRDLAVGVVADGRYYPKFRDHCRPPCYVDEHYLPTVLSIEAPARIANRSVTWVDWSRGGAHPATFGEEDVHEAFLRRLTAPGKDQGNCTYNGQPAEVCFLFARKFAPSTLRPLLSLAPKLLGYG

SEQ ID NO: 7384 - protein, 686 aa, Zea mays
  VARIANT 319..686: note = Derived polymorphism lacks residues 319 to 686
  VARIANT 296: note = Ancestral polymorphism is T, Derived polymorphism is A
  VARIANT 283..686: note = Derived polymorphism lacks residues 283 to 686
  VARIANT 232..686: note = Derived polymorphism lacks residues 232 to 686
MDQSRRAVESYWRSRMVDGVTADDDKVAPVYKLEEICELLRASDASIVKEVADFVLKRLDNKSPLVKQKALRLIKYAVGKSGTDFKREMQRHSAAMRQLVHYKGHPDPLRGDALNKAVRETANEAIAAIFSTEDPKPAVATESLGKRIQGFGNTNYEPSRDDKKSFLSELSEVVGIGSASIKQGLSNFAAAHAMMTNDNGSTYRSPNLRRSLTTESERYGRYDPSEIQRESRASSDASKNAPSGPWGPTSSSTPTDETSSSQPGIKTREERLLETIVTASGVRLQPTRDALQIFFAEASKLDAVALSRALESKLNSPLWQVRMKAICVLEAIVRKQDTDPYSIIASYFTENTASVVKCSELPQVSLREKASKVLNMLIGEQPTGTAATKAAMPTPVQMPDLIDTGDQDDLATSSGHASIEQNSGNSAYVSSVDDLLGGEPISDTSVTADSNGSDPFADVSFHEAETKETNDLFSGLTVEEKSSTTMHDSSSDKNELPDIFGSSPDSFNQGSVTDQGTVNDLIAGLNLNGTGHAQSAVKAEPNSNSGSQFFDTKNESGHVPSAATLNDILGQNSLYQQQQTPLQYSFPQHMMLNQSFPGQQLNYGAMGILLAQQQQLLQSFGNFNAGLGNSSFNSMNGGNTSVLPDIFNSSNQPQNHVAVMSSSKKDDNKAFDFVSDHLAAARGSRK

SEQ ID NO: 7385 - protein, 42 aa, Zea mays
  VARIANT 35: note = Ancestral polymorphism is R, Derived polymorphism is G
MAHSRTLAGCGDQKVLGHRHRLPHLRGFFMKFLFRFFELMST

SEQ ID NO: 7386 - protein, 113 aa, Zea mays
  VARIANT 48: note = Ancestral polymorphism is S, Derived polymorphism is F
MIKSDNRICADCGAPDPKWVSANIGVFLCLKCGDVHRALGPDISKVLSVTLDDWSDSDIDSMVEVDDYSMVSFIPLDLRKESSIQYVLSSIDTCIQYGEDADVKVRDFEEDED

SEQ ID NO: 7387 - protein, 139 aa, Zea mays
  VARIANT 86: note = Ancestral polymorphism is E, Derived polymorphism is K
  VARIANT 53..139: note = Derived polymorphism lacks residues 53 to 139
MHWSGKGKPWDRLDAGKPCALDHTWKAYDLYTGENDSSSASASSGVVLLYRSQGKVMNCGGGGSCGTCIIEIIDGKELLNERMSTENRYLKKKPDSWRLACQTIIGNKENSGKASFVLFPTHPAINTSLPYALKKKVVQ

SEQ ID NO: 7388 - protein, 267 aa, Zea mays
  VARIANT 39..267: note = Derived polymorphism lacks residues 39 to 267
MMRRRAMTMTIAAVLCLLLFSGRLAAAEKTFRGGGGGGYGGLEAGGGGGGGGYSTPSEAAPSTPAAGETTTPSSGGGYSTPSEAAPSTPAAEETTTTPSSGGGGYGGATGKASSGGGGLDPDGDPEVGLNGKAIEEIVNEHNVFRAKEHVPPLVWNATLARFSQQYAETLKGNCQQIHSSSPYGENLMEGTPGLTWKITVDGWSEEKKNYHYNSDTCDPGKMCGHYKAVVWKTTTSVGCGRIKCNSGDTIIMCSYWPPGNYDGVKPY

SEQ ID NO: 7389 - protein, 46 aa, Zea mays
  VARIANT 37: note = Ancestral polymorphism is I, Derived polymorphism is T
  VARIANT 27: note = Ancestral polymorphism is A, Derived polymorphism is D
  VARIANT 16: note = Ancestral polymorphism is R, Derived polymorphism is H
  VARIANT 11: note = Ancestral polymorphism is L, Derived polymorphism is Q
  VARIANT 6: note = Ancestral polymorphism is R, Derived polymorphism is Q
MLQRFRTLFNLPSAIRGNIRKGEYDLAVREYQKAKSIVLEYCIRLL

SEQ ID NO: 7390 - protein, 346 aa, Zea mays
  VARIANT 131: note = Ancestral polymorphism is G, Derived polymorphism is V
MWRGAEAERSAEAQREVASALLRCGSAVSCRFPHPQGQRRPTSATQKRRTPFRRPNLPLPRSPSPAAAPSYAPLAGLVARRGCGGAATVRGMSFGGSSSLASGAKRPFEYGRTHVVRPKGTHKATIVWLHGLGDNGASWSQLLETLPLPNIKWICPTAPSRPVSVFGGFPSTAWFDVADLSEDAPDDIEGIDASAAHVANLLSTEPADIKLGVGGFSMGAATALYSATCFAHGKYGNGKPFPVNLSLAVGLSGWLPCARTLKNRIEASPECAQKASSIPLLLCHGKADDVVAYKHGERSAGALKANGFSNVLFKAYNSLGHYTVPEEMDEVCKWITANLGLGTKSS

SEQ ID NO: 7391 - protein, 111 aa, Zea mays
  VARIANT 104: note = Ancestral polymorphism is G, Derived polymorphism is D
  VARIANT 81: note = Ancestral polymorphism is G, Derived polymorphism is S
  VARIANT 66: note = Ancestral polymorphism is R, Derived polymorphism is K
  VARIANT 58: note = Ancestral polymorphism is R, Derived polymorphism is H
MVRRGEACLTVEGAHRGRKEWRAFSSSLLCSNGVENILEQSATLVCSLVSGYVVYPVRVRHGGRKRHLPKCIVYGKPKHQGITQLKFQRYKRYVAEERAIRKLGGLRVLMS

SEQ ID NO: 7392 - protein, 498 aa, Zea mays
  VARIANT 97: note = Ancestral polymorphism is N, Derived polymorphism is K
  VARIANT 304..498: note = Derived polymorphism lacks residues 304 to 498
MATIREESDYDSSRSSLTAPGGSRRSWISDIGSASSVSARSVAGRGWDAPACRHRHKPHKANQAEWEAIGRVRAAAGRVGLEHFRLVRRLGSGDLGNVYLCQLREPWSTTGCLYAMKVVDKDALAFRKKLRRAEVEREILRALDHPFLPTLYADFEASHYACLVMEFCPGGDLHVARQRQPGRRFSISSARFYVAETVLALEYLHMMGVVYRDLKPENVLVRGDGHIMLSDFDLSLKCDVVPRLLRHNSLPAQNGSSAGGGRADSGKPSCVPPIQPVLSCLFNGVHKCHQAKEGAAAAARDGGEADDSTEPCDRNPELVVEPVSARSRSFVGTHEYLAPEVISGQGHGSAVDWWTLGVFMYEMVYGRTPFKGADNEKTLVNIIKQPLAFPRVVAASGREWDEHLRAQDLMTQLLAKNPKKRLGGCTGSAEVKRHDFFKGVNWALVRSVRPPEVPKPPVVPAPAPALAPQKKVLMMSRKERQEPYNYNPRPDDERFEYF

SEQ ID NO: 7393 - protein, 158 aa, Zea mays
  VARIANT 96..158: note = Derived polymorphism lacks residues 96 to 158
MAMESQAEALGQLATDDLLEGKFALLETSSVDDDLSQLKKELSGSSLDMGEPGTAVEILFVSGVLLTIGSKPTVQFFTKPKDHKCDSSEPDLCDSGCNGVQMTHPSVISKAGGLEREKDYRYTGSNGKCKFDKSKIIASIQNFSVVSVDEGQNVANLI

SEQ ID NO: 7394 - protein, 107 aa, Zea mays
  VARIANT 64: note = Ancestral polymorphism is P, Derived polymorphism is L
  VARIANT 61: note = Ancestral polymorphism is G, Derived polymorphism is S
  VARIANT 60: note = Ancestral polymorphism is T, Derived polymorphism is I
  VARIANT 55..107: note = Derived polymorphism lacks residues 55 to 107
  VARIANT 27: note = Ancestral polymorphism is S, Derived polymorphism is L
  VARIANT 23: note = Ancestral polymorphism is D, Derived polymorphism is G
MTKQLVLSFLEKKLDVFLVFYSDFPLSIVLVGVGDGPWDNLIHFNDNRRWFDKFQFVDFIGIMLREMLQGDKEDEFTWEGLMKIPTQHDAIIIENVRIHNVRCSTTM

SEQ ID NO: 7395 - protein, 145 aa, Zea mays
  VARIANT 63: note = Ancestral polymorphism is R, Derived polymorphism is C
  VARIANT 58: note = Ancestral polymorphism is T, Derived polymorphism is R
  VARIANT 45: note = Ancestral polymorphism is T, Derived polymorphism is K
MAASDVEYRCFVGGLAWATDDHSLNNAFSTYGEVLESKIILDRETQRSRGFGFVTFSTEDAMRSAIEGMNGKELDGRNITVNEAQSRGGRGGGGGGYGGGRRDGGGYGGGGGGYGGGRGGYGGGGGYGGANRGGGYGNNDGNWRN

SEQ ID NO: 7396 - protein, 214 aa, Zea mays
  VARIANT 194..214: note = Derived polymorphism lacks residues 194 to 214
MQMQIFSRSTMLSLLRLRSSVAATPSTAQYAASAHLPAVLWRSLPPALARRASPCPLTVPPDPPTRRVVRFRIGSRSSMATTTTSGIKGDDDETSSLAKACNDEQDGRTAAVHGDKHTRKKTGHDIFLRCGDGPPGERTDDEELRRLEEEEERREKEEEDDDDQHADYQYNYPDEDVRHLAIFPYSTHRDGSIYRNAFSWRKMHRIENRNESVT

SEQ ID NO: 7397 - protein, 672 aa, Zea mays
  VARIANT 307..672: note = Derived polymorphism lacks residues 307 to 672
  VARIANT 256: note = Ancestral polymorphism is M, Derived polymorphism is I
MVHVPCGDYNKHAPCMKNGRCSKNYPKKLQEDTSFDENGFVLYRRRNNGRVVFKNKIALDNRYIVPSNLLLLKKFGAHTNVEWCNKTIFIKYLFKYVTKGPDRSKMFLQRIQSGEDVPYDEETDARNEIKEYIDSRYLCDIDSCWRVFGFEIHRHYPAVERMHVHLPNENYITYNSSANMAGILSQSFLRKTMLTEWFTTNQQHSNARNLTYSQFPSKWRWDDKTRTWHPRQTREGKIGRLYYVHPLAGDKYYLRMLLLVVKGARSYEEVRTYNNIVYNTFKEACKARGLLGDDQEWLAAFNEAATWATSSQLRQLFVTMLLYCQVADEYTLFRKVWKYLADDIEYNIRKALNQTNYQIPEDNLKNYLLDKLAVLFNKSGGNIHDFNLPRKTDNLEGRNVNHLLKEELSYDANSLSYESEVLIYQLNTEQMKAFNTIVENVLSGQPGFYFVSGYGGTGKTFLWNTIVAYLRSQKKVVLTVASSGVAALLLPGGRTTHSRFKIPCDLNETTTCNIKRGTMLAELIEVASLIIWDEAFMTHRIAFEALDRTLRDLLSPRCPVAEKTPFGGKVVVLGGDARQILPVIEGGTQSQIIDATITSSPLWTSIIVLYLTENMRLKSPHLDSASKNEIASFSKWLLDIGDGKVPARAKDSKKEKYWIKIPQDILLTCTSK

SEQ ID NO: 7398 - protein, 311 aa, Zea mays
  VARIANT 20: note = Ancestral polymorphism is G, Derived polymorphism is V
  VARIANT 68: note = Ancestral polymorphism is E, Derived polymorphism is K
  VARIANT 165: note = Ancestral polymorphism is R, Derived polymorphism is G
MAALLLRRLAGTHRGRVPLGAAAAAACGGATLFYASSSPTVAHLEETGKAAEQVALNPDKWLEFKLQEKATVSHNSQLFRFSFDPSTKLGLDVASCLITRAPIGEEAEGRRKYVIRPYTPISDPDSKGYFDLLIKVYPDGKMSQYFASLKPGDVVEVKGPIEKLRYNPNMKKQIGMIAGGSGITPMLQVVRAILKNPNDNTQVSLIYANVSPDDILLKRELDRLASSYPNFKVFYTVDKPSTDWRGGVGFVSKDMVLKGLPGPAEDSLILVCGPPGMMNHISGDKAKDRSQGELSGVLKDLGYTAEMVYKF

SEQ ID NO: 7399 - protein, 118 aa, Zea mays
  VARIANT 29: note = Ancestral polymorphism is D, Derived polymorphism is H
MAGLQRSSQTFRRSGSSGLVWDERLTSQDDDQSGPEDADAATDLKELRHSRSVGSVGLQPQPQPQPQRRRSDDSGQGFRTRRVAPALDPPSPKVPGCIFCGIFRKAGASEPKSKPRRY

SEQ ID NO: 7400 - protein, 397 aa, Zea mays
  VARIANT 254: note = Ancestral polymorphism is R, Derived polymorphism is H
  VARIANT 209: note = Ancestral polymorphism is P, Derived polymorphism is H
MDSDQESVDDWVVLASSSDDDERVIALSSGSCSDSEPDHAAGSPNLLPASIDPDDAEGLYALSDAEDTDASLQPSPLLPNPLSGLLHHTLAGDVAYSAFDPVPPAAKQLVPDTTFAAFFPEPVAALASTRGLVCLRGACSAAYYVANPATFASERLPAPARDHRAHGDPAVVIAFDLDLDPDPCDADPERAESEGEGFYRHYHVVVAFPVGEGIYAFESFSSRAWAWATGSGVADAEAVLPGSGVGALGCAFWRTTMGLFLCYDPVSRRADLVPAPAEVMQWPYWELGEMDGTLCVTCMGARVDAVVVIRLDIVSGAINWTLAGYFEGGCLRGRKDVTLLRSQGKAEVVMWDPSSETVVAMDIEGRTTRVIRFIPGSGYYADFIPYVSSLAAVSRSG

SEQ ID NO: 7401 - protein, 98 aa, Zea mays
  VARIANT 36: note = Ancestral polymorphism is T, Derived polymorphism is A
  VARIANT 72: note = Ancestral polymorphism is E, Derived polymorphism is K
  VARIANT 76: note = Ancestral polymorphism is L, Derived polymorphism is P
MPMSSHPLGENFHFVGLTQNFNTSPPPPPPPNAKRTQKPSRLAKGTIQIDGDGDATTEESKAVKKRYWTHDEEVRLASAWLNCSNDPIHGNDKKGETF

SEQ ID NO: 7402 - protein, 432 aa, Zea mays
  VARIANT 394..432: note = Derived polymorphism lacks residues 394 to 432
  VARIANT 336: note = Ancestral polymorphism is A, Derived polymorphism is P
  VARIANT 15: note = Ancestral polymorphism is K, Derived polymorphism is M
MINNISISNMEAKAKEFNEVIQEQHYPWFAQYMVMKRASIEPNFHDLYLKFFDKVNSKSLNKEILKATYENCKFRGALLAKNLGSWLGKFTIGRNQALRAKEIDPKSLIVEAYEKGLMIAVIPFTSKSSIAYRPPNPWTMGILSLLAEIYNLPNLKMNLKFDIEVLFKNLTVDIKDVKPTSLLKDRLREVEGNPDFSNKDVTASQTPVVAEVPSGTIPSLTHMEQQPEINITSRAMSLPNILNQYAAPVRLPTNSTVEDDKVALMMPEQVPSLTQVSPAQTQSTSPSPFSVNQLMAAIPREEIRFKINPKLGSLGPQVQYSKEIILPVIQRSVTIASRTTKELILKDYALESDNNTITRSAHLMVGTLAGSLAHVTCKEPLRVALYSNLRNLIQNLMSGSETIEQLIHTLINDNLDLGCAIIEVVATRQVAS

SEQ ID NO: 7403 - protein, 410 aa, Zea mays
  VARIANT 130..410: note = Derived polymorphism lacks residues 130 to 410
  VARIANT 229..410: note = Derived polymorphism lacks residues 229 to 410
  VARIANT 263..410: note = Derived polymorphism lacks residues 263 to 410
  VARIANT 279..410: note = Derived polymorphism lacks residues 279 to 410
MASSSRTADVAASRVLSEKGAAAMAECVGLLFGKWTALQLAVQNQWGGHDSQAKADRLASSVLSWFTRAAAARETAEAAPRTPRTAPANLLEQPSALAQSPCLFNLYMDDDDVSPDTRDVYVANATVSSYFAASDVASVDRLFAEVSTDVVAWTTMVAGHASSGGLGRARHFFDAMPERNIVSWNAMLRAYARAGMLTEARDLFDAMPTRNAATWSCMISGLVLSGRCWEALRDQGLFGDMVRSSGIVPNEPALVSVVSACAQLRSLEHGAWVHAYDEQELQGAMSVVLASAIVDMYMKCGGPCRSGRVMEALYFVKSMPVEPHPGLWGALASACKMHGKVELGEEVAKKLIELEPRYGSRYILLSNLYGSVNRWDDMASVRKILKRSKVPKGTGNAVVGMTSTSCMSNG

SEQ ID NO: 7404 - protein, 312 aa, Zea mays
  VARIANT 7: note = Ancestral polymorphism is A, Derived polymorphism is T
MDQSIRTACEFLSSVLNHAESSSRELADAVSQRPVHLEMARTSFLQKLEHRVEASAADLQHIESIALDTVSFEELLGHCGEALKVYARHADALQSHLASFGYEPPDAQHPEIDVDVEDGDVGKVGDPGDRCLSVSRSVLRSGKRRFDSHSDAIFEESLKDLGFSDACLATLSSEGAHYGESPKKLYKNAESTDDGEKIMNEAEIMTPLNERNGQGNSFEGVIRASKEDYEQLPPYMKSLASWEELQEGISKLNSYLGGDKLQGSVALNQDRVAEIGLGRKGRACLLMLLRLNQLTMETVDGSTFYTLCKNNV

SEQ ID NO: 7405 - protein, 142 aa, Zea mays
  VARIANT 32: note = Ancestral polymorphism is G, Derived polymorphism is S
  VARIANT 14: note = Ancestral polymorphism is R, Derived polymorphism is G
MVYAQCESMEAVQRRLTELGIRYVQRRVEEGGIYVDQLFFHDPDGFMVEVCTCDNLPIVPLVPEDDHAILGLQQPAAPACKRRPAAALKQAPPQQQQQALPVPVAVPTPAKASGGSCVGEVELEAASIPGCAMRSCPEHACV

SEQ ID NO: 7406 - protein, 315 aa, Zea mays
  VARIANT 271..315: note = Derived polymorphism lacks residues 271 to 315
  VARIANT 269: note = Ancestral polymorphism is G, Derived polymorphism is S
  VARIANT 266..315: note = Derived polymorphism lacks residues 266 to 315
  VARIANT 253: note = Ancestral polymorphism is V, Derived polymorphism is G
  VARIANT 252: note = Ancestral polymorphism is R, Derived polymorphism is M
  VARIANT 238: note = Ancestral polymorphism is T, Derived polymorphism is A
  VARIANT 236..315: note = Derived polymorphism lacks residues 236 to 315
  VARIANT 230: note = Ancestral polymorphism is P, Derived polymorphism is L
  VARIANT 214..315: note = Derived polymorphism lacks residues 214 to 315
  VARIANT 212: note = Ancestral polymorphism is D, Derived polymorphism is G
  VARIANT 205: note = Ancestral polymorphism is E, Derived polymorphism is V
  VARIANT 196: note = Ancestral polymorphism is Q, Derived polymorphism is P
  VARIANT 193: note = Ancestral polymorphism is G, Derived polymorphism is D
  VARIANT 163: note = Ancestral polymorphism is A, Derived polymorphism is T
  VARIANT 146: note = Ancestral polymorphism is I, Derived polymorphism is T
  VARIANT 144..315: note = Derived polymorphism lacks residues 144 to 315
  VARIANT 128: note = Ancestral polymorphism is F, Derived polymorphism is S
  VARIANT 127: note = Ancestral polymorphism is S, Derived polymorphism is N
  VARIANT 126..315: note = Derived polymorphism lacks residues 126 to 315
  VARIANT 114: note = Ancestral polymorphism is I, Derived polymorphism is V
  VARIANT 113: note = Ancestral polymorphism is A, Derived polymorphism is E
  VARIANT 108: note = Ancestral polymorphism is C, Derived polymorphism is S
  VARIANT 103..315: note = Derived polymorphism lacks residues 103 to 315
  VARIANT 97: note = Ancestral polymorphism is P, Derived polymorphism is T
  VARIANT 55: note = Ancestral polymorphism is P, Derived polymorphism is H
  VARIANT 33: note = Ancestral polymorphism is P, Derived polymorphism is L
  VARIANT 19: note = Ancestral polymorphism is G, Derived polymorphism is R
MNKRKGCLLYKYEKEVDTGSPSDVQILDSPTNPKKRKLLCAPDDSEVLMEDDDGPITQADLERWFVHDWNKGTPIKVSVDECINNFLMSGLSTKDMPVTKANLIDVLCDYIMAIQDNMTLQMTWVRSFNPFKIEISVKDLQNILRINLDMTLKCFDMAVRLLANKDSRMSKGEKIKDIKHYMDMHFWRMVGFGKLPKYHEDPTTEELAKTLDCWPSMNYYITGCKYVLMPWKLNECYTLFVIDHVGQTLFYRVNTNYLVLQAMVMWGNGRRMEFVRAKILRINFLIDLLSYEDNPCRYAIPANIQQRLINISTKE

SEQ ID NO: 7407 - protein, 216 aa, Zea mays
  VARIANT 56: note = Ancestral polymorphism is M, Derived polymorphism is T
MSSAQIAPADHVCYVHCSFCNTVLAVSVPGNSMLNIVTVRCGHCANLLSVNLRALMHSLPEQDHQLQENIKVHGINGTLHDDHQYCGHLDQLGSSSSSRFRRLPVMCSPQNEQHLLQEQTLNNNARPPEKRQRVPSAYNRFIKEEIRRIKANNPDINHREAFSTAAKNWAHYPNIHFGLDDSGREGKKKLVDHEAAASVVAVAAAPTAAKKIQGFY

SEQ ID NO: 7408 - protein, 227 aa, Zea mays
  VARIANT 131: note = Ancestral polymorphism is P, Derived polymorphism is R
  VARIANT 160: note = Ancestral polymorphism is E, Derived polymorphism is K
MALFKCMCIFLVSLLLALTFTNAQEESSHRTLPPFPCIPGQPRPPRLPPCPPAPTECYTSLSGMMPCADFLTHNEVPPMPPTVACCDGLRSLVTNASICLCHIVNGNINKLLPAPMIPVRMVALPRFCVVRFPRAILRRCIRGHLPPMNPPPPPEASPSEPPSTSPAASPPESPPTPPTSSPPTASPPESPPTPPPTASPPESPSTPPPESVDYTVDTSSSTTEITV

SEQ ID NO: 7409 - protein, 58 aa, Zea mays
  VARIANT 33..58: note = Derived polymorphism lacks residues 33 to 58
MLRAQHMLTTLVDEVRPLEKPEETPKNTSAVDQIGLSERGAFAASWLAKGILTYIHPA

SEQ ID NO: 7410 - protein, 152 aa, Zea mays
  VARIANT 77..152: note = Derived polymorphism lacks residues 77 to 152
  VARIANT 82: note = Ancestral polymorphism is H, Derived polymorphism is Y
  VARIANT 134: note = Ancestral polymorphism is E, Derived polymorphism is K
MYCVEDTKFAIKLTCSMFSDLSKNCLWYSCFTMLPMFEYVALTTKLKTLLNISIRKPMERTSHHWFPRSIVAEVNLQAVLAHRFTIQAAGLRNRCISNKAEIVSEVEKNVWPDVAVGKVKSVIYTTFLLCEAAEAHRLMDASTHIGKILPLP

SEQ ID NO: 7411 - protein, 494 aa, Zea mays
  VARIANT 20: note = Ancestral polymorphism is D, Derived polymorphism is Y
MATPGEQPAEVVSVEMPAPDGWTKKAGALAIRGGRVWPIGFQISYWSFDDWLGVTALSFGLKCCSSFFVQKFTPLRGGRSEIVFVSPTGEEIKNKRQLSQYLKAHPGGPAVSEFDWGTGDTPRRSARISEKVKVFDSPEGEKIPKRSRNSSGRKGKQGKKETPETEEAKDAETGKEAEEAPSEDAAKETDVEMKPAEEVKGASAETEDADMADAPAPAPMEEDKKQTEELAEAIAAPPVPSEEKKDVKPAEPEAAASNPTEDSAPAPAEPADVAAPAAEPKSDAKPAAVAAPVPETKSDAEPAAVAAPAPETKSDAEPAAVAAPAPETKSVAEPAAVAAPAPETKSDAEPAAVAAPVPETKSDAEPAAVAAPVPETKSDAEPAADAAPVPEMKSESEPAAVAAPASETKSDAEPAAVAAPAPETKSDAEPAAAAAPVPGTNSDAAATDPAPGTKATAADPAPGAPAENSTDKDGSQESQPVNNGQLPHSTVKCT

SEQ ID NO: 7412 - protein, 151 aa, Zea mays
  VARIANT 77..151: note = Derived polymorphism lacks residues 77 to 151
MVRLEAAFAVVSVLAVVTVAALLRACSRRAAPARLRDDDEARRAHRRTVTAVFVGGVEDVEAGLDEAALRALPKVVYGDEEAATRACCAVCLGEYAPGDVLRVLPQCAHAFHQRCVDRWLRLHPTCPVCRSPPVTTPVAAAAKPLAVAPLS

SEQ ID NO: 7413 - protein, 60 aa, Zea mays
  VARIANT 59: note = Ancestral polymorphism is M, Derived polymorphism is I
  VARIANT 52: note = Ancestral polymorphism is D, Derived polymorphism is Y
  VARIANT 36: note = Ancestral polymorphism is R, Derived polymorphism is C
  VARIANT 20: note = Ancestral polymorphism is E, Derived polymorphism is K
  VARIANT 16: note = Ancestral polymorphism is C, Derived polymorphism is Y
MSWRSTGSIMVGFSRCHRYEAHQRLGLPTIRCKVRCGTKETLRRVHLTFSLDSILNYLMH

SEQ ID NO: 7414 - protein, 110 aa, Zea mays
  VARIANT 1: note = Ancestral polymorphism is M, Derived polymorphism is I
  VARIANT 2: note = Ancestral polymorphism is G, Derived polymorphism is R
  VARIANT 3: note = Ancestral polymorphism is R, Derived polymorphism is W
  VARIANT 5: note = Ancestral polymorphism is K, Derived polymorphism is Q
  VARIANT 50: note = Ancestral polymorphism is C, Derived polymorphism is Y
  VARIANT 90..110: note = Derived polymorphism lacks residues 90 to 110
MGRGKFKGKPTGRHSVSTPEEIGNDAPARPMVPFIAAGTSGRPRTFMKVCNIHSFSFIHMMSATFIPRDPLPSYDSKLISSSLALDNIKYSQQLSPIHIHTAPRKFTILV

SEQ ID NO: 7415 - protein, 361 aa, Zea mays
  VARIANT 35: note = Ancestral polymorphism is A, Derived polymorphism is V
  VARIANT 143: note = Ancestral polymorphism is Q, Derived polymorphism is H
  VARIANT 160: note = Ancestral polymorphism is A, Derived polymorphism is T
  VARIANT 171: note = Ancestral polymorphism is A, Derived polymorphism is V
  VARIANT 179: note = Ancestral polymorphism is P, Derived polymorphism is L
  VARIANT 184: note = Ancestral polymorphism is P, Derived polymorphism is L
MAPPYVLSLLLLLVLSVPAVFLVAPRLIPPRALPAIPDADETEDLALFRRAVLLSAAPSSKAGAGPASPSRFFGAAHRRQRKQKVAFLFLTNSDLVFAPLWERFFAGHHGLLNVYVHADPAAAFALPPTPSFRGRVIRGKATQRASATLISAARRLLATALLDDPANHFFAMLSQSCVPLRPFPALYRTLTADTAGPRGRHRSFIEILDAEPTLHDRYYARGDDAMLPEVPYESFRVGSQFFVLTRRHAVMVVRDRRLWNKFKLPCLVKRKHSCYPEEHYFPTLLDMQDPAGCTKFTLTRVNWTDSFDGHPHTYQPEEVSPELIRDLRKSNGTYSHMFARKFAPGCLAPLMEIADSVILRD

SEQ ID NO: 7416 - protein, 156 aa, Zea mays
  VARIANT 24: note = Ancestral polymorphism is R, Derived polymorphism is W
  VARIANT 48: note = Ancestral polymorphism is P, Derived polymorphism is L
  VARIANT 94: note = Ancestral polymorphism is C, Derived polymorphism is S
  VARIANT 108: note = Ancestral polymorphism is I, Derived polymorphism is F
  VARIANT 109: note = Ancestral polymorphism is E, Derived polymorphism is V
  VARIANT 110: note = Ancestral polymorphism is L, Derived polymorphism is I
  VARIANT 127: note = Ancestral polymorphism is E, Derived polymorphism is K
MDLLCYMALVVIPLLVRTALAMEWDTFDVVADIAWEVESLRSPMVSVPDRAEHNFVAGATHARSVGSANDTTLVAHKGGQMEATSDEARLEIVCVVPFAENGHLVSMIELGKILHARVLTVIIAIFKPPYNTSVTRPFLVGFFVAKCCTLRRGWVP

SEQ ID NO: 7417 - protein, 85 aa, Zea mays
  VARIANT 66: note = Ancestral polymorphism is D, Derived polymorphism is E
  VARIANT 65..85: note = Derived polymorphism lacks residues 65 to 85
  VARIANT 51: note = Ancestral polymorphism is F, Derived polymorphism is S
  VARIANT 48: note = Ancestral polymorphism is P, Derived polymorphism is S
  VARIANT 38: note = Ancestral polymorphism is W, Derived polymorphism is G
  VARIANT 36: note = Ancestral polymorphism is D, Derived polymorphism is Y
  VARIANT 34: note = Ancestral polymorphism is S, Derived polymorphism is I
  VARIANT 30: note = Ancestral polymorphism is L, Derived polymorphism is I
  VARIANT 20: note = Ancestral polymorphism is S, Derived polymorphism is C
  VARIANT 17: note = Ancestral polymorphism is R, Derived polymorphism is C
  VARIANT 9: note = Ancestral polymorphism is T, Derived polymorphism is I
MTTLCSSPTVKPKKEARYCSSVFMSMQQLLCLGSGDKWRWHHQFLDVPGMFGLLYSDIVWFNIFKDSCVLCSLYAVGASGLQQLN

SEQ ID NO: 7418 - protein, 717 aa, Zea mays
  VARIANT 425..717: note = Derived polymorphism lacks residues 425 to 717
  VARIANT 216..717: note = Derived polymorphism lacks residues 216 to 717
MQSPTLEHPSNPAGPSPGPNASSHRRTDGVAGAGAMAVGVDAPHSIPHILPRRHQIRHKGREGAPGVIGEERHHFAHGMAASRPRCPAATLLAGAGLLAPSSDDGATSFLFTEYKYVGLFMGIFAILIFLFLGSVEGFSTKSQPCHYSKDKTCKPALANAIFSTIAFVLEARKGVGKAFITAFRSGAVMGFLLAASGLLVLYIAINLFGIYYGDDWEGLFEAITGYGLGGSSMALFGRVGGGIYTKAVDVGADLVGKVERNIPEDDPRNPAVIADNVGDNVGNIAGMGSDLFASYAESSCAALVVASISSFGINHQFTPMVYSLLVSSVGIIACLITMLFATDFFEIKVVNEIEPALKKQLIISTVVMTIGIALISWLGLPDTFTIYNFGARKTVQSCPVQGIADSCRTRAATNVIFGLALGYKSVIIPIFAIVFSIFLSFSLAAMYGVDVAALGMLSTIATGLAIDDYGPISDNDGGIAEMAGMSHRIRERTDALDAAGNTTAAYGKGFAIGSAALVSLALFGAFVSRVAISTVDVLTPKVFIGLIVDAMLPYWFSAMTMKSVGSAALKMVEEVRRQFNTIPGLMEGTTKPDYATCVKISTDASIKEMIPQALLVLAGALVSGVQVGGSSSQILIAISASNTGGAWDNAKKYIEAGASEHARTLGPKGSDPHKAAVIGYTIGDPLKDTSGPSLNILIKLMAVESLVFAPFLAAHGV

SEQ ID NO: 7419 - protein, 199 aa, Zea mays
  VARIANT 16: note = Ancestral polymorphism is A, Derived polymorphism is T
  VARIANT 60: note = Ancestral polymorphism is L, Derived polymorphism is F
  VARIANT 85: note = Ancestral polymorphism is A, Derived polymorphism is T
  VARIANT 100: note = Ancestral polymorphism is A, Derived polymorphism is T
MVVEEIAEGVKNLTVTGDAAASGGEGQRRGGGGSSNRIQVSNTKKPLFFYVNLAKVRLTFSPYAPHLSVILLPTRRFQILADLVTSVRAEVYATARRCRAIRSWDGCVPPSPFFLTLFLHIFITAIATVVTVAEILKNNGFAVEKKIRTSTVEINDESRGRPFQKAKIEIILGKSDKFDELMAAAAEERGEVEDGEEQA

SEQ ID NO: 7420 - protein, 170 aa, Zea mays
  VARIANT 54: note = Ancestral polymorphism is M, Derived polymorphism is T
  VARIANT 68: note = Ancestral polymorphism is R, Derived polymorphism is W
  VARIANT 73..170: note = Derived polymorphism lacks residues 73 to 170
  VARIANT 97: note = Ancestral polymorphism is R, Derived polymorphism is H
  VARIANT 113: note = Ancestral polymorphism is A, Derived polymorphism is V
  VARIANT 144: note = Ancestral polymorphism is T, Derived polymorphism is I
MAAFLRSKCSPVGRTLMGSLGNSLFGAANSSVGAITRPSHCDAISQQIRTFIQMRTNLKVVDNSGAKRVMCIQSLRGKKGARLGDMIIGSVKEAQPRGKVKKGDVVYGVVVRAAMKKGRSDGSEVQFDDNAVVLVNKKGELIGTRVFGPVPHELRKKKHLKILALAEHIV

SEQ ID NO: 7421 - protein, 495 aa, Zea mays
  VARIANT 124: note = Ancestral polymorphism is A, Derived polymorphism is V
MRRSSPYSYAFFERLLQEHFPFPRRLFQVHALLLTSGVLLLDSQCSAAAFPYNCLAHAHRRVPAASSSRPPSAPLRLFCAMLARGARPNCHSFPSLLMSASASAAAALHAQCLRRGLAADCFVACSLVSVYGRTGHPSCDARKVFDEMEGPPDLASCNALLDALCHAGDLDGAGDFFERMAVRDPVSWTTLVSGLSRGGRHRCALEVFRGFLLGNVGRRLEEATLVSVFSACANVDGGEGLAAGMAVHAYLIRHEIELTAFLGTALVDMYGKHGRIGFCKSAFAVVCTKEVCTWNALLSALANHGKETDALVKFDMMRGEGFLPDQISFLALLTACARAGLVEVGLYWFDAMVAEYKVVPLMIHYGCVVDLLGRASRFGEAIQVIERMPFAADASVWGALLGACKLHGNVELAVEIGQKLMSLGPQQSGRYVTIRNVYLEGGNWHAGARMGEVMLEAGIKKTVGQSSVVLHGTDIPSSPFTAKCAGQEWMNFYDS

SEQ ID NO: 7422 - protein, 261 aa, Zea mays
  VARIANT 247..261: note = Derived polymorphism lacks residues 247 to 261
  VARIANT 233: note = Ancestral polymorphism is W, Derived polymorphism is C
  VARIANT 199: note = Ancestral polymorphism is R, Derived polymorphism is H
  VARIANT 197: note = Ancestral polymorphism is I, Derived polymorphism is V
  VARIANT 173: note = Ancestral polymorphism is A, Derived polymorphism is V
  VARIANT 154: note = Ancestral polymorphism is G, Derived polymorphism is D
  VARIANT 151: note = Ancestral polymorphism is R, Derived polymorphism is H
  VARIANT 149: note = Ancestral polymorphism is R, Derived polymorphism is Q
  VARIANT 146: note = Ancestral polymorphism is A, Derived polymorphism is T
  VARIANT 130: note = Ancestral polymorphism is A, Derived polymorphism is V
  VARIANT 129: note = Ancestral polymorphism is P, Derived polymorphism is L
  VARIANT 125: note = Ancestral polymorphism is R, Derived polymorphism is W
  VARIANT 123: note = Ancestral polymorphism is A, Derived polymorphism is T
  VARIANT 40: note = Ancestral polymorphism is T, Derived polymorphism is M
  VARIANT 35: note = Ancestral polymorphism is R, Derived polymorphism is W
  VARIANT 34: note = Ancestral polymorphism is A, Derived polymorphism is V
  VARIANT 29: note = Ancestral polymorphism is A, Derived polymorphism is V
  VARIANT 27..261: note = Derived polymorphism lacks residues 27 to 261
  VARIANT 23: note = Ancestral polymorphism is S, Derived polymorphism is R
  VARIANT 17: note = Ancestral polymorphism is P, Derived polymorphism is S
  VARIANT 15: note = Ancestral polymorphism is P, Derived polymorphism is S
  VARIANT 9: note = Ancestral polymorphism is R, Derived polymorphism is W
  VARIANT 8: note = Ancestral polymorphism is C, Derived polymorphism is Y
  VARIANT 4..261: note = Derived polymorphism lacks residues 4 to 261
  VARIANT 3: note = Ancestral polymorphism is G, Derived polymorphism is R
MAGQEHHYWRIVLFPLPLQGHIRPTLQLAALLHARGLAVTVLHTGLNAPDASRHTELTFVPIHEPSFPDEVTSPGTDIVTQLLALNAACEAPFREALASLLRGGQDVACAVVDGQCYSALRATHWLGVPALPLRTDSAATFRSMLAYPRLRDAGFIPVKGNDTCGFVGHVVGAVRASASGVVINTFERMEASELAKIQRELSRPAFAVGPLHLLSQAPAEQSLHAPDRGCLAWLDDHPPRSVLYVSLGSVACVDRGAFVEM

SEQ ID NO: 7423 - protein, 207 aa, Zea mays
  VARIANT 115: note = Ancestral polymorphism is R, Derived polymorphism is G
MMTDRQRVRQCDIEVMKMAMLKHEETFRQQVHELHRLYRIQRELMMTTSDDLTGAKPVTTPRRRSKQPRRALPLGLQLPADEYIASADEDEDAAAGTELELTLAVGGRCSPAGRRKSDRRRRRQAAEPRDDAGAVSSPFGPDCSGASVLSSPSSAEYCSDDGPAAAFHVPPPPCQRAVAFDLEESMMMRQHAPWLLQCRQYLTLRMT

SEQ ID NO: 7424 - protein, 29 aa, Zea mays
  VARIANT 9: note = Ancestral polymorphism is V, Derived polymorphism is D
  VARIANT 22..29: note = Derived polymorphism lacks residues 22 to 29
  VARIANT 24: note = Ancestral polymorphism is L, Derived polymorphism is F
MAAANLSTVGFFADAGDKLKLWVLCFLKG

SEQ ID NO: 7425 - protein, 211 aa, Zea mays
  VARIANT 39: note = Ancestral polymorphism is G, Derived polymorphism is R
  VARIANT 79: note = Ancestral polymorphism is H, Derived polymorphism is L
  VARIANT 110: note = Ancestral polymorphism is A, Derived polymorphism is V
MEQGDEASSVTKESPEQQLTRDREQQHDAGVAWLNLTLRAGESPSPDAAASCSAESGSGSGSGSGSGPEPTAKPSAAPHKVFSCNFCLRKFFSSQALGGHQNAHKRERSAAKRSYHAHRMIVGLPLHAHAALMHSLRVSPASSPIHKAAGPARAAARFLEGGSAWGTTVAACEEAPGSAAWPGSFRLRAQHSEHERAFETEQSKIDLDLRL

SEQ ID NO: 7426 - protein, 299 aa, Zea mays
  VARIANT 67..299: note = Derived polymorphism lacks residues 67 to 299
  VARIANT 76..299: note = Derived polymorphism lacks residues 76 to 299
  VARIANT 82..299: note = Derived polymorphism lacks residues 82 to 299
  VARIANT 178: note = Ancestral polymorphism is K, Derived polymorphism is I
  VARIANT 189: note = Ancestral polymorphism is G, Derived polymorphism is A
  VARIANT 193: note = Ancestral polymorphism is E, Derived polymorphism is Q
MATRRLRPQPTGSQTNLGANTPRPAANVCVTISDLKTEERKQKLSRYRKKKIKRNFDRKIKEGSGRQPAKSAREICQDRRMQPAEAKKVDPRLHFWILVSTTRNIQRQHEWLPKGWVMEVRAGGEKADKMYKFYVHSITGLRLLSKQDILLYINEAKVSGCDTNGQCDTTSEDNILSKVDFRPSGLPEGWVKELVYRKTKEGLIKRDPYYTDPASFYTFRTLKSALSFLETGKVSERAFIQRTSVHDLYSFEISADMVIVLLVFSLSSENLHDILCSSCLHFGHYHAEIKGSEFCFLAT

SEQ ID NO: 7427 - protein, 437 aa, Zea mays
  VARIANT 239: note = Ancestral polymorphism is A, Derived polymorphism is T
MAGKENAAPVGALGVAGPRLTRAAAKRAAAMAAEGPDDAKRRRVALGELPALANNAALAPSRPVKPSKPASRPARPGASEACGPAAAAEAERCASFSPPRAADAESNSASYSPPRTTADTAFSAPPRAADAESNSASYSPPLATADTAFSAPPRAVAPADLQLSGSYASDIYTYLRSLEVDPQRRSRSDYIEAVQADVTAHMRSILVDWLVEVAEEYKLVADTLYLTISYVDRFLSVNALGRDKLQLLGVASMLIAAKFEEISPPHPEDFCYITDNTYTKEELLKMESDILKLLKFELGNPTIKTFLRRFIRSAHEDKKGSILLMEFLGSYLAELSLLDYGCLRFLPSVVAASVMFVARLTIDPNTNPWNTKLQKMTGYKVSELKDCIVAIHDLQLNRKCPSLTAIRDKYKQHKFKCVSLILVPVVIPTSYFEDLAE

SEQ ID NO: 7428 - protein, 174 aa, Zea mays
  VARIANT 3..174: note = Derived polymorphism lacks residues 3 to 174
  VARIANT 85: note = Ancestral polymorphism is T, Derived polymorphism is P
  VARIANT 107: note = Ancestral polymorphism is R, Derived polymorphism is W
  VARIANT 120: note = Ancestral polymorphism is P, Derived polymorphism is L
  VARIANT 121: note = Ancestral polymorphism is C, Derived polymorphism is Y
MDWDRCRGAVPSGVERREGWTKPSTGEDGDGMREDEGPERVGRGSTSFSFITDCCLGLMIPTEEVIRVVVDEEGATLTAAVPLGPLMRVVERAKHELRVMCMVVPLRDTNEDDLLDRVEPCLDFIDEGIQFLYPLYEIRIDRSPLRCLNPAPTSYCASRSCCRLEPVAARGVSA

SEQ ID NO: 7429 - protein, 244 aa, Zea mays
  VARIANT 12..244: note = Derived polymorphism lacks residues 12 to 244
  VARIANT 140..244: note = Derived polymorphism lacks residues 140 to 244
  VARIANT 183: note = Ancestral polymorphism is D, Derived polymorphism is Y
MKRSGDIASLFQKYASKKKASTSIGDVPEEKIQEQEDAPEKEQMVEENVNTMPSCPPPLAPKGIVTPTPTPTPVYDISRLPLDPGDRQPIASYPVNDQDTIRKAYIIRGPFKPYAHDFESRRIGNMDRQFSPIWFYNYPWIEYSIKLELAFCFVCYLFAREKIKKSAFLNGGWNNWNRYDALDLHMGGVKSAHNATQERYNLFVNPQKAIDEQIVKVDNEDRRLYKIKLTYSIRCLKFLLQQGL

SEQ ID NO: 7430 - protein, 318 aa, Zea mays
  VARIANT 120..318: note = Derived polymorphism lacks residues 120 to 318
  VARIANT 125..318: note = Derived polymorphism lacks residues 125 to 318
MPRIGAIPTPLMARISFVSDDWLKSSLKEHLMGVSVDLLSTMNHNITYNLAWRKLTDPTRMPSNSAQEELGHNLLSSIKYAYKVDRRDSSIRPARGYAFMSTSQVGGLAPESKYSRFLRQEFDLRMALPLGVLNGALNAGVAAGVIHPLERGSAGSVSPLVERFNLGGNMPLVCHLGGPSSLLGFKTRGLRAATESRTHDPNTPGNGTSPSSKLNGLGGEVAVTAFADLSFDLPLKPLRELGIHGHAFVCAGNLGRLTECDLRKFPATEFLQTFRSCAGWGIVVPTRLFRVEMNYCYILKQLDHDGGKTDIQFNFSSS

SEQ ID NO: 7431 - protein, 180 aa, Zea mays; identical to SEQ ID NO: 354
  VARIANT 120: note = Ancestral polymorphism is D, Derived polymorphism is E
  VARIANT 117: note = Ancestral polymorphism is Q, Derived polymorphism is H
  VARIANT 56: note = Ancestral polymorphism is G, Derived polymorphism is E
  VARIANT 47: note = Ancestral polymorphism is L, Derived polymorphism is V
  VARIANT 27: note = Ancestral polymorphism is M, Derived polymorphism is I
  VARIANT 24: note = Ancestral polymorphism is P, Derived polymorphism is A

SEQ ID NO: 7432 - protein, 337 aa, Zea mays
  VARIANT 221..337: note = Derived polymorphism lacks residues 221 to 337
  VARIANT 219..337: note = Derived polymorphism lacks residues 219 to 337
MMTEADGETATLFPKSARLRNLTYSAPLYVDVSYRVMKKGHDCEEVTETAEYPKVFIGKGSSGQYIRATLPYIRRTYQNGKEQLACLSCTGYVLRDQNSQKTTVKSVTHSCTHHGDVKEIPYMCVGEDIDDLQYTPKPEFEGYFRVKNVQTEEIGFQCDNNQGECRAKFSCHLDCFAWVKRDSYLPQGSQGLKAVTKAKLRYDPLEVNPEDMVRFAMEQPQTMASYSVSDDVATYYLYMTYVHPFIFSLATIIPMLPDEVLWKGSGTLCEILLMVQPALLTKSASSSACPIVIQILIWDVEVQPNRHAVLGASESRPDLIYGFNEMLVLAHLLSDDR

SEQ ID NO: 7433 - protein, 201 aa, Zea mays
  VARIANT 183..201: note = Derived polymorphism lacks residues 183 to 201
  VARIANT 38: note = Ancestral polymorphism is G, Derived polymorphism is R
  VARIANT 5..201: note = Derived polymorphism lacks residues 5 to 201
MDEESAHKNTVEGITRIISKTISKKGMLELYNSLSEEGKKEFNKAYSASFYLCMDILYKCYEDVASRSEIRGVVLTRRRFYVRERGPPNFSNGQHRPCGRLVKRCAQVSTHPEGDLGPLHAFTYGVYTALMMAQERADELSRDEFERLMSHDCRWMLANPQQLKVHGLFLNRKNDCKDGRFSQVVSNALDMKLSSGMTLRG

SEQ ID NO: 7434 - protein, 219 aa, Zea mays
  VARIANT 208: note = Ancestral polymorphism is D, Derived polymorphism is Y
  VARIANT 183: note = Ancestral polymorphism is V, Derived polymorphism is F
  VARIANT 180: note = Ancestral polymorphism is L, Derived polymorphism is H
  VARIANT 153: note = Ancestral polymorphism is D, Derived polymorphism is V
  VARIANT 138: note = Ancestral polymorphism is V, Derived polymorphism is A
  VARIANT 131: note = Ancestral polymorphism is E, Derived polymorphism is K
  VARIANT 123: note = Ancestral polymorphism is V, Derived polymorphism is M
  VARIANT 85: note = Ancestral polymorphism is R, Derived polymorphism is L
  VARIANT 54: note = Ancestral polymorphism is L, Derived polymorphism is H
MFARHHIIFSNTALLDSVHLSTPSCRSPPRRAPALQHHCHPFSVMLQAFVDCTLESFGSRICDPFTSLLEAIIAWDATVGCPHIRTKLAAAGLGPGLPLLAASANGNGSAEDPPGASVTGSAMWRGATRCEDLAVCHVRVLIKGWTWIPNALVDVYTCHCGVSCVGSKFPAAVDRPGALLFEVATPPPCFYRLLRSLMVWLEADGQVDHLLYAQFCPQD

SEQ ID NO: 7435 - protein, 435 aa, Zea mays
  VARIANT 304..435: note = Derived polymorphism lacks residues 304 to 435
MGYEQGRDTDKVCLKKKNGIRKLSLDWYSRWEDQPNDMEEELSLNMEKELHLLDNLEPPSKIEKLRIRGYRGSQLPCWMAKQSDSCGPADDTHIVMQRNPSEFSHLTKLVLDNLPNLEHLGELVELPLIKILKLKRLPKLGELLTTTTGEEGVEAQCCFHHVSTLVIIDCPKLVVKPYFPPSLQRLTLEGNNMQLVSSGCFFHPRHHHASHAHGDESSSSSYFADETGTHLERLELRRLTGSSSGWEVLQHLTGLHTLEIFKCTGLTHLPESIHCPTNLCRLVITQCDNLRVLPDWLVELKSLQSLEVRLCDALQQLPEQIGELCSLQHLTISSLTSLTCLPESMQHLTSLRTLNLCLCNALTHLPEWLGELSVLQKLWLQGCRGLTSLPQSIQRLTALEDLLISYNPDLDRRCTEGLGEDWHLVSHIQNLRLRD

SEQ ID NO: 7436 - protein, 66 aa, Zea mays
  VARIANT 30: note = Ancestral polymorphism is R, Derived polymorphism is L
  VARIANT 34: note = Ancestral polymorphism is K, Derived polymorphism is N
  VARIANT 36: note = Ancestral polymorphism is R, Derived polymorphism is H
  VARIANT 46: note = Ancestral polymorphism is R, Derived polymorphism is C
  VARIANT 62: note = Ancestral polymorphism is G, Derived polymorphism is S
MSAGLSTELRHKYNVCSIPIRKDDEVQVVRGTYKGHEGKMVQVYRRRWVIHVERITREKVNGSVPG

SEQ ID NO: 7437 - protein, 144 aa, Zea mays
  VARIANT 120: note = Ancestral polymorphism is S, Derived polymorphism is F
MAAAGPWPRDLAPVSPTWLGRRAWSQIRDGDVWIRWARGHTWPSLGSWLRGWALRWHTCSVGCGPRQSGRLGAASIRGGGRGAAWRRPLPVAQVGAVGGRNRLALGRQSDPEVQWLDLPSLRPMSVVERRRASSPWWCGGEERR

SEQ ID NO: 7438 - protein, 1365 aa, Zea mays
  VARIANT 978..1365: note = Derived polymorphism lacks residues 978 to 1365
  VARIANT 528..1365: note = Derived polymorphism lacks residues 528 to 1365
  VARIANT 527..1365: note = Derived polymorphism lacks residues 527 to 1365
  VARIANT 18..1365: note = Derived polymorphism lacks residues 18 to 1365
  VARIANT 15..1365: note = Derived polymorphism lacks residues 15 to 1365
MLINFFLGIWYFLCWINLLSLPLLRGTLFTGGWKLVCTRTKQLIYSSLIPALGNKNNIKGVVPALDKFNLQGTSKEGTSRNTGGMEVALVSTVLKVLGTKLAPLALKELSSKAGVAKDLQELQDLVEEINNWLQTVGDKDRSSKWLKKLKEVAYDAEDLVHEFHIEAEKQDREITGGKNTLVKYFITKPKATVTEFKIAHKIKKIKNRFDAIVKGRSDYSTIANSMPVDYPVEHTRKTIGEVPLYTIVDETSIFGRDQAKNQIISKLIETDSQQRIKIVSVIGLGGSGKTTLAKQVFNDGNIIKHFEVILWVHVSREFAVEKLVAKLFEAIAGDMSDHLLLQHVSRTISDKLVGKRFLAVLDDVWTEDRVEWERFMVHLKCGAPGSSILLTTRSRKVAEAVDSSYAYDLPLLSMEDSWKVFQQCFGIAMKALDPEFLQSGIEIVEKCGGVPLAIKVIAGILHGMKGIEEWQSICNSNLLDVQDDEHRVFACLWLSFVHLPDHLKPCFLHCSIFPRGYVINRCHLISQWIAHGFVPTNQARQAEDVGIGYFDSLLKVGFLQDHDRDQIWSTRGEVTCKMHDLVHDLARQILRDEFESEIETNKQIKRCRYLSLTSCTGKLDNKLCGKVRALYVCGRALEFDKTMSKQCCVRTIILKYITADSLPLFVSKFEYLGYLEISDVNCEALPEALSRCWNLQALHILNCSRLAVVPESIGKLKKLRTLELNGVSSIKSLPQSIGDCDNLRRLYLEGCHRFEDIPNSLGKLENLRILSIVHCFSFEKLSPSASFGKLLNLQTITFNCCFNLRNLPQCMTSLSHLEMVDLGYCYELVELPEGIGNLRNLKVLNLKQCTQLRGLPAGCGQLTRLQQLSLFVIGDSAKHARISELGNLDKLDGELQIKNIRYVKDPSDTDKVRLKKKIGIRKLSLDWYSRLEVQPDDVEEELSLNMEKELHLLDSLEPPSKIEKLRIRGYRGSQLPRWMAKQSDSCGPADDTHIVMQRNPSEFSHLTELVLDNLPNLEHLGELVELPLVKILKLKRLPKLVELLTTTTGEEGVEVLCRFHHVSTLVIIDCRKLVVKPYFPPSLQRLTLEGNNMQLVSSGCFFHPRHHHASHAHGDESSSSSYFADETGTHLERLELRRLTGSSSGWEVLQHLTGLHTLEIYMCTDLTHLPESIHCPTTLCRLMIRSCDNLRVLPDWLVELKSLQSLDIDSCDALQQLPEQIGELCSLQHLQIISMPFLTCLPESMQHLTSLRILNLCECNALTHLPEWLGELSALKKLLIQSCRGLTSLPRSIQCLTALEELYISGNPKLLQISASYSKEDKDGQLQPFRCCRPDDQHCSEAQEFDLVRNMLIVAVEERYKDAVD

SEQ ID NO: 7439 - protein, 647 aa, Zea mays
  VARIANT 407: note = Ancestral polymorphism is T, Derived polymorphism is I
  VARIANT 322..647: note = Derived polymorphism lacks residues 322 to 647
MDLPENELQRYIKDNGKPMWTAHNNHNIRYFKEEDIRIITNNYNTFLGKGAFGEVYKGVLDDNSLVAVKKYIHNVKEDFAKEVIVHCQINHRNVVRLIGYCIGENALMMVTEYISRGNLSDILHSSEISISLETRLSIAIGCAEALSYMHSQMYGKVIHGDIKPANILLDDNLTAKISDFGISKLLSTDNTLYTTHVLGSIGYMDPLFARSGRLTSKSDVYSFGVVLLELITRRKAVDGGQISLTENFTQALAKRNKIREFYDVKVADENSLRILDGIGKLAAKCLAMEIEKRPEMKDVAEQLRMFRKTQYQSQEKIFFFGWVRRSKQPPQNMVQIHKNRGNQVLKAEVQTQEVSKVDKDVHNVTVVRDRSSKLYSFGSSQGIELEKLLEASAEVLGKGKYGTTYKTTLHDGSTLIIKRLKTLDVPEAVFKKRIVAIGTIEHELVVPLRQYYYSKDEKLLVYDYFPNGSLASNLHGKDVKPVGWETRSAIALSVARAVAFIHSTNAAASHGNISSSNVLLTSNYEGLVSEHGLKTLVSIPTLLADNNIAQKDDVYSFGVILLEMLTSKSPIVTDEPDLVDWVLSIPHEHWATQAFDKKLLTNKTVVEELVQFLKLAIHCCDKNPTMRPAMAEVVQRIEGIRRFYSWE

SEQ ID NO: 7440 - protein, 189 aa, Zea mays
  VARIANT 99: note = Ancestral polymorphism is P, Derived polymorphism is L
  VARIANT 175..189: note = Derived polymorphism lacks residues 175 to 189
MAIAGQCSSCYYTSPTLQLHRRHSHLPRQPQAARRARRPRLQVAAAADSGPIRAATDAEFFQPSDTRPIMLFDGVCNLCNGGVRFVREHDPNRSIRYVPLQSESGRKLLQRSGRSPDDISSVVLVEKDRSFIKSEAVLRIMEYLNLPFPQLAVFLKFVPLFLRDFAYDNVANNRYAMFGRAEAEACEIL

SEQ ID NO: 7441 - protein, 338 aa, Zea mays
  VARIANT 301..338: note = Derived polymorphism lacks residues 301 to 338
  VARIANT 200: note = Ancestral polymorphism is C, Derived polymorphism is S
  VARIANT 199: note = Ancestral polymorphism is R, Derived polymorphism is L
  VARIANT 185: note = Ancestral polymorphism is P, Derived polymorphism is S
  VARIANT 182..338: note = Derived polymorphism lacks residues 182 to 338
  VARIANT 84..338: note = Derived polymorphism lacks residues 84 to 338
MDIINGAVLPRCHAAPVTGAAAASVADARVSGHLQLLRRVRCRGSGSASAGLLHATTPRAGVAARRFFSPPLGNGNGNGRTIGWRPARCTHGGSSSDGDGAAAADFDAREEEFVDSSVMEAVELRSVSDGGFVIKMRDGRNLRCVQNNPRVLRLRDSAPHHAIVLKMEDGSDLLLPIIVSTYQFPACCLDECLIDVINRCCRCFFFLLLVLNLVACSCYFNHIPPQWRRQASCFWLRFGTSELCVWCGSQKWSMTHTILDYISQRLGMTKTLSVSTSSHRMLSTLLSAARPDDQHCSEAQEFDLVRNMLIAAVEERYKDAAQYRDQLSMLRSKKKNAI

SEQ ID NO: 7442 - protein, 471 aa, Zea mays
  VARIANT 158: note = Ancestral polymorphism is S, Derived polymorphism is R
  VARIANT 151: note = Ancestral polymorphism is G, Derived polymorphism is R
  VARIANT 19: note = Ancestral polymorphism is P, Derived polymorphism is S
  VARIANT 2: note = Ancestral polymorphism is E, Derived polymorphism is K
MEKTTVVLYPGAGVGHLAPMLELAKALLRHAGDQVDVAIVVVEPPVYADGFAATVARAKASNASVACHVLPPPASDGGAEPDDPLTRLLRFLRATNAPLRDFLRALSASRRVQAIVLDMFCAGALDVAADLGLPAYFHFASGAAGLAYFLGLPAMRASVGTSFAELGGSTVLSFPGVPPLTVADLPQGVLNDSEACRVIMGAAARMPDARGILINSFESLEPRAMRALRDGLCVPGRATPPVYCVGPMVSPGGDGAGHECLRWLDAQPDRSVVFLCFGSLGTFPKRQLEEIAVGLERSGQRFLWVVRSPPGGPPADDVRALLPAGFAERTEGRGLVVASWAPQVDVLRHRAAGAFVTHCGWNSTLEGVVAGLPLLCWPLYAEQRMNKVRIVEEMKLGVEVRRDGEGLVTAQEVEAKVRWVMQDSDGARELKERAEAARARAAEALAEGGPSRAAFLEFVLDLLASEGMVNV

SEQ ID NO: 7443 - protein, 117 aa, Zea mays
  VARIANT 90: note = Ancestral polymorphism is V, Derived polymorphism is D
MAWRGPASRAVLAAVRRPAAAPAAARLHAPRPFAAPRRRVPSAFATSSLPSARPLAAMMGSPVTVAAVMARLTAHPGASARACCELSQGVRIMKPVSHTNSYVLLSKSTIPSNAGAH

SEQ ID NO: 7444 - protein, 349 aa, Zea mays
  VARIANT 27..349: note = Derived polymorphism lacks residues 27 to 349
MSSSSVQQTAFPEQEADAEGETNPELYQHFANLVSSLPSSKGLSNNKFYRHGQGWHCSEVGIVGAMVTDACFSARPSDVIIATLPKSGTTWMKSLLYATVHRRERPVVGAAAADQHPLNSWGPHDLIKFFEYQLYTRDRVPDLDRLPDPRLFATHVPFVSLPSSVVATPGCKIVYVCRDPKDHLVSLWDFVNKYFRVKDGLEPLSVEAAAELFCAGLTPFGPYWDHVLGYWRAHRADPDKVLFFRYEEMQRDPAAHVRRLAEFVGLPFSSEEEDGGVVDAVVGLCSFERMRGMAPTKGGRTEFPIGVVPNSSFFRQGVVGDWVNHLSPEMARRIDAITADKFRGSGLVV

SEQ ID NO: 7445 - protein, 154 aa, Zea mays
  VARIANT 14: note = Ancestral polymorphism is D, Derived polymorphism is Y
  VARIANT 18: note = Ancestral polymorphism is H, Derived polymorphism is N
MITTTTTTMTAAPDLSLHISPPSPPEPRLLLGLELDDDTAAEAAAATKKADDAAAMREYNNLQVQRRQLHQPSQTAGHGFKRGTSGSAAAGAGGRRSSRAPRMRWTTALHAHFVHAVELLGGHERATPKSVLELMNVKDLTLAHVKSHLQARLH

SEQ ID NO: 7446 - protein, 273 aa, Zea mays
  VARIANT 240..273: note = Derived polymorphism lacks residues 240 to 273
MAPLFLYMFLSLQQMYRTVKQQGADRPCVAVAGHGHARDMVVLLTTGVGEGDAGFVDDVSNSNSNSNNSVVVNNTVPAAFNNNHTDRLVCLCTCSRTPQSPGGREQQQQPAPAVDRRRDDAAAAAAACAWVVGRQVQHQRSCSEGVTKLQGLKVGDERVDRHHGDDAIAAHRLVEDEARDDHAGSGGGFQQRRPSPNNTSGTVSSSEWLNQQHCSGVMSVRVLGLPPATPPSLEMSLGRQGWQMDQQCGGEFEFDFEPSPPSAAKELTLLRCL

SEQ ID NO: 7447 - protein, 812 aa, Zea mays
  VARIANT 80..812: note = Derived polymorphism lacks residues 80 to 812
MAQILLHGTLHATIFEAESLSNPHRATGGAPKFIRKLVEGIEDTVGVGKGATKIYATVDLEKARVGRTRMISNEPVNPRWYESFHIYCAHMAADVIFTVKIDNSIGASLIGRAYLPVQDLLGGEEIDKWLEICDENREPVGDSKIHVKLQYFDVGKDRNWARGVRSTKYPGVPYTFFSQRQGCKVTLYQDAHVPDNFVPRIQLADGKNYEPHRCWEDIFDAISKAQHLIYITGWSVYTEITLVRDTNRPKPGGDVTLGELLKRKASEGVRVLMLVWDDRTSVGLLKKDGLMATHDEETANYFHGTDVNCVLCPRNPDDSGSFVQDLQISTMFTHHQKIVVVDHEMPNQGSQQRRIVSFIGGIDLCDGRYDTQYHSLFRTLDTVHHDDFHQPNFEGGSIKKGGPREPWHDIHSRLEGPIAWDVLYNFEQRWRKQGGKDLLVRLRDLPDIIIPPSPVMFPEDRETWNVQLFRSIDGGAAFGFPETPEEAARAGLVSGKDQIIDRSIQDAYVNAIRRAKNFIYIENQYFLGSSYGWKPEGIKPEEIGALHLIPKELSLKIVSKIEAGERFTVYVVVPMWPEGVPESASVQAILDWQRRTMEMMYTDIAQALEANGIEANPKDYLTFFCLGNREVKQEGEYEPEEHPEPDTDYIRAQEARRFMIYVHTKMMIVDDEYIIIGSANINQRSMDGARDSEIAMGAYQPYHLATRQPARGQIHGFRMSLWYEHLGMLEDVFQRPESVECVQKVNEVAEKYWDLYSSDDLEQDLPGHLLSYPIGVTADGSVTELPGMENFPDTRARVLGNKSDYLPPILTT

SEQ ID NO: 7448 - protein, 351 aa, Zea mays
  VARIANT 88: note = Ancestral polymorphism is A, Derived polymorphism is T
MLSAYARGGRMGDAERLFAGMPDRSVVSWTAMVSGYAQNGRHEEAMHTFLDMWDGAGVRPNKLTVSSVLPACAALGALALGRKVERYARGRGMLRNVYVANALVEMYAKCGSIRWAWKVFRGMGTQRDLCSWNSMIMAFAVHGLWTEALALFHKLRMTGVKPDGITFIGVILSCTHGGLVDEGKLLFNSMRGEFGLKPRIEHYGCMVDLLGRAGLLKEADSLIASMPMEPDAVIWGALLGACSFHGNLELAKTAVEKLMHLEPHNTANLVILSNIYASCGKWDGVARVWKLLKEKDHKKSAGYSVIELDGRMHKFLVEDKSHPRSEKVYDALDSITLAMKLVSSENPEVES

SEQ ID NO: 7449 - protein, 197 aa, Zea mays
  VARIANT 99: note = Ancestral polymorphism is S, Derived polymorphism is N
  VARIANT 163..197: note = Derived polymorphism lacks residues 163 to 197
  VARIANT 165: note = Ancestral polymorphism is D, Derived polymorphism is A
  VARIANT 168: note = Ancestral polymorphism is Q, Derived polymorphism is R
MTKVTSADAEQLSSSREGVNPPPAEALSSALPRSGVPLHRPSRLAPVCRHGSSNDEAERQLQCPDVFRRVPGTHQECTSYSPRREYFLQPVCVICTSYSLFVSLDHGYKTIVTIGDGATDLEKMVSFVKCMLGLDAVVWDIIGSSLLEKVVYLLTELDVNITWEDILQDEHNKGIFDMELEDLAEDEHNLGRTSVET

SEQ ID NO: 7450 - protein, 256 aa, Zea mays
  VARIANT 126: note = Ancestral polymorphism is P, Derived polymorphism is L
  VARIANT 189..256: note = Derived polymorphism lacks residues 189 to 256
MQNTAMAVRCSCTALFPLLFCFMICQLCYGTVTDIQCLKKLKASVDPDNKLEWTFNNNTEGSICGFNGVECWHPNENMVLSLHLGSFGLKGEFPDGLENCSSMTLLDLSSNSLSGPIPADISRRVPFVRNLDLSFNSFLGEIPEALANCSYLNIVNLQHNKLTGTIPVQLAAISRLAQFNVADNQLSGQIPSSLSKFTASDFANQDLCGRPLSNDCTANSSSRTGIIVGSAVGGAVITLIIAAVILFIVLQPSHSL

SEQ ID NO: 7451 - protein, 171 aa, Zea mays
  VARIANT 18: note = Ancestral polymorphism is C, Derived polymorphism is Y
  VARIANT 19: note = Ancestral polymorphism is C, Derived polymorphism is W
MVQCLDGVRQLLAVLLNCCDVELKQPRGLQDPQVLARETVFSVSEVEALYELFKRISSAVIDDGLINKEEFQLALFKTNKKESLFADRVFDLFDTKHSGILGFEEFARALSVFHPNAPLDEKIDFSFRLYDLKQQGYIERQEVKQMVVATLAESGMNLSDEIVESIIDKVC

SEQ ID NO: 7452 - protein, 108 aa, Zea mays
  VARIANT 24: note = Ancestral polymorphism is L, Derived polymorphism is F
MNHECILFISCCIVPCCCMTSVGLALEIIRLSSSCLLISNSLANFVFFCHYKTFEEADTKHDGRIDKEEWRNLVIRHPSLLKNMTLQYLKDITTTFPSFVFHSQVDDN

SEQ ID NO: 7453 - protein, 367 aa, Zea mays
  VARIANT 278: note = Ancestral polymorphism is R, Derived polymorphism is T
MEEVEVANMAAVESCHRVLALLSQQQDPALLKSVASETAEACAKFRKVAALLGSASGGGGCGHARGRFSRRVRPLGLVNQKSPLGIATGSGNPLEMMPSTAAAAGSPSPPQSTSYAQMRARLSSAPESSRGLDLACSSSRCSPHPFGAPKLVQPLSVQFQIGSVAHRYPFHQQQSRQKLQAEMFRRSNSGISLKFDSPSPSGGAAGTMSSARSFMSSLSIDRSMASLDGKRPFHLVGTPVASDPADAHRAPKRRCTGRGEDGRGKCATTGRCHCSKRRKLRIKRSIRVPAISNKIADIPPDEYSWRKYGQKPIKGSPHPRGYYKCSSVRGCPARKHVERCVDDPAMLIVTYEGEHSHTQLPAQPAQT

SEQ ID NO: 7454 - protein, 162 aa, Zea mays
  VARIANT 116: note = Ancestral polymorphism is M, Derived polymorphism is T
  VARIANT 114: note = Ancestral polymorphism is I, Derived polymorphism is R
  VARIANT 112: note = Ancestral polymorphism is G, Derived polymorphism is R
  VARIANT 103: note = Ancestral polymorphism is S, Derived polymorphism is G
  VARIANT 94: note = Ancestral polymorphism is E, Derived polymorphism is K
  VARIANT 89: note = Ancestral polymorphism is I, Derived polymorphism is V
  VARIANT 88: note = Ancestral polymorphism is A, Derived polymorphism is T
  VARIANT 83: note = Ancestral polymorphism is G, Derived polymorphism is R
  VARIANT 78: note = Ancestral polymorphism is A, Derived polymorphism is V
  VARIANT 74: note = Ancestral polymorphism is V, Derived polymorphism is M
  VARIANT 73: note = Ancestral polymorphism is A, Derived polymorphism is V
  VARIANT 72..162: note = Derived polymorphism lacks residues 72 to 162
  VARIANT 70: note = Ancestral polymorphism is S, Derived polymorphism is L
  VARIANT 69: note = Ancestral polymorphism is T, Derived polymorphism is I
  VARIANT 65: note = Ancestral polymorphism is S, Derived polymorphism is L
  VARIANT 63: note = Ancestral polymorphism is I, Derived polymorphism is F
  VARIANT 61: note = Ancestral polymorphism is S, Derived polymorphism is N
  VARIANT 50: note = Ancestral polymorphism is A, Derived polymorphism is V
MDKNSKNKDKQLKSHPPKNVESEILREHIKKEREAAKAGKRPYYLKKYRACLSVFVQLVISEIDSSAATSLQVVKLLALYLTGDKEGAISSLKEWLSDSAIGSNPVLRLIAGIIFMHEQDYNEALKHTHSGGTLDLEAIIDPAAIFEQLEKRKLIPQPLAAK

SEQ ID NO: 7455 - protein, 346 aa, Zea mays
  VARIANT 11..346: note = Derived polymorphism lacks residues 11 to 346
MAVDTTQPEYWLNWRFLLCALWVYSCMALAFFLIKKYEGASSPDSNGDDGGDREEALPRVRPGVVYLEDCWKTCLEGIHPGWLLAFRVVAFFVLASLLVVDIITDGWSIFLYYTQWTFLLVTLYFGYVYNTGGDRYDPVRSGADHGTYMIAPTAESVYDPAIKISHDTKTNNGGEIAGVWGYMFQIMFQTNAGAVMITDLVFWFILYPFLAHNQYKMDFILIGTHSINVVFIVGDAALNRLVALPISRLDIPWCTCMVPGGGTAAPPMLRHVRPGAEAQAYVAGKLVPSNLCEVIKDDNRWSWLSLYASFSKKIKRRFCKLYAPRNHIEIDHTCLSTGFSGSGHVD

SEQ ID NO: 7456 - protein, 662 aa, Zea mays
  VARIANT 96..662: note = Ancestral polymorphism lacks residues 96 to 662
MRAREPRMWMGWCWVALAALLALILPPSNATLSPAGINYEVVALMAIKTELEDPYNVLDNWDINSVDPCSWRMVTCSSDGYVSALYVTLPCSCPFSRAPAVARSSHMRSFVYRGLPSQSLSGKLSPGIGNLTRLQSVLLQNNVISGPIPSTIGRLGMLKTLDMSDNQLTGSIPGSLGNLKNLNYLKLNNNSLSGVLPDSIASIDGFALVDLSFNNLSGPLPKISARTFIIAGNPMICGNNSGDSCSSVSLDPLSYPPDDLKTQPQQGIGRSHHIATICGATVGSVAFVAVVVGMLLWWRHRRNQQIFFDVNDQYDPEVCLGHLKRYAFKELRAATNNFNSKNILGEGGYGIVYKGYLRDGSVVAVKRLKDYNAVGGEVQFQTEVEVISLAVHRNLLRLIGFCTTESERLLVYPYMPNGSVASQLREHINGKPALDWPRRKRIALGTARGLLYLHEQCDPKIIHRDVKASNVLLDEYFEAIVGDFGLAKLLDHRESHVTTAVRGTVGHIAPEYLSTGQSSEKTDVFGFGVLLVELITGQKALDFGRVANQKGGVLDWVKKLHQEKQLGTMVDKDLGSSYDRVELEEMVQVSLLCTQYHPSHRPRMSEVIRMLEGDGLAERWEASQNVDTPESVSSELLLQKYMDFAADECSLGLEAMELSGPR

SEQ ID NO: 7457 - protein, 199 aa, Zea mays
  VARIANT 138: note = Ancestral polymorphism is A, Derived polymorphism is E
MAAGSSSCSPVLLLLLLFLASSGAGAGAGEASTTSTSAPVPAPASALDQVCGRLGSYYVTPSLCESALCADPSAPCRAARDAPTVAALAARLAADNATAARDSIEAVFFPSSSSSSAAAAAQSCLQLYAGAVPALRWAARAVAAGRYRGAREVLQAAQYVAAGCEGIAGDAAAPLPRENGGFADMAFVAHAVVASMSAD

SEQ ID NO: 7458 - protein, 187 aa, Zea mays
  VARIANT 46: note = Ancestral polymorphism is V, Derived polymorphism is I
  VARIANT 59: note = Ancestral polymorphism is P, Derived polymorphism is S
  VARIANT 68: note = Ancestral polymorphism is G, Derived polymorphism is D
  VARIANT 81: note = Ancestral polymorphism is G, Derived polymorphism is R
  VARIANT 90: note = Ancestral polymorphism is G, Derived polymorphism is V
  VARIANT 137: note = Ancestral polymorphism is A, Derived polymorphism is V
MGRRITTTTLLAVAASALCFSSCCGVDVNGAADTVAGSCDAIRDFVDVAFCASRLGSVPGAASADLHGHLLMAADLAAASGVSARDAAAGMARREGDGGHPAARDALEACGILYGAASVPALRLMRGYAAARAWGAARALLPLTGQAGIGCDAALTGSAPAKARMAAANREFDQLSTMATALLNKLA

SEQ ID NO: 7459 - protein, 425 aa, Zea mays
  VARIANT 197..425: note = Derived polymorphism lacks residues 197 to 425
MFACRSLLARASRLTRPAIPSAAGSPLRYLHQGSYCRNKLASFVMEGAQGSSIVTKHNKRQSPVQRWRPVSTEAVPQHHQDDIIETSNSGSKKIIEDCIASSENLPPDGTTNVVEVTANDASSSKNNLSFGYSSTKVVIEDHAELSGFNKDLAGSNVFGTHSSSVEAVQSRQLDYSHFISLPLALHPDLVNKLNYFQSSILGEENSNKDGSQSEGSIGEMDYDHKQAEAKMGAKGSQSDFGIDKSIFIKPETFHLTVLMLKLWNKERIDKASDVLQSVSTQVNEALENRPISIQLRGLTCMKGFPAKARVVYVPVLEVGSEGRLAHACKVITDAFIKAGLVFERDVRELKLHATVMNVRHRKSRNKRNTWTDSFDARGIFGRFGKAEWGAYPIHEIHLSQRFKFDRSGYYYCCSSIPLPAEMHTE

SEQ ID NO: 7460 - protein, 110 aa, Zea mays
  VARIANT 18: note = Ancestral polymorphism is A, Derived polymorphism is D
  VARIANT 36: note = Ancestral polymorphism is E, Derived polymorphism is G
  VARIANT 60..110: note = Derived polymorphism lacks residues 60 to 110
  VARIANT 79: note = Ancestral polymorphism is C, Derived polymorphism is W
  VARIANT 98: note = Ancestral polymorphism is E, Derived polymorphism is K
  VARIANT 102: note = Ancestral polymorphism is A, Derived polymorphism is V
  VARIANT 109: note = Ancestral polymorphism is L, Derived polymorphism is H
MWKESRELVNQDTTTLVAIVSGINNGGVGKLMAAPEAETRARFKCNYYKFAMDQAQYKLQFPILIELLKAVEGKQCIICETIILEFKEIVSMCGGPEENTRARHLLKQLT

SEQ ID NO: 7461 - protein, 344 aa, Zea mays
  VARIANT 282: note = Ancestral polymorphism is T, Derived polymorphism is A
  VARIANT 277: note = Ancestral polymorphism is D, Derived polymorphism is G
MATTTDLGFEATELRLGLPGGGGGGEPALGGEGRSSSSASGKRGFAETIDLKLKLEPAAVVEAEEEEEDHGVAVALEKEEEAGKMKRSPSQSSVAAAAAAVLADPAEKPRAAKAQVVGWPPVRSFRKNIMSVQSDKGAAAANGDKSSPAAGGGAAFVKVSLDGAPYLRKVDLKMYRSYQQLSKALENMFSSFTIGSCGSQGMNGMNESKLVDLLNGSEYVPTYEDKDGDWMLVGDVPWEMFVESCKRLRIMKGSEAIGLGELTYMIIIITNLNNKRDFLGYAKGHGEMQEQKLRRRRTDGSLHLSTTRGGWMQEEQISMAFAALLVSVSYSSSLPFRPLYLPDQ

SEQ ID NO: 7462 - protein, 520 aa, Zea mays
  VARIANT 307: note = Ancestral polymorphism is Q, Derived polymorphism is H
MAAAPPPCSSCSCSCRIRGRKQAPARRALPTVASLVPCFLLLLLVVASCQPALVSAAHGGGGGGGRKHAAAAARAHAHAQQTLFRAAGDEREEAYRRVMARMARMDRDSNMTIQSPDGDVIRCVPSHLQPAFDHPVLRGQKPEDEPVERPMPPKRVGGAAEEEEDDDVFPQAWSDGGKRCPEGTVPIRRTTARDVLRASSARRFGMKARASHHARRDSTSSGHENSVEATSRSSYAQRRTLYTTYSSYRSIGPDPDKILLAALHGGSDGRAQHAVGYVTGDQFYGAKASLNVWSAKVASAAEFSLSQIWVISGSFGNDLNTVEAGWQVSPELYGDSSPRFFTYWTTDAYQETGCYNLHCSGFVQTNNRIAIGAAISPTSVYNGRQFDISLLIWKDPHRGNWWLQLGSTGQLVGYWPSFLFTHLGGHANMVQFGGEVVNSRPSGSHTPTQMGSGHFPREGSNRAAYFRNVQVVDGDNSLVPAAALRLVADHPACYDIQGGYNRAWGNYFYYGGPGRNVHCP

SEQ ID NO: 7463 - protein, 221 aa, Zea mays
  VARIANT 216: note = Ancestral polymorphism is A, Derived polymorphism is E
  VARIANT 204: note = Ancestral polymorphism is G, Derived polymorphism is R
  VARIANT 182: note = Ancestral polymorphism is S, Derived polymorphism is N
  VARIANT 160: note = Ancestral polymorphism is P, Derived polymorphism is L
  VARIANT 153: note = Ancestral polymorphism is A, Derived polymorphism is T
  VARIANT 144: note = Ancestral polymorphism is D, Derived polymorphism is H
  VARIANT 109: note = Ancestral polymorphism is R, Derived polymorphism is C
  VARIANT 81: note = Ancestral polymorphism is D, Derived polymorphism is N
  VARIANT 64: note = Ancestral polymorphism is G, Derived polymorphism is V
  VARIANT 44: note = Ancestral polymorphism is P, Derived polymorphism is L
  VARIANT 11: note = Ancestral polymorphism is A, Derived polymorphism is D
MPRDSDSLKCAACGCHRSFHRKDDACRRHHQLMLPATTTASRILLLLPPPHPHYASPPSFLYHGTPSGGGGTATDSSSGTDAELVLGFFFMLLRSVWCLIRTDLVAVLRMDLEVQGFPTIKIFRDQGKNIQEYKGPREADGIVHYLKKQVGPASKEIKSLEDAAALIDDKKIYIVGIFAEFSGTEFTNFMEVAEKLRSDYDLLGSYSYLINIWQWALLSIL

SEQ ID NO: 7464 - protein, 443 aa, Zea mays
  VARIANT 190..443: note = Derived polymorphism lacks residues 190 to 443
MGGGDDAAAGVGDGFAWDADSQLYYHASTAFYHDPVAGWYYSSRDSQYYVYKNGNYMPLTTDLENEPTANHPYDEANQDVLEHSSGLETTILDNENEIPGPPSEWMEETLINLYLSGYSNNEVNAESSLVIAHSNEEDRIETTGNKLDSLTSDSASASLHDATSQQTEVETETKNSAYVYESLGEEEEKWHAQYGQVERSNDDQHLPPTIDIWDWDVVQDHVNKGQPVVRLVGCLSRGSNKLHPSLPTRGGLVRTAPVREVHLDLVQVSTGKLYRLRNPSRKYLATLSAYDSSNPTKDWGFPDINLNKQSTAKCQSEVLADKSCGGGSVSAANTMEPNTKVYRDRAAERRILHRGLGVGPGQKQSNTNNFDEYEESIEDMDSMGVASADLNFQSSGLLSAKRIMENMGWKQGEALGKSRKGIVEPIQPSINKHGAGLGWRQTR

SEQ ID NO: 7465 - protein, 110 aa, Zea mays
  VARIANT 60: note = Ancestral polymorphism is A, Derived polymorphism is T
  VARIANT 73: note = Ancestral polymorphism is V, Derived polymorphism is D
  VARIANT 74: note = Ancestral polymorphism is A, Derived polymorphism is V
  VARIANT 91: note = Ancestral polymorphism is T, Derived polymorphism is K
MSSLGSTDVDDGNEEEDGSASTPEIYRCHSHAVACSLSMQQDLQSDTDEETTKITPVDEAKKLYLLFGLGANVAIIFSGRTMKYFSNLRKTLGPGMMSIVVLLELASIGE

SEQ ID NO: 7466 - protein, 790 aa, Zea mays
  VARIANT 127: note = Ancestral polymorphism is V, Derived polymorphism is A
MAPNLSKKTPAGLLGDEVAPVEGLKPSRFTLKGKDLAVDGHPVLLDVPANIRLTPASTLVPAADVPAAGGGSFLGFDAAAAESRHVVPVGKLRDIRFMSIFRFKVWWTTHWVGDSGRDVENETQMMVLDRSAGEPGGGGRPYVLLLPIIEGSFRACLEAGKVEDYVDLCVESGSSAVRGAAFRSSLYLHAGDDPFELVADAVRVVRAHLGTFRTMEEKTPPPIVDKFGWCTWDAFYLKVHPEGVWEGVRRLAEGGCPPGLVLIDDGWQSICHDEDDPNSGEEGMNRTSAGEQMPCRLIKFQENHKFREYKQGGMGAFVREMKAAFPTVEQVYVWHALCGYWGGLRPGAPGLPPAKVVAPKLSPGLQRTMEDLAVDKIVNNGVGLVDPKRAHELYDGLHSHLQASGIDGVKVDVIHLLEMLCEEYGGRVELAKAYFAGLTASVRRHFGGNGVIASMEHCNDFMLLGTEAVALGRVGDDFWCTDPSGDPNGTFWLQGCHMVHCAYNSLWMGNFIHPDWDMFQSTHPCAAFHAASRAISGGPIYVSDSVGQHDFALLRRLALPDGTVLRCEGHALPTRDCLFADPLHDGRTVLKIWNVNRFAGVVGAFNCQGGGWSPEARRNKCFSEFSVPLAARASPSDVEWKSGKAGPGVSVKGVSQFAVYAVEARTLQLLRPDEGVDLTLQPFTYELFVVAPVRVISHERAIKFAPIGLANMLNTAGAVQAFEAKKDASGVTAEVFVKGAGELVAYSSATPRLCKVNGDEAEFTYKDGVVTVDVPWSGSSSKLCRVQYVY

SEQ ID NO: 7467 - protein, 275 aa, Zea mays
  VARIANT 34: note = Ancestral polymorphism is P, Derived polymorphism is H
  VARIANT 35: note = Ancestral polymorphism is V, Derived polymorphism is D
  VARIANT 71: note = Ancestral polymorphism is K, Derived polymorphism is E
  VARIANT 192: note = Ancestral polymorphism is A, Derived polymorphism is P
  VARIANT 219: note = Ancestral polymorphism is V, Derived polymorphism is A
  VARIANT 253: note = Ancestral polymorphism is R, Derived polymorphism is W
MAAVASSALHAVGAVASAKPRSVAPGRLMAMEVPVFCRPAMQVKLPAAALINNSLTKSGQLGTALFGAISKYRNISRFISLISQTSTKNIGPCCSFSSSSDGNGYMAGNSSESDEDYVNSTVLEAVEVRSGSEGYVIKMRDGKNLCCVHSNFQGRNIPESAPQPAIVLRIEDGSRTLLLIIVLEMPSVLLMPVIRNVHIARATIYQAVKEMIDKMGYEVKLVRVNKRIQEAYCADLYLTKVNDPTDNTTFDLRPSDAINTAVRCKVFSVYVLATY

SEQ ID NO: 7468 - protein, 409 aa, Zea mays
  VARIANT 330: note = Ancestral polymorphism is G, Derived polymorphism is W
  VARIANT 44: note = Ancestral polymorphism is S, Derived polymorphism is F
MDSKSKWSNKKCKRLVGKYELGSLLGRGTFAKVYLARPVAGGEFVAVKVLDKAEVMGTAGMAPRVLREVTAMRRLRHPNVLRLHEVLATRSRIYLVMELAPGGDLLSKIAALPRRRLPEHAVRRVFGQLVAALSYCHARGVAHRDVKPQNVLLDGNGALKVSDFGLSALPDSLRDDGRLHTACGTPAYAAPEVLRRKAYDGAKADAWSCGVILFVLLAGHLPFDDANITDMCRRAHRREFQFPEWVSQPARSLVNRLLDPNPLGGLLNGQQERALAFLAPAMNAFDIISMSSGLDLSGLFDQRNRQRRFMTIASPERTLEELGRAGGKLGYVVVGKKGVDRLPLGGLPGLAVMTVEMSEVAPPLMLVELRLEVADGDGDGDGEGQGFGWEELKQELGDVVRAWHTCKDF

SEQ ID NO: 7469 - protein, 393 aa, Zea mays
  VARIANT 54..393: note = Derived polymorphism lacks residues 54 to 393
  VARIANT 103..393: note = Derived polymorphism lacks residues 103 to 393
  VARIANT 307: note = Ancestral polymorphism is A, Derived polymorphism is V
MKRKSSATTDLRAFLARAAAKKKDIVAPSSNEREMQLVIFQGQIETSNATPAEQERVEPEPPIIVDAEDNDDFESMHLNGTASSVIDRQLVELNNRFDEVNIELLRCMASFNPSKNFDGFSTEKLVKLAGFYPQDFEFEEKARPCCPPCCSLRPPQTVGFPPCRLLSAMLLSPTSARMRFPRRDGVPDPSSHASRHCVRVRRRGGQPQPLRAVAQGLGGSYTLATVLAVRPGLSPSTSCIDFACYNLSDELKAATRESIPLPSLPPLKSCRPPPAVRSVAFFRAPRRRLSPQPLLSIDETLLTRHGAIVVVGDLSTAGATEAGHAAGALGEEQRLAQCGVPRCLRCRKGDEHGVDALGDGVTAPTPSTLLYGALTPASGMTGIAAPLTPPRCR

SEQ ID NO: 7470 - protein, 325 aa, Zea mays
  VARIANT 78: note = Ancestral polymorphism is A, Derived polymorphism is V
  VARIANT 16: note = Ancestral polymorphism is A, Derived polymorphism is V
MASLHPLIAAALVVAAASTAAAAASWAAPSSPARPLFREYIGAEGKNVTFADVPVHPGVDFHFILSFAIDYAANATNASAPPVPTDGRFAVFWDEANLTPAAVAALKCPSSRARVALSLGGDTVFGANATFRASSVDAWVGNAVASLAAILTRYGLDGVDVDYEHFGERETPEVFAECVGRLVRALRARGVISFASIAPFANPDVQAHYAELWRRYGRDFDYVNFQFYAYPSNTTVPEFLAHYDEQSARYAGAGGGGKVLVSFGTDPASGGLRPGKGFFRACRELRRQGRLHGIFVWAADNSAADGFRDERLAQTFLAGNAPGFP

SEQ ID NO: 7471 - protein, 156 aa, Zea mays
  VARIANT 76: note = Ancestral polymorphism is R, Derived polymorphism is W
  VARIANT 71: note = Ancestral polymorphism is W, Derived polymorphism is L
  VARIANT 56: note = Ancestral polymorphism is V, Derived polymorphism is D
  VARIANT 48: note = Ancestral polymorphism is A, Derived polymorphism is V
  VARIANT 21: note = Ancestral polymorphism is Q, Derived polymorphism is E
  VARIANT 20..156: note = Derived polymorphism lacks residues 20 to 156
  VARIANT 18..156: note = Derived polymorphism lacks residues 18 to 156
  VARIANT 16: note = Ancestral polymorphism is A, Derived polymorphism is T
  VARIANT 10: note = Ancestral polymorphism is T, Derived polymorphism is M
MEVDEQKRHTAELTSALQGQETSELELRLLVETGLSNYKRLFRIKAAAANADVFYDMSGLWKTPAERFFLLIGGFRPSDVLKDAGERTSGAVGPSMDKMEKAPGEAFGRRNPSGPVNQTDSYAQQPHETVSMLLKEIMHSIYRSGKGLWRGHSKYL

SEQ ID NO: 7472 - protein, 169 aa, Zea mays
  VARIANT 74: note = Ancestral polymorphism is A, Derived polymorphism is S
MDLLNPEQISEFREAFAFFDKDGDGCITVEELATVMGSLQGQRPSAEELREMIRDADADGNGAIDFAEFLGLMARKTAGGGAGGGADPDEELREAFKVFDKDQNGYISATELRHVMINLGEKLTDEEVEQMIREADLDGDGQVNYDEFVRMMMLSDGAGAGAAATGHHQ

SEQ ID NO: 7473 - protein, 161 aa, Zea mays
  VARIANT 3: note = Ancestral polymorphism is G, Derived polymorphism is V
  VARIANT 29: note = Ancestral polymorphism is D, Derived polymorphism is Y
  VARIANT 94..161: note = Derived polymorphism lacks residues 94 to 161
  VARIANT 150: note = Ancestral polymorphism is D, Derived polymorphism is E
MQGITARDCGSRGQVFKSKVEEQCSKIEYLRNNMFQGEIFDKYFMSFLPLFVMQTYMKGIVSQSSDNQYWDIWNRQKLSPEFEVKRQNSLRANQDLTNQLVELERHFNNLEMNRSGETGRVASNRRVVYSNKSSSRYLTVRPSCYKFYTDLVIIISLLTNN

SEQ ID NO: 7474 - protein, 119 aa, Zea mays
  VARIANT 33: note = Ancestral polymorphism is T, Derived polymorphism is I
  VARIANT 34: note = Ancestral polymorphism is G, Derived polymorphism is S
  VARIANT 40: note = Ancestral polymorphism is E, Derived polymorphism is K
  VARIANT 43: note = Ancestral polymorphism is G, Derived polymorphism is D
  VARIANT 49: note = Ancestral polymorphism is V, Derived polymorphism is M
  VARIANT 54: note = Ancestral polymorphism is G, Derived polymorphism is R
  VARIANT 55: note = Ancestral polymorphism is R, Derived polymorphism is L
  VARIANT 64: note = Ancestral polymorphism is L, Derived polymorphism is I
  VARIANT 84: note = Ancestral polymorphism is V, Derived polymorphism is M
  VARIANT 104: note = Ancestral polymorphism is C, Derived polymorphism is Y
  VARIANT 111: note = Ancestral polymorphism is R, Derived polymorphism is G
MPTEILRRTWSILHKPKEQISDGTPVIGAGAGTSISAKFKEAGGVDLIVLYNSGRFRMAGRGSLAGLLPFGDANDIVLQMASEVLPVVKGVPVLAGVCATDPFCRMEYFLRKLETIGFM

SEQ ID NO: 7475 - protein, 86 aa, Zea mays
  VARIANT 40: note = Ancestral polymorphism is S, Derived polymorphism is I
MEALQFLVLWLRMLLTLMYKHEQYNAFDVVMLLFYFHPSSDCWLMQIGWLLLFTKVLIMVVCLLSSFSSIYQSSNYGCVPSFNIFM

SEQ ID NO: 7476 - protein, 443 aa, Zea mays
  VARIANT 195: note = Ancestral polymorphism is R, Derived polymorphism is S
MGKASQWLRNLLLSGRKGRKAKDRAEADCQSVLSAPLPSHAQAAATPHGREKRRWSFRRPGAAASSSQGPLASSSSHCFSEAELHVVVVQQEQGQQQAAAAAVPEAASTSGTVVALPASGRRTRRRNARGGGRGGEAAAAAVKIQSAFRSYLARKALCALRGMVMLQAIVRGQLVRRQASLTLRRMQALVYAQRRARAERLRLLDVVEDDASRQQAASATPPRRRSPSPQHPRSWKPLEAVERRLEENVRTVEVDDGAPRAGARRNSCGHCSASTTPSRTPMPKAEPRQKVSPSPSPSALTDGSARTPSGRLDDASFTSTSEPMPSLRAAPPSYMANTESSRAKARSQSAPRQRLSSAPETAPAATAVLSPSCCDRPPSQGGGSARRRASLDPLDLPGGAPSRRMERCASRARATTMSSVPGSECGSSSTVGHRGSAHGPWLG

SEQ ID NO: 7477 - protein, 1829 aa, Zea mays
  VARIANT 6: note = Ancestral polymorphism is S, Derived polymorphism is F
  VARIANT 150..1829: note = Derived polymorphism lacks residues 150 to 1829
MAMPSSTTAALSRLVDRTRVPDPTLQRHAVGAVFRHLLSLPAPLPAAAHDATSALLASPHPAVAAHAAASIARLTATRPDLLPSDVALPLLIAPLAASPSPLLASCLVKAVSALATCALRSGSRFPAHDHPFIQALASGADGARAELMRQAAGMVADRVDWVVKFLRPFVMFSVVRKGDAAFARDLIGALAAAAVAAGKASVAIPVLKMLQDSMLHFGRGDDQEVRLWLSSAECLVDAYVVLLRKLAHGQMPTYDAQASSATLMETLLSQYSFHQKFLGIDSTIFGLSKHLFLVQKDLGLCYIPEISVVLSSLSYSLTGLEFEHEQLAALKLLSFLIDWKYENVLDSKEQTHHVSVELLCVLAVINLTISPSKSVKAVAYHVLSRFSLFVLDLPASHSSEEQDISTSYHISKPALLLPKLLHHLWSKPSSSCFSFMKYIATKASPDSGQSDLEANYWTHQINAYLTALHREKHTLDVRSSKTTSVAISSLISSVASVLVMHPKLGTSAAESLAMLGTSDPRLGMPLFVVILFYSKILCSSGKFSAEISLSLLESLPSLAIHGFVLPLALQWISPMLKRDSNSVLYAMAVRLLCKIWAVTDWAFPNLQVVLDPENFSNFISDREISASIATSIRDVCKQNPDRGVDIILSVSFCIESRDSVVQALGLESLSYLCEADVVDFYTAWKVISKQVLDYYVEPAVAHSLCILLRCGAMDAEAYSVISGNLVRTLWRIGTSKKNNPDPLWDKARGTAFHSLSNYKVSLIQDAIPDFWKLNYEFFTNEHNLAVLKAMEHLQDEIIRYEHINRRRVTTDKRTAVHKFEKLLEVFPRAVFKGMLSHHQLPGAALLTLNFTPKDILNEGKPKDLPRVHSAFEQAFVEIAESMYVSRNIVVALLALQSWKSFVSNWMQAVVALLDTKDSSKLNKAMKAANDIFKILCDQVPVSTPQVVVNIALVIGALALIVPPTAHLVVSSVSDFLLKWLLQYEHEHKQWSAALSLGLIFNCFHPTDKKSRLQVINGFLEVISKTESCLVKGACGLALGYVCHGLLTRAHNAVDSEVEAITQLNERASVEDILHALVTLLIQLCPSSCYSLKKLSIYGISSMGGMEENIHSFSDDPWAVAGLVIGLGNSVVALYRLGAYEAVTEVKDVLISWIPNVDSNSALFDEIDSVSLCMGSCLALPSVVAFCQRVELLNDDLDALFNRYTSLASELLNLNKSGIIFQNLLMAICIGAGSFLSSILNDGVHAMEFNGVKGFLDTLRHIYTHPFPPLVHLGGMFGVVNAFGAGAGDLTGVFSKPMTSQIKHELCAQESSFVSGSLLTSPVGETLSTSMIQEIFLLAKDAKDKHIQDYAAWAISFLRSRWSKNQNQILYEDNGSNRSPDDHDQASSFSEQSLVWNLSLWLSDLKFEKSGDVVPISTVGTVLKCLSKAPRLPTTDWGAIVRRCIKAEAQISHKLTNQEDPKILKEACLYLTLAHAAHISPLLQFLDDLTDILRFQRLDINVQSILLKHLLHLMKLFSDSRLDKLHEDFTEYLYSPTSSYLNYSSEQKSMLRMSFWEGIYTCLVDVSEESGVFSFIEKCIQCLLPLLTLHSDGQPEFMKEWSVAILCLTNAQKKWLDDILQIRSTALVNEGHVDVAKKIILRARLCATGCGSTHELGNIKTAILCTKADGVWWSVLVEITSALNSAENIIKRQWLLDALDIGCVTAHPSTVLCFVGLLCGSCCIYMPLLLVNSINVLSDLPVTLPAFLSTIVSDDFRNSVADRLWLLTTDIYTWAEQLAHGHDQPGHDRIHRSETEIATFLANILLSTCITVEDYLSVDKRLKLANLEAL

SEQ ID NO: 7478 - protein, 86 aa, Zea mays
  VARIANT 32: note = Ancestral polymorphism is V, Derived polymorphism is D
  VARIANT 2: note = Ancestral polymorphism is A, Derived polymorphism is T
MAMLVRGGGGSVRIRLGGGGEDEESVLGLVVVAVVVIIRGEVDAGAALEGGEEGRVSMSKVEALYELFTKINNVVIDDGLINKGCE

SEQ ID NO: 7479 - protein, 426 aa, Zea mays
  VARIANT 55: note = Ancestral polymorphism is T, Derived polymorphism is M
  VARIANT 35: note = Ancestral polymorphism is R, Derived polymorphism is H
MSSSMQSSYLPATTESVAKAQEAKDASESISILYRVLEDPSSSADALRVKELAITNLTNYLTKENRAEDLRNLLTQLRPFFALIPKAKTAKIVRGIIDAVAKVPGTSQLQISLCKEMVEWTRAEKRTFLRQRVEARLAALLLENQEYTEALTLLSGLIKEVRRLDDKLLLVDIDLLESKLHFSLRNLPKAKASLTAARTAANAIYVPPSQQGTIDLQSGILHAEEKDYKTAYSYFFEAFEAFSSLEDPKAIFSLKYMLLCKIMVNQADDVAGIISSKAGLKYLGPDVDAMKAVADAYSKRSLKYFETALRDYKAQLEEDPIVHRHLSSLYDTLLEQNLCRLIEPYSRVEIAHIAEMIELPMNHVEKKLSQMILDKKFAGTLDQGAGCLIIFEDSKTEEIFPATLETITNVGKVVDSLYMRSAKIMA

SEQ ID NO: 7480 - protein, 413 aa, Zea mays
  VARIANT 19..413: note = Derived polymorphism lacks residues 19 to 413
  VARIANT 81..413: note = Derived polymorphism lacks residues 81 to 413
  VARIANT 148: note = Ancestral polymorphism is C, Derived polymorphism is Y
  VARIANT 185..413: note = Derived polymorphism lacks residues 185 to 413
  VARIANT 213..413: note = Derived polymorphism lacks residues 213 to 413
  VARIANT 228: note = Ancestral polymorphism is R, Derived polymorphism is L
  VARIANT 265..413: note = Derived polymorphism lacks residues 265 to 413
  VARIANT 325..413: note = Derived polymorphism lacks residues 325 to 413
  VARIANT 343..413: note = Derived polymorphism lacks residues 343 to 413
  VARIANT 372: note = Ancestral polymorphism is R, Derived polymorphism is G
  VARIANT 375: note = Ancestral polymorphism is S, Derived polymorphism is R
MQNRRWTDIDQRFLHPVASGFAAICSDCALVRSFGGKGESSYFLSMHELTNIWEKHPLFNSKNSTKNNCCCEQGSYLLNPQAPGMVLDMDDYVDPYEEVVAEDDSDNPDKDDSDAESNYKDKSFDLLKSDKHRLRNLDDTFRGPFCPCKKSRGTRARTSSSTLRRHRCLQQALTSRPQMYELGRQPANTKLSSNETVRRVHVRGGNAKWRALRLDTGNCSWGSEALIRKTHILDVVYNASNNELVRTQTLVKSAIVQVDAAPFKQWYLTHYGVDIGRKKKVHVAKKDDTEGQEGEAIVEETKKSNHVQRKIDKRHQYRALDTHIEEKFGSGRLLACISAHPRQCGRADGYILEANYSGISFYWLATSLRIDRRFSVVSALLGKNSYSVTLNPGIDYAFVVSLVVILDEMHYQR

SEQ ID NO: 7481 - protein, 293 aa, Zea mays
  VARIANT 36: note = Ancestral polymorphism is W, Derived polymorphism is C
MMPYGTAAEAEAALGRSMTWAEALWFRYSAGMPDLWLTWHVSLVYLVLYALVPLPVMVIQKLAPGYALRHKLQPGVPEPSPVSTYVEYIRDSRGVTLAALGPFPLIYSIAFKLFGVRTGLPLPSVWETATHLVVYSLVEDYTSYWLHRFLHTRWGYEKIHRVHHEKTAPSGFAAAYATGTELSLYLTTLFLGPAIVPSHVTTHWLLFSIRIMEAFDTHSGYHFPFSLARFIPFYGGAEFHDYHHYAGEKTRSNFSSVFTYCDYIYGTNKGYMYHKRSLAELKTKEAEHSGKED

SEQ ID NO: 7482 - protein, 261 aa, Zea mays
  VARIANT 167: note = Ancestral polymorphism is Q, Derived polymorphism is K
MASPSSTSNNSAFSPVAASAGTTMPGAGAPCAACKFLRRKCLPGCVFAPYFPPEEPQKFANVHKVFGASNVTKLLNELLPHQREDAVSSLAYEAEARVKDPVYGCVGAISVLQRQVHRLQKELDAAHAELLRYACGDVAAGIPTALPVVSAAPRLSTAPMTTTSPGQFAAGMYGSGRRLGVVDGLAAPPLPPSGGGGGCYFMRNHHNNVVISSSPGADVAPVLPYASVANWAVNAISASTTTTSGSESIGLDHKEGGDSSM

SEQ ID NO: 7483 - protein, 432 aa, Zea mays
  VARIANT 262..432: note = Derived polymorphism lacks residues 262 to 432
  VARIANT 128: note = Ancestral polymorphism is R, Derived polymorphism is C
  VARIANT 51: note = Ancestral polymorphism is R, Derived polymorphism is G
MTTPCGTQRRAVTLYNILPIHDLLAEHPSLRFPKVRATATALRACDFLSRRPSIYILEGDPHTDLLYTGLHLLVWGEAANLRFMPDYLCYIYHHMATELHCILEGFIDTTTGRPANPTMHGENAFLVRVVTPIYDIIRAKAESSRDGKAPHATWRNYDDINEYFMHRDVFDRLGWPMDQSCQFFHTLPDRSHVCKTGFVEVRSFWNIYRNFDRLWVMLLLYLQAAAIVACEGAKWSWDDLLSSRGSEYKDTQVRVLTVFITWAALRFLQSLLNIGTQFRHIFRDGQMIVVCMVLKVVVAVACAVAFSVLYKRVWNQRTDNGQWSSAADSRMRSFLYAATAFVILEVLAIVLFIEPWVRNALEKTNWKICYALTWWFQSRSFVGRGLCEGTFDNVKYSIFWVLLLAVKFDFSYFLQIRLLVKPTKEIYKLNGI

SEQ ID NO: 7484 - protein, 355 aa, Zea mays
  VARIANT 258..355: note = Derived polymorphism lacks residues 258 to 355
MASATAAPRPPAPPPPPPPPPAAAAQWLGPRVSFSLDDAGGGGVGGRDAAAAAGGKAGPGAGAGADFEFLLGGCAAACSMLPADELFSGGKLVPLRIPASTDETAAGAEAEVAAQSTLPPPPPKQEQQQQPETPRAAAEPKVPARRWRDLLRLRKQQASPGAAADPRPLRRLLRRGPKPPEPEPSLSLPLLREPGPEEPNVTTKATEKTASSQHQSLLPPKIRLSAPQQQTSAPPPAPPPPPPSAVAADSPRLNAAGKVVFNGLGRSSSSPSSLAGGRRHRSGSAGAMERSYSAHVRVAPVLNVPVCSLRGSRKSAAALGIDRLFAPSSSGAASSSAGAAKKNRAAKKDVGPGAQ

SEQ ID NO: 7485 - protein, 411 aa, Zea mays
  VARIANT 231: note = Ancestral polymorphism is G, Derived polymorphism is V
  VARIANT 17: note = Ancestral polymorphism is C, Derived polymorphism is R
MDRIVGGKFKLGRKIGCGSFGEIYLATHVDTYEIVAVKIESSKTKHPQLFYEAKLYNTLQGGSTHRHATLCSSLPVCKDIDMASLQCKGFGCPGGIANVKWCGVDGEENVLVIDLLGPSLEDLFCYCGRKFTLKTVLMLADQMITRIEFMHSKGYLHRDIKPDNFLMGLGRKANQVYIIDFGLAKRYRDSTTNRHIPYRENKSLTGTARYASCNTHLGIEQSRRDDLVSLGYVLLYFLRGSLPWQGLKAATKAQKYDKICEKKISTPIEVLCKSCPVQFSSYFHYCHSLAFDQRPDYAFVKRLFRDLFISQDYEFDYVFDWTVLKYKQGHKQKQSPGAPIARPIQAHGPKQAGVNGVINHNEAQEHVETSRPTGQAAWSQDKQATNNDRNPDVRHTVNLAQLFRGVFWVFD

SEQ ID NO: 7486 - protein, 551 aa, Zea mays
  VARIANT 175: note = Ancestral polymorphism is P, Derived polymorphism is R
MAAAPASVGCGGAYSCETAERTREWMQALATFLGRHRPLLEAHVVNFFKDRLWELVDAEWMECLRREPVESLLKLPSGCVQEHWPATLREFVLTARSLVIPREQKAPQSLVSDIHVAPVGTVLAQGMNSKKKHEIENLAAVVHAIAKRCGAKTVVDVGSGQGYLAQALSFEYQLRVVAIDASSHHASVTIARAERIKKHYAAKCVEKQLLMVPRAVTCHVLSSDTLAAVTLDACKDDNGEHVRDTKTSTKKITQIQESTQGTPPLILAGLHACGDLSVNMLRVFVSCEQVKALVSIGCCYNLLSEDTYEDTDTCPGFPMSKAAKHSELVLGKSIRDLACQSAERWRNLTMDIALQNFDVHAFRAAFQMVLEKYFPEVSRLSPSIGRQGKALRRQRLRKVVESQMTTKKNDDFSCSTLKEQNKNTNDVHPVIHEVDTGPDDIHQNAHQKFILFKDFTLSGLGRLGCGSVEDTSLLEIWKDVQPFSEYIGPFWCLRAALGPLVETYILLDRLLYLQERSNLVEALLFPLFDPTISPRNMAVIAWKLCANSSEA

SEQ ID NO: 7487 - protein, 309 aa, Zea mays
  VARIANT 181..309: note = Derived polymorphism lacks residues 181 to 309
MFRCLAGWMRRVRRSVERSNRAGKLGRSVWGNRIAWMGFGIGREAGGCLFSPVPKLSVDDGDNRGRAKLIECLADVGLGGICWIANCSIWCTKNWTALGLGLGLGWDCFAFDCVYAYYVLIRCGFGRNFADMQSQIVCHGCRTLLFYPRGAPSVCCAVCHVVTNVPPPAMEMARLICGGCQTLLMYARSATTVRCSCCDTVNLVRPVSSIAHVNCGQCQTVLMYPYGAPSVKCAVCNFITNVGGVTPMIPLPPPALTASSGTSYIIPSISVPTNQPRNVTVVVENPMTVDDKGKLVSNVVVGVTSGGKK

SEQ ID NO: 7488 - protein, 998 aa, Zea mays
  VARIANT 360..998: note = Derived polymorphism lacks residues 360 to 998
  VARIANT 378..998: note = Derived polymorphism lacks residues 378 to 998
  VARIANT 742..998: note = Derived polymorphism lacks residues 742 to 998
  VARIANT 828..998: note = Derived polymorphism lacks residues 828 to 998
MEGDFEGGRFGRDGEFYYRSRRERAPQTRDDAIYGVFAEGDSDYDSEDDEGTRRRRRKRRKDGGGEADLTKPVQFVSTGKFMPTQEPEPEERPGLGRAAAAAADKEEEEEEEDQDDEGDTEMLPAMFGKIRDGARARREEKEREREMAARRRQAAGLGAGEPSAAPGSLESNSKVAKMMRMMGYKKGMGLGKNQQGITAPVESTLRPKNAGLGSVEGFREPKIMSAKENVPAPPPPPASAKKKRWSKKATTKKAPILTKNELLAMRAEQEQEEQPAVVQKVIDMRGPQARVLTDLKGLNEEQEMEANDVPMPELQYNVRMLVDEARADIVRLDAQLRREQEKVASLVREKEKVAKQEASQKRQLLVMERIAETLEKVQDDDASGMLTLDGLIQTFHGLKVQFEEEFKMCSIAWIACRYAHPLLIRVFQGWQPLHDPKFGLEVMKKWKDLLQGDQPYDFSDSAASMTPYVQLVSEVILPAVRISGTNSWEAREPEPMLHFLELWDNKKLLPPVLLQSLLEHVIMPKLSAAVDSWDPRRESIPIHVWVHPWLPMLRERIETLCHSIRYKLSTVLHVWQAHDASAYAVLSPWKDVFDSASWEDLIVRYIIPKLRLALQDFQINPANQKLDQFNWVMLWTSAIPVQLMVHMLEVDFFSKWQQVLYHWLCSPNPDFNEIMNWYKGWKGLFPPELLANERIRMLLTAGLDMMNQAAEGLEVVQPGARENVGYLRATEKRQFDAAQQAYHAVPGAAMADLSFKESIQAYAMEQGLLFMPRVGKFYNGMPVYEFGTGKKPVAGRQQTSARRRQYEARHPARREGHLHTNRVYDNVWTFILTDATFKSAEIQETLSKMGLNAVVAACYVFPLLVFVLTVRFFYVLWHSGQPESRLCATRLRCLIVLGSGEYVLQSCLSNTLWTSFRYGCLKRSRLPAPGDADELSVIEDQIAWIVHIIASIVNYGTLEWLQIEGERPGNSDAACSHEDGNNGNICIGPVNKVLNMLA

SEQ ID NO: 7489 - protein, 592 aa, Zea mays
  VARIANT 486..592: note = Derived polymorphism lacks residues 486 to 592
  VARIANT 108: note = Ancestral polymorphism is S, Derived polymorphism is W
MASGLQCPDKHTSMNVEAVLHMKSGLGESSYAQNSSHQKKSTETLRSLVMDSATLVYEALRPESFTVADLGCASGTNALGVVEAIVRGVGEACRGRGPSSSSPPPEFSVLLNDLASNDFNTVFARAPEVAGRLKADAGAVVFLSGVPGSFYGRLFLCRSVHLVCSFNSLHWLSQVPAGLRDETNKPLNKGKMFISSTSSPAVPAAYLRQFQKDFNLFLRSRGAEVVSGGRMVLSMLCRETEDYTDVKMTLLWDLLSESLAALVSQGLLEQDVVDAYDAPFYAPSAREIEEEVSKEGSFSLDYVRTFEGSLSSGAGAETDGRKVSMAIRAIQESMLTHHFGAAIIDALFHKYTELVTESMHKGEVKSVQIGAVLGLLEQDVVDAYDAPFYAPSAREIEEEVSKEGSFSLDYVRTFEGSLSSGAGAETDGRKVSMAIRAIHESMLTHHFGAAIIDALFHKYTELVTESMHKGEVKSVQIGAVLGLLEQDVVDAYDAPFYAPSAREIEEEVSKEGSFSLDYVRTFEGSMSSGAGVETDGRKVSMAIRAIHESMLTHHFGAAIIDALFHMYTELVTESMHKGEVKSVQIGAVLVRI

SEQ ID NO: 7490 - protein, 599 aa, Zea mays
  VARIANT 144: note = Ancestral polymorphism is T, Derived polymorphism is I
MYAVLRRAAPLRRRAVSALAAALLQQQPAALGAVAPRAPTPLPAAAWFHSSPAWLGFRDTTELAARAEFAAEEGLFYEDDSRAPAGGPAAEGLEIAKLGISSKIVERLASKGITKLFPIQRAVLEPVMQGRDMVGRAKTGTGKTLAFGIPIMDAIIRHNEKYKPGKFPLAIVLAPTRELAKQVEREFLDSSPLETLCVYGGTPIMQQIKQLNYGVDVVIGTPGRVIDLLKRGALSLAEIRFVVLDEADQMLSVGFDKDVETILERVPPQHQTLMFSATMPTWIRKLTQKFLNSPVTVDLVGEDDQKLAEGISLLSVSSENREKPAVLGKLIKEHAKGGKCIVFTQTKRDADRLSHNMSRSFQCEALHGDISQSERERTLAGFRDGRFNILIATDVASRGLDIPNVDLVIHFELPNSSEIFVHRSGRTGRAGKKGTAIVMYNYEQSRAVRVIERDVGCKFTELPKINVEGSDLLGGGFDSFGGGGGGYGGSNYGRSRGGFGGRGGGGGFGRSGGGGFGNSGFGRSSGGFGDSGFGRSGGGGFGDSGFGRSGGGGGFSDSGFGRSGGSGGGFSDSGSGRFGGGFGSSRSGSFGGFGDKDSR

SEQ ID NO: 7491 - protein, 454 aa, Zea mays
  VARIANT 166: note = Ancestral polymorphism is R, Derived polymorphism is W
MASPPPDVDLGKLSYEIFSLLESKFLFGAGSVPGTPGRPGPGEDRDRGRVRVLAIDGCGPGPGDALLAAAALARLEAALRARAGDPDARVADFFDAAAGAGAGGVLAAMLLLRGDDGRARYTAADALAFVASSLGRHGGWGGGVGGGLRSRWAALFRRGERPSPLRRVFGDATLRDTVAPLLVPCYDLATAAPFLFSRADAVESDSFDFRLRDVCAATCAGGGAAAAVRSVDGRTAIAAASGGVAAMGNPTAAAITHVLHNKHEFPLAAGVDDLLVVSIGSGCSAGAAPSAGWRTPIPPRSPSPAEMVRLTAEGVADMVDQAVAMAFGHTCGRNYVRIQASCSGRKALRSLDAKKAAAAADGMLAQRNVEAELFRGRRVSEKSNREKLDAFAAELVKEQQRRARSPGLPTVVIRQARPTATATPRLSSATTASSATVRTASTVPSPASQGSYQH

SEQ ID NO: 7492 - protein, 221 aa, Zea mays
  VARIANT 73..221: note = Derived polymorphism lacks residues 73 to 221
MSPTLQQATEHYFILPDPPSDLKDPASTFSPCAGGESQEGADTTQNMNDTDKNNSEREESDLALEKESATFTSQKQHLEELSDAKETFIGGPEAEAKSNNTKDSDNPIAKVGSSVASDKMRDGCNANAIPCPATSNHTTEHSSIASQEASPASTKDTAIPEQVERPSSEELLADVSLPQGKVEPKKTEPAPAASSNIQQHGCKQAGNGNTGTSFNLIHYFS

SEQ ID NO: 7493 - protein, 558 aa, Zea mays
  VARIANT 284: note = Ancestral polymorphism is G, Derived polymorphism is A
  VARIANT 361: note = Ancestral polymorphism is L, Derived polymorphism is H
  VARIANT 393: note = Ancestral polymorphism is S, Derived polymorphism is R
MLASAVLRAMEECTFTSAAMAVGFLLVVYLYEPYWKVRHVPGPVPLPFVGHLHLLARHGPDVFLVLAKKYGPIFRFHMGRQPLVIVANAELCKEVGIKKFKSMPNRSLPSAIANSPIHLKGLFSTRDSRWSALRNIIVSIYQPSHLAGLIPSMQSHIERAATNLDDGGEAEVAFSKLALSLATDVIGQAAFGADFGLTTKPAAPPPHHGPPRQHGEEDGDGSHSTRSSEFIKMHIHSTTSLKMDLSGSLSTIVGTLLPVLQWPLRQLLLRVPGAADREIQRVNGALCRMMDGIVADRVAARERAPQAQRQKDFLSVVLAARDSDAAARKLLTPDYLSALTYEHLLAGSATTAFTLSSVLYLVAQHPRVEEKLLREVDAFGPPDRVPTAEDLQSRFPYTDQASTTARMHAIYFFLDVLKESMRFFMVSPLVARETSEQVDIAGYVLPKSTWVWMAPGVLAKDPVNFPEPELFRPERFDPAGDEQKRRHPYAFIPFGIGPRICIGQRFSIQEIKLALIHLYRQYVFRHSPSMESPLEFQFGVVLNFKHGVKLQSIKRHKC

SEQ ID NO: 7494 - protein, 547 aa, Zea mays
  VARIANT 16: note = Ancestral polymorphism is S, Derived polymorphism is F
MEDLGLWNQAWMWVLSQKHILAWAHTAACGSRERLAFLVDRHWPAVSRGCATSSRLTLAALRQWRGCMARGVLAVASLGPAAVFVILWSFFVCMTSPACALYALLSLGAAAAVVHYMGYTPGLLIVGLFGILIMWMYGYFWITGMLLVAGGCMCSLKHARYVTPVLTSYAIYCVAVRVGWLGVFLTFNLSFLTNDLLNKLAQGYEGSTEESQFEDMKDSDPVMDEFYRSCEFPSVPDSEPETVSSAKPYCSAPIQDVLHVQKEEPPSKIVKSDSSSSDEIKRIMDGSNHYEVLGVPRNRSIDQKALKKEYHRMVLLVHPDKNMGNPLACESFKKLQSAYEASVLSDFTKKNSYDQQLRKEESQKMTPRSRAVSQQSGVEFLSEESRRIQCTKCGNFHIWICTKRSKTKARFCQGCDQFHQAKDGDGWVETRFSSSIKMEIPRAFVCAESKIFDVSEWATCQGMECKPNTHGPTFMVNMVGADRMPQRSYSSRYPFSLDAEMIPDDEFEMWLQQALASGVFADSPKRRKSWSPFKLPQKGIKSWRRSS

SEQ ID NO: 7495 - protein, 865 aa, Zea mays
  VARIANT 295: note = Ancestral polymorphism is T, Derived polymorphism is M
  VARIANT 220: note = Ancestral polymorphism is A, Derived polymorphism is V
MAAVASRERLSPGAAPQVDAGKYVRYTPEQVEALERVYSECPKPSSLRRQHLIRDCPILRNIEPKQIKVWFQNRRSPLNRVSIVVGRCREKQRKESSRLQTVNRKLSAMNKLLMEENDRLQKQVSRLVFDNGYMKNRLHSPSVATTDTSCESVVTSGQHNQQQNPAVLHPPQRDANNPAGLLAIAEETLAEFMSKATGTAVNWVQMVGMKPGPDSVGIIAVSHNCSGVAARACGLVSLEPTKVAEILKDRASWYRDCRHVDVLHVIPTGNGGTIELIYMQTYALTTLAEPRDFWTLRYTSGLDDGSLVICERSLTQSTGGPSGPNTPNFIRAEVLPSGYLIRPCDGGGSMIYIVDHVNLNACSVPEVLRPLYESPKILAQKMTAAALRHIRQIAHESSGEMPYGAGRQPAVLRTFSQRLSRGFNDAVSGFPDDGWSCLLNTDGAEDITVTINSSPNKLVGSHVSASPLFSAMGGGIMCAKASMLLQNVPPALLVRFLREHRSEWADPGIDAYSVASLRANPYTVPGLRAGGFMGNQVILPLARTLEHEESLEVIRLEGHGFSHEEVLMSRDMFLLQLCSGVDEDAPGACAQLVFAPIDESFADDAPLLPSGFRVIPLDAKTDVPTATTRTLDLASALEVGSGGSGMRASCDGSGTCATRSVLTIAFQFSFENHLRESVAAMAKQYVRGVMASVQRVAMAIAPSRLGSRIELKHPPGSPEALALATWIGRSYRAHTGTEIRWSDTEGADSPLMLFWKHSDAILCCSLKPAFTLKFANSAGFDILETTMVNIQDLPLEAVLDEEGQKALSAQLPAIMQQGLAYLPGGVCRSSMGRQASYEQAVAWKVVGDDGAPQCLALMLANWTFI

SEQ ID NO: 7496 - protein, 289 aa, Zea mays
  VARIANT 169: note = Ancestral polymorphism is G, Derived polymorphism is R
MQVTSDRPHRPPPSLFPSTPALKFETQTIPSSPVATPSATPRRPTPAPSAAARVLPLRPRAALIPPSAVGSALGPSPLDPPLVGDHRAEDQSHQKKQTEPGDQQEAPVTSSDSQPTVGTPSTDYVAPYAPHDMSHAMGQYAYPNIDPYYGSLYAAAYGGHPLMHPTLVGMHPAGLPLPTDAIEEPVYVNAKQYNAILRRRQSRAKAESERKLVKGRKPYLHESRHQHALKRARGAGGRFLNSKSDDKEENSDSSQKEIQNGVAPQKGGQPSTPPSPNGASSAYQAPSRE

SEQ ID NO: 7497 - protein, 435 aa, Zea mays
  VARIANT 360..435: note = Derived polymorphism lacks residues 360 to 435
MSKVRWPRCWRWQWLEQPVEEDLHPLSSSTPHPLRRARTTHHRSSGEEGVHKAACSCRSCGASVQPEQASSLSPPRCSLLSAGRSFAGTQNVSSLQKDEAWKVNVCIHGCNLEQGYLCETMEALNVPLADTPVVTFWEGEIVDAKNYTFFTSKWEASPEDDIRHWSKFPSFMPLLVFGYLPSLVLSIILNFLVMCLYALSPHLFVDVGHLHLLYRSVVVSSMCYHGSSQTKAPSSQTTKAPELALSSTTNLANLLPTGVLLAFNLLALKSPYDGCVYYVVTSCTGLRLLNYLPDASPLPEGVTRRSPPQGTGTRHRIPIVANTVAKYKKRNREIDTNWLDLGGCKRGDACELAHEVFECWLHPSRYRTQPCKDGTGCRHRVCFFAHTPDQLRVPQAQQFSPRGASAASPLAEPSYDGSPLHRQAFESYLTKSHKD

SEQ ID NO: 7498 - protein, 345 aa, Zea mays
  VARIANT 279: note = Ancestral polymorphism is R, Derived polymorphism is W
  VARIANT 276: note = Ancestral polymorphism is A, Derived polymorphism is V
  VARIANT 254: note = Ancestral polymorphism is A, Derived polymorphism is T
  VARIANT 228: note = Ancestral polymorphism is A, Derived polymorphism is V
  VARIANT 7..345: note = Derived polymorphism lacks residues 7 to 345
MALCGRGAGPLSGPMRRTRARRTAQAVGSDDGDKAEEEKAFLVPSAAVFPHGMSAAAAGLSLAVAKKKEFSKSPSNSMASSGGTDGGSSVVLWPEQLHAQNGAPARVEAMEPVIALTACTNSVAAYNHDATNYYLARLGEMVFNISLPREITNGAVAIADDAMALRVLNVVTPIPRFLHFTLNERVLCAFDGHDCVHVIDFDIKQGLQWPSLLQILTMRGSRALRYYVAAFDVVEAAGLADASPARAKAEEMFAREIRNAVAFEAADRFERHETFAGWRWRMQEGRFQNTGIGDREALQGCMIARMFAPGNYSMQALLSYGTNAGAGVLILYCSFSVQCFKLALK

SEQ ID NO: 7499 - protein, 648 aa, Zea mays
  VARIANT 85..648: note = Derived polymorphism lacks residues 85 to 648
  VARIANT 193..648: note = Derived polymorphism lacks residues 193 to 648
MKRARSSEVFIGVGRLRARRGLAPLLAAAAFAYLLFVSVKLTYLGSAGPAPAVGRLATTGAGEPAARARSSGGGAVSGYGRITGEILRRHEAFEERRKRWGQLGNFTELERVAAEAWALGAAAWEEASAFDGDVDYIASRDVAGEGTAKCPGSLALGAGETTAFLPCGLAAGSAVTVVGTARTARPEYVEALERSGTGNGTVLVAQFAVELRGLRATDGEEPPRILHLNPRLRGDWSSRPVLEMNTCFRMQWGRAQRCDSTPSGDDDLVDGLRKCEKWDWQDVVESKETKTSSWFNRFIGRAKKPEMRWPFPFSEGKMFVLTIQAGVEGYHINVGGRHVASFPHRMGFALEDATGLAVTGGIDVHSVYATALPKAHPSFSLQQVLEMSERWKARPVPEEPIHLFIGILSATNHFAERMAIRKTWMQFPAIQSGNAVARFFVALSHRKEINAALKKEAEYFGDIVILPFIDRYELVVLKTVAICQYGVHNVTADYIMKCDDDTFVRLDIVLHQISTYNKTSPLYLGNLNLLHRPLRRGKWAVTYEEWPEAVYPPYANGPGYVISAGIARDVASRHTNHSLRLFKMEDVSMGMWVEDYNASAPVQYVHSWRFCQFGCVDNYFTAHYQSPRQMLCLWEKLSAGRAHCCNYR

SEQ ID NO: 7500 - protein, 178 aa, Zea mays
  VARIANT 18: note = Ancestral polymorphism is G, Derived polymorphism is D
  VARIANT 29..178: note = Derived polymorphism lacks residues 29 to 178
  VARIANT 62: note = Ancestral polymorphism is S, Derived polymorphism is I
  VARIANT 76..178: note = Derived polymorphism lacks residues 76 to 178
  VARIANT 83: note = Ancestral polymorphism is R, Derived polymorphism is C
  VARIANT 92: note = Ancestral polymorphism is S, Derived polymorphism is L
  VARIANT 131..178: note = Derived polymorphism lacks residues 131 to 178
MRAVASTQQPSQDSPRLGSAALASFASHWRRCLTFSFSFSIMQEMQASRDAWQHRAMASDISLRSFNSQVLEWKNWAQASEQRVEELHREISELESKLHTFKAHLRAPAAIPNQKQWSDECKMEYPRAKPQHPWSQESSKEEIKKHVLICRVKRSPNSVLSKRSPFQEIGNISLPQHR

SEQ ID NO: 7501 - protein, 535 aa, Zea mays
  VARIANT 230: note = Ancestral polymorphism is S, Derived polymorphism is L
  VARIANT 254..535: note = Derived polymorphism lacks residues 254 to 535
  VARIANT 290..535: note = Derived polymorphism lacks residues 290 to 535
  VARIANT 315: note = Ancestral polymorphism is A, Derived polymorphism is V
  VARIANT 373: note = Ancestral polymorphism is G, Derived polymorphism is C
  VARIANT 387: note = Ancestral polymorphism is S, Derived polymorphism is F
  VARIANT 391: note = Ancestral polymorphism is R, Derived polymorphism is M
MQIRLSPSMRSITISTSHGLLDLMRLKVAARHFSYRTVFHTVLILAFLLPFVFILTAIMTLEGFNKCSSLDCLGRRLGPRLLGRGNDGSMRLVRDLYVMLDKVNSEEAPLDLKVPETFDEFIWDMKNNDYDLRSFAFKLKATMESMDKELRSSRLSEQLNKHYAAIAIPKGLYCLSLRLTDEYSSNALARKQLPPPELVPCLSDNSYFHFVLASDNILAASVVVRSTIRSSLKPERIVFHVITDKKTYPAMHSWFALNSLSPAIVEVKGVHQFDWLTQENVPVLESIETQRAARDRYHGSRRPITSANDSPRVFAAKLQAGSPTYTNVLNHIRIYMPELFPSLNKVVFLDDDVVVQHDLSPLWDIDLSGKVNGAVETCRGGDSWVMSKRFRNYLNFSHPLIAKNFDPSECAWAYGMNIFDLNAWRKTTIKDKYHHWVKENLKSNFTLWRLGTLPPGLIAFKGHVHPIDPSWHLLGLGYQEKTDISSVEQAAVIHYNGQSKPWLEIGFKHLQPFWTKYVNYSNEFLRNCHIMEPQL

SEQ ID NO: 7502 - protein, 239 aa, Zea mays
  VARIANT 93: note = Ancestral polymorphism is R, Derived polymorphism is G
MGRVHPCCSEEKKVRKGLWSPEEDERLASHIARFGVSCWSSIPELAGLQRCGKSCRLRWMNYLRPDLKRGRFSQQEEDLIIALHKALGNRRNRPNSTENGDDRIKPAPPPVFTPYPFVPPSPRDHVAAAASGASSCDDYSSAAGSFVADPAAAAACAAVHVGYATDRSAAAAESGVTPTPPSMTTSTSACTDDARGSCDDGFLRAMVDDPSFLFGDFYLDSDGGHHGQIMSFWESHAFS

SEQ ID NO: 7503 - protein, 168 aa, Zea mays
  VARIANT 43: note = Ancestral polymorphism is G, Derived polymorphism is E
  VARIANT 23..168: note = Derived polymorphism lacks residues 23 to 168
  VARIANT 13: note = Ancestral polymorphism is R, Derived polymorphism is L
  VARIANT 1: note = Ancestral polymorphism is M, Derived polymorphism is V
MGNPGTSANPVVRHCLSPHLVGQPSVPRALDSLDLASVAAPSGSTPAMESTVNPKAYPLADAQLTMGILDIIQHSTNYKQLKKGANEATNTLNRGISEFVVMAADTEPLEILLHLPLLAEDKVLIFFSRFPLLFCNMVLCDYSLDAIYMSCWLFFSLSSFVILSQMLY

SEQ ID NO: 7504 - protein, 346 aa, Zea mays
  VARIANT 11: note = Ancestral polymorphism is P, Derived polymorphism is L
  VARIANT 33: note = Ancestral polymorphism is H, Derived polymorphism is P
  VARIANT 85..346: note = Derived polymorphism lacks residues 85 to 346
  VARIANT 137: note = Ancestral polymorphism is V, Derived polymorphism is G
  VARIANT 178..346: note = Derived polymorphism lacks residues 178 to 346
  VARIANT 309..346: note = Derived polymorphism lacks residues 309 to 346
MPMEERREMDLVTDAHRVAWLQHGLLVLLQIHPVRLHLDGDAAVHRPTTEDICYYLGCHLTSSKATRNLGRGRGPTPPTCRGRRRCGPVPSPALHGEEGVHRDGYDDDDGAAWRSQQFVDAFTLKKEVAKGVDVMVVRELNGGRLEVTEIFNFSQDDLLTEDMMILDTHGEVFIWIGQYVESKEKQKAFDIGQAYHRWDASAGREDVETLAQCQRMIACGEWPPLAVAYDHVEGSTMEAGGILGASLILWVLVPHMMAVTESSRFHESLKKDDVHIRRLIINQVLPLSASFCRFCAAKWRVTEIFNFSQDDLLTEDMMILDTHGEVFIWIGQYVESKEKQKAFDIG

SEQ ID NO: 7505 - protein, 221 aa, Zea mays
  VARIANT 6: note = Ancestral polymorphism is A, Derived polymorphism is V
  VARIANT 23..221: note = Derived polymorphism lacks residues 23 to 221
  VARIANT 45: note = Ancestral polymorphism is P, Derived polymorphism is S
  VARIANT 77: note = Ancestral polymorphism is T, Derived polymorphism is M
  VARIANT 97: note = Ancestral polymorphism is A, Derived polymorphism is S
  VARIANT 111: note = Ancestral polymorphism is E, Derived polymorphism is G
  VARIANT 150: note = Ancestral polymorphism is R, Derived polymorphism is M
  VARIANT 153: note = Ancestral polymorphism is I, Derived polymorphism is S
  VARIANT 211: note = Ancestral polymorphism is A, Derived polymorphism is T
MVICGAWSLWSGRNARRFGRDRWNPYAAVSYVAKMLEDLVCLKVPGPQASLRCRVKWKAPLEGWVKINLDAAFVAETGKGAGGVVMRNSQGEVLAAATQLYEHIPDALTSEALAARDGVVLAQMLSVEKAILEVDNSVLVALLRSEEGRRSAIAGLWQEIKEKSMNFRSFQVSFVNREGNEVAHLCASKAIELAPVLFWLDCFPSWLMEAASRDCNVTLNQ

SEQ ID NO: 7506 - protein, 478 aa, Zea mays
  VARIANT 423..478: note = Derived polymorphism lacks residues 423 to 478
MGFGMVSLIDGFFRRALTSAGLRPGSAAVDADTTIHFWAHPSLLQAQAQPSSAAPRPVVVLIHGFGPDPTWQWAAQAGPLSRHFDLLVPALLFFGASATRAPARSDAFQAAALAALLAGGGHVPGLGGRTVHLVGANYGGLVAYHLARELEQRGVRVGKVALCDADACWGAEDDRALAGRSGAADVVDLLAPGDTAAVRRRWMMTDERLPPLQTHPQVLPPRPLSGTAYGSIRKHFADNREEKVALVKGITAKEGFELTPLPQEVFIIWGEFDQIYPVEKAHKMGGKLGEKATVKVIPGCRARDTCRSNRTSSSSTASPRLPAAACCCFHLQWQRCRQVARKSLEGRRQKVELIKGMTTAAEGFQLSSFASVFTRVKLTHNFHHKTKQQKIIYLRMKLKQPAVGCPLFQFIVTYLQFTVTYQWKLGEKATWKVIPNSGHLPSPRRRNPSSSTASSSSRAPADATRLQRQLASATGPPL

SEQ ID NO: 7507 - protein, 109 aa, Zea mays
  VARIANT 12: note = Ancestral polymorphism is P, Derived polymorphism is S
  VARIANT 28: note = Ancestral polymorphism is A, Derived polymorphism is T
  VARIANT 52: note = Ancestral polymorphism is D, Derived polymorphism is N
  VARIANT 60: note = Ancestral polymorphism is N, Derived polymorphism is K
  VARIANT 61: note = Ancestral polymorphism is L, Derived polymorphism is F
  VARIANT 62: note = Ancestral polymorphism is P, Derived polymorphism is L
  VARIANT 72: note = Ancestral polymorphism is Y, Derived polymorphism is H
MIMPQHLLQARSGRRQKRDSEEEGLIAAFKSVGDTLSSAIEKVATGDTDVLDDLFDSLINLPGFEQTHISLYLNYLVAHPHIVRAFNKLPFDHKLIWARNFVSEKFPGV

SEQ ID NO: 7508 - protein, 471 aa, Zea mays
  VARIANT 409: note = Ancestral polymorphism is L, Derived polymorphism is S
  VARIANT 393: note = Ancestral polymorphism is G, Derived polymorphism is D
  VARIANT 377: note = Ancestral polymorphism is Y, Derived polymorphism is H
  VARIANT 228: note = Ancestral polymorphism is T, Derived polymorphism is I
  VARIANT 223: note = Ancestral polymorphism is R, Derived polymorphism is I
  VARIANT 115: note = Ancestral polymorphism is D, Derived polymorphism is H
MRAAASAVLWTAVVQVASIAGLFRPRVLADCGGKGGAAAASGLAALAGEDSLAARLSPPALVPKRIYKSNGYLLVTCNGGLNQMRAGICDMVTIARHLNLTLVVPELDKRSFWADPSDFGDIFDVDHFINSLRDELMIVKELPLKLQLRTKKRLYSMPPVSWSNETYYLKRILPLARKHKVIHFDKSDARLANNGLPIQLQMLRCRVNFEALRFTPQIEALGRKLISTLQRRSGQFVVLHLRYEMDMLSFSGCTHGCSGKETEELTKMRYAYPWWKEKEIDSEVKRLQGLCPLTPEEITLVLKALGFTKDTLIYIASGEIYGGERRLAVLKAAYPKLVRKEKILSPDELRPFQNHSTQMAALDYMVSLASDIFIPSYDGNMARVVEGHRRYMDFRKTIVLDRKKLVELLDLFQGGALSWDEFSDAVKEAHRSRTGQPAERKVVPGQPKEEDYFYANPLECLGSNGGLRDVS

SEQ ID NO: 7509 - protein, 99 aa, Zea mays
  VARIANT 44: note = Ancestral polymorphism is N, Derived polymorphism is I
  VARIANT 10: note = Ancestral polymorphism is S, Derived polymorphism is F
  VARIANT 7: note = Ancestral polymorphism is S, Derived polymorphism is T
MFHTKTSTMFSFMLSYLSNVVSSGERTSFGFKKVHYNSGAKAINEKFQTALNGFEQTHISLYFHYLVAHPHIARAFNKLSFDHKLIWARNFVSEKFPGV

SEQ ID NO: 7510 - protein, 306 aa, Zea mays
  VARIANT 166..306: note = Derived polymorphism lacks residues 166 to 306
  VARIANT 125..306: note = Derived polymorphism lacks residues 125 to 306
  VARIANT 49..306: note = Derived polymorphism lacks residues 49 to 306
MPTSRGTRAIWCYTYEKGLVDILKEHADIPMYKAQNGWTTEGWVNITKQFNETFPLAYFTKQQIQNKEKELKGNYKIIQDVLKINGVSWNKSLGMIIAEPKIWHEVIKGNAKVSKFKKKPFLLYEYMSSLYAGSTTDGDLNLTSTEPPNKRAGPLTKRSHSKQSTQNTVVVPDSNGINFAGNGTNPFPQIMGLEMKSAPSNLNQEEQEDASGKKRKQTQTTAKLVELLEFRKNHIEKSMKEKKEKEDDYCVEKCIDVVDSMKDLTDEQKADANELFQSEMNRRIFMKTKNLNVRLIWLKKKISQNQ

SEQ ID NO: 7511 - protein, 92 aa, Zea mays
  VARIANT 89: note = Ancestral polymorphism is V, Derived polymorphism is M
  VARIANT 87..92: note = Derived polymorphism lacks residues 87 to 92
  VARIANT 86: note = Ancestral polymorphism is S, Derived polymorphism is R
MCKGVHQRDVPHLQGCCFVTTLVPCLGAAYQPLILFLNSGSYVGPTSNIKALPSLLALKPLINVRYNLVFGSPDVVAVECKKSHASWIVLDK

SEQ ID NO: 7512 - protein, 417 aa, Zea mays
  VARIANT 363: note = Ancestral polymorphism is R, Derived polymorphism is C
MSSQVSTSHGLHPPGKLGTFESPHAWPLSAPTAQPEAGRGDDQEVRLLSVAWNQDCGCFAAGTSNGFRIFNCDPFKETFRRDLKSGGFGIVEMLFRCNILALVGGGSNVQYPPNKVMIWDDHQSRCIGEFAFRSDVRAVKLAKDYIVIVLERKIFVYNFTDLKLLYQIDTLSNPKGLCCLSHNSNTSVLACPGVHQGHVRVEHFGLKMAKTISAHDSHISCMSLTMDGLLLATASTKGTLIRIFNTMDGTRLQEVRRGLDRAEIYSIAVSPNVQWLAVSSDKGTVHIFSLRVRVAGEDASNEQRTAESPRMDHQSSSSSIDPLIQANTGSNASSSLSFMRGILPKYFSSEWSFAQFHLPEVTRYIVAFGAQNTVMMVGLDGSFYRCSFDQVNGGQMLQKEYFRFLKSDSPPLRSAAI

SEQ ID NO: 7513 - protein, 407 aa, Zea mays
  VARIANT 284: note = Ancestral polymorphism is S, Derived polymorphism is L
  VARIANT 5: note = Ancestral polymorphism is R, Derived polymorphism is C
MVIACPFVIIVREERNYGAPPRDGPGRGRGGRGGKTGPRRDFGDADAHGFEGGMVAAAAVLGTVELLAVKMVRVGRQRGAVGPASLIVEAGNEFGRPRRAYERHSGTGRGYGMKREGAGRGNWGTATDEGLEQLRLSLFSLQYVSFDLLVCVAYRDTVDAVNPEETTAMVEDEKKPEDAPQSEVEKDKEGAENEEEEKEHEDKRKNDALINPEPAYLLELSWDVFLHQNKVVCGMMFAPTMTQEMTLEEYEKVLEEKRKAVLSLKAKERKVEIDKELQAMQQLSVKKDGDEVFIKLGSDKDLKKKESAEREERGKKDLLRALAEVLGKGSYGTTYKAVLEDGTTVVVKRLKEVVAGKREFEQQVELISKVCQHQNTVPLRPYYYSKDEKLLVYDYVPLGSLCVALHD

SEQ ID NO: 7514 - protein, 357 aa, Zea mays
  VARIANT 27: note = Ancestral polymorphism is A, Derived polymorphism is E
  VARIANT 80: note = Ancestral polymorphism is G, Derived polymorphism is C
MSGASGSGDDFGRAVARAAVAQALEAAGFDCAHRSAVDAVVDILLRYITHLGRSAAFHANLAGRALANELDVIQALEEVGADTDGFAGAAATGHCLVSSGVVRDLMAFVDSKDEVPFARPLPRFPVQRVQPQPTASLAVAGRETGMRHVPEWLPVFPDPHTYVSTEVWVEPPATKDRVDKVEQVRQRRKAEKSLLSLQQRLAMAGADGFRPVAAVAQDNAEKGKEIQAAGTKRNPFLEPALPPGEKYVSEVDMPPEKKKPSVLEAFAPAIQARTIKEFDAGAGLDQNQRNIVPKERARVHLKIGFGKKPFAAALNSRALDLREDPSFLKEEAKDDKKRRAGMILRASMENPQELPQL

SEQ ID NO: 7515 - protein, 141 aa, Zea mays
  VARIANT 57..141: note = Derived polymorphism lacks residues 57 to 141
  VARIANT 96: note = Ancestral polymorphism is Y, Derived polymorphism is D
MGDGADEDSSMVATVTCRTCFRGRDRRQVEDMWLVVEKSQFPNITHEFIIAFSFHIWRNNFTESKQGHEELDGASLREHEEFTKVKNITKVELGRYEIDTSYMRVTPCGSKVGKMDIGGGPEVTLIGSLENAKGSQLPYLV

SEQ ID NO: 7516 - protein, 175 aa, Zea mays
  VARIANT 125: note = Ancestral polymorphism is G, Derived polymorphism is S
  VARIANT 91: note = Ancestral polymorphism is G, Derived polymorphism is D
  VARIANT 44: note = Ancestral polymorphism is G, Derived polymorphism is S
  VARIANT 18: note = Ancestral polymorphism is G, Derived polymorphism is E
  VARIANT 16: note = Ancestral polymorphism is D, Derived polymorphism is N
MAVVEGTKKKVIIDTDPGIDDAIAIFLALRSPELEVLGLTTTFGNVHTALATRNALHLLEAVGRTDIPVAEGSHLTIKKATKLRIASFVHGTDGLGNQDFPRPATKPVDQSAAVFLVEQTNLYPGQVTVVTLGPLTNLALAIELDPAFPEKIGTQSIVWIVSYTLLCFSFLLGFN

SEQ ID NO: 7517 - protein, 609 aa, Zea mays
  VARIANT 61..609: note = Derived polymorphism lacks residues 61 to 609
  VARIANT 81: note = Ancestral polymorphism is P, Derived polymorphism is L
  VARIANT 91: note = Ancestral polymorphism is P, Derived polymorphism is L
MDRDEEMGHGDRSLLFVGDEDDDIGTYRDGGFMETSSDEGSFSDPSDGEARGGRRGGDGSKSAWPQSYRQSIDMLSVVPSPTVSMLMAASPNLTRFGSSFLKAGSSFFLRKGDDSVLPLARPLLPPSLPQLSQSSLRPQPPMRQSTDILAQPPRPPAGHEAQLPDRPSSACLRPDYIELPPPASKCSRNQSIINGFNVLCGVGILSTSYGIKEGGWSSLLLLPLLGGSSCYTGLLLKRCIDSSPNIGTYPDIGQAAFGVAGRIFVSVVLYLELYASCVEYITLLGDSMSSVFPSAHLAFAGIDMNAHTLFAITTALAILPTVCLRNLSLLSYLSAGGVMATIAVIVCLFWVGIGEGIGFHFSGALVNVTHLPVALGLYGFCYSGHSVFPNIYSSMKERSQFPFVLLFCFTVVTVAYAGIAVSGFLMFGESTMSQFTLNLPQQYIPSKIAIWMTIVNPYTKYALTMTPVALSIEEALPKKMQNYLVGMSVRTCLVLSTVVVALLFPYFGEQSCRAGDGIAWICLHNACGRFWETLSPKPVHCTFLWPIQLNKLLDDLQALILPCACYLSIKKGAVPLWEIILCIVIIMIGAVCASVGSYTSVSQMISSTR

SEQ ID NO: 7518 - protein, 67 aa, Zea mays
  VARIANT 47: note = Ancestral polymorphism is E, Derived polymorphism is A
  VARIANT 26: note = Ancestral polymorphism is G, Derived polymorphism is S
  VARIANT 25: note = Ancestral polymorphism is K, Derived polymorphism is R
  VARIANT 10: note = Ancestral polymorphism is R, Derived polymorphism is W
MNDKSKKGRRRSTPGSPGCPAAGLKSRGSRAPPGRSVPGRLASLVKEQRARLYIVRRCVTMLLCWRD

SEQ ID NO: 7519 - protein, 329 aa, Zea mays
  VARIANT 293: note = Ancestral polymorphism is M, Derived polymorphism is T
  VARIANT 292: note = Ancestral polymorphism is E, Derived polymorphism is Q
  VARIANT 234: note = Ancestral polymorphism is W, Derived polymorphism is C
  VARIANT 170: note = Ancestral polymorphism is R, Derived polymorphism is W
  VARIANT 112: note = Ancestral polymorphism is P, Derived polymorphism is H
MSLALQALRRSRPLVGFLPHSSPLSTSASPPDAHELLRIDRILTNPAAGGGGSLPSQSQQHPRAATDLHQLLRRAAGLTAAESASLLRRLPGAQPHPRLGRLLQELAGLGLPRGEVKAALASDQEGLLSMDPGEPSRLLDLLRDLRCREAVRDRILAHGALRAAVAARRRVELLHARGLSRHDALRVLAAEPRTMLYSPEDVERKLEFLVETMGFEVGWLVQYPEFLGVNLDRWIIPRHNVVEHLKSVGGLGDPVEMKHYVRLTRRRFYNMFVKPYPECERIFGGLVRERDEMARRRHPTGLWKLFKPAKHERTQEDVQNMKSLVGSLK

SEQ ID NO: 7520 - protein, 140 aa, Zea mays
  VARIANT 64..140: note = Derived polymorphism lacks residues 64 to 140
MAAGYLPLAAAAAAAAVTLLVVATSAIPVAAAKFSGRNRMVIIRAPGARVVSPGGALNNKWQQQRRLVEDDVAPEFGGGGGQLVGGADGNSLGLVNDRPVCLHNGCAQPGQRYTPGHCTYKNGCPHTPTTAERAGPMQHA

SEQ ID NO: 7521 - protein, 182 aa, Zea mays
  VARIANT 20: note = Ancestral polymorphism is A, Derived polymorphism is S
MAGSGGMELPPLRDLSRRAASFLRMARLALTGAATPAQLLAGEEVVVDGGISCNPYYKSISTEDDWGSELWPDQEDESELLVDGDEDGSTTRGGGGGASESVTLVGAGGGGVGGPLDRKPQLRHQSAAPGAHVTSSEPSSSEPLMTRRRATKRVNDTAVAVDHPFGRDRRGGESSSLLLVSS

SEQ ID NO: 7522 - protein, 175 aa, Zea mays
  VARIANT 148: note = Ancestral polymorphism is R, Derived polymorphism is S
  VARIANT 144: note = Ancestral polymorphism is N, Derived polymorphism is I
  VARIANT 140: note = Ancestral polymorphism is P, Derived polymorphism is S
  VARIANT 105: note = Ancestral polymorphism is A, Derived polymorphism is V
  VARIANT 104: note = Ancestral polymorphism is S, Derived polymorphism is N
  VARIANT 102..175: note = Derived polymorphism lacks residues 102 to 175
  VARIANT 96: note = Ancestral polymorphism is T, Derived polymorphism is I
  VARIANT 92: note = Ancestral polymorphism is A, Derived polymorphism is V
  VARIANT 63: note = Ancestral polymorphism is E, Derived polymorphism is K
  VARIANT 59..175: note = Derived polymorphism lacks residues 59 to 175
  VARIANT 50..175: note = Derived polymorphism lacks residues 50 to 175
  VARIANT 49: note = Ancestral polymorphism is R, Derived polymorphism is Q
  VARIANT 48: note = Ancestral polymorphism is Q, Derived polymorphism is L
  VARIANT 40..175: note = Derived polymorphism lacks residues 40 to 175
  VARIANT 38: note = Ancestral polymorphism is I, Derived polymorphism is T
  VARIANT 35: note = Ancestral polymorphism is E, Derived polymorphism is K
  VARIANT 33: note = Ancestral polymorphism is E, Derived polymorphism is K
  VARIANT 24: note = Ancestral polymorphism is G, Derived polymorphism is R
MSNLLYYYGMCNVVNDILLQRYFGKGVRGGSAEPESDIVQACRSFLDQRQCINVWRFIQTINERKDLTENLKQLQCRTLIFVGENSQFHAEAVHMTAKLDRRYSALVEVQACGSVVTEEQPHAMLIPMEYFLMGYGLYRPSQINCSPRSPLNPFCISQSMGVKLKPIKTQANLKA

SEQ ID NO: 7523 - protein, 137 aa, Zea mays
  VARIANT 13: note = Ancestral polymorphism is R, Derived polymorphism is L
  VARIANT 17: note = Ancestral polymorphism is F, Derived polymorphism is I
  VARIANT 21: note = Ancestral polymorphism is G, Derived polymorphism is D
  VARIANT 61..137: note = Derived polymorphism lacks residues 61 to 137
MLCDIQNGFRGLRGLQFIWLGLYSPYPMRKYSIGISIACGCSSVTTEPQACTCRDTKLALQRPFGDMKPKQTREHVAVERKPMASQTYKSRPDARPLAGAKLELAKPKVYDDGLDNNRKLEAAKRYQEAENGSWSLF

SEQ ID NO: 7524 - protein, 164 aa, Zea mays
  VARIANT 23: note = Ancestral polymorphism is R, Derived polymorphism is Q
  VARIANT 109..164: note = Derived polymorphism lacks residues 109 to 164
MVYCMDILGSTIPSAQFSVNGLRMNLSIFLTIYISSITLLMVFHTIFLGLWYLGFVSRMADKKPEMLTIIQNCAVSSIVISIACCVFYSHCGNRTVSSDKTIDRRTASWIVFSLWTKHDDNTLIPRLLRMHKFKQQICSSWFPPVSIHTGKLKSVFEIYYVVYG

SEQ ID NO: 7525 - protein, 672 aa, Zea mays
  VARIANT 146..672: note = Derived polymorphism lacks residues 146 to 672
MAGDRGRGAAERVDAAVGAVGSGGWEFRNAYRRQLLALSRRIRLLGPFAEELREARRGSAEQEEQERALAPLADALEEALDLLQLGRDGSRIFLVLDRDEVMKKFHESIAQLEQALCDFPYDKLDISDEAREQVELVHAQLKRAKERVDMPDDEFYNELCSLYNKSHDPSAELDILGRLSEKLHLTTIADLTQESLALHEMVASGGGNDPGEHIEKMSMLLKKIKDFVQTQNPETGPLVTAKPMGSNGKPRPVNVPDEFRCPISLELMKDPVIVATGQTYERALIEKWLASGHHTCPSTQQRMPNTTLTPNYVLRSLITQWCEANGIDPPKRPTQQPDRPTSSCSSSERASIDALLSKLCSADPEEQRSAAAELRLLAKRNANNRICIAEAGAIPLLLSLLSSSDLQTQEHAVTALLNLSIHEDNKASIILSGAVPGIVHVLKNGSMEARENAAATLFSLSVVDEYKVTIGGTGAIPALVVLLSEGRQRGKKDAAAALFNLCIYQGNKGRAIRAGLVPLVMGLVTNPTGALLDEAMAILSILSSHPEGKAAIGAAEPVPVLVEMIAGGSPRNRENAAAVMLHLSASVRQSAHLARAQECGIMAPLRELALNGTGRGKRKAVQLLERMSRFLVQQQEDAVDPRVQELEEIERQLAAFGPGVTEADVLQQLGAL

SEQ ID NO: 7526 - protein, 180 aa, Zea mays
  VARIANT 1: note = Ancestral polymorphism is M, Derived polymorphism is I
  VARIANT 71: note = Ancestral polymorphism is P, Derived polymorphism is L
  VARIANT 75..180: note = Derived polymorphism lacks residues 75 to 180
MAARPGAPAPGPPSPAAWWSGHGLRRDATPPRPRQLASPGAAPPSPGVPDPVLAVAAWRGPGSPARSRGAPSPRRPRAAPLPALDAWPRAVRPRWLTGAAVRDLAVAARPRPARCGALPAQLARPWRGPIRWPWRLGPARLGVPRPCAAWPRPGAASARAAVVPLRSAARALLGPGVRTL

SEQ ID NO: 7527 - protein, 184 aa, Zea mays
  VARIANT 111: note = Ancestral polymorphism is R, Derived polymorphism is C
MRRPGVDGGLLGGGRGLVSFRFPDSFWAGRVVARTGCSSGHSRCETGSVAPATVVQLVVHAEGQDLASYSVSLVDGFNVPAVVSPQAVGGGQCPALGCAADLNAGCPPSQRVLGAGGGVVACKGPAGYFKERCPLTRTTPTDVEPVPQRCLAPGELKVVFCQSAMVNAAAAAETERIRTVVADN

SEQ ID NO: 7528 - protein, 987 aa, Zea mays
  VARIANT 772..987: note = Derived polymorphism lacks residues 772 to 987
  VARIANT 697: note = Ancestral polymorphism is C, Derived polymorphism is R
MALEDGFTATCLAAGVRADRGWATGGRATCPAWDLDLDAECWTAGGWAAGSSSLGYAWARWPAPALECSDARALECSDARARSQVLGTQDPRVARRLGLMPAAGGWRLGGWGRVNMSLDVTQVLLSAQSADGAIRKHAEESLMQFQEQNLPGFLLSLSSEMASEEKPEESRRLAGLILKNALDAKEQHRKNELFQRWLALDTGAKAHIKGLLLQTLTSSVASARSTASQVIAKVAGIEIPQKQWPELIGSLLANIHQVQPNVKQATLETLGYLCEEVSPDAVEQDQVNKILTAVVQGMNASEANSDVRLAATRALYNALGFAQVNFSNDMERDYIMRVVCEATQSPEVKIRQAAFECLVAISSTYYDKLATDMQDIFNITAKAVRGDEESVALQAIEFWSSICDEEIDILDEYSSEFTADSDVPCYYFIKQALPALVPMLLETLLKQEEDQDLDEGAWNLAMAGGTCLGLVARTVGDDIVPLVMPFVEENITKSEWRQREAATYAFGSILEGPSADKLAPLVNVALGFMLSALMKDPSNHVKDTTAWTLGRIFEFLHGSALETPPIITGENCQQILTVLLHSMKDVPNVAEKACGALYFLAQGYVDAGSASPLSPFFQDIVQNLLMVTHRDDAGESRLRTAAYETLNEVVRCSTEETAPIVMQLVPVIMVELHQTLEAEKLSTDEREKRSELQGLLCGCLQVIIQKLGGMESTKYSFLQYADQMMDLFLKVFACRNATVHEEAMLAIGALAYAAGPNFAKYMTQFYQYLEMGLQNFEEYQVCAITVGVVGDLCRALEDKILPFCDGIMTQLLKDLSSNQLHRSVKPPIFSCFGDIALAIGEDFEKYLIYAMPMLQSAADLSAHTTATDDEMLDYTNQLRNGILEAYSGILQGFKSSPKTQLLMPFAPHIIQFLDALYNGKDMDDTVMKTAIGVLGDLADTLGVHAGPLINQSTSSQAFLEECLASDDPLVKESADWARIAVSRAVSG

SEQ ID NO: 7529 - protein, 382 aa, Zea mays
  VARIANT 151..382: note = Derived polymorphism lacks residues 151 to 382
MAVAFASSRRALHTLHRRLLLHPSPTPAAARRALPTSTRTPIPAHSPTFISSSSSSSSSRFFTTARTDATRLRHGVLPQRLAGGVRSVASGGSKLAPLGQGVKGLGRPMEAARSAAARYRAAVGLQVEAFWRRNYMILVGAGAVVVCVALWRIMFGIASTFVGLSEGMAKYGFLALATALVAFAGMYARARLTINPDKVYRLAMTKLNTSAAILEVMGAPLTGTDVRAYVMSGGGPKLKDFKFKLGSKRCFLIFPIKGSERRGLVSVEFKKKKGQYDMKLLAVDIPMASGPDQRLFVVGDEQEYKVGGGLISELRDPIVKAMAAEKEFDYLDEREDEEDERREREEAEQEEAEALRREEERLRQQAEERRRREEAESLEKAS

SEQ ID NO: 7530 - protein, 193 aa, Zea mays
  VARIANT 49: note = Ancestral polymorphism is L, Derived polymorphism is V
MARCLALVALLVLGLAAAASAADAPFVVAHKKISLSRPKPGVERVAVSLDLYNQGSATAYDVSINDDSWPTEVFELVTGEKSKTLERLDPGATASHTYVLETKTQGRFQGSPAIITYRVPTKTALQEAYSTPIFPLDILAERPPEKKFEWVKACDEIRVTCVCCLFCWTVYLPCREPVEEQLKGKQEETLIYL

SEQ ID NO: 7531 - protein, 144 aa, Zea mays
  VARIANT 45: note = Ancestral polymorphism is A, Derived polymorphism is D
  VARIANT 72: note = Ancestral polymorphism is V, Derived polymorphism is D
  VARIANT 105: note = Ancestral polymorphism is T, Derived polymorphism is I
MGLRRLMRCCCCIAKQHADDGDKIDFGGGNVHVVTSKEDWDQRIAEANKDGKTVVANFSASWCGPCRVIAPVYAEMSQTYPQLMFLTIDVDDLMEFSSSWDIRATPTFFFLKNEQQVDKLVGANKPELEKKVAAVADAAGSKTV

SEQ ID NO: 7532 - protein, 440 aa, Zea mays
  VARIANT 171..440: note = Derived polymorphism lacks residues 171 to 440
MARTLLWLALLCAALAFCTRAAGLRLELTHVDAKQNCSTEERMRRATERTHRRLASMGEASAPVHWAESQYIAEYLIGDPPQQAEAIIDTGSNLIWTQCSTCQPAGCFSQNLSFYDPSRSRTARPVACNDTACALGSETRCARDNKACAVLTAYGAGVIGGVLGTEAFTFQPQSENVSLAFGCIAATRLTPGSLDGASGIIGLGRGNLSLVSQLGDNKFSYCLTPYFSQSTNTSRLFVGASAGLSSGGAPATSVPFLKNPDVDPFSTFYYLPLTGITVGDAKLAVPEAAFDLRQVATGLWAGTLIDSGSPFTSLVDVAYQALRDELVQQLGASIVPPPAGAEGLDLCAAVAHGDVGKLVPPLVLHFGSGGGDVAVPPENYWGPVDDSTACMVVFSSGGPNSTLPMNETTIIGNYMQQDMHLLYDLEKGMLSFQPADCSSM

SEQ ID NO: 7533 - protein, 440 aa, Zea mays
  VARIANT 174: note = Ancestral polymorphism is A, Derived polymorphism is V
MARPLLCLALLCTSLAFTTCAGIRLELTHVDAKEHYTVEERVRRATERTHRRLASMGGVTAPIHWGGQSQYIAEYLIGDPPQRAEAIIDTGSNLIWTQCSRCRPTCFRQNLPYYDPSRSRAARAVGCNDAACALGSETQCLSDNKTCAVVTGYGAGNIAGTLATENLTFQSETVSLVFGCIVVTKLSPGSLNGASGIIGLGRGKLSLPSQLGDTRFSYCLTPYFEDTIEPSHMVVGASAGLINGSASSTPVTTVPFVRSPSDDPFSTFYYLPLTGITAGKVKLAVPSAAFDLRQVAPGMWTGTFIDSGAPLTSLVDVAYQALRAELARQLGAALVQPLAGTTGFDLCVALKDAERLVPPLVLHFGGGSGTGTDLVVPPANYWAPVDSATACMVVFSSVDRKSLPMNETTVIGNYMQQNMHVLYDLAGGVLSFQPADCSSI

SEQ ID NO: 7534 - protein, 194 aa, Zea mays
  VARIANT 20: note = Ancestral polymorphism is L, Derived polymorphism is P
MKSTTRSMAPSTVLVLVVILVAVRVHGQFDPQGFISIDCGVAEAYQDPDPDRGLTYVSDAGFVDAGEGLNAPVRPPYVDKGLAQRYLNVRYFPVVTGAGAGGGGAARTRTRSCYTLRPVAQGSRNLVRATFYYGNYDGLNSRPAFDLHLGVSRWATVNVTSNTGVYIFEAVTVSPADFMQVGRSFSSFHIGLAF

SEQ ID NO: 7535 - protein, 353 aa, Zea mays
  VARIANT 245: note = Ancestral polymorphism is Q, Derived polymorphism is H
  VARIANT 217: note = Ancestral polymorphism is E, Derived polymorphism is A
MSPAAATTTFVAISIAVPNPTAPSRGRVRLPLGGVPAAPRRAVASMAVSAPRSGAATSFLERRESERALHFVKYQGLGNDFIMVDNRDSSVPKVTPEEAAKLCDRNFGIGADGVIFVMPGVNGADYTMRIFNSDGSEPEMCGNGVRCFARFIAEIENLQGTNRFTIHTGAGKIVPEIQSDGQVKVDMGEPILSGLDIPTKLLATKNKAVVQAELAVEGLTWHVTCVSMGNPHCVTFGANELKVLQVDDLKLSEIGPKFEHHEMFPARTNTEFVQVLSRSHLKMRVWERGAGATLACGTGACAVVVAAVLEGRAERKCVVDLPGGPLEIEWREDDNHVYMTGPAEVVFYGSVVH

SEQ ID NO: 7536 - protein, 420 aa, Zea mays
  VARIANT 85..420: note = Derived polymorphism lacks residues 85 to 420
MEPVGSLKLFPGSVARVHGYTLLGEDTCRRGTRLATPSTGAPPPVHASISPEVAAACGSATPACFAAGHHVVPGVGDHRKCRPRGILAITGEGLTSQDLDEELSRASIHWLSSPSGAVAWTSSTKCGNEEASVNWLVSSHDEGGVDLLEDEIFVPRCSSEDAFWRFSPDCTRLLGLPLLSGLLDSGTPSSEMSGATPSSGFLPVQKTPSSGNSISPFSLIVKRASESSARFRTLCAQQGLGSIYWYDSVADPTPISGESWPESVSNYTRSGLTRTGSRPLKMMDPVMECLEMMSLSPRPGDDDYDGTGTLPAPLPQHSFQFPGDPTPLESIDLTSFKRSPRDIELKAKDTSFRKSVMADTRISWQEGLVSRMFDMGDLDCCKWLSDDEDSPVFLHTDKALAVGTNFEPCNGCCLHEGGDQ

SEQ ID NO: 7537 - protein, 224 aa, Zea mays
  VARIANT 73: note = Ancestral polymorphism is G, Derived polymorphism is C
MTLTIPDEVRAKAEVYVGDAAGQEKTRLLLQETGLPSGLLPLRDIIECGYVEETGFVWLRQRRKVDHYFAKAGRHVSYGAEVSAVADKGRLKKITGVKAKEMLLWVTLHEICVDDPPTGKLHCKAIGGLSRSFPVEAFEAEEPAPPGAGGVVPRDAEEEEEVEKEEGEGDKNPEQEAAAEKDGDAPAAAPAPEEAESKAEEKADKEVSSADPAVVHAEALAAKN

SEQ ID NO: 7538 - protein, 161 aa, Zea mays
  VARIANT 113: note = Ancestral polymorphism is G, Derived polymorphism is R
  VARIANT 44: note = Ancestral polymorphism is Q, Derived polymorphism is K
MRYLWMPHLVDATATADDEYHQHQAAAAGNIDGLLAGGDVDHVQHALAAGVAAAMASSSSDSLASEPYSYEDGGLLASLRAGDDMQLVMSGGGWAAAQAQEANDQGLWPSSSGHGLSSSVQAAAGGAGQFEDPELSGWVQGFSDSIITGNLWALEEIWKMQ

SEQ ID NO: 7539 - protein, 175 aa, Zea mays
  VARIANT 82: note = Ancestral polymorphism is R, Derived polymorphism is H
  VARIANT 83: note = Ancestral polymorphism is K, Derived polymorphism is N
  VARIANT 94: note = Ancestral polymorphism is F, Derived polymorphism is S
MPPPSFIPVRPLTAPPGGPLAAPPSGPLATAFASATAHSNRSTSEQSHSPLHPHTNPFSMDFQEISNEAQSRHVEGGNGRKRKQSQIGAAIESFVDFKRSATSKTLEGIEEVSMEKCLDKLDRIDGFTDEDRSYAMEVFESAINREVFMKSKNHNARLLWLKRKISACRALTTIM

SEQ ID NO: 7540 - protein, 629 aa, Zea mays
  VARIANT 364: note = Ancestral polymorphism is E, Derived polymorphism is G
  VARIANT 463: note = Ancestral polymorphism is T, Derived polymorphism is A
MPPPAAPATNRVALYLRRARLIDSLRVRLRSSSPSSPPALPPDDPVVALHAIRAAPTASCALSLFRAIPSQPPPPLPLYQALAARLSSLAALSDLRAHLASFPLPAPPLARLRLLAAAGDRASALEAFGSLPATPRRPAEAHNVVIELHARGGDHDAAVEAFRRMVREGALPNARTYTVVIAHLASAGFVDQALEVFRILPSLRVRRTTRQYNVLAEALASGGRFDQLRWLVREMAAVDGVMPGPQMRAAIAALREAGHVDGTKDFVEELSPNARIGYAVDDVEGEGDGEEEDDDDEDEGEVKDRGNGEKQTLKPWLDPRELARALDGWDSREVAELEGAGLVWTPRLVCKLLRAFKKAETAWEFFCWVACRPGGFAHDRHTVARMMAILARTGHVELVERLLAKVRADGILLPLATVRLVIDFYGLSKKADAAVRVFQEAESICGPISGPNLALLYSSLLRTMTKCRRGPDAMDLLEEMMARGVLPDLQTFSGLMEHLAGAGDLKGVHRLLGLVRQCELQPDGYMYSVLVRAYCKRERAALALRVFDEMRAAGVTPDAPTKALLVKSLWREGKLREAALVEERCNDVVDGLPDVSPGHVWTASAADLKKVLDIYSGCLDQPAAQTSTG

SEQ ID NO: 7541 - protein, 120 aa, Zea mays
  VARIANT 54: note = Ancestral polymorphism is K, Derived polymorphism is E
MAVTAVAASLSVAQGLGKPLCAGRNATSRRAVALAPRRSATRMAVVRASSAHQKQHPAKEWAAAAAVAAALVLPEVAEAAPGISPSLKNFLLSIVSGGVVLVAIVGAVVAVSNFDPVKRR

SEQ ID NO: 7542 - protein, 213 aa, Zea mays
  VARIANT 197: note = Ancestral polymorphism is R, Derived polymorphism is W
  VARIANT 179: note = Ancestral polymorphism is R, Derived polymorphism is P
  VARIANT 145: note = Ancestral polymorphism is V, Derived polymorphism is I
  VARIANT 94: note = Ancestral polymorphism is A, Derived polymorphism is T
MASLPPGPPAWSVTLSLRHRGGLEIRAAAENLLPGWGRGGERMSLLLRLRRCLLLSVTSNCGGRPAATTQPGPPPRGSRVVRFLRSRWARLPRATSIWRRKKQPPARAAVPPDCRDQRSRTLARPVFWATASTPAATTRFVVVVVVAALAVTVSIVTAFRITGGISNRRGGCDSKPIARWARLLELLEHPPLNCNYRCLLGAPKRGLEWIFSK

SEQ ID NO: 7543 - protein, 939 aa, Zea mays
  VARIANT 116..939: note = Derived polymorphism lacks residues 116 to 939
  VARIANT 383..939: note = Derived polymorphism lacks residues 383 to 939
  VARIANT 550..939: note = Derived polymorphism lacks residues 550 to 939
  VARIANT 694..939: note = Derived polymorphism lacks residues 694 to 939
MASLLWKLGTLLSDEHRLLSSVKVDMVSLKAEVEGMHAFLKKMSEVEDPDEQSKCWMQEVRELSYDIEDNIDSFMLTLGSCTESSSKPRGFKGCVARFLNLFAGAKAHHWAAKEIQRLKRQAVEASDRRGRYSHRVGDAVAVPRSSRTSIDPRLPALYAETTRLVGVDGPRNRLIKLLTTEREGTVTELNVFSIVGSGGLGKTTLASEVYRRLEAQFDYRAFVSVSQNPDMKKILRHILCHRGCGGSEEWDEQQLIHAVREFLQDKRYFVVIDDIWSTSAWRIIRCAFPENNCSSRILTTTRIVTVAKYCCSPHLDRVYALQPLDAAHSESLFLSRIFGSEGRCPLHLKEASDKILKRCGGLPLAIVTVASLLATKGITKEEWEKTLKSIGSALEIQDTDVEEMKKILLISYNDLPYHLKTCLLYLGVFPEDYEIKRDRLIRRWVAEGFITAEGGQDMEEIGECYFNDLINRSMIQPVGIQCDGRADACRVHDMVLDLIVSKSAEENFLTLCGDGDHRMARRDKARRLSINYHARDGIVVPENMVVSNVRSLTIFGHAEDMSALSNFLFLRVLDLENRVVLEYNYLRHIGRLRQLRYLRLSSRRIAALPEQIGDLQNLQTLDLRWTRLKRLPRSVVLLRRLTCLLVNSLELPEGIGNMQALQELSEIEINRHTPVSSLLELGKLTNLRILGINWCIIDADHDARKVHADSLVTSLCKLGVLSLRSIQIQSYHTCSLDFLQDSWFPPPRRLQKFDMSIDYHFPRTPKWMVSLEYLSYLDIYLTPVDEESFRTLGDLPSLLFLWISSREARPGEGVAVGSHGFRCLREFYFTCWEVGTGLAFEPGAMPALEKLRIPCNARGACSSHAGVRDLGIGRLSSSLRHLQVEIVCRGARLQEVEAVEEAVRNAASEISDELFLGVSRWDEEEILKDEEHKLEEAEA

SEQ ID NO: 7544 - protein, 135 aa, Zea mays
  VARIANT 70: note = Ancestral polymorphism is E, Derived polymorphism is D
  VARIANT 13: note = Ancestral polymorphism is A, Derived polymorphism is G
MESLIAMVAFSRAPFDGTSPASSLAARNISSSTNVPKAKAGGYGMASSRLALLAAKWPMERLAAMMAFCEAPFDGTWAQLSSGAAACATNARVASAGGDDVASASLRPAIEAGRGCKEATDGGARGHDGRLRGAV

SEQ ID NO: 7545 - protein, 135 aa, Zea mays
  VARIANT 126..135: note = Derived polymorphism lacks residues 126 to 135
  VARIANT 118..135: note = Derived polymorphism lacks residues 118 to 135
  VARIANT 111..135: note = Derived polymorphism lacks residues 111 to 135
  VARIANT 96: note = Ancestral polymorphism is R, Derived polymorphism is W
  VARIANT 95: note = Ancestral polymorphism is G, Derived polymorphism is S
  VARIANT 88..135: note = Derived polymorphism lacks residues 88 to 135
  VARIANT 76: note = Ancestral polymorphism is P, Derived polymorphism is L
  VARIANT 60..135: note = Derived polymorphism lacks residues 60 to 135
  VARIANT 34..135: note = Derived polymorphism lacks residues 34 to 135
  VARIANT 25: note = Ancestral polymorphism is R, Derived polymorphism is Q
MGRGKVEPKKIENPTNRQVTFSKRRMGLFKQAIRRRCTCQPEQGGYLCLMNLAAAIASGQHQQAGEMVGINPRLFLWWDVGASGSGSQSQQLLHGRDAAESSMTTLGLSPQMHRYRLQPRQPNLRQDADVHGGLW

SEQ ID NO: 7546 - protein, 129 aa, Zea mays
  VARIANT 30: note = Ancestral polymorphism is G, Derived polymorphism is E
MDKSPGAASHLRLSSLVNRGIYEALELRDGGSDYLGKGVLKEMAVTITWVKTRQIFISRGNPTVEVDVGLRDGSYARGAVPSGVSTGTSVCSMPPSPFTPRFCFSSAPVPEPLLGFIDLVSLIWACRGI

SEQ ID NO: 7547 - protein, 90 aa, Zea mays
  VARIANT 9..90: note = Derived polymorphism lacks residues 9 to 90
MKSSLRSRQEPRRVSNGVIISAMLLSLCVLSFVKARYCATPLGKAEDQLEEQMNASIRMQPEESSPARTLGGLSSAMLCSYMTASRRPPI

SEQ ID NO: 7548 - protein, 357 aa, Zea mays
  VARIANT 189..357: note = Derived polymorphism lacks residues 189 to 357
  VARIANT 278..357: note = Derived polymorphism lacks residues 278 to 357
MGVAGEKFQLGTVGALSLSVVSSVSIVICNKALMSSLGFNFATTLTSWHLLVTFCSLHVALCMKLFEHKPFDARTVMGFGVLNGISIGLLNLSLGFNSVGFYQMTKLAIIPCTVILETLFFRKKFSRNIKLSLSVLLLGVGVATVTDLQLNVMGSVLSLLAIITTCIAQIMTNTIQKKFKVSSTQLLYQSCPYQALTLFLVGPFLDGFLTNQNVFAFDYTTQVLFFIVLSCLISVSVNFSTFLVIGKTSPVTYQVLGHLKTCLVLTFGYVLLHDPFSWRNILGILIAVIGMVLYSYFCTRETQQKPAEASPQAVQQAKEGESNPLISDSLSAAENGGSATDDEPLKVPMWSSKYSKA

SEQ ID NO: 7549 - protein, 422 aa, Zea mays
  VARIANT 26: note = Ancestral polymorphism is D, Derived polymorphism is N
  VARIANT 356: note = Ancestral polymorphism is R, Derived polymorphism is W
MARKKIREYDSKRLLREHLKRLAGIDLQILSAQVTQSTDFTELANQEPWLSSMKLVVKPDMLFGKRGKSGLVALNLDLAQVRQFVKERLGVEVEMGGCKAPITTFIVEPFVPHDQEYYLSIVSERLGNTISFSECGGIEIEENWDKVKTIFLPTEKQMTPDACAPLIATLPLEVRTKIGGFIRAVFSVFQDLDFSFLEMNPFTLVNGEPYPLDMRGELDDTAAFKNFNKWGNIVFPLPFGRVLSPSESFIHELDEKTSASLKFTVLNPKGRIWTMVAGGGASVIYADTVGDLGYASELGNYAEYSGAPKEEEVLQYARVLLDCATSDPDGRKRALLIGGGIANFTDVASTFSGIIRALREKESKLKAARMNIYVRRGGPNYQTGLAKMRTLGAELGVPIEVYGPEATMTGICKEAIDCIMAA

SEQ ID NO: 7550 - protein, 310 aa, Zea mays
  VARIANT 11: note = Ancestral polymorphism is S, Derived polymorphism is F
  VARIANT 30: note = Ancestral polymorphism is A, Derived polymorphism is V
  VARIANT 34: note = Ancestral polymorphism is D, Derived polymorphism is Y
MEATAVPRALFLFGTSPAPYRMRMNCLRVAIGGDVRRQGAVAVWAKKKRGRGRDSETEERVDTHSFTPKPGEAAGLFPEAVLLRKKMVREDGQVSPEFADADEEKLYDFLNIELESDLNLKRMRHYEVVYLIHEDRVEEVENVVSKVQDFIREKKGRIWRLNNWGLRRLAYKIKKATHANYILMNFEIESRYINDFKTLLDKDERIIRHLVMKRDEAITEDCPPPPVFHTLRAQQYFDDEYEDEGEEEEDEDARSEPKSANYDEDDVEADDEPEIIYVDEADEDNYEDTRRRNTKLKVKKYTSEKVLRQH

SEQ ID NO: 7551 - protein, 595 aa, Zea mays
  VARIANT 99: note = Ancestral polymorphism is R, Derived polymorphism is L
  VARIANT 150: note = Ancestral polymorphism is A, Derived polymorphism is S
  VARIANT 270..595: note = Derived polymorphism lacks residues 270 to 595
MAWKMLPAASELFPAIVRAGTATPPRPQPPAARNSPSPTVHRHAPPAARLGSAGTVLVVDVDGALLLSRSLFPYFMLVALEAGSFLRGLVLLLLYPAIRCCYCCLGGGDLAVRAMAAVAFCGLRARTFRAGRAVLPRWLLEDVAAEALEAARRVGDPARVVWASAMPRVMVEPFLREYLQVPAAAAVAAREMKTAWGFYTGLMEGGGEDCEATMALMTKRTSAGEGAGDVVGFSAARSVAFLSSSPLASTCKVVLLVSRVACFDHQSHARSTAMCLLLLLTTTTISLQEVYVVCPEEKSKWRRLARRDYPTPLVFHDGRLAFLPTPLNTVAMFTWLPLGAALAILRLAVALALPYKVATALLAATGQSWRLRGSLPPPGNSGGSGQLYACNHRTLIDPVYVSIALDRPVRAVSYSLSRVSDLISPIGATVRLARDRARDGAAMARLLARGDSVVVCPEGTTCREPYLLRFSPLFAELGGAGGVVPVALAAEASMFYGTTASGWKAADPFYFLCNPRVCYTVQFLKRVDTADVAGDGKKKKAAASSVDVANRVQRLIADALGYECTMLTRKDKYLMLVGNDGAVAAPRCRQRQVTN

SEQ ID NO: 7552 - protein, 130 aa, Zea mays
  VARIANT 35: note = Ancestral polymorphism is I, Derived polymorphism is V
  VARIANT 39: note = Ancestral polymorphism is T, Derived polymorphism is M
  VARIANT 66: note = Ancestral polymorphism is N, Derived polymorphism is T
  VARIANT 87: note = Ancestral polymorphism is E, Derived polymorphism is D
MVRVSVLNDALKSMYNAEKRGKRQVMIRPSSKVIIKFLTVMQRHGYIGEFEYVDDHRAGKIVVELNGRLNKCGVISPRFDVGVKEIEGWTARLLPSRQFGYIVLTTSAGIMDHEEARRKNVGGKVLGFFY

SEQ ID NO: 7553 - protein, 188 aa, Zea mays
  VARIANT 174..188: note = Derived polymorphism lacks residues 174 to 188
  VARIANT 169: note = Ancestral polymorphism is A, Derived polymorphism is S
  VARIANT 87: note = Ancestral polymorphism is K, Derived polymorphism is M
  VARIANT 74: note = Ancestral polymorphism is E, Derived polymorphism is K
MAAAAASTPQGVAERRGIPAAAFVEDVEAYLRQVGLDVNSALAFLQERLQQYKIVEMKLLAQQRDLQAKIPDIEKCLDIVTTLQAKKDLGEALIADFELSEGIYSRAKIEDTDSVCLWLGANVMLEYSCDEANALLKKNLENAKASLEVLVADLHFLRDQQTITQVTIARVFNWDVHHRRSKQAVKET

SEQ ID NO: 7554 - protein, 67 aa, Zea mays
  VARIANT 2: note = Ancestral polymorphism is A, Derived polymorphism is G
MAATASKTRRAILALFIWAMAILLFMAALHPNALAAADEIYCMCCAAKTECTFDPTCCTDGCCRMRP

SEQ ID NO: 7555 - protein, 294 aa, Zea mays
  VARIANT 182: note = Ancestral polymorphism is S, Derived polymorphism is Y
MDFAGRVSVLLFFLVARTVANDQIFTTSGLPFGRSSREPRYRVEFHPVDSPFHPENGQESVPMASHEGKRYKCFLPVEETKTMKSMLPQNATNIIIESERRIKPKEPDELLEVLKDQCFYRHEGWWSYEFCYYGKIRQVHVEDGKVIQEFVLGEFDDDATAAYHENSTSELADDDHHVKDISKRYHVHLYTNGTVCDLTDIPRETEVRFVCSEPTVLISSVKEISSCKYVVTIQSPMLCKNPLFQQEKRTLPIHCNELPAKAESGAEDGLLPKEAQISIIPDQDELHGFPAYAT

SEQ ID NO: 7556 - protein, 348 aa, Zea mays
  VARIANT 329: note = Ancestral polymorphism is P, Derived polymorphism is L
  VARIANT 221: note = Ancestral polymorphism is R, Derived polymorphism is W
MTKLPLPLLLLQPPAGAASPLRSLLPPARSLTAMSAATSTAPSIGEYPSPVSPPYPATSKDLELRRAMTASARSAAFASADVVFEDEWLAVVDKPAGVYCDALLTSFPCSAVSGKHFLRLAENPATKPNLHLANRLDRDTSGLMVITKCNKVAGKLVKAFTDHKVKKTYLALCIGFPPAWEKIKICSGHGRSKHGAWRVYAMSDVGRSLPGGSVVRDMSTRFEVLGVNGKGQFREPYSLDTDDIEPITVQEKATDQTCGGDANSSVILVRAYPQSGRTHQIRLHCQYLGLPIRGDVKYGGVIEWDGVECEGHALHAESLSFVHPITGLPITLRSPLPPWAKDCISAME

SEQ ID NO: 7557 - protein, 186 aa, Zea mays
  VARIANT 149..186: note = Derived polymorphism lacks residues 149 to 186
  VARIANT 126: note = Ancestral polymorphism is C, Derived polymorphism is Y
  VARIANT 117: note = Ancestral polymorphism is I, Derived polymorphism is N
  VARIANT 113: note = Ancestral polymorphism is T, Derived polymorphism is I
  VARIANT 97: note = Ancestral polymorphism is S, Derived polymorphism is I
MPNRALWIGHAGDNGQSQGPGAEQSTYRADALLLTTLIRVNKVPHVQHAFTWDCGLACVLMVLRTLGIDCCDGIADLERLCRTTRSNCKKTSIEWTSYLGRRSMLELVFKSITAYDIAFLLLSGHCIAIALVDKSKLNLPCMSDYDVQQHNDEPDYMEGLRQAANFRVTTGSADPPIGYHAWLEQK

SEQ ID NO: 7558 - protein, 17 aa, Zea mays
  VARIANT 13: note = Ancestral polymorphism is L, Derived polymorphism is P
  VARIANT 10: note = Ancestral polymorphism is E, Derived polymorphism is D
  VARIANT 9: note = Ancestral polymorphism is G, Derived polymorphism is S
  VARIANT 3: note = Ancestral polymorphism is A, Derived polymorphism is T
  VARIANT 2: note = Ancestral polymorphism is A, Derived polymorphism is V
MAAVKKFYGEKVLIQVS

SEQ ID NO: 7559 - protein, 200 aa, Zea mays
  VARIANT 128..200: note = Derived polymorphism lacks residues 128 to 200
MNLQHKATTMANASSVLRYGLHSSDTTFTYPSSSSTTLGSSLAYTGEVPIAAHLVSFTENARGIPTALYGEPATTGESPPHQSWGRGWGRSGSRPRLRPRPQQVHLAKRGIWSLVHGATSRLDSPMAWRSSSRREARKVASVGSGCEEMASTSACTVGERKECGGVGVWCDRRGEGVGAVRCRSESSGTEERLPTRGVEL

SEQ ID NO: 7560 - protein, 284 aa, Zea mays
  VARIANT 11: note = Ancestral polymorphism is P, Derived polymorphism is L
  VARIANT 111..284: note = Derived polymorphism lacks residues 111 to 284
  VARIANT 112..284: note = Derived polymorphism lacks residues 112 to 284
MVLLALPLIIPACSSCSYVDTDGPDPAYDDPHKPLLISNSHQMESNAMMQKPKENQMQVKGRLETLGEEHSAKKLIRCVDFWLYYTAYFCGATVGLIYNNNLGQIAQSLHQQSQLTMLLVVYSSCSFFGRLLSTLPDLLHRVACCCIGPHANGLFLMWNQQDGSTLVAGTTLIGLSSGFIFAAAVSVTSELFGPNSVGVNHNILITNIPLGSLLYGQIAAMVYDANGQKMTVVDNRTGIVDTMIVCIGVKCYSTTFVVWACITFLGLASSIVLFIRTKPAYAHS

SEQ ID NO: 7561 - protein, 154 aa, Zea mays
  VARIANT 7: note = Ancestral polymorphism is N, Derived polymorphism is K
  VARIANT 10..154: note = Derived polymorphism lacks residues 10 to 154
  VARIANT 25: note = Ancestral polymorphism is R, Derived polymorphism is H
  VARIANT 37..154: note = Derived polymorphism lacks residues 37 to 154
  VARIANT 60: note = Ancestral polymorphism is T, Derived polymorphism is N
  VARIANT 75..154: note = Derived polymorphism lacks residues 75 to 154
MLYLVKNLLQILKNLNIISTGVLYRIILKKKSDHVLQTPIRGWVMAIVMALLSGFAGVYTEVIIKKNPSRNINAQNFWLYIFGMLFNLVAICVQDFDAVMNKGFFHGEVYMSTTIIWIKNISKMLPAQTMMQEELLPSLKMQKSECLLTNLKTP

SEQ ID NO: 7562 - protein, 595 aa, Zea mays
  VARIANT 88..595: note = Derived polymorphism lacks residues 88 to 595
  VARIANT 128..595: note = Derived polymorphism lacks residues 128 to 595
  VARIANT 141..595: note = Derived polymorphism lacks residues 141 to 595
  VARIANT 151..595: note = Derived polymorphism lacks residues 151 to 595
  VARIANT 210..595: note = Derived polymorphism lacks residues 210 to 595
  VARIANT 414: note = Ancestral polymorphism is G, Derived polymorphism is E
MVGLQYDLVGNPLGAVRATFERTAAAAAAQSGGADPVAAFRGKDWGAGDLFRSFLFEQDGLGKVPVLDSSNLGLIKPNTLVRYRGMVQDMLGNEYYIGAFKDGSTWRTNKYTDFSPYSMPHPCDSHLWERHLFHCVPAPGQNSWTLESSPGPDVCRMSNCLAPELREKRKRDGDDDAMDVSENGHGNSSFCKKPKEGDVHVSSSSTEVAGTIPEMNGGDHHIPGSSFSCLVKIYDMPDSQVKLNDVIEFIGVYTFDPELAAPSDNPDDIMLDLIEDVTVQLPPSKVPRLHCLVWRKLSFHDFISRPVVEPSPSLLRGIRQSLLSHLTLVLGNDELAAQCLLLHLLSRLRNRVDVVTVGRLSLNFTGFNRESASIFGNQLYSLIQKLVPYSQAIPLSIEYLNTATLQPRKDNKSGRLVTGVLQLPQGTHLIFDETLLQTGSLTSKGVENTMLLKNLMESQKVDYDFEYYKLEMAADVQLLTLSEGKSNILPSDLVVPFRPSSVPTVNAGAEETESWRWFLTTVRSLPQSTEPETYQMIQDEMVSAMRDDRSLGCSELSRWLTMAQIMASSFGEKSLSLEHWQMVKELERLRKQRMQ

SEQ ID NO: 7563 - protein, 219 aa, Zea mays
  VARIANT 44: note = Ancestral polymorphism is S, Derived polymorphism is N
  VARIANT 40: note = Ancestral polymorphism is G, Derived polymorphism is A
  VARIANT 38: note = Ancestral polymorphism is C, Derived polymorphism is F
  VARIANT 37: note = Ancestral polymorphism is H, Derived polymorphism is Q
  VARIANT 23: note = Ancestral polymorphism is A, Derived polymorphism is T
  VARIANT 14: note = Ancestral polymorphism is A, Derived polymorphism is V
MCSVARLAFVLALAIAASSIEVAESRDFNIFAISSTQCRGRSFSLAAIPHRNSSFSEVLHFWPILSSVFNSAQGSLPDATKGSSGLAATSGKLCQLCEQYSSEALLYLTQNETQTEILSILHHECASLAPLKQQCITLVDYYVPLFFLEVSMVTPEKFCESMHLCKKGMKISLPTREGTCGLCHHVVVEILIMLKDPNMQLEVIDLLTKTCSKAQNYEQ

SEQ ID NO: 7564 - protein, 146 aa, Zea mays
  VARIANT 94: note = Ancestral polymorphism is R, Derived polymorphism is C
  VARIANT 70: note = Ancestral polymorphism is G, Derived polymorphism is S
  VARIANT 46: note = Ancestral polymorphism is P, Derived polymorphism is S
  VARIANT 23: note = Ancestral polymorphism is P, Derived polymorphism is L
  VARIANT 13: note = Ancestral polymorphism is E, Derived polymorphism is K
MDSDSESALDSFELVLDSFELALDSAAEQVALDSFELTLDSFELVPDSAAEEVAPEAKSGELELDPFLCGSCGVVHDNRASWNRVHSAFRPCSRCDVINKDNLIDALLHGAQEWDCKPECDGKASHIVEAELISIIRLLEVFIELI

SEQ ID NO: 7565 - protein, 576 aa, Zea mays
  VARIANT 131: note = Ancestral polymorphism is R, Derived polymorphism is W
MLGHRFPAALGLPRGLLLGRSVTRRSLSAMAGGEAEGPLGGFFDYMERLRNYERSGVPRGAGTDSDDGFDLGRMRRLLRRLGDPHTDFPAVHIAGTKGKGSTAALLSNIMRAQGYNVGSYSSPHLLTIRERISVGNDGGPVPVRLLSDLFDGAKEAIDEAIELENGSLTHFEVFTALSFLLFSQENVDIAIIETEIGSNAIDITDFKEVLKAKGLGGARDATNVIRSTELAASVITTVGREHLVALGGSLQSIAIAKSGIIKQGQPVVIGGPFSAVIEQIIRDRAFLTQSPVISACDPGIKSFTKCIDWDNGKPYQRCYFSINISNDVPLSIEMHDINLQLLGDHQRQNAVTAACTALCLRSLGWEISDASIQAGLRETQLPGRSQFLTAEEASVLGLDGASTVLIDGAHTEESAKALSGVIEAVRPEGPLALVVGMASDKEHLAFAEQLLSGQTPDVVLLTEASIAGGSSRAMPASSLKEVWIAAARHRGIEYVDIGGISGTETLEHIADLLGSPSLSSRRKPMVIGCQDMGPFSWNLIIAASQLLESRGRAPGLICVTGSLHLVGAILQKLGRH

SEQ ID NO: 7566 - protein, 335 aa, Zea mays
  VARIANT 210: note = Ancestral polymorphism is R, Derived polymorphism is C
  VARIANT 174: note = Ancestral polymorphism is T, Derived polymorphism is I
  VARIANT 168: note = Ancestral polymorphism is A, Derived polymorphism is V
  VARIANT 158: note = Ancestral polymorphism is R, Derived polymorphism is W
  VARIANT 139: note = Ancestral polymorphism is G, Derived polymorphism is R
  VARIANT 138: note = Ancestral polymorphism is A, Derived polymorphism is T
  VARIANT 124..335: note = Derived polymorphism lacks residues 124 to 335
  VARIANT 79: note = Ancestral polymorphism is A, Derived polymorphism is T
  VARIANT 73: note = Ancestral polymorphism is V, Derived polymorphism is G
  VARIANT 35: note = Ancestral polymorphism is R, Derived polymorphism is C
  VARIANT 34: note = Ancestral polymorphism is R, Derived polymorphism is C
  VARIANT 29..335: note = Derived polymorphism lacks residues 29 to 335
  VARIANT 26: note = Ancestral polymorphism is P, Derived polymorphism is L
MPLGDDAEAADFVLPDELLATLLRDPYEQLDLARRITALAVSGRVSGLEREAGRLRAEAMGKDRENAELRERVVLLDTALQETNAKLRSPMITMTDLVPSCGPSASSELGPDDIGVMKVLPDQQTFLALLRSVERLSAGRQVHAHVVVSGLHSRVYLRNSLIKMYIDAGDVETTELMFRSALVLDTVSCNIMISRYVNEGCTLMALWFFRDMASRGIVVDQYTAVALLTCCGRLKNKIIGRAFEDAEITHVDDKDIEFMKKKLKDLGKPMKRSNDKLLKIEHELCERITELEMQTIGSQMKIVKNKHAQPFKNTQFELEFGKGICHNSEFFEQNF

SEQ ID NO: 7567 - protein, 320 aa, Zea mays
  VARIANT 41: note = Ancestral polymorphism is V, Derived polymorphism is L
  VARIANT 81..320: note = Derived polymorphism lacks residues 81 to 320
  VARIANT 99: note = Ancestral polymorphism is S, Derived polymorphism is F
  VARIANT 171: note = Ancestral polymorphism is A, Derived polymorphism is V
  VARIANT 173: note = Ancestral polymorphism is G, Derived polymorphism is R
  VARIANT 186: note = Ancestral polymorphism is A, Derived polymorphism is T
  VARIANT 194..320: note = Derived polymorphism lacks residues 194 to 320
  VARIANT 282: note = Ancestral polymorphism is M, Derived polymorphism is T
MGEKLLKTFQDVTVSLEQALAGILFDELNISNEVREQVDLVHTQFKRAKQRSDSCDDDLFNDLMSLYNSSSSASVDVDILRWLYEKLQLVTIYDLNHESLTLHEMASGGDPSGIVEKMSTLLKEIKDFVQAEDPEMGGKSFPKGNSACPVIPDDFRCPISLDLMKDPVIVATGQTYERGKRDAATALFNLCIYQGNKGKTVRAGYYQNYSWRLKVGCCQKWISKEQGKCCCCYGASMKWGEQQQQHLAEAQEQGIVSLLEELADESGTERGKRKAVQLLERMNRFLKQQSQAQAKAMAQAHAQAQAQDHAQAHARAQAQA

SEQ ID NO: 7568 - protein, 233 aa, Zea mays
  VARIANT 219..233: note = Derived polymorphism lacks residues 219 to 233
  VARIANT 205..233: note = Derived polymorphism lacks residues 205 to 233
  VARIANT 156: note = Ancestral polymorphism is T, Derived polymorphism is M
  VARIANT 62: note = Ancestral polymorphism is P, Derived polymorphism is Q
  VARIANT 60: note = Ancestral polymorphism is C, Derived polymorphism is Y
  VARIANT 52: note = Ancestral polymorphism is G, Derived polymorphism is C
  VARIANT 46: note = Ancestral polymorphism is S, Derived polymorphism is N
  VARIANT 41..233: note = Derived polymorphism lacks residues 41 to 233
  VARIANT 32: note = Ancestral polymorphism is L, Derived polymorphism is I
  VARIANT 23: note = Ancestral polymorphism is S, Derived polymorphism is A
  VARIANT 19: note = Ancestral polymorphism is Y, Derived polymorphism is D
  VARIANT 4..233: note = Derived polymorphism lacks residues 4 to 233
MRFQGLNVTNYASLVMMGDYGKSIKDLALARIPTVSLESLQIEECSKVTLTGIIAFFLNCSPKFKSLSLSKCIEIKDICSASAQLPVCKSLRSLAIKDCSGFTDTSLPMVGMFCPQLENINLSGLSAITDNGFLPLMKSSDSGLVDIDLNSCENLTVTNAAVSALVKAHDASLATSVSRDAARSLMQACSPSVRAAASSSSSAFRTAWSVTTTSRSWKRRSSSGCVSSCCVAV

SEQ ID NO: 7569 - protein, 401 aa, Zea mays
  VARIANT 266: note = Ancestral polymorphism is R, Derived polymorphism is G
MGGEFRSSLMQQMVWSSSGGGTDSKNMMSSSLMPCAEEQEEEGSNKMPPLSSPSMLLLPQHHLQIFSGLPLPLPPEVLNDSSATSDLHDGRESSMPESWSQLLLGGLVGDHERYNAATALLSKGLEERPAAYNCYDPGHGGGEEIQTSGTNIRSHQVSQALLASSSPRSCITTSLGSNMLDFSNTTVPPAPDLKNHHSDNSSEGNSAGSGSAPKKARVQTSSSAQSTLKVRKERLGDRITALHQIVSPFGKTDTASVLQETIGYIRFLLSQIEALSFPYLGHDNGDSMQQHNTNNVRYVCVRIKVHAQARHVRIKLLLNHSTSDAMVQVQGPPMTNQEGEVYGNGIEEGSRKDLRSRGLCLVPVSCTSHLADDNGPSDFWAVSAAPSPPPPPPPFAGIIWR

SEQ ID NO: 7570 - protein, 53 aa, Zea mays
  VARIANT 34..53: note = Derived polymorphism lacks residues 34 to 53
MGAFHSWNMYSSEKAGQRTSIGVGVGRAVAMHSQSSNIVQCSSNPYTLEGTDG

SEQ ID NO: 7571 - protein, 189 aa, Zea mays
  VARIANT 34: note = Ancestral polymorphism is V, Derived polymorphism is M
MRSYMGQQEDGMSDGLYTYKHHRERGADIHTIFVKKSKFRILLSFIGTTFLLVSVCCALLSKDGLCLCSLWSISFASVIAKCLRCDPVKKESLVIMPTFGIQLEQHFWSGRVHRKFVPIGKILRPVLNEHVTPVSCYWSLALLVREEYELMLVFKSLNPPVKMLVPIWKALCAFVDSNTLGNSALPQST

SEQ ID NO: 7572 - protein, 112 aa, Zea mays
  VARIANT 104: note = Ancestral polymorphism is S, Derived polymorphism is N
  VARIANT 94: note = Ancestral polymorphism is G, Derived polymorphism is E
  VARIANT 72: note = Ancestral polymorphism is T, Derived polymorphism is A
  VARIANT 63: note = Ancestral polymorphism is R, Derived polymorphism is W
  VARIANT 55..112: note = Derived polymorphism lacks residues 55 to 112
  VARIANT 54: note = Ancestral polymorphism is A, Derived polymorphism is E
MPYGKEAKEELVRLVQGKSLNISIYDSDWYGRLVGDVDCDRAFVQEHMLMKGLAWHYTTYDRRMEFSKVISALVPLYSIEWSAPFQLADKKTMGMEEEKAHWDSMMQMWIFI

SEQ ID NO: 7573 - protein, 533 aa, Zea mays
  VARIANT 346..533: note = Derived polymorphism lacks residues 346 to 533
  VARIANT 117..533: note = Derived polymorphism lacks residues 117 to 533
MEGGGWAVGGHALGAAQEPRGQQQHREEEKAAGAAAERKGAGAGGGGGMKFRVRARAPHGVGALLLIGGAAVVGAAVLAWRRSRHGNKGGSVDQPDRRLPAKVEGLDGGIVEDGKVQGGSLVQKLSQSNEILSVGNTDIGSGRLDGNASEESHQIHKDGEITADQSESKHDGKIDENSGINPAEVQMHDQESKHEEKNDENSGSNPVEVHKHDLDKEHVEEVDQKSSSNHVEISAHDMCEDNEHVEKIDHVERIDQNSSRDPVKAIMQEMIKVCLVSGSVEKVEEEDSSKKDLEKEIAPKDNKDMEASDGSKLGVNGPGIILSKHNDECGGGAQEAESMENTPTAQLMMHQDQLLDDMVTDTVTETGGAVADTEEDDTVAETEDVVTDTEDTVTDTEDALAETEAEKGERAIADKGELEQDEKKDLVALPELASSPALSSLVKPTVVKKELDFPRPNETGMKTEQDYTNGELREHNDLVSKVQGEGGVATTMESRSSALMIILALIFALATGITIVVRLYSPSRATKLQMDLP

SEQ ID NO: 7574 - protein, 74 aa, Zea mays
  VARIANT 54: note = Ancestral polymorphism is N, Derived polymorphism is I
MLSSDHSPSTPDLKLMEEGDFLRAWGGISSLQNISAYLGKQLSGKVLSTFVRGNLVFAEDKHANAACGVPILAK

SEQ ID NO: 7575 - protein, 176 aa, Zea mays
  VARIANT 61: note = Ancestral polymorphism is A, Derived polymorphism is V
  VARIANT 103: note = Ancestral polymorphism is T, Derived polymorphism is I
  VARIANT 124: note = Ancestral polymorphism is I, Derived polymorphism is T
MDMAEEEAAAGAGGSSSSSGKPVMVVGIDDSDHSYYALNWTLQHFFVAGQPQQYQLVVLTAKPPASSVIGIAGVGSAELLPKVETDLKRSVARVMDKAKKLCTETEVVTDVGYEAIEGDARSVICDAVERHHAEILVVGCHAYSKWKRAVLGSVSDYCAHHAHCTVMIVKRPKHKH

SEQ ID NO: 7576 - protein, 172 aa, Zea mays
  VARIANT 14: note = Ancestral polymorphism is D, Derived polymorphism is G
  VARIANT 27: note = Ancestral polymorphism is C, Derived polymorphism is Y
  VARIANT 32: note = Ancestral polymorphism is R, Derived polymorphism is H
  VARIANT 136: note = Ancestral polymorphism is G, Derived polymorphism is S
  VARIANT 156..172: note = Derived polymorphism lacks residues 156 to 172
MAEYLASIFGTEKDRVNCPFYFKIGVCRHGDRCSRLHNRPTISPTLVLANMYQRPDMITPGVDAQGQPIDPEKMQEHFEDFYEDIYEELGKFGEIENLNVCDNLADHMIGNVYVQFREEEQAAVAYNALQGRFYSGRPIIVEYSPVTDFREATCRQFEENSCNRGGSVISCM

SEQ ID NO: 7577 - protein, 53 aa, Zea mays
  VARIANT 44: note = Ancestral polymorphism is R, Derived polymorphism is G
  VARIANT 1: note = Ancestral polymorphism is T, Derived polymorphism is M
MVVPRRPRVQLHRPPTLVRPAAARRPSCSTDSASPMALRCRGTRPSSPSTSMS

SEQ ID NO: 7578 - protein, 84 aa, Zea mays
  VARIANT 1: note = Ancestral polymorphism is M, Derived polymorphism is I
  VARIANT 33: note = Ancestral polymorphism is Q, Derived polymorphism is L
  VARIANT 39: note = Ancestral polymorphism is P, Derived polymorphism is T
MESGSKKVAACVLALLLLQLMVAPTTATARLLQQADTSPVFGLDIIAREFGHPDGAVPCFESCVFVPCISSVVGCRCENNVCVK

SEQ ID NO: 7579 - protein, 319 aa, Zea mays
  VARIANT 130: note = Ancestral polymorphism is S, Derived polymorphism is L
  VARIANT 81: note = Ancestral polymorphism is T, Derived polymorphism is I
  VARIANT 32: note = Ancestral polymorphism is L, Derived polymorphism is P
MADRIVGQGSFGIVFVAKCLETGETVAIKKVLQDKRYKNRELQTIRLLDHPNVVALKHCFFSTTEKDELYLNLVLDYVPKIVHRVVKHHNKMHQHMPLIYVKLYMYQICRALAYIHDEIVWYLEIDFQTSVQVNPHTHQLKLCDFGSAKVLVKGEPNISYICSRYYRAPELIFGATEYTTAIDIWSAGCVLAELMLGQVLGTPTREEIKCMNPNCTEFKFPQIKAHPWHKVFNKRMPPEAVDLVSRLLQYSPNLRCTAVEALVHPFFDELRDPNTRLPNGRFLPPLFNFKPHELKGVPADIVARLVPEHAKKQCSYVGS

SEQ ID NO: 7580 - protein, 424 aa, Zea mays
  VARIANT 118: note = Ancestral polymorphism is R, Derived polymorphism is G
  VARIANT 259: note = Ancestral polymorphism is R, Derived polymorphism is W
  VARIANT 393: note = Ancestral polymorphism is T, Derived polymorphism is I
  VARIANT 403: note = Ancestral polymorphism is R, Derived polymorphism is W
MAAKESSRTMKAARSAGRIGVVASVAMNLAWLAMYIRQRYGEITTVEASRGKPPVTQDSVVILDHGDPVMYEEFWRREGDSASILIPAWQTMSYFSNLGGICCFLEPGLEREVRRLHRLVGNAVVDGYHVIVGTGSTQLFQAVLYAISPASDGTPIDVVSPAPYYSCYPVAASFLNSGLYRWGGDANTFAGDDTSCVEVVCSPNNPDGGIRHAVVKSKSSKAIYDFAYYWPQYTPITEAAAHDVMLFTFSKCSGHAGTRLGWALVKDTEVAKKMTKFMELTTIGVSKDSQLRAAKILGAICNGYEQLPSAGQTRSHLFHFARDKMAARWTRLRAAVAASDIFTLPDELSEYCGFFKKTITANPAFAWLRCKKDGIEDLESFLRENKIVTRGGTKFGVDGRVVRVSMVDTDQAFNVFLDRLSTMK

SEQ ID NO: 7581 - protein, 374 aa, Zea mays
  VARIANT 342..374: note = Derived polymorphism lacks residues 342 to 374
  VARIANT 264..374: note = Derived polymorphism lacks residues 264 to 374
  VARIANT 223: note = Ancestral polymorphism is W, Derived polymorphism is S
  VARIANT 211: note = Ancestral polymorphism is A, Derived polymorphism is P
  VARIANT 205: note = Ancestral polymorphism is N, Derived polymorphism is I
  VARIANT 157..374: note = Derived polymorphism lacks residues 157 to 374
  VARIANT 156: note = Ancestral polymorphism is P, Derived polymorphism is L
  VARIANT 50: note = Ancestral polymorphism is I, Derived polymorphism is L
  VARIANT 43: note = Ancestral polymorphism is C, Derived polymorphism is S
  VARIANT 41..374: note = Derived polymorphism lacks residues 41 to 374
  VARIANT 12..374: note = Derived polymorphism lacks residues 12 to 374
MARLPLSTRTRKRNLTFRNVTSAIMLMYYYILALLVLSHKWKCWKIERRIKVKELRSQRMYHLICESDVKCINDLRMDRRTFHILCDMLRDVGGLRGTRNTPLEEIVAAFLHTLAHHVKNRTIEGFFLRSGETVSRNFNACLLAVLKLHQLLLKKPEPIPEGCTDFRWNHFKSCLGALDGTHVKVTVPTKLKGRYRSRKGEIVTNVLGVCAPDMQFIYVLPGWEGSAHDGRVLRDAISRPNGLRVPQGCYYLVDAGYTNANGFLAPYRGQRYHLGGFTTQNPPHSAEEYFNLCHARARNIVERAFGRLKGRWAILRDPFENDEEPAMDASFEVMDGEISEPEFITGVSTSNEWTDFRNNLAQGMYNRYRARSNN

SEQ ID NO: 7582 - protein, 52 aa, Zea mays
  VARIANT 16: note = Ancestral polymorphism is F, Derived polymorphism is L
MINSRTIGGIHRPKAFKVKKKIEKLSSTLHELDNRPQNKHVYFAEDRLLNCY

SEQ ID NO: 7583 - protein, 526 aa, Zea mays
  VARIANT 200..526: note = Derived polymorphism lacks residues 200 to 526
  VARIANT 161..526: note = Derived polymorphism lacks residues 161 to 526
  VARIANT 117..526: note = Derived polymorphism lacks residues 117 to 526
MSKAPDDHLQATEQEGSVHPSQQAGQQHVNAAYQFSKTELTEGSKNEQPVQVEQLSSHLQQAYPEIQLQQAETDSFQLAEKETGYFGQQSFAGAKVDVAQPSVVQQNVKQTVGQQASSGTQDTRKGPSIPFNMLIPILQAHLDRDKDMQLQTVWAKLRRNEVNKDDFLRVTVNIVGDQMLKQAAHKVFVQMQAQMQRNSQANSSQQSLFSQLSAQQMASSGSAQLHDQKIRPPGPPNQGQKNQVSSSPQAFAPPSGTQPQNSVHYLAHDNPNQNPDAKGTNVVPNQPSRMNTSVPLQTKDKQHQPTQLQQASQQIYGANNPGAQAYPRSITGSLRSPSPVPETQPSMHAPGMAPAKMVPPPTHPMMQHNATAWKMHQNRELKTNAPPPNANMKQNSESVGKVRMAGTGNSSAKGKQGTPNSTPNASGGTKSSKKSGGQKKSLEAAGSMQPSSKKQKKSGAPQEQSIDELNDVTAASGVNIREEEEQLLSAPKEESFASQEARRIAQEEENIFLRKGPLLRKLAEIG

SEQ ID NO: 7584 - protein, 103 aa, Zea mays; identical to SEQ ID NO: 2445
  VARIANT 91: note = Ancestral polymorphism is L, Derived polymorphism is F
  VARIANT 90: note = Ancestral polymorphism is A, Derived polymorphism is S
  VARIANT 70: note = Ancestral polymorphism is A, Derived polymorphism is T
  VARIANT 61: note = Ancestral polymorphism is I, Derived polymorphism is M
  VARIANT 46: note = Ancestral polymorphism is R, Derived polymorphism is H
  VARIANT 24: note = Ancestral polymorphism is R, Derived polymorphism is H
  VARIANT 17: note = Ancestral polymorphism is K, Derived polymorphism is N
  VARIANT 5: note = Ancestral polymorphism is G, Derived polymorphism is D
  VARIANT 1: note = Ancestral polymorphism is M, Derived polymorphism is V

SEQ ID NO: 7585 - protein, 209 aa, Zea mays
  VARIANT 66: note = Ancestral polymorphism is C, Derived polymorphism is G
MANCFGDIVDNYKLDTMPRYVGKTKTREDRAREASYLNNENEKSKKAKDYVNMLKDWYGNGASTLCVIYNQTGGTLRYIDDKDWLGYPGPTPYPTEIGNGQWASFLHVHKTGAASGSMAAVVYRGKDGGGSERDFAMAWSTPWGASKNRAYCEIGSVGSFQSQWDKLYTNLNKAGYTTNASSTHSSISAATAKGSSPDFKAYVKIPYSA

SEQ ID NO: 7586 - protein, 228 aa, Zea mays
  VARIANT 100: note = Ancestral polymorphism is G, Derived polymorphism is E
MAGGGTQHLLQVAAVLAAAVVLMATASEGFISKKTWSAIRRADRDGPFVGLVVPNAYEMVPVLNSPDFKPSSNIPILDVQGRRFRFGTIGSQNVVMVMTGLSMLNAGLTTQLLLSLFRVKGIVHWGIAGNANEDLQIGDVTIPESWAHLSLWNWQRHGDGPENELPLENAGDYTREYGFLNFSDYTVGQDAGNPELAANTLNSVWYQPEEIFPISGTPEERQHAFWCP

SEQ ID NO: 7587 - protein, 171 aa, Zea mays
  VARIANT 40..171: note = Derived polymorphism lacks residues 40 to 171
MPSNGGSLVNMWGRASAKPMPPSTTNSTAVASVAATADAQICAKEEADGNSSDDEHGIKYKRGSTNANNRKRRVVFDYSDDEEDDNIVSIASPELPKQHTPDLVVGTADDTEVNQKSLENEYNLPNNGKGSTTLVDSDFTSECKIKTIDPMNDFGITLKEKSSDPPINDKK

SEQ ID NO: 7588 - protein, 81 aa, Zea mays
  VARIANT 6: note = Ancestral polymorphism is M, Derived polymorphism is I
MRIVYMAAVMFLVLATMSSTSPSFCQAGGCIGCPRAPPPPSDETCYEDLKCSASRCHLGCIHRGYKGTGSYCRGRDCCCKH

SEQ ID NO: 7589 - protein, 114 aa, Zea mays
  VARIANT 99: note = Ancestral polymorphism is R, Derived polymorphism is H
  VARIANT 72: note = Ancestral polymorphism is F, Derived polymorphism is I
  VARIANT 64: note = Ancestral polymorphism is E, Derived polymorphism is K
  VARIANT 36: note = Ancestral polymorphism is A, Derived polymorphism is E
  VARIANT 25: note = Ancestral polymorphism is V, Derived polymorphism is D
  VARIANT 21: note = Ancestral polymorphism is G, Derived polymorphism is R
  VARIANT 17: note = Ancestral polymorphism is P, Derived polymorphism is L
  VARIANT 7: note = Ancestral polymorphism is R, Derived polymorphism is C
MIVQYGRILDIDLKIPLRPPGYAFDEFEDPHDADDAIYGRDGYSFDGYRLRVCISCFHLMVLLEERIEALKFHLLNHAVMVTSLPSSASWQDLKDHMRRAGDVCFSDVYHEVGG

SEQ ID NO: 7590 - protein, 150 aa, Zea mays
  VARIANT 78: note = Ancestral polymorphism is E, Derived polymorphism is V
  VARIANT 77: note = Ancestral polymorphism is E, Derived polymorphism is Q
  VARIANT 75: note = Ancestral polymorphism is E, Derived polymorphism is Q
  VARIANT 70: note = Ancestral polymorphism is A, Derived polymorphism is T
  VARIANT 41: note = Ancestral polymorphism is A, Derived polymorphism is T
  VARIANT 30: note = Ancestral polymorphism is C, Derived polymorphism is F
MAAPGELRRVFASFDQDGDGRVSAAELRLCMEAAIGEDVSTEDVRVAMASVDADGDGMLDEEEFLQLVEASQQQQQQEEEGGRCRWLREAFGMYEMADCRGCITPLSLKLMLAKLGEHRDIAECQAMICRFDLDGDGVLSFDEFKTMMMG

SEQ ID NO: 7591 - protein, 394 aa, Zea mays
  VARIANT 81: note = Ancestral polymorphism is I, Derived polymorphism is K
MSSSPSPAATRLDLDGNPIAPLTICMIGAGGFIGSHLCEKLMAETHHTVLAVDVYCDKIRHLVDPAPPHLAGRISFHRLNIKNDSRLEGLIKMADLTINLAAICTPADYNTRPLDTIYSNFIDALPVVKYCSENSKRLIHFSTCEVYGKTIGSFLPKDHPLRKEPEFYVLKEDESPCIFGPIVKQRWSYACAKQLIERLVFAEGAENGLDFTIVRPFNWIGPRMDFIPGVDGPSEGVPRVLACFSNNLLRREPLKLVDGGQSQRTFVYIKDAIEAVVLMIENPARANGHIFNVGNPNNEVTVRELAQMMTEVYANVSGEAPLDEPMIDVSSSQFYGEGYDDSDKRIPDMTIINKQLGWNPKTPLKDLLETTLTYQHKTYKEAVKRQMSQASAST

SEQ ID NO: 7592 - protein, 421 aa, Zea mays
  VARIANT 6: note = Ancestral polymorphism is G, Derived polymorphism is R
  VARIANT 14: note = Ancestral polymorphism is T, Derived polymorphism is I
  VARIANT 19..421: note = Derived polymorphism lacks residues 19 to 421
  VARIANT 37: note = Ancestral polymorphism is K, Derived polymorphism is E
  VARIANT 258..421: note = Derived polymorphism lacks residues 258 to 421
  VARIANT 260..421: note = Derived polymorphism lacks residues 260 to 421
MLEDMGKIKQVDETIVRARSLTTFLYSHTRVLALMRKFLGKDLVRAGITRFSTTYLNLKSMLGNKKELGKLFRSDELNEMGYLKKDKGKNASKIVRSDTFWENVDCAVNFFEPLANVLRRMNSDVPAMGFLYGCLLDAKNDIAKRFNNVERCFKTIWEIIDKRWDNKLKTPLHLAGYYLNLYYYYPNKLEIELDGTFREGLVSCITKMVQEVEIQDKIMDELNMYQDGMGSFGKDIATSSPNLRKLAIKILGLTCSSSACERNWSDFEKVDSKIRSILLHDRMRDLVFVKFNSKLKQKKENKSRDPIEKQVPDILEDSGNEWITRVASIEQEQAQNTEFVEATNAQGQSSRTTIETGKRKREIQPRRKTRTRKLIDINECNDDEPKLASSSDSEEDDAHVDMDQESSSSHSSDSDNSVFDE

SEQ ID NO: 7593 - protein, 124 aa, Zea mays
  VARIANT 35: note = Ancestral polymorphism is S, Derived polymorphism is P
MARLALVLLLLLAVAASAWAGAGASHLDLGLGFLSSGDRRRECRGTVAECLDESEGLDLGAGPASVESHRRALYGGGGGYISYGALRRDNVPCSRRGASYYNCRPGGQANPYHRGCSRITRCRG

SEQ ID NO: 7594 - protein, 133 aa, Zea mays
  VARIANT 5: note = Ancestral polymorphism is S, Derived polymorphism is I
MILYSICVGNQSWFHVACHLFQFSDGSPSRLICDRLKCSMTFTEKMVLVVFRDLIILWMTKSLMDDIHGWGVLFDGRVGDRTVTGKNWKPFESNTIPPPLTLEPKPNKGHLAWDDTFVITADSISMLSEACST

SEQ ID NO: 7595 - protein, 169 aa, Zea mays
  VARIANT 18: note = Ancestral polymorphism is S, Derived polymorphism is Y
  VARIANT 22: note = Ancestral polymorphism is A, Derived polymorphism is T
  VARIANT 35: note = Ancestral polymorphism is G, Derived polymorphism is R
  VARIANT 56: note = Ancestral polymorphism is P, Derived polymorphism is S
  VARIANT 154: note = Ancestral polymorphism is F, Derived polymorphism is C
MTRVLLPLLLLLALPGAYARPARQYLGQCPGLEYGLPPFAAALRATCPVSTEGYWPPYEVVSGEELLRMLDGKEKHTAVLFYASWCPFSQRTRSVFDDLSSMFPRVKHLAVEESSIMKRKTRICWNAHFVKVPCPCTAFHNNSSQLTRVLASWFQRSRLPGQPLHCCYR

SEQ ID NO: 7596 - protein, 543 aa, Zea mays
  VARIANT 34..543: note = Derived polymorphism lacks residues 34 to 543
MTVAVLTAAKESVAMGSAILNSIAPEEPKVVVPEYGETADIQDKEVSMEQLCSISTYDQWTPLSVSGQLPKPRYKHGAVVIQQKMYVFGGNHNGRYLGDIQVLDFKTLSWSKLEAKSQAEPSESAGAVPFSACAGHSVIQWGNKILCLAGHTREPAESLSVKEFDPQTCTWSTLRTYGRSPSSRGGQSVTLVGDTLVVFGGEGHGRSLLNDLHILDLETMTWDEFETTGTPPSPRSEHAAACFAERYLLIFGGGSHSTCFSDLHLLDTQTMEWSRPKQQGVTPESRAGHAGVTIGEYWFITGGGNSRKGVSDTLVLNLSTYEWSVLTNLEARAPPVSEAYALKASLKPSVPSQQINESDTNGFSPLSVAENSSRKVIFEIEELKDEKIVSLVCSLKHAFFHYQPGNRADNSKTLGQVVMVEQNEIENRLNQEHLQSLRLKQELTGLENRNAELTEASYISLTKLCKTAENELHLVQDQLSIEQTRASKFENEISDIQQRLQKMDTLEKEIESLRYELDSTVSEEESSSGNELHRSRGFWRWNG

SEQ ID NO: 7597 - protein, 751 aa, Zea mays
  VARIANT 177: note = Ancestral polymorphism is A, Derived polymorphism is T
  VARIANT 179: note = Ancestral polymorphism is R, Derived polymorphism is C
  VARIANT 599..751: note = Derived polymorphism lacks residues 599 to 751
  VARIANT 627..751: note = Derived polymorphism lacks residues 627 to 751
MDDATLRLRIEFNFSLDAQLNAVIRNEALLLLTYLTRDAEEIQKIVVFEGVFEKIFSIIREEGYSDGGVVVQDCLELLNNLIRHNASNQMLLKETMGFDPLISILKIRRGSAFNFTQQKTVNLLAALNTVELLLMVGPSGEAGKDANKNANQTALAQKNILDHLLLLGVESQWAPVALRCMALRCIGNLVLRNPQNLDSLARKQVGEEPHVQPALNAILSIILRTSIAQEFVAADYVFKCFCERNPNGQALLASTIAPHPNQGDIHEPASDMPFGSVLLQALVSSDVNGDMEACCRASSVLSHIIKDNLQSKDRVLQIQLETSTASLGRTEPVLHRIVTCLSIAASMEGENDQNNQLEEPYIQPFILRLLIIWLVDCSNAVNCLLESAVHLNFIIELASNKRYAACVRGLAAVVLGACILYNASREKGRDAFAVADAISQKIGLTTYFLRFDELRKSLAHPLSEQHHRKELSRSSANSMSDFQEIEEDETNKGDQHPVLSEIFDSQFVNLLTKLEADIRENIMDIFSRTKTATAVLPTELEQKNGEVDEEYIKRLKSFVEKQCNEMQDLLARNAMLAEELLRTGGGTTTDTSQKPSSGRERVQIEALRQELEGAKRQIGALKSEKSQIEAEANNQRNLSVKLESDLKSLSEAYNSIEQANYRLDAEVKALRQGGSVPYPDVEAIKAQAKEEAEKDSEAELNDLLVCLGQEQTKVEKLSTRLAELGEDVDTLLQGIGDDTAIPDDDDEDDEE

SEQ ID NO: 7598 - protein, 175 aa, Zea mays
  VARIANT 81: note = Ancestral polymorphism is G, Derived polymorphism is C
  VARIANT 167: note = Ancestral polymorphism is S, Derived polymorphism is I
MLLSGTSLTCEKYGCIISANFSGEVCLSHDIHVTADRVSLVATNITVADTVIVNTTALAGDPPDRTSGVPTGTHSDGGGHCGRGASCFVKQGQTQQDSWGGDAYAWSDLEHPWSYGSKGGSTSVEKHYGGVGGGIVWLFAKDLVMNGTVLANGGDSNEKGGGGSGESIFIRAASM

SEQ ID NO: 7599 - protein, 524 aa, Zea mays
  VARIANT 363..524: note = Derived polymorphism lacks residues 363 to 524
MAGAEGRGPRRSRVAFVLVDGIGDVSVPSLGGRTPLDAACAPRLDAVAAAGVTGLMDPVEPGLACGSDTAHLSLLGYDPREYYRGRGAFESMGAGLAMAPGDIAFKSNFATLDENTGVIISRRADRHFEEEGPILCAALDGMKLRSFPEYEVRVRYATEHRCGVVVKGPKLSGNISGTDPLKDNRLHLKAEPLDGSEEAKNTAAVVNELSMEITRILVSHPINAKRAAEGKNIANVVLLRGCGIRIEVPAFETKHGLAPCMVAPTKIIAGLGLSLGIDILEAPGATGDYRTLLTSKAKAIAKALSAPMDTPPRVFVPGEDGYKAGKENGYDFGFLHIKAKCIFRFFLLVLTIYVIVIALVIMSMQAIDDAGHDKAVKLKVRGLEAVDRAIGQLARLLWEAEKAGHYQYFLCVTGDHSTPVEYGDHSFEPVPFAICRLRDYAGAIGEDNIMNTQLDDFPLPSVKSGEDLLDSIESLEHKPGQLKAFSGDSVCEFNEIAAARGCLGRFPGSEMMGIIKKFIKAKND

SEQ ID NO: 7600 - protein, 548 aa, Zea mays
  VARIANT 187: note = Ancestral polymorphism is A, Derived polymorphism is V
MRVPPGSHAYTSAAELNAPLRGKLICCSQVPPATAPSANGDCSDFYAGGVAVYSGLLWSTPCRDLPVLLAQPRSLPVIVTYRPNWEGGQYAGEDEPRFEALLLAMELGAEYVDVEFKVADKFMKYLSGKKPQNCKLIISAYDYKTTPSVHELLNLVAQIRATGADIVKIETTAADIVDTSRMFQVLAHCHEKQVPIIGLVRKEHGFISRIICAKYGGYLTFASLENGKESTTEQPTVADLINKYKIRQIGPDTKVFGIIGNPVSHSKSPIVQNQAFRSVGFDAVFLPFLSDDLVQFLYTFSAPDYAGFSCTMPHKETALRCCDDVDPIARDIGAINTIIRRPDGKLVGYNTDYSGAISAIEDGIRASQPTDSITSPLAGRLFVVIGAGGAGKALAYGAKEKGARVVIANRTFVKTKNVIDNIKRPNFPARAQELAHIIGGTALTLSELESYHPEKGMILANATSVGMHPNVDETPLSKHALKSYAVVFDAVFVPRETRLLREAAVCGATVIDGLEMLIRLVMVQFKLFTGGMTAPERLMREAILTKTH

SEQ ID NO: 7601 - protein, 107 aa, Zea mays
  VARIANT 92: note = Ancestral polymorphism is G, Derived polymorphism is D
  VARIANT 89: note = Ancestral polymorphism is V, Derived polymorphism is G
  VARIANT 83: note = Ancestral polymorphism is R, Derived polymorphism is C
  VARIANT 37..107: note = Derived polymorphism lacks residues 37 to 107
  VARIANT 33..107: note = Derived polymorphism lacks residues 33 to 107
MSSFLTQRTKSKIAFCSPDRSAETLFRYVTPEQVPVQFGGLYKEDDTEFSASNAVTELTVKPSSKETVEVPATEGSTVVWELRVLGWEVSYGAQFAPDAEDGYTVIV

SEQ ID NO: 7602 - protein, 841 aa, Zea mays
  VARIANT 393..841: note = Derived polymorphism lacks residues 393 to 841
MDVSDQSVRLTIEAQPSDPAVTPGFMAATPFEPQLSDSPPRPSVAADDGKDDDNNEASCSARGRLDDGAAGPERRLTLLALRLAVLEKAASGLGALGFIWATVVLLGGFAITLERVDFWSVTAILLVEGARIFSRSHELEWQHQATWSLSLVDAGRSSVRLVARSFRFVFRAGGCDCESGKASGGAAASCSHAGRSGWGWRSAWTWTAWPWSWSWSFLSGHVGRLFYWLQLASATACVVLSGVRLARQDFGDAVDARTNRRSALDIFYGLALAEALLFHAEKAAWEWEVSHGRLLERVADECRLAGAPGLLAIRRFFYDAYSRCIEGSIFDGLRMDLVSFAEELIVGGSHDEQRIGVGILVNVAASPRLGDGALRRVGTSPAVVERLVDMLSWKGAAERGARASAALVVSKLASKKRNALRVAGVPGAIESVSSLLYAADEECNLLGLLIIKKLARDHANCSKIGTARGLLDKIIDFSSIGVGGASPATGPSATFFMAPARAKAVQRSLQVIKMLAETTGSTGKQLRREVAEIVFTVSNIRAVLQHAPAAQVGLRRLGAEVLTRLAMDAVARERIGGTGGLVALLLHMFLRPGGSEEDTDAARVEAGEALAMLALESPRNCERILRAGGSSSSATSTATVDSLVDALGDAAIGVGAGRILMNLCAYTGGSSEWFPQLRRATRAAATVLREVDTVNESKPLEVSLGFAAQLVRLMGPHELAHHLVNAGVSEADLVSRLVSVLATHACPSTKAPRIRRFTVDLVIALLRTPPARERWLIAEAMAAAGMGAELRRVAETTSELECFHVFSGSAGLIRHAVGLAALVDTALELMSTVAEADRAPV

SEQ ID NO: 7603 - protein, 525 aa, Zea mays
  VARIANT 2: note = Ancestral polymorphism is S, Derived polymorphism is R
MSAAMPPAMDPAAAGEMAREAAAWCSLHGLVVGDRADQRSATVPGVGLVHAPFSLLPAHFPESFWRQACELAPVFNELVDRVSMDGNFLQNALSKTRQVDDFTSRLLEIHRKMMEINKEENIRLGLHRSDYMLDSETSSLLQIELNTISASFPGLGSLVSDLHRSLIKQYGTSLSLEHKRVPANAASTQFSEALAQAWSEFNIDSAVIMMIVQPEERNMYDQYWLSKHLQDSYPSIGGQKVAVVYFRAGYAPNDYPSEAEWSARLMMEQSSAVKCPSISYHLVGTKKIQQELAKPNVLERFLKSEEIDKVRKCFAGLWSLDDEYIIKTAVEKPELFVLKPQREGGGNNIYGLDLRETLVRLQKEGGDALAAYILMQRIFPKASPAYLVRGGVCHEGLAISELGIYGAYLRNKDKVVINEQCGYLMRTKVSSSDEGGVAAGFAVLDSLYLTGKGKVCADLLASCSEITKGAAATAFGWGHTPSMDHHVLHLDRHRISCCKLEPLCDTMSRCLMNSFYLPLPRERRE

SEQ ID NO: 7604 - protein, 204 aa, Zea mays
  VARIANT 13: note = Ancestral polymorphism is A, Derived polymorphism is P
  VARIANT 15: note = Ancestral polymorphism is R, Derived polymorphism is P
  VARIANT 180: note = Ancestral polymorphism is P, Derived polymorphism is S
MAPDLSELAAAAPARGAYLAGVGVAVLLAASFLPVAESSCVRDNSLVRDISQMPQSSYGIEGLSHITVAGALNHGMKEVEVWLQTISPGQRTPIHRHSCEEVFTVLKGKGTLLMGSSSLKYPGQPQEIPFFQNTTFSIPVNDPHQISTCKFILVGRKLIFLLMYTSSFSCRFLYDDWSMPHTAAVLKFPFVWDEDCFEAAKDEL

SEQ ID NO: 7605 - protein, 348 aa, Zea mays
  VARIANT 118: note = Ancestral polymorphism is V, Derived polymorphism is A
MATIAVPRVVPSPAEDAAALLKAFQGWGTDEQAVIGILAHRDATQREQIALEYEHKYGESLVQRLQSELTGDFEVPITVLSSSGIISFFFLTSPELTNLRVQRAVYHWMLGPAERQAVMANAATECLQEECAVIVEIACANSSAELVAVKKAYHALYRRSLEEDVAARATAGNLRSLLLALVSTYRYDGADSVDMELARSEAKAVHEAVRDGGGAGGHEELIRVVGTRSKAQLRATFGCFKDEHRRSVAKALPRGTDPTGYLRALRAAVRCVADPSKYFAKVLRSATRESAGTDEDSLARVVLLHAEKDDMGAICAAFLKRASCTLEQAVAKETSGDYRSFLLALLGS

SEQ ID NO: 7606 - protein, 340 aa, Zea mays
  VARIANT 271: note = Ancestral polymorphism is P, Derived polymorphism is L
  VARIANT 161: note = Ancestral polymorphism is G, Derived polymorphism is E
  VARIANT 116: note = Ancestral polymorphism is T, Derived polymorphism is I
MSRSLSMRGSMRSRRDLPPPGKTIERLESMVDGGNFYEAQQMYKSTSARYIAVHKYSEALDILQSGALVQLKHGQVTCGGELAVLFVDILITGEFPYSEQFFDRIRKIYEAFPRITVPHFLGEDYDDEGHKLSEAISAAKVRAESCSSFLKAAIRWSAEFGTSRNGSPELHVMLAEYIYSESPETDMTKVSSHFVRGNDPKKFASMLVNFMSKCYPGEDDTAIARGVLMYLSQGNLRDANLLMDEMKEQLKSVNSDFPKTDLIQFIMYLLPTTLAFVTCDTVYRLERDAYPLFRTLRQKYKTSTDRDAVFQELLDEIAAKFYNIQRQNPLEGLFSEMFRI

SEQ ID NO: 7607 - protein, 71 aa, Zea mays
  VARIANT 8: note = Ancestral polymorphism is T, Derived polymorphism is M
  VARIANT 14: note = Ancestral polymorphism is G, Derived polymorphism is R
  VARIANT 18: note = Ancestral polymorphism is G, Derived polymorphism is C
  VARIANT 48..71: note = Derived polymorphism lacks residues 48 to 71
MVVEAAATHKAITGLWRGRRDEWGRLFGSRVCFAIGMKLLIIGCFATELSGNGVFHRVRRGKPVPDLRSHW

SEQ ID NO: 7608 - protein, 697 aa, Zea mays
  VARIANT 625..697: note = Derived polymorphism lacks residues 625 to 697
MAASGGNEPELAVVTDVCNASSTPQENRLAGDSNTISENAQESLSSLPEQESNDASVNTEKQEPGISKCKSVDEIPKTVTVKRCKNVDSKKVSSNNNNNPRFTGSPALKKHPTKGDHLFELCENGMAQDTKPPSTRICINSACKAVFNSDNTFCKRCSCCICHGFDDNKDPSLWLVCSSETGDQDCCGSSFHVECALKHRKAGCIELAQSIQLDGNYCCAACGKVIGILGFWKRQLVVAKDARRVDSLCSRIYLSHRLLDGTTRFKELHQIVEDAKAKLESEVGPLDGTSSKMARGIVGRLPVAADVQQLCSLAIEKADEWLSSNIQSETKQNDTLPSACRFKFEDITASSLVLVLKEAVSSQYHAIKGYKLWYWNSREAPYTGEPAVFPKDQRRILISNLQPCTEYSFRIISFTEDGELGHSESKIFTKSVEIIHKNTEHGAEGCSSSAKRAGKRQNARSSGFQVRQLGNVFRRAQTENGYPSTLCKYEIEDSCDQSESVIPDKDQFRCGASRKLDLNETSVPDLNAEVVMPTECCQNENGCTSGKNAFTKSNGCGDSETCAEGHVGDAPAMESRSQSRKQASDLEQETCLDDSNLVARAARLFAPRLGQLDDNYEYCVKIIRWLECSGLIEKDFRMKFLTWFSLRSTEQERRVVITFIRTLIDEPSSLAAQLLDSFEEIVTSKRPRTGFCTKLWH

SEQ ID NO: 7609 - protein, 188 aa, Zea mays
  VARIANT 46: note = Ancestral polymorphism is G, Derived polymorphism is A
  VARIANT 59: note = Ancestral polymorphism is V, Derived polymorphism is I
  VARIANT 62: note = Ancestral polymorphism is E, Derived polymorphism is V
  VARIANT 85: note = Ancestral polymorphism is K, Derived polymorphism is N
  VARIANT 125: note = Ancestral polymorphism is W, Derived polymorphism is R
  VARIANT 144: note = Ancestral polymorphism is P, Derived polymorphism is L
MGKLLFWVDKWLEGNTIQELAPNLFKAIPKRIIKHRTMSQALLNRGWIVDIKGALTVQVLSEYLLLWDLVHNWHLQQEAADQHLKNGSYSTKSAYNAFFVGTIHFAPWKRVWRSWATPKCNLFMWLVLKNRVWTVDRLAKRGLPHLAACPLCDQEAELIQHLLVSCVFAKQVWFLILHGLGLSVLPQP

SEQ ID NO: 7610 - protein, 196 aa, Zea mays
  VARIANT 59..196: note = Derived polymorphism lacks residues 59 to 196
MATSFQGTTTKCTACDKTVYLVDKLTADNRVYHKACFRCHHCKGTLKLANYNSFDGVLYCRPHFDQLFKRTGSLDKSFQGTPKVVKPERNVGNENATKVSSAFAGTREKCVGCSKTVYPIERVTVNNTMYHKCCFKCCHGGCTISPSNYIAHEGKLYCKHHHVQLIKEKGNFSQLENDHEKTSQAGSLEDDEEEEY

SEQ ID NO: 7611 - protein, 273 aa, Zea mays
  VARIANT 104..273: note = Derived polymorphism lacks residues 104 to 273
  VARIANT 119..273: note = Derived polymorphism lacks residues 119 to 273
  VARIANT 129..273: note = Derived polymorphism lacks residues 129 to 273
  VARIANT 201: note = Ancestral polymorphism is W, Derived polymorphism is L
  VARIANT 211..273: note = Derived polymorphism lacks residues 211 to 273
MLTSSLNPARSPWKGPPPSPQIRVPAILHLGSASASTLPARSPWKGPPPADLAPTALVLYMGEKFPSKYLGQTSSPRISLAIHGSGPAPDSARVKGQYSARAAQSAALVAYRCLSGSPKNRLDMSTVVQALEPLLDLDDDVPVAPLGHAGPVVLFVAAVVEEKKERAPRKDVLGHRRRSMSPKASPRKHPSAGTKDEFWVWHLPTDQKTLCCYGEMRCRVSPSSVSDSCGRSSADPYGVPEFGWRDIRRYKQFRSVDTNISTGDDSALGQRLK

SEQ ID NO: 7612 - protein, 122 aa, Zea mays
  VARIANT 31: note = Ancestral polymorphism is L, Derived polymorphism is F
MDAEVRSKRMPQLLGAAYVHHAGVVVITTTLKEMPSLQKALPPELADNVLRLYRECLRRAKYISHQKHNTKLLVAMVRQQFKKNMHETDPEKIQKMKDDSARGLINHILYESEKITGHKFSG

SEQ ID NO: 7613 - protein, 193 aa, Zea mays
  VARIANT 18: note = Ancestral polymorphism is R, Derived polymorphism is S
MSSAADEDALSSDKGKKREEDGTDGRSQRQEGVEVADGKVDLGDLYGAAAGWVEARTSCPHIGTMPPAGADDLARVPSPDSPCSRCNHPAENWLCFICKDVLCSRFINKHMLCHHQETGHCLALSFSTVHIMFCSDLSVWCFSCDSYLDVQAILELRPVYEVAHLLKFGQRPPFRSLDVQDSGTGESGSVSRA

SEQ ID NO: 7614 - protein, 156 aa, Zea mays
  VARIANT 120: note = Ancestral polymorphism is T, Derived polymorphism is I
  VARIANT 112: note = Ancestral polymorphism is K, Derived polymorphism is T
  VARIANT 30: note = Ancestral polymorphism is R, Derived polymorphism is S
  VARIANT 6: note = Ancestral polymorphism is R, Derived polymorphism is C
MLLLTRFHLLLLFHCQMLTLDPEDSLDFLRTARMATYVFLISGPTLHLWFNFISKLFPKKDVVNTLKKMALGQAVYGPIMKSVFFSYNAGLQGETLPEIIARLKRDLVPAITSGLLYWPTCDLITFKFVPVHLQVTDAFWKYLLGLSLFGVAAFLT

SEQ ID NO: 7615 - protein, 100 aa, Zea mays
  VARIANT 22: note = Ancestral polymorphism is T, Derived polymorphism is I
  VARIANT 27: note = Ancestral polymorphism is R, Derived polymorphism is Q
  VARIANT 45: note = Ancestral polymorphism is P, Derived polymorphism is R
MGRHALAKSAALLREVKNKQRTNLVKRLEPTEARSPQTSLWVPHPRTGIYYPKGFEWVMEDVPSSAASFQQSYWFRTGEAEPASSITSKNDSTSFDHPFA

SEQ ID NO: 7616 - protein, 443 aa, Zea mays
  VARIANT 246: note = Ancestral polymorphism is R, Derived polymorphism is W
  VARIANT 58: note = Ancestral polymorphism is S, Derived polymorphism is F
MDHSVYYCLVALLPLVYFLLKSSWKKAPFGSGSRHGLKLPPGPWQLPVIGSIHHLRGSLVHHALRDLSLRHGPLMFLKLGEVPVVVASTPEAAKEVMKTHDAIFSTRPLSSTIRTVSKDGLGIVWAPYGDHWRQLRKICTMQLLGARRVQSLRPAREEEAFRLVRAVMSSSTAAGGAAPPPLVDLGKLAAVYVAEASLRAILGRRFKVEDRDTLLRYVDDGVRLAGGFTPRDLFPSSWLVRALTHRAVREVDAYRDSLFAFMDVVDLIGGGIETATTTLQWAMAELMRNPGIMAKAQAEVRGLFMGQTKVTEDRLGELPYLQLVIKETLRLHVPGPLLIPRECQEQCRILGYDVPRGAMVLVNAWAIARSPDHWEEPDAFVPERFVGDARDFKGNDLEFIPFGAGRRICPGMSFGLASGQRRARSRQLALLLRLESPGGRPSC

SEQ ID NO: 7617 - protein, 231 aa, Zea mays
  VARIANT 10..231: note = Derived polymorphism lacks residues 10 to 231
  VARIANT 35..231: note = Derived polymorphism lacks residues 35 to 231
  VARIANT 99: note = Ancestral polymorphism is H, Derived polymorphism is D
  VARIANT 110: note = Ancestral polymorphism is R, Derived polymorphism is S
MEWPMGNGMRSLASCARATSNPADPDITVLVCYAQVPDHHLHLSLHHLLPHSTGRNPTLTRPPRHPPTLSPPQHTPVRPLASPVSTPSIPPPCPHLVVHRLSSRPLRFLRRCLRLRSLGRLEIRRDPRELPHCSPCAAASPSPTSRIYACLSCTAVFGPSHAATHASASVGLGHQIAIDVDRAKLFCAACGDQVYDPDFDYTVFLAQSSSLLPSTSTSSTSPALRKRRRVD

SEQ ID NO: 7618 - protein, 190 aa, Zea mays
  VARIANT 17: note = Ancestral polymorphism is C, Derived polymorphism is R
MAMHERIVGTPFKFMHCWLILRHEMKWNALLDSMNPTDAKETEQKGTNIMEELLPPKIARPTGRDHDKNMKSNISSSSFTACINVLQKLSMEHGAFEERQDATSREEATHMVVRSDRKLALQEEVIIIQKASLEIQQQMLKLQEEEREERVMTMDVNKMEPWVREYYINKQKKIAASSMNVETSSAREPS

SEQ ID NO: 7619 - protein, 140 aa, Zea mays
  VARIANT 132..140: note = Derived polymorphism lacks residues 132 to 140
  VARIANT 58: note = Ancestral polymorphism is G, Derived polymorphism is R
  VARIANT 34: note = Ancestral polymorphism is Y, Derived polymorphism is F
MSVELILWLFSFASVVLLVGLTVYQLLCLVDLEYDYINPFDSSSRVNAVVMKEYSLQGALCASFLLTLHWLPFLLMAPVTYYHVKLYLARKHLVDVTEIFRQLNGEKKYRTIKLAFYFCLFIVTIYRFDFGYILINILVN

SEQ ID NO: 7620 - protein, 266 aa, Zea mays
  VARIANT 8..266: note = Derived polymorphism lacks residues 8 to 266
  VARIANT 217: note = Ancestral polymorphism is A, Derived polymorphism is P
MLLSFKAQGARLVEASLEDHAGLVAAVAQADVVVSAMSGAHIRSHNLSLQHKLVEAIKEAGNIKRFIPSEFGMDPSKMGHALEPGRVTFDEKMDLRRAIEDANIPHTYVSANCFAAYFCPNLCQMRTLLPPKEKVHVYGDGNVKAIFCDEDDVATYTIKSVDDPRALNKTLYIRPPENILTQNDVISKWEKLSGNVLEKIHIPADEFLASMKGTDLANQAGVGHYYHIFYEGCLTNFEIGDDGADATLLYPEVQYTRMDEYMKRYV

SEQ ID NO: 7621 - protein, 161 aa, Zea mays
  VARIANT 111: note = Ancestral polymorphism is A, Derived polymorphism is V
  VARIANT 116: note = Ancestral polymorphism is T, Derived polymorphism is M
MVGPVFLYDLPPSREPEVRAPQAASPFFLHALPSPMRGSSASARPCSPPSASTSRASLGALVLAAEGKFFSNGYDLAWARAGPAPAPGHRLFAMRAAMRATFRGLVADLLALPVPMVTTVMGHAAGAGCALALAHDAIAMRASRGFLCMSEVDTGIKDRTL

SEQ ID NO: 7622 - protein, 188 aa, Zea mays
  VARIANT 46: note = Ancestral polymorphism is S, Derived polymorphism is C
  VARIANT 47: note = Ancestral polymorphism is A, Derived polymorphism is V
MAAQREKSAAVAVAPAHGAAVSGSPSPSSSSGGPAVSASSSGDRWCAAIGNLGELGANVDALQKLLGRKAVFVDDDIFSKASLAADQARTIKVLDQRVQSLERELDAAISAAARARVEKRQAEAAQRAAELRTREVTEELENTARVFELHMEELRLKQEDIAKKDSDIKVLEAIIRTLSSKDDDGSSE

SEQ ID NO: 7623 - protein, 85 aa, Zea mays
  VARIANT 39: note = Ancestral polymorphism is W, Derived polymorphism is R
  VARIANT 74: note = Ancestral polymorphism is W, Derived polymorphism is R
MELGGYAIGAVEDCSKRLSDYISMDVLSAIQRAGATFSWVPKEPYNEDACLLDFDVLLMEPRKLEKTLITSIMWWATGCLQQCRY

SEQ ID NO: 7624 - protein, 183 aa, Zea mays
  VARIANT 81: note = Ancestral polymorphism is P, Derived polymorphism is L
  VARIANT 4..183: note = Derived polymorphism lacks residues 4 to 183
  VARIANT 3: note = Ancestral polymorphism is M, Derived polymorphism is I
MPMQPQAPSMTPAAGITTEQIQKYLDENKQLILAILENQNLGKLAECAQYQSQLQKNLLYLAAIADAQPETAVSRPQMAPPGASPGVGQYMSQVPMFPPRTPLTPQQMLEQQLQQQQAQLLNFSGQMVARPGMVNGMLQAMQVQQAQPSPVMNRPDAGGIASEPSGTESHRTSTGGDNGGGSD

SEQ ID NO: 7625 - protein, 37 aa, Zea mays
  VARIANT 4: note = Ancestral polymorphism is P, Derived polymorphism is A
  VARIANT 13: note = Ancestral polymorphism is Q, Derived polymorphism is H
  VARIANT 21: note = Ancestral polymorphism is P, Derived polymorphism is L
MLEPSVLLLELMQRILYASLPVLAQGRNWVLLYMFRV

SEQ ID NO: 7626 - protein, 491 aa, Zea mays
  VARIANT 109: note = Ancestral polymorphism is L, Derived polymorphism is V
  VARIANT 24: note = Ancestral polymorphism is A, Derived polymorphism is T
MPSTTAQQKPHVVLVPFPAHGHIAPHVQLARALRARGVHATLVHTELYHRRLLRTKQQQATGGDDALDPDEGFSVEVIPDGLSLEDPPRTLRAYHEAMERNCLEPFKALLRDLLLPPTGVPPVSCVVADTPMPFAAVAAREVGVPDVQFFTASACGLMGYLQFQELLAREVIPLRPTYETDGSLDAPLDWVPGMKAVRLRDLPTFCHTTDADDWLVHFHVHQMKTAAASKAVVLNTLYDMEKDVVDALAPHLPPIYTVGPLASVVKASLPAPPRGAGDDTSVPAAGSVRSSAMLGVLQEDRECMAWLDDGKAARSVVYLSFGSHASMGDARLKEIASGLARCGSPYLWVLRPEMAAAVEVGENGLVVPWCAQEAVLSHPAVGLFVTHCGWNSILESVVAGVPVLGCPVLSEQTTNCRQVCTAWGIGAELPQEAGSDEVAALVREMMTGRKGKDAREKTLQWKRLAQVSAQPGGLSYNNIGRMVENILLKHI

SEQ ID NO: 7627 - protein, 725 aa, Zea mays
  VARIANT 47..725: note = Derived polymorphism lacks residues 47 to 725
  VARIANT 185: note = Ancestral polymorphism is I, Derived polymorphism is N
  VARIANT 187: note = Ancestral polymorphism is D, Derived polymorphism is Y
  VARIANT 189: note = Ancestral polymorphism is A, Derived polymorphism is P
  VARIANT 198..725: note = Derived polymorphism lacks residues 198 to 725
  VARIANT 293..725: note = Derived polymorphism lacks residues 293 to 725
MAASTAAAAARKGALTDQRFSELSPALSPEVVEALDRGGFQRCTPVQAAAIPHLLSHKDVAVDAATGSGKTLAFIVPVVEILRRRSSPPKSHEVLALIISPTRELSSQIFNVAQPFFATLNGVSSMLLVGGLDIKAELKKVEEEGANILVGTPGKLFDIMHTDALEYKNLELHLFLCMHGKQILILDEADRLLDMGFQKHINFILSMLPKLRRTGLFSATQTKAVADLSKAGLRNPIRVEVKTEAKSTSKDAGQQELGPSITPLGLRLEVQSIYFLFYYDCDLIFLNSSCSLQNHNLVLVQYMICEASKKSSQLVDFLVQNSGKKIMVYFATCACVDYWAVVLPLIKSLKGSPIIAYHGKMKQSLREKALASFSALSSGVLVCTDVAARGLDIPSVDLIVQVIFCSSLPKFESHVQASADSKDACLFIQYDPPQDPNVFIHRAGRTARYDQEGDAIVFLLPKEDTYVEFLKLRGVPLTERECLANTDDVIPQVDSLVQIPFRDREIRSAALEDRNVMEKGLRAFVSFVRAYKEHHCSYIFRWKDLEIGKLAMEYGLLQIPSMPEVKHHSLSLEGFISVDDVDITQIKYKDKAREKQRKKALKRKAEEEAQNPKPERKRPPEKPEKPKRKKTGKQRQSIQTKEDLDELAHEYRLLKKLKRGDIDEEEYEKLTGFGDSDGEASDGDGSNLDERKKGNKAQKKTKQRGKCKSGSKKFEGRSKLRSKRR

SEQ ID NO: 7628 - protein, 364 aa, Zea mays
  VARIANT 30: note = Ancestral polymorphism is E, Derived polymorphism is K
MTTRACLLVALAMALALLLQEHAAGAEAHEQKQQVQRLLRRLNKPPVKTIESPDGDIIDCVHITKQPAFDNPLLKNHTIQMWPSSHPRGGQLNEDYSNTASSITQTWHQNGSRSCPENTIPIRRTMEEDVRRADSPRSYGKKERRPKFTPVDGAGQPTTVTSGHQWAQASAQGGSTYYGTEATFDLWQPVVETASDFSLTQFWVVSGSYQANDLNTIEAGWQVSPNMYGDNSPRLFIYWTDPKTGNWWLQVGKDLLGYWPSSLFTNLASSASNIQWGGEVYSPDAGQTSTQMGSGHLPEEGLGKASYIRNIQVVDASNTLLSPSGGLGLFASRPNCYNVLNGAAGNSFGTYIYYGGPGRNPNCQ

SEQ ID NO: 7629 - protein, 296 aa, Zea mays
  VARIANT 45: note = Ancestral polymorphism is E, Derived polymorphism is G
  VARIANT 60: note = Ancestral polymorphism is D, Derived polymorphism is G
  VARIANT 106: note = Ancestral polymorphism is S, Derived polymorphism is F
  VARIANT 112..296: note = Derived polymorphism lacks residues 112 to 296
  VARIANT 126: note = Ancestral polymorphism is P, Derived polymorphism is L
  VARIANT 146: note = Ancestral polymorphism is Q, Derived polymorphism is R
  VARIANT 190: note = Ancestral polymorphism is A, Derived polymorphism is G
  VARIANT 204: note = Ancestral polymorphism is S, Derived polymorphism is P
MATEKPILYNAWISSCSHRVRIALNLKGVDYEYKSVNPRTDPDYGKINPIKYIPALVDGGIVVSDSLAISLYLEDKYPEHPLLPKDLKRKALNLQVMSRSKSLVVSCSQKLQTLFVQAFNLFKAMLLLWGLHEGRMSPDEGLHIVQSYIDKGFRAIEKLLEGCESKYATGDDVQLVCFSTQPFNITLFFALINHIEIVYIVASSYQSCIVFFSPNYISTKFLISLLTSNFEKSEVFIFYAHGQADVFLEPQIHAGINRFQIDMSMYPILERLHDAYMQIPAFQAALPKNQPDAPSS

SEQ ID NO: 7630 - protein, 982 aa, Zea mays
  VARIANT 93..982: note = Derived polymorphism lacks residues 93 to 982
  VARIANT 487..982: note = Derived polymorphism lacks residues 487 to 982
MNSPKMELSPWLVFSLGFLAQALVILADTNAQDASGLNGIQDSWNKKPSNWRVGTDPCGDKWNGISCTTSRVTAMLVSAARRYYHIRRLSSLGLSGSLSGDIQSLSELQTLDFSYNKDLGGPLPASIGSLSNLENLILVGCSFSGEIPKELGQLTKLRFLSLNSNKFSGSIPASLGRLSNLYWFDLADNKLSGGLPVFDGTNPGLDNLTNTKHFHFGVNQLSGTIPSQIFNSNMTLIHVLLDNNNFTGRIPPTLGLLNTLEVMRFDNNYQLTGPVPSNINNLTKLAELHLENNQLTGPLPDLTGMIALSFVDMSNNSFNASGVPSWFTTLPSLTSLYLENLRVTGQLPQALFSLPAVQTLRLRGNRFNGTLTIGSDYSTQLQLIDLRDNQISQITVGGSQYNKQLILVGNPICSPGTGSSEKYCASPGQSNQAAPPPYSTPMNCSGLPPPCLSDQLVSPGCVCAVPYRGTLFFRSPSFSDLSNGSYWGQLETGIRAKFRSLSVPVDSVALHDPSVNSVNNLQLALEVFPSGKTQFSEQDISDIGFILSNQTYKPPSVFGPYYFLGQPYSFANVVLIPSKSKANNRLPLIVGASVGGAVLVAIVLALVTIVARRKKRPKQNEERSQSFVSWDMKSTSGSSVPQLRGARTFNFDELRKITSNFSEANDIGNGGYGKVYRGTLPSGQLVAVKRCQQGSLQGSLEFRTEIELLSRVHHKNVVSLVGFCLDQAEQILVYEYVPNGTLKESLTGKSGVRLDWRRRLRVLLGAAKGIAYLHELADPPIVHRDIKSSNVLLDERLNAKVSDFGLSKPLGEDGRGQVTTQVKGTMGYLDPEYYMTQQLTDKSDVYSFGVLMLEMATARKPLERGRYIVREMKVALDRTKDLYGLHDLLDPVLGSSPSALAGLEQYVDLALRCVEEAGADRPSMGEVVGEIERVLKMAGGPGPESASNSMSYASRTPRHPYGGDSPFDHSNSGLPSARVEPK

SEQ ID NO: 7631 - protein, 1522 aa, Zea mays
  VARIANT 275..1522: note = Derived polymorphism lacks residues 275 to 1522
MPLSSCLPDQASSLLRLKRSFVTTNYSTVAFRSWRAGTDCCRWAGVRCSSNSDDGGGRVTSLDLSDQGLESGGLDPAIFHLSSLERLNLAYNDFNGSQLPSSGFERLANLTHLNLSTSSFSGQVPASGIGGLTSLVSLDLSTSYEFYDLLDDGFLLHRDSNSDARLTVQSFETLVANLRNLRELHLGLVDLSSDDDGAGPRWRWCSVVAASCPELRVLSLPRCGLSGPICGSLSSLRSISVVNLEYNRLSGPFPDFFTNSSDLTVLRLRRTGIQGRVSPAIFLHRKLVTVDLYNNYGISGYLPDFPAGSSSSRLENLNVGRTSFYGTIPNSLGNLTSLKELGFGATGFSGDIHIPSSIGDLKSLNALEISGMGIVGPMPSWIANLTSLTALQLYDCGLSGPIPPFVAELRRLKRLALCGCSFSGEIPSHVITNLTQLQILLLYSNNLEGTLELQSFGKNMPYLIALDLSDNNLLVLDGEEDNSSASVSLPKLKTLVLGGCGMSKFPEFLRRQDEIDWLDLSYNQIRGAVPGWAWELWNGMVYLVLSNNEFTSVGHGHLLPLQDMIVLDLSNNLFEGTIPIPQGSADALDYSNNMFSSVPAHLSSHLDDVALFLAPGNRLSGNLSASFCGGGTSILLLDLSYNDFSGSIPSCLMENVNGMQSLNLRKNRLHGEIPDSSKEGCSFEALDFSGNQIQGRLPRSMASCENLEVLDVGNNQISDAFPCWMSELPRLQVLVLKSNRFFGQVSEPVLQEKKQSYSCAFPSASIVDLSSNSFSGPLPEGRWFKNLRSMVLTDPSKPLVMDHEVPGVTRTYRYTTAVTYKGHDTSFAEILTALVFIDFSNNTFSGSIPVAIGELGLLHGLNVSHNFLTGQIPPQLGHLSRLEALDLSFNGLSGEIPKELASLDSLTTLNLSDNRLVGSIPASPHFSTFSSSSFQGNDGLCGPPLSKACNDNVTQVDAVRSEKRSVDFVLFLFVGVGSIPRRNPLTPCRIPVPSRQHPRNAPVFSRSNSTSNGTAEEAAGAGEELPSPVNGGAAPFFPRQAGDALLDDLQLQEQLAFLNEGGGNPAHQLQGFDGVECRSPGPGDADGMFAFGLGWHNGGPAHRRSSSVNELCLGGGGGDGFGWKPCLYYASGFCKNGGSCRFVHGGLSDDAVALAGTKMEAAADQQQQCQDFLIRSKGQRLGPAVFPYSPTGSLPGSPSAASKCLSFLLQQRQQHDRAAAAASLMLGGGDEAHKFMARPRLDRADFASLMNPSSRQIYLTFPADSTFREEDVSNYFSIYGPVHDVRIPYQQKRMFGFVTFVYPETVKLILAKGNPHFICDTRVLVKPYKEKGKVPDNANELLLRRKLEEQQQAAELQHAIELQSRRLMGLQLLDLKARAAATAAAASALPTPVVNAFASIHPLSTMAVESPLESGEQLKLSSGFALEGKLNGGDHNLPDSPFASPTKSDVLVHDSFAATEPENTASLVGSKIDGGSNHLRPPALEIPSPSSYFFPMRRCVGKASTLLFRGADYVREHSVIHE

SEQ ID NO: 7632 - protein, 126 aa, Zea mays
  VARIANT 14: note = Ancestral polymorphism is T, Derived polymorphism is K
MPVASSLMAMELETDQLAWAEQQRQQNRRQTMVVCRKSDAAVAKGQQRQNASPPSPKPPPAGGLSAEAFLVLACVAVSLIVLPLVLPPLSPPPPLLLLVPVCLLLLLAALATFVPSDVRSMPSSNL

SEQ ID NO: 7633 - protein, 291 aa, Zea mays
  VARIANT 39: note = Ancestral polymorphism is H, Derived polymorphism is Y
MEAPPVALFDTLKAAKPFFLLAGPNVIESEEHVLKMAKHIKAITTKLGIPLVFKSSFDKANRTSSKSFRGPGLEEGLKILQKVKATYDLPIVTDVHESHQCEAVGRVADIIQIPAFLCRQTDLLVAAAKTGKIINIKKGQFCAPSVMVNSTEKVRLAGNPNVMVCERGTMFGYNDLFVDPRNLEWLRESNCPVVADVTHALQQPAGRKLDGGGVASGGLRELIPCIARTSVAVGVDGIFMEVHDDPLNAPCDGPTQWPLRNLEELLEELIAIARVTKGKKPFKIDLTPFQE

SEQ ID NO: 7634 - protein, 570 aa, Zea mays
  VARIANT 327..570: note = Derived polymorphism lacks residues 327 to 570
MAPLLLASRTACRPGLTSRHAHDNGRHGLSSSPPGSRSKRSRSLSLRPRAEKTTTGGGGHVVSEKLSPWQIPRREWFPPSFIFGAATSAYQIEGAWNEGGKGPSTWDDFCHNHPEWIADGSSGDVGANSYYLYREDVRLLKEMGMDAYRFSISWPRILPKGTLEGGINHKGIEYYKKLINLLKENGIEPYVTLFHWDTPQALVDSYGGFLDDRIVKDYTDFAKVCFVHFGDVVKNWFTFNEPQTFSSFSYGTGICAPGRCSPGQKCANPVGNSLTEPYIVGHNLLRAHAETVHQYNKYYRGNKEGHIGMAFDVMGRVPYEKMFLDDQAQERSIDYNLGWFVEPVVRGDYPFSMRSLVKDRLPYFTDEEKEKLVGSYDIMGINYYTSRFSKHVDISTGYTPVLNTDDAYATQETKGPDGNTIGPSMGNSWIYMYPNGLKDILMVMKNKYGNPPIYITENGIGDIDSKEKPLPVKDALNDHARLDYLQRHISVLKDAIDLGADVRGHFTWSLLDNFEWCGGYTERYGIVYVDRSNGCKRRMKRSAKWLKKFNRAAHSKKKDKTGIIPPPSAY

SEQ ID NO: 7635 - protein, 156 aa, Zea mays
  VARIANT 26: note = Ancestral polymorphism is S, Derived polymorphism is F
MIRFILLQNRQGKTRLAKYYVALEDSEKHKVEYEVHRLVVNRDPKFTNFVEFRTHKVIYRRYAGLFFSICVDITDNELAYLECIHLFVEILDHFFSNVCELDLVFNFHKVYLILDEFILAGELQETSKRLLDFSFQNPDFTSTPADRRPSVRAVRF

SEQ ID NO: 7636 - protein, 286 aa, Zea mays
  VARIANT 39: note = Ancestral polymorphism is S, Derived polymorphism is Y
MGAPKQRWTSEEEAALRAGVARHGVGNWRMILNDPELSSTLRYRSNVDLKDKWRNMNVIVTSSSTRDRGRTSTRRTRAAPKNNDQLLAMSTITSEVDDEIVDVKPIVSMSVEGWNTSNSKKSHSRLDNIIMEAIKNLNEPTGSHRTTIANYIEEQYWPPSDFDHLLSAKLKYLATSGKLLKVNRKYRIAPSLLEDVQREPLKLGSDASRTLTRSQVDAELVRMATMTVEAAAAAAAHAVAEAEAIMAEAEAAAREAEAAEAEARAAQAFAEAAVLTLKNRNAAKLV

SEQ ID NO: 7637 - protein, 298 aa, Zea mays
  VARIANT 30: note = Ancestral polymorphism is L, Derived polymorphism is M
  VARIANT 98: note = Ancestral polymorphism is G, Derived polymorphism is W
  VARIANT 136: note = Ancestral polymorphism is L, Derived polymorphism is V
MSSPTHARKAIHLASLRARLAQQGKAGVALRLLLAAALAGFLLVFAARTLVTSPVPASPSYSYSSEPQPHPLPLPVAEALVHYATSNATPQQTAEEIGVALRVLQRRAPCNFLVFGLGLDSPMWAALNHGGRTVFLEEDAAWIGSVRGRHPALESHHVAYDTALADADALLGLRAHPACVAQPDLAAAAAASCRLALRGLPPVFAGLDWDLVMVDAPTGWTPRAPGRMGAIYTAGMAARARRPGAGPTHVFVHDVDRPVEDAFSRAFLCEGYLAEQVGRIRHFVIPSHRDKDGTPFCP

SEQ ID NO: 7638 - protein, 266 aa, Zea mays
  VARIANT 4..266: note = Derived polymorphism lacks residues 4 to 266
  VARIANT 112: note = Ancestral polymorphism is P, Derived polymorphism is S
  VARIANT 169: note = Ancestral polymorphism is S, Derived polymorphism is R
  VARIANT 235..266: note = Derived polymorphism lacks residues 235 to 266
MSGSYGENARRKPHTPSAIVIGGGFAGLAAADALRNASFQVILLESHDRIGGRVHTDYSFGFPVDLGASWLHGVCEENPLAPIIGRLGLPLYRTSGDDSVPQKDLIRKCRLSLLPSGSRISQGLTMEKSTVVVSIPVVVMAETAEIDYSSSFSVFTMEAYDLLGDDVCSAQMYSEAKLASVAATVSRRVEKVERDYLSHDKPRTVLLGEACNNLDGEFCDASYQAGISRELAHTWSLILITIHVFPELSWSHSQIDVHTMYLCVSF

SEQ ID NO: 7639 - protein, 1284 aa, Zea mays
  VARIANT 1176..1284: note = Derived polymorphism lacks residues 1176 to 1284
MAAAATIMFAGKLAGSSVANATISFWINKAFTCLTDYWKADGLEDVKGRVLQSVKKVQVVFDIVDPEYIKEQSSALDLWLWQFRDAVEEAEDVIDELHYDELREKAKDHKVSDWGSSSAKLKHKFVKSVKHAGVMGKTVKEFTHRGTLKRLRKVLEGLEKAATEIVAILTVTQHLKDIGSGSKRQVNFVIKDHDTGSTLTEPYFVGREEEKQKIVQWLIEAPVEASEIVRSTHHVPILSLVGHGGMGKTTLAQYVCEEAEVVNDFKVIWVHVSTRFSATSVTSKLLESVTGVKPCADHLETLQQMLKQELRSVKFFLILDDVWEDENKKEWENVFAPLRKAKSGSKILVTTRMQSVADMAANAMGVEREYLELEGLQEDENLKLFNHHVYSGRNPQDFENLKPIGEHLVKQLGGCPLVTKVVSGYLQCNMDPDSWTDFLQEGLVHFNGSEDYVMETLRLSYYCLPAQVQICFRYCSIFPQNYEFKKKDLVLMWMGSGLISQHGNKPRRIENIGYQILAELTRKSFFEMKFKVLQYSQRREEYYVMHDLMHELAQYVSAGECSTLIDPVMLENESENIRHLRIACVDKFSAEEVKKITRFKNLRTAIIDGPGLIDNDMAVMVENVIQKSKSLRLLRSNLENTFHLPKLADLKHLRYVYLHRISLEGMRGLVKLHHLQLVDCLNDCGEELRQVMCLGNIDHLRYVNYGSRRIGEFPIGRLTSLQELHNYRVQGGEGNKISDIKNLGALRELDVFSIENVESLEEADNAKLKEKPYLNSLSLMWSARADAKNGKDDLILDHLEPHAHIRNLNISGYCGARPPIWIENLHVKNLVSLELARCMYWEQLPSLGELECLKKLLLECLPSLQQIGQPSQLSNISCIGSYLPPHLDTLIIRHCKELKQIPILPPCLVHLEICRVGLTEFPSIGNIHGESIESRPSKMQFVSVEECESLTLPKGSPLLQIHYIRTIHVLHISDCKELESAPLFDEMRNLRELSIINCPKLRASSETEGKNLSPSLKNLIIKQCGDLVHFLIKSLHGLVNLSELVLENCPGLLSLPSADVFKSLKSLKFLEVIGCENLSSFGGLSSLCSLVTLKISSCSKLAAPPVLGGAASGPANYDDDVIEEENMVLPVNSLQIDYLEVDLPCVLNIEPLSRLCHTKGLVIGGGTQMVSLPEQWLLQNHKELQSLKVLCASSLESLPPSMRALRALNFFLLSGAGKLTSLPDMPSSLQWLHVIGCCPELVTQIRVKDNPEWRKISTVPKVHIAAAKTVHSSPHTFHGIYAPL

SEQ ID NO: 7640 - protein, 439 aa, Zea mays
  VARIANT 9: note = Ancestral polymorphism is T, Derived polymorphism is M
  VARIANT 38: note = Ancestral polymorphism is A, Derived polymorphism is V
  VARIANT 62: note = Ancestral polymorphism is L, Derived polymorphism is I
  VARIANT 73: note = Ancestral polymorphism is I, Derived polymorphism is N
  VARIANT 278: note = Ancestral polymorphism is P, Derived polymorphism is L
  VARIANT 295: note = Ancestral polymorphism is P, Derived polymorphism is L
MSASSVVPTLLPDERPDILSLLDAAARPLADVVADFLARFPRERRLRVCGALCFLLEDKMMLHPTGRLIAFAILHQSYSPQTANPYIPILLNAACDETSEKSERAFVQLLLTSSSGNSNNEVLNQSALDYINGSVSASQVFLPREQLEKQYCSTGVHSSPQTSSFTAPAVRSAIPDPDVRQSCANSSESSISPPGSKQKSASDDRDTTISVLLEDIPGGRLGPQWIRPTPPRLPLFDGELQWLNPDNNHELLWDYSMCADTNRGAAIRDLIARALKGPLAPIQQEQVVVELAKDPKLVYYCGMTPQKLPDLVEHNPLIAVEVLSKLIHSPDISGYFDVLVHMEMSLHSMEVVNRLTTAVDLPTEFVHEYITNCIQSCQNIKDKYMQNRLVRLVCVFLQSLIRNKIINVQDLFIEVQAFCIEFSRIREAAGLFRLLKSLE

SEQ ID NO: 7641 - protein, 163 aa, Zea mays
  VARIANT 20: note = Ancestral polymorphism is A, Derived polymorphism is P
MASSYYSLMLLLLLAATAVAEEAAAEASGGGGNATETSPTAYEMLERYGFPRGILPAGVTGYELGADGAFEVYFPRACEFLLARTWLVRYEARVSGSVAAGSLTALRGISVKVLFLWLGVGEVDRAGETLSFYIGPVATSFPIDDFAESPRCRGYDAEAAASS

SEQ ID NO: 7642 - protein, 368 aa, Zea mays
  VARIANT 94..368: note = Derived polymorphism lacks residues 94 to 368
  VARIANT 130..368: note = Derived polymorphism lacks residues 130 to 368
  VARIANT 134: note = Ancestral polymorphism is W, Derived polymorphism is C
  VARIANT 147: note = Ancestral polymorphism is Y, Derived polymorphism is H
MERLGVGVGVGELPPGFRFHPTDEELITYYLLCKAVDGGFCGGRAIAEIDLNKCEPWELPDKAKMGEKEWYFYCLRDRKYPTGLRTNRATAAGYWKATGKDREVRSGRSGALVGMKKTLVFYRGRAPRGQKTRWVMHEYRLDGTYAYHFLPGSTRDEWVIARVFQKPGEVPCGRKHRLGGPSAAAGESCFSDSTTSASIGGGGGGGASASSRPLLTVTDTSSPSLFVANANAAASNNNGNPVTGRELVPCFSTTASPLEAAALGVVGHPYNAAPLRLGLDFEAPSPGFVVPNLRSLQVQDDGGLPLFLSAAAGGGMSSATLGIMGSLGGSLHCPPHAGMDVVKVEGRAAPPQMAVGPGLLDGAFAWGF

SEQ ID NO: 7643 - protein, 158 aa, Zea mays
  VARIANT 30: note = Ancestral polymorphism is G, Derived polymorphism is R
  VARIANT 118: note = Ancestral polymorphism is T, Derived polymorphism is R
  VARIANT 121: note = Ancestral polymorphism is H, Derived polymorphism is Y
  VARIANT 126: note = Ancestral polymorphism is R, Derived polymorphism is Q
  VARIANT 130: note = Ancestral polymorphism is G, Derived polymorphism is R
MEEFAFPSFPLEQCNADFSASASPWLLVPGGVVGTAAVHEHDHRRSVSAVEQQAAGGDQQQLGGRHGSARFAVEDKMDMLWEDFNEELARAAQPCPLTRGTPSWAAAREPWLDGALETRKHAVVRRRRMGLLMMLRLLKKLFLAHKSGAAPSRKAPPI

SEQ ID NO: 7644 - protein, 123 aa, Zea mays
  VARIANT 46: note = Ancestral polymorphism is G, Derived polymorphism is V
  VARIANT 10: note = Ancestral polymorphism is R, Derived polymorphism is C
  VARIANT 5: note = Ancestral polymorphism is V, Derived polymorphism is G
MLRFVSKALRELARSHGTGRSKNTQPTAHAVLEVVRAPAAAAGGRGKRGDGAAEQGAVQEGGVRHPGLPLQEHVRLQEVRTPLFPKPEECVRVIQLLQSCCEQCEYKSTHCGSLSGLLKNISK

SEQ ID NO: 7645 - protein, 117 aa, Zea mays
  VARIANT 11: note = Ancestral polymorphism is G, Derived polymorphism is R
MAATGRAEEAGRMSSSIEWEPKTLTVDQIKFAREAALYVVSTKTEEEAIRIFTEGIKPVRTAVRKSTSTDSSSDDDVELGCCSSSTKRCCGAAGAHARRRRRSTDDDDRDDVATAPF

SEQ ID NO: 7646 - protein, 1353 aa, Zea mays
  VARIANT 1: note = Ancestral polymorphism is M, Derived polymorphism is I
  VARIANT 578: note = Ancestral polymorphism is R, Derived polymorphism is G
MAGPTPTCSAIVSHTAAFLAELVADPLLRRHLLSAAAAAGGGQQHPAATLQALSLVSDALDTAASCSPSPSSLRAAERLLRSLPAATPLSCLLLALARAARRGAGAAAAVLDLFALDPALARHELAPAAFEALFAPRLLPVMRHFAARRAAAAARTKGEEGGSDEATPMRVLSLMSGAQAQEMRALEREYDKVLDANCRAYALYLKRILEAGEPSSPAVSSPLPQPLPPPELVFGVEDDDDSRGDEDTAPENDESAASSQSELRDNPMWAETEEQPGDLYPRRQGSVKGRRDLLRPPSLYPQRVPPHLIVQQQQALPEKIAASPLSSKQPRPRADAGQLSPEPASFPVRCDAAAVDPLQPLPTPKDFVCPITSQVFDDPVTLETGQTYERRAIQEWLDRGNATCPITRQRLHGAQLPKTNYVLKRLIGAWRDQRRTPSPSSSPSPSPPPATPPPAPATAMAGDSPAPPFPLPVKAAAASSPSPDANTSASAPSPTSVIAQASLESAVAELRAAVSCLCTSEDLAQSERSVLKIERLWRDATAGGADAEPAILAALARPAVLNGFVEILFNSVSAQVLRVAVFLLAELASRDDAVVQTLTRVDSDVDCLAALFKKGLAEAAVLICLLSPAPEQLVEMDLAEALVATIRRGGGDEDPLKMCVSPKAASVILLSQILVEDAAAAADDDSSSTPPVPRSALMSERFIRSLAASLEAEPVEERLAAMRILLRCIWEDGHCRRSIAEKASLGAVLDAFHAVGDADKIDIVRFLYELLKLKKRSAAERLLRTIKEGGSFSMMHTLLVYLQSAPPEHSPVVAGLLLQLDLLVEPRKISMYREEALDCLIQCLKNADFPRCQLLAAETIMCLPGRFSSSGRPLARSTLLKLARVKERYRQSQDLSAARADGEDEMEEGKAASEWERKAAYAVVSHEFGLVFEALSECLRTKNAELFTTSLVCAAWLVHMLSLLPDTGVLGAARVCLLRQFVVVLRSAKHGSDRVLAMVALRSFMNDRGRFFFLLLLLLLLHVSELNLGMCKFVEGMHDITTYIKDVLRTLRELKKSSGLAFEMLKLLSDGQESSVDMWSHKEINQEHSKAITSLSVLHSESEEKLYSGSLDRSIRAWQLRDGVLRCVEVHDTRDPVQSLAVASAVACFVPQGAGVKVLSWGSGSSRVVNANKYVRSMALVHGKLFCGCSDGSVQEIDLASGTLGVIQPGSKRILGKASPVYALQAHGGLLYTGGTPSSSSAASADGGGGAAVKVWSCANYGLVGSMATAAEARSLVVSADLVYVASRAAAVEIWSREKLARIGTLQAGGRVQCMAVDADGDVLVVGTSDGKIQVRPVQRIYYFLHCIELGTE

SEQ ID NO: 7647 - protein, 187 aa, Zea mays
  VARIANT 30: note = Ancestral polymorphism is A, Derived polymorphism is T
  VARIANT 31..187: note = Derived polymorphism lacks residues 31 to 187
  VARIANT 47..187: note = Derived polymorphism lacks residues 47 to 187
MGEVAPLIPATWRRTMSRKAAGAVEADRPAEDVSEEKTLKITIALNQEAEVVAIASKEEKGLQDEPKGQVTVEGGADIATATEQQLLLCYNLHLRHIRIKVNTWVSKRADAIQRNYGGSCVQLRLSFSSLAPLFLYFIQWLDCGCCYALPSYLGLFHILICKVYANGDSSVSTYERRASLREFYGSL

SEQ ID NO: 7648 - protein, 190 aa, Zea mays
  VARIANT 10: note = Ancestral polymorphism is D, Derived polymorphism is N
  VARIANT 46: note = Ancestral polymorphism is A, Derived polymorphism is V
  VARIANT 56..190: note = Derived polymorphism lacks residues 56 to 190
  VARIANT 64: note = Ancestral polymorphism is G, Derived polymorphism is R
  VARIANT 66: note = Ancestral polymorphism is R, Derived polymorphism is W
  VARIANT 84..190: note = Derived polymorphism lacks residues 84 to 190
  VARIANT 85: note = Ancestral polymorphism is I, Derived polymorphism is T
  VARIANT 90..190: note = Derived polymorphism lacks residues 90 to 190
  VARIANT 103: note = Ancestral polymorphism is R, Derived polymorphism is W
  VARIANT 108: note = Ancestral polymorphism is G, Derived polymorphism is A
  VARIANT 110: note = Ancestral polymorphism is P, Derived polymorphism is S
MESSRLTYPDRFYAAAAYAPHKDEAIVGSPSPSLLWDEPFPSSMTVTAAAAGGMGQLRLMCSFGGRIIPCSTGKSLCYLCGEIQTMAVDQHASRADIHACLSRLLLGGRPIMLKYQLPTRNFTPLSQSLRTRTMTTSSTRKMVLAVFGDLIILWMTKSMMDDIHGWGVLFDDRVGDGTVTVADVVFKEFG

SEQ ID NO: 7649 - protein, 264 aa, Zea mays
  VARIANT 178: note = Ancestral polymorphism is Q, Derived polymorphism is L
  VARIANT 211: note = Ancestral polymorphism is A, Derived polymorphism is D
MAASMAASAAQKGALTDQRFSELSPTLSPEVVEALDRGGFQRCTPMQAAAIPHLLSHKNVIVDGATSSGKTLAFIVPIVEILHHRSSPPKSHEVLALIISPKRELSSHIFNLAQPFFATLNGVSSMFLVGGLDIKAELKRVEEEGANILVGTPRKLFDIMHIDALDCSLQNHNLVLVQYMICEASKKSSQLVDFLVQNSGKKIMVYFATCACVDYWAVVLPLINSLKGSPIIAYHGKMKQVGRAKHFFHAFPVQKYETHFDCLE

SEQ ID NO: 7650 - protein, 531 aa, Zea mays
  VARIANT 408: note = Ancestral polymorphism is D, Derived polymorphism is G
  VARIANT 466: note = Ancestral polymorphism is G, Derived polymorphism is S
  VARIANT 475: note = Ancestral polymorphism is L, Derived polymorphism is P
MPTTTSASTTGAAQRRRRRCKGTPPRQPWCCSLGLDPSTVAATATAAGRSPLPAPPHQVAPPLSRRIRSPGRVSPIDDPTLPASVGSSVPVRLSSVTECPPPALLGPPPGAVEKPREILNLRLVDKGVILEVNELERVRGESEVVRKVVGELGGELTVEGMVEVEAFREAVDMMLEDGDEAAEMRRLARGGVARAIDVLEVSSPLLYLRCYFLLICAQILLFVSLSLVFDRGVKSCVRYLDAVPWSESEEETIKRLMSQHPSYNAALRNLLAARLQPAERPASSAEAELVVELADSITKGTNNNARKELRNLVNGILSKSSVYVKQGDKELDRRSIYRICHSCLNSLARLLGGESPGPDQTSLPSVGRGGVPPPETESIYRLVEDINWLLQILIDRQMGEEFVELWADQTSLSGVHGRASPMVRHELSRISATVFIAMGSGRLQCAGARRFGVFQAWFRPMLADFSWLRRYPKGLNVTALEEGIGQALLTLTLEQQQALFLEWFGAFGSHGRECPDLMRAFQVWWRRSFVR

SEQ ID NO: 7651 - protein, 409 aa, Zea mays
  VARIANT 29: note = Ancestral polymorphism is S, Derived polymorphism is L
  VARIANT 177: note = Ancestral polymorphism is I, Derived polymorphism is T
  VARIANT 193: note = Ancestral polymorphism is G, Derived polymorphism is D
  VARIANT 209: note = Ancestral polymorphism is S, Derived polymorphism is F
  VARIANT 210: note = Ancestral polymorphism is G, Derived polymorphism is W
  VARIANT 221: note = Ancestral polymorphism is R, Derived polymorphism is C
  VARIANT 223: note = Ancestral polymorphism is G, Derived polymorphism is D
  VARIANT 225: note = Ancestral polymorphism is S, Derived polymorphism is N
MRSILLKRLHVWSSTPGSRADSPLLKTHSMASATGVSSSEMAVDHATGPGAVEKPRFDALTPNEMSGGRPQFRKVPMPQHRFAPLKRCWMEIYKPVYEHMKIDIRMNLKAILLKNFSSSQTLPIQISPLLHGAPNNQPLIMEFSVLEFDDLGISPISNLSMLDYNDYHRTIDCILQIAVKKLNPESVQGLQSGRITWRTSTLSVTIECSGLFSTPVLTTVRIGASFTIPWFYYIDHLGWAGGVEIGIVSTVISSSKDWSRSAETCFKKKCLFLFDYFDSRTVILVRLLRFWDYQNTDRGYTVYFDSRTAKCLYCLKAVFILVYYLLDVSVCLIMQVDYSAYVHNSSSLHMTASFFSLLDSFHFCPLGYKDFPDLGNTTSSLLSTCCHVVLELWYNWSWVKATWSLEVES

SEQ ID NO: 7652 - protein, 1149 aa, Zea mays
  VARIANT 1098..1149: note = Derived polymorphism lacks residues 1098 to 1149
  VARIANT 1078..1149: note = Derived polymorphism lacks residues 1078 to 1149
MEVPTYTSEVVHPTADVSEPDSSSDNACDWVIPEYTSTPFMPASTQTEDVSSPDMSTEPLRRKHHVLRGERQAILSRQNKKFEANIARNVATLTEDTISDIRKMDDSTQPGSTIEINNTVDDDDEGVIFGEDNDENEGYLFADEDTNEDFEIDGTQDQSIATNVPDPYDKVYSNIPEETHMLKHVPNCGYCTAKKFEYESPRFCCRGGKVELAPLETPPQLRRLWDSADSDARHFRDNIRFFNGHFSFTSLYCCLDSMTTNMRDSGIYTFCAQGMMYHNIKSFGSECGAEHKLLELYFYDDDPSLEHRYQVNLDGMQISQRLVYPWTKWMHTGRRIGQVMQMMKMWICPGVFNPILHGKRLFQQFAVDTYIKIESSRLDFICKNQDQLRADLYQGLVDIMLDGDVRAEKVGKRTVLSALFIGGPRDMRRRYMDDMALVQKFGKPDIFLTMTCNPNWDEIRRELLPDRHRKIVGSCSDILGKVRAYVYVVEFQKRGFPHAHFLLIMQRKYKLTCPEQYDLLISAEIPSNKYPELRKMVIKHMMHGPCGSLNPNCPCTKGHASCKNQYPWHFREATLQGKDSYPNYKRHDDGRKEKVQGCELDNRWVVPYNPYLLQLFNYHINVEACGRIKAVKYLFKYIYKGHDRASVVMRDASKENDDVDEIQQYRDARWVTPSEALWRIYGFELSQNSPSLMQLQLHLPNMHMVTFHERQMVERVVNRPGADRSMITTYFEANKLHKEARCILYRDFPEWCTWQQGKVWQRRKRNTGGQVGRIISALPSEGEHFYLWLLLNHVAGATSYADLRTVDGDTLPLFRESMGKDIKTFPLPAIIDRYDDSQGIDREIYEEESIEATTEDVALQETLNEEQKSAYEKILSVVDTSNGGVFFVDGPGGTGNTYLYKALLAVLRSQDKIAVAIATSRVAASIMPGGRTAHSRFKIPLTIDDGAICTFTKQSGTSKLLQKASLIIWDEASMAKRQSIEALHNSMCDIMGRLLVRNMRAKSDPWFAEYLLCVGGGTEEVNNDGDVRLLDEHAGMRVFLPRIPLCPSDDEMFPFHFKRKQFPVRLSFAMTVNKSQGQTIPNVVVYLPEPVFSHGQVYVALSRATTRFNVKILVIPVTDEKMKKGMQKKSTINGVTYTKNIVYKEVLTP

SEQ ID NO: 7653 - protein, 88 aa, Zea mays
  VARIANT 1: note = Ancestral polymorphism is M, Derived polymorphism is I
  VARIANT 20: note = Ancestral polymorphism is T, Derived polymorphism is K
  VARIANT 22..88: note = Derived polymorphism lacks residues 22 to 88
  VARIANT 24: note = Ancestral polymorphism is R, Derived polymorphism is C
  VARIANT 37: note = Ancestral polymorphism is D, Derived polymorphism is Y
  VARIANT 38: note = Ancestral polymorphism is V, Derived polymorphism is F
  VARIANT 43: note = Ancestral polymorphism is V, Derived polymorphism is F
  VARIANT 69: note = Ancestral polymorphism is R, Derived polymorphism is L
MYPIVSKESLLQEMFFSAKTTSGRLHLAKELLKLPTDVLKSFVGSKEGLSTLYSWILDSLGKNATQLLLHCVRLLVLVSTDLVAVRLS

SEQ ID NO: 7654 - protein, 88 aa, Zea mays
  VARIANT 17: note = Ancestral polymorphism is S, Derived polymorphism is N
  VARIANT 21: note = Ancestral polymorphism is T, Derived polymorphism is I
  VARIANT 38: note = Ancestral polymorphism is V, Derived polymorphism is F
  VARIANT 44: note = Ancestral polymorphism is G, Derived polymorphism is R
  VARIANT 51: note = Ancestral polymorphism is T, Derived polymorphism is M
  VARIANT 62: note = Ancestral polymorphism is K, Derived polymorphism is E
  VARIANT 64: note = Ancestral polymorphism is A, Derived polymorphism is D
  VARIANT 71: note = Ancestral polymorphism is C, Derived polymorphism is Y
  VARIANT 73: note = Ancestral polymorphism is R, Derived polymorphism is C
  VARIANT 75: note = Ancestral polymorphism is L, Derived polymorphism is R
  VARIANT 79: note = Ancestral polymorphism is S, Derived polymorphism is F
MYPIVSKESLLQEMFFSAKTTSGRLHLAKELLKLPTDVLKSFAGSKEGLSTLYSWILDSLGKNATQLLWHCVCLLVLVFTDLVAVRLS

SEQ ID NO: 7655 - protein, 269 aa, Zea mays
  VARIANT 189: note = Ancestral polymorphism is N, Derived polymorphism is Y
  VARIANT 195: note = Ancestral polymorphism is H, Derived polymorphism is L
  VARIANT 233: note = Ancestral polymorphism is T, Derived polymorphism is I
MDFVEALATTYAKLGQVMTEAKLKSASAWDTEVTRGERPQGECVPRAASKDNYTSRLAQSFNVFSYGSNIEDVVSAAMEKSWKVVAKKRMASSRLVDLMKLVHEKLAKTEASIKTKASAPAVVEIVSDFLSWRLGETSLVLNTQATKTVPVVGLDISLLDYHVEEPFDFMLSDLLAIDVLESGKIKPHNNIDLFHRARRNINDLVQIVMPVRVWFCDTTASPTYDNGYVNITTQLPGLRTKMPPLIMAIDENLASFMFPGITMILEKIS

SEQ ID NO: 7656 - protein, 128 aa, Zea mays
  VARIANT 41: note = Ancestral polymorphism is G, Derived polymorphism is E
  VARIANT 32: note = Ancestral polymorphism is A, Derived polymorphism is V
  VARIANT 5: note = Ancestral polymorphism is L, Derived polymorphism is M
MVVNLKLREDVLVEKCLGRRICGQCGKNFNLACIDVKGENGLPPIYMAPLLPPNNCMSKLITRADDTEEVVRNRLQIYNDMSQPVEGFYREQGKLLEFDLPGGIPESWPKLLQVLNLEDQEELRLAAA

SEQ ID NO: 7657 - protein, 430 aa, Zea mays
  VARIANT 400: note = Ancestral polymorphism is T, Derived polymorphism is I
  VARIANT 382: note = Ancestral polymorphism is Y, Derived polymorphism is S
MSVWQRIGPQLPPSKFSHSPAAEASLVESNISSHSGTGTEAHIGRMLAADTGTEAHFGGMLAVSTGAEVHTGSMVAVPAMDVLAIQMELTAADMGTGLGTDCSKVGPVGCAVDAPVVQQPQMDGHRGPMWTRLAGSLKSLGSGSPRQRFVGLQRLTKTVSPRNSFNVGIELVPRLPSTQSLVGTSEADRNSPAGMSLDAQVLESPRLKVYSRLKKGRLQIPTSVSSQMEVSAPVLDLVPAGVSSQLEEATPVMKLVANITRDIDCLLPQPPIQKRRTKQLPPDFVPRRSSRLSKKREGLNSTVRQVQAELMLKLNVTNSQVVVTDEMLEEFGQLFDKPLSNSYIKALAALFGWPVPDNVQECLDVPLLRENIVKQSNGFKSYIIVVIRRSITISQSSARTLCGKEPEGAETVGTKPIMAMVNRCHKNNKR

SEQ ID NO: 7658 - protein, 651 aa, Zea mays
  VARIANT 241: note = Ancestral polymorphism is V, Derived polymorphism is I
MLYLQKGPNPSPTTEKKTTLGGLSCKFRGRRSTRASTSAVAAAASMSGSNGNGGGASSALYGLYGPNVKPDVVFKEAALNSTLNLQDVQGLVTWVIGDGMLPSWVFVKNKPLIPKVVLLYVPGLDAALYMSQTRLLSSLKELCGNPKPVLASSCIPDDRHTIDALLTCRVKRKLDVKTSNQSSKPDRDGKLSSLDDLGDIPFPVTYYTLSEKDLEDNGYPFNLPGFVPTVSAPSGSLPHKVLALDCEMCITEAGFELTRVTLIDIKGSVVLDRLVKPANPIIDYNTRFSGITAEMLADVSTSLHEIQEEFVGLVYTETILVGHSLENDLMALQISHGLIIDTAVLYKYNRGSRCKIALRVLTKRFLGREIQNTGSGHDSVEDARAALELAILKIRHGPDFGSQPSLSRRKLTSILHESGKKCSLIDDMSILDRYSDTSCNSIAVFSDDDALSRSMKEVKNDKVAFIWTQFSGLISYFRRRAEDPEKLKSCVAEAIALKTCDTKTASKKAKSQICPELKEILCELDKKIKQLYGALPDNSMLIVCTGHGDTPLVRRHLWINVLMDMASAIIEGGWQKFRLYGIGPCFRFIIWPLLFTLRETVHAGKNIGHCLRKCGKWQYDARAPDPDAASLTNPKYGQAIGFVDPKLSLES

SEQ ID NO: 7659 - protein, 122 aa, Zea mays
  VARIANT 96: note = Ancestral polymorphism is G, Derived polymorphism is R
  VARIANT 27: note = Ancestral polymorphism is T, Derived polymorphism is I
  VARIANT 9: note = Ancestral polymorphism is C, Derived polymorphism is Y
MKKTSSLSCTLSSGTVMPPVSPSALSTSMGLNLPPDIPRHGGTGIGSTAVDSFYWDGTNPSSSSSTGRRGSNIMGFEPQSTSTILENSVFSWIDIGQEKDTRAHLVAELKWPDSFAETTTAM

SEQ ID NO: 7660 - protein, 107 aa, Zea mays
  VARIANT 54: note = Ancestral polymorphism is A, Derived polymorphism is D
  VARIANT 91: note = Ancestral polymorphism is P, Derived polymorphism is S
MAKLLLGLLLALAILGTTSAAGCVQDAEDMKRECKQFELFPANPKLPPSAACCAVWKRADVPCLCKYVNKEVEKVWCMEKVVYVANYCKRPFQPGYKCGSYTVPLSM

SEQ ID NO: 7661 - protein, 489 aa, Zea mays
  VARIANT 270: note = Ancestral polymorphism is G, Derived polymorphism is A
MAKPRGAPKLLYPRHRRLLRSPISRCACLFLAFAALLLVSSLHQVVRVDLLRPDPPHQVSNDQLWASNGYGYHACVTPTSRYKVQGKSDSYMTVRSNGGLNQMRTGICDMVAVARLVNATLVIPQLDKRSFWQDTSTFKDIFDEPHFIKALEGDVHIVSDLPGSLQSAPRARKHFTSWSGASYYEEVKELWKNQKVVHIPKSDSRLANNGLPIDIQRLRCRCLYQALRFSDLIEDLGKKLVERLRSHGKYIALHLRYEKDMLAFTGCTYGLSDLEANELRIMRERTSHWKLKDINSTEQRYEGNCPLTPNEVGIFLRAMGYPESTWIYLAAGEIYGGEKYISKLRSYFPNLVSKDMLATEEELAKFSNHASQVAALDYIIAVESDVFIPSHSGNMAKAVEGHRRFLGHRKTITPDRKGLVELFDLLEKGDLTEGPKLSALVTDMHKYRQGTPRKRYGSLPGSKGRARLRTEESFYENPFPECICLTGRS

SEQ ID NO: 7662 - protein, 217 aa, Zea mays
  VARIANT 188: note = Ancestral polymorphism is P, Derived polymorphism is S
MDPANEQKRSLQQAAAHRPTPRTTREASRGESRRSGKHHPAEMTVLLSPSSSLFLAKPSAVAKGRAAAVTCFSGPSLSVGREDQEGVAVVVGRRALASAAAVASVLGFAGRGLAANQGLLAGRVPGLSEPDENGWRTYRRPDDKSGGHGVGWSPIIPYSFKVPDGWDEVPVSIADLGGTEIDLRFANPKEGRLFVIVAPVRRFAGELRPEQNAQEML

SEQ ID NO: 7663 - protein, 328 aa, Zea mays
  VARIANT 48: note = Ancestral polymorphism is D, Derived polymorphism is E
MEHYERLGKIGEGTSGIVYKARDRRTGETVAIKRLRAGAGNGEGDAFEKTFRREVRCLEACRGHPCIVELRAAHRDPAGAFLVMEYAGQSLPEVMRARAERALPEPDARRVMRRLLEGAAAMHARGLLHRDLKPDNVLLDGRGGVKICDLGLSRAAAAAPGAPHTPGLATLWYRAPEMILGSGDYDAGVDTWALGCIMAELLAGAPLFPGRSEMDQLNRVFDTVGMQDIASWPGFARLPRAGSPLCRRARPPSRLRELFPALSAAGFDVLAGLLACRPDRRLTAADALRYPWFADAAAVPEVLPDQPRASRCAGFAAGVAGAGEAIVA

SEQ ID NO: 7664 - protein, 163 aa, Zea mays
  VARIANT 123: note = Ancestral polymorphism is K, Derived polymorphism is M
  VARIANT 93: note = Ancestral polymorphism is P, Derived polymorphism is A
  VARIANT 71: note = Ancestral polymorphism is A, Derived polymorphism is S
  VARIANT 61: note = Ancestral polymorphism is P, Derived polymorphism is T
  VARIANT 60: note = Ancestral polymorphism is A, Derived polymorphism is G
  VARIANT 51: note = Ancestral polymorphism is R, Derived polymorphism is H
  VARIANT 46: note = Ancestral polymorphism is V, Derived polymorphism is I
  VARIANT 45: note = Ancestral polymorphism is S, Derived polymorphism is T
  VARIANT 32: note = Ancestral polymorphism is Q, Derived polymorphism is L
  VARIANT 23: note = Ancestral polymorphism is V, Derived polymorphism is L
  VARIANT 12: note = Ancestral polymorphism is A, Derived polymorphism is V
MGDGETRLVAAATARKWLEDPRVGYDGGVGSQALSCVAIAGARVSVAERGRVVCSLRVRAPVADAEGRWHAGAIAAAVDCVCSAVAYTVEAAPTATVHYSLSYFSPADRDTEVEVEGRVVGRMGKLTAAVVVVRDKESGELVAVGRQWVTPAWPTKANKTSKL

SEQ ID NO: 7665 - protein, 348 aa, Zea mays
  VARIANT 56..348: note = Derived polymorphism lacks residues 56 to 348
MMANGRFQKQALLPPRSPFPVAAPHAELGPIARPRETPHRHGHQRTSSESFLADEQPSWLDDLLDEPETPARAHGRPGHRRSSSDSFALFEGGSAAGGMYEFDNVLDGMRGGGQVASLAGAPEFFPEPASFGRPWESRQMYRQGGGMPMPGREKNGGRHGPSSSFGEHELGHVPNGVNRKAHGDAAYDQRIVIERKEGLRHSQSETDTKRAKQQYAQRSRVRKLQYIAELERRVQSLQTEGIEVTAEMDFLGQQNIMLDLENKALKQRLESLSQEHLIKRYQQEMFEREIGRLRTLFQQQQQQQHVPQQQAPTHSRSNSRDLDSQFANLSLKHSDPSSGRDAISGLRI

SEQ ID NO: 7666 - protein, 697 aa, Zea mays
  VARIANT 536..697: note = Derived polymorphism lacks residues 536 to 697
  VARIANT 488..697: note = Derived polymorphism lacks residues 488 to 697
MAGSMVDRATSDMLISPDWAKNMEICDICNRDPGQSKDVVKALKKRIGHKNPKVQLLALTLLETVIKNCGDILHMHVAERDILHEMVKIVKKKSDPRVKEKVLVLIDTWQEAFGGPRARYPQYYAAYHELVRAGAEFPKRPEKPAPLFNGQSQAARNMRSPDQQDAAESSTANDFPALSMSEIQNARGIMDVLAEMLNALGPGNREGLRQEVIVELVDQCRTYKQRVVQLVNSTTDEELMSQGLALNDDLQSVLAKHDAIAAGIAVRVEKKPKSLQSLVETEDSANQDSKKEQGLIDIEDPTSQDAAKEPNQSTSDQSPFEQLALPAPPVSNGAATKSDLGIDLLSWDDTPATAQNPLALVPVTDPLADSTSSNQNALAIVDTFSQNSTVNSNTQAADPFGLNPSSAIPGSQAYNTPTQQHFQSQQATLYPNGGAGTSYDQASQFNNVNSGWNDQAANLPAEQALNYGMARIVISDLLLYLSGILLNYYFINDQSGNLPPPPWEAQPAASNEMPNGELGGVQPLPGTAGQFGGMQQALQPQVNHMGVPQRQPMYSNQSGIGVAPTLMQAGLGNQQLGSTSMMGMPPQMYGGGSQAAMMYPQQMPVAPQQPMYGGGGGRLAGYMQHPAVAAAHYYSNLGTAGMYGYPGANGLSQSMYGLSVQDNSSYQTKTAPPSAVMKPEDKLFGDLLSIAKTKKAS

SEQ ID NO: 7667 - protein, 94 aa, Zea mays
  VARIANT 88: note = Ancestral polymorphism is C, Derived polymorphism is Y
  VARIANT 50: note = Ancestral polymorphism is A, Derived polymorphism is T
  VARIANT 39: note = Ancestral polymorphism is P, Derived polymorphism is S
  VARIANT 27: note = Ancestral polymorphism is A, Derived polymorphism is T
  VARIANT 26: note = Ancestral polymorphism is P, Derived polymorphism is S
  VARIANT 25: note = Ancestral polymorphism is T, Derived polymorphism is A
  VARIANT 24: note = Ancestral polymorphism is P, Derived polymorphism is L
  VARIANT 22: note = Ancestral polymorphism is P, Derived polymorphism is S
  VARIANT 20: note = Ancestral polymorphism is R, Derived polymorphism is W
  VARIANT 19: note = Ancestral polymorphism is P, Derived polymorphism is S
  VARIANT 17: note = Ancestral polymorphism is V, Derived polymorphism is M
MATPTPMPGSEGTLVAVMPWSPSPTPAEAGTSATETPVSIFLYFHKAIRAELEALHGAAVLLATERTGDVAALAECCRFFFSIYKHHCDAEDAV

SEQ ID NO: 7668 - protein, 289 aa, Zea mays
  VARIANT 80..289: note = Derived polymorphism lacks residues 80 to 289
MGVGVAIPLRRRLCPPLWARMATPPRLSLAACERPPRVFSTWRHLSPGTLASSAGCLASVFGPQPVEEERMDLVSRWLFQESLSFGDLPSLFYFVYALFSIFCLVLLVVCVVIFSLKIGKRLLHDRRVDGTTYKAVLEDGTTVVVKRLKEVVAGKREFEQQMELIGKVPLCCFACYFTCFANLLSESLTRHIIHISVEMKLYGIAGCLEEDDGGLFPPPPAIEEGKSVADKGLPRNCGGREGGGAIRAATTPHHLGEAINVRYNLVFGSPDVIAVECKKSHASWIVLDK

SEQ ID NO: 7669 - protein, 335 aa, Zea mays
  VARIANT 10..335: note = Derived polymorphism lacks residues 10 to 335
  VARIANT 143..335: note = Derived polymorphism lacks residues 143 to 335
  VARIANT 306..335: note = Derived polymorphism lacks residues 306 to 335
MSDDRRTVAYDAEAGDGHERQAGTVWTATSHIVAVVAGSGVLALPWTVAQLGWVLGPLVLVGFSCVTYYTSALLADCYRYPDPVHGAVVNRQYVDAVRCYLVREPMGHSRRLHHHRQRQHDAMKRASFYGLGAATAFYLALGCAGYAAFGDDAPGNVLTGFAFHEPSWLVDAANACVVVHLVGAYQVFAQPIFARLESCAACRWPDAKLVNATYYVRVPPFLLRSASSPPTVAVAPLKLVLRTIVIMFTTLVAMLLPFFNAVLGLIGALGFWPLSVYFPVSMHMARLNIRRGELRWWALQAMSFVCLLVSIGASIGSVQDIVHNLKAAVPFKTVN

SEQ ID NO: 7670 - protein, 137 aa, Zea mays
  VARIANT 86..137: note = Derived polymorphism lacks residues 86 to 137
  VARIANT 52: note = Ancestral polymorphism is R, Derived polymorphism is W
  VARIANT 49: note = Ancestral polymorphism is R, Derived polymorphism is Q
  VARIANT 47..137: note = Derived polymorphism lacks residues 47 to 137
MNENKIKLYAAYVGSAFLLLHLCCAVACLTKRGLAVSLARQGDELRWRRKLWHLHRRGTSSPPQSTAPNIIDGKELLNERTSTENRYLKKKPDSWRLACQTIVGNKENSGKASFVLFPTHPAINTSLPYALKNKVVQ

SEQ ID NO: 7671 - protein, 125 aa, Zea mays
  VARIANT 120: note = Ancestral polymorphism is W, Derived polymorphism is C
  VARIANT 63: note = Ancestral polymorphism is K, Derived polymorphism is N
  VARIANT 45: note = Ancestral polymorphism is G, Derived polymorphism is R
  VARIANT 36: note = Ancestral polymorphism is R, Derived polymorphism is C
  VARIANT 33: note = Ancestral polymorphism is N, Derived polymorphism is D
  VARIANT 29: note = Ancestral polymorphism is K, Derived polymorphism is N
  VARIANT 22: note = Ancestral polymorphism is G, Derived polymorphism is D
MRSTSHMQRTVLCGPHAGIFNGVFLKVNKATINMLRRVEPYVAYGYPNLKSVRELIYKRGYGKLNKQRIPLSNNQVIEEVCKLGTVHLGLGKHNIICVEDLVHEIMTVGPHFKEANNFLCRAVMP

SEQ ID NO: 7672 - protein, 513 aa, Zea mays
  VARIANT 87..513: note = Derived polymorphism lacks residues 87 to 513
  VARIANT 215..513: note = Derived polymorphism lacks residues 215 to 513
  VARIANT 392: note = Ancestral polymorphism is R, Derived polymorphism is L
MRRQSSLARSCSSVAPASPPPQNGGVNSKHLVPPMEVSAEAGNAGAAEWLDDDGRPRRKGTFWTASAHIITAVIGSGVLSLAWAIAQLGWVAGPTAMLLFAFVTYYTATLLAECYRTGDPDTGKRNYTYMDAVRSNLGGAKVAFCGVIQYANLVGVAIGYTIASSISMKAIRRAGCFHTHGHGDPCKSSSTPYMILFGAAQVVFSQIPDFDQIWWLSIVAAVMSFTYSSIGLSLGIVQTVYARACSESIERIVAANGGFKGSLTSIGFGAGVNSTQKVWHTLQAFGDIAFAYSFSNILIEIQDTIKAPPPSESKVMQKATRLSVATTTVFYMLCGCMGYAAFGDDAPDNLLTGFGFYEPFWLLDVANVAIVVHLVGAYQVFCQPIFAFVERRAAAAWPDSAFVSRELRAGPFALSPFRLAWRSAFVCVTTVVAMLLPFFGDVAGLLGAVSFWPLTVYFPVEMYIKQRRVPRGSARWISLQTLSVTCLLVSIAAAAGSIADVVDALKVYRPFSG

SEQ ID NO: 7673 - protein, 131 aa, Zea mays
  VARIANT 76: note = Ancestral polymorphism is T, Derived polymorphism is I
  VARIANT 59: note = Ancestral polymorphism is A, Derived polymorphism is V
  VARIANT 44: note = Ancestral polymorphism is G, Derived polymorphism is R
  VARIANT 43: note = Ancestral polymorphism is S, Derived polymorphism is F
  VARIANT 37: note = Ancestral polymorphism is I, Derived polymorphism is V
  VARIANT 30..131: note = Ancestral polymorphism lacks residues 30 to 131
MEVSVEAGNADTADEWLDEDDRPRCMGTFQMTSAHIVTAVIDSRVLSLAWAIAPLGRVVGPATILLFALITYDTATLLAECYLTGDPGTGKRNYTYMDAVRANLGGTKVAFCDAIQYDKTNLVGVAIGPTA

SEQ ID NO: 7674 - protein, 849 aa, Zea mays
  VARIANT 624..849: note = Ancestral polymorphism lacks residues 624 to 849
MDRRWPGAGNYSDDDCCRWTGVRCRRFGAGAYHRQQQLRVVSLDLAGMGLAGPVAPRTLDRLDMLCVLNLSRNSLHGAVPPELLHMPRLRVLDLSQNSLSGELSGRPSSRGTSGITHLDVSFNSLTSLRDDVFQWLPLLRNFSAESNRLTGVLPGSLLSSCPELEHLNVANNSLHGALGPTTDFSRLTRLRALHLGWNRFRGRLPASLSRCRELRVVNLRRNRLTGPVPSSFRRLRALSFFDAGDNSLAGVARALRAFQECRHLAVLILTTNFQLGEEMPGAAAGIRGFPSLRLLGLANCALRGAVPPWLRASARLNVLDLSWNRLAGQIPPWLGGFEAVYRIDLSHNALTGEIPLSLARLKSLASGDASARVQLSMSDYGAVRLYNWHVERGQLWYDSYIPPSLDLSRNRLAGAIPPELGDLVALSLLNLSGNTLSGPIPAVLASLSDLQTLDLSYNQLAGEIPASLTGLTFLSCFDVSHNRLRGFIPETDQFSTFPCSSFAGNADLHGGYCGGNAAVDEGMPGRHDGPFLTAAIEFFGMPFALGMIFGLCAVMLFHVLVPKKPGSRYFKQFFPCIPRCKHTRNQATKHAFRDVGLTYDGRSRGSGIVIATASGTGLSNIGKENVRSPFDGACASTSEARNCGQTSGNMSGRSTKQSSLRSLYSSPCSSKAPLAIDLAHSIAPSHPRVDIMLCGDYKLKLWKALSKWFYTNDIPSRKVDYPYFLAAMKLSQQLGKVPLQKGKDIDGPLLSMNYNDLEDHVESFKEDWGRYGVTTMCDSWMRPAMMCIINFMVFCNGCMFFHKSMNATEEVQNVDIFYCIREVMVDEVGAKFVTHIMTNNGSNCKKACK

SEQ ID NO: 7675 - protein, 560 aa, Zea mays
  VARIANT 73: note = Ancestral polymorphism is S, Derived polymorphism is F
  VARIANT 314: note = Ancestral polymorphism is N, Derived polymorphism is I
MAAAHYDREDGLPPSAPPHAAADAYDPNYVPDSVKTFVVHLYRHIRDKNVYEIHQMYEGGFQRLSDRLFRDVFWPSAEAVSPYCDGDHVFLLLYRELWYRHAHARLSPLTAAHRAESWTNYCDLFSVVLHGVVNMQLPNQWLWDMVDEFVYQFQSFCQYRAKLKTKTEDELNQLKQFDKAWNVYGVLNYLQALVEKSMITQILEKEKEGLEQFTATDGYDYEGGSNVLKVLGYYSMIGLLRIHCLLGDYHTGLKCLTPIDLNQQGVYTIVIGSHISAIYHYGFANLMMRRYVEATREFNKILLYILKYKQYHQNSPQYDQILKKNEQMYALLAICLSLCPQNKLIDENVSTQLKEKYNDKMTKMQRYDDEAYAAYDELFSYACPKFITPSPPILDQPLTNYNQTVIFLARLIVQEALPILALPGKPNLLQQDLKVLWLLQQDAYRLQLKLFLYEVKQQQLLSGIRSYLKLYSTITISKLAQYMEVDEATLRSILMTYKHKMHAVDSEGKIVSSADFDFYIVEDVIHVVESKPTKRHGDYFLRQILKFEEMIGELEKVQLD

SEQ ID NO: 7676 - protein, 773 aa, Zea mays
  VARIANT 530..773: note = Derived polymorphism lacks residues 530 to 773
  VARIANT 455..773: note = Derived polymorphism lacks residues 455 to 773
  VARIANT 425..773: note = Derived polymorphism lacks residues 425 to 773
  VARIANT 415..773: note = Derived polymorphism lacks residues 415 to 773
MPRKASSNSDARAKSRKRKRAAASASPSKQPDDHSDDSDTAAAANGDDETSRAASVNGGGGTLAGVGGDDDPVLDLRAAEVLSSSAEPVSAFPAAVRRAVSRPHPSVLAVIAAERAAASSDDAPVTPASVPVLENISHGQLQVISAMLPDHPSLSYDPDKPSTYVCTPPPLMEGCGVHKQFYDKLHIVPRHSDWFVPQTVHRLERQVVPQYFSGKSQGQTPEKYIMLRNKVIAKYLERPGKRLVFAECQGLVTSTPELYDLSRIVRFLESWGIINYLATGSVYRGPRTASSLIKEETTGELQLVSAPMKSIDGLILFDRPKCSIQANDISSLVSTSSAPFVVNHDGDSANLDEKIWERLSESSCSFCSQPLPSMHYESQKETDIALCSDCFHNAKFVTGHSSLDFQRVDAMKDGSDTDGDRWTDQETLLLLEGIEKFNDNWNHIAGHVGTKSKAQCIHHFIRLPVADGLLENIEVPEASLPSGMQSSGFLHSDSNGSTSGSQPGNQIPFINSANPVMSLVAFLAAEVGPRVAASCASAALSVLTREDSRMNAEGIDAMGHGTHLNYGPSSSISSETVKNAASCGLSAAATKSKLFADQEEREIQRLSATIINHQLKRLELKLKQFAEVETMLLKESERLDLMRQQLVTQRIRMLSTRFTSTGGTIPGGSSGMVSNLMNQASGLRPPLMMPGSVTQSSMPAMYANNMQGHPQMALLQQRQQMLSFGPRLPLSAINPGSSSSAPNMMFNHGMPNSAAPNHHPLLRSPSGDNSNVG

SEQ ID NO: 7677 - protein, 425 aa, Zea mays
  VARIANT 8: note = Ancestral polymorphism is E, Derived polymorphism is D
  VARIANT 11: note = Ancestral polymorphism is A, Derived polymorphism is V
  VARIANT 20: note = Ancestral polymorphism is W, Derived polymorphism is C
  VARIANT 37..425: note = Derived polymorphism lacks residues 37 to 425
  VARIANT 86..425: note = Derived polymorphism lacks residues 86 to 425
  VARIANT 352..425: note = Derived polymorphism lacks residues 352 to 425
METGPEQEASAEVDPLVEWWLLFRLRSRRSETSPRLQVFEREFTQDQVIMKAARASRIENQDAIDTAIIGMLADPKEAQHTNHRTKLHLRIFLNNSKGTGMVTEYLSKMEKEVGKKMTLRSPRTNTAFQELFSLPAEEFLISSFTCYLKRKLPTQGQVFLSPRTIGFYSSMFGRKTKCYFLWEDIEDIQGIPQSISSWSPSIIITLHKGRGMDAKHGVKSMDNGKLKFCLQSFASFSVANRTIMALWKARSLSTEFKVQLAEEQSQINTLQSEDNGVFVGIEDAKSLQMTEVFSSTISTNMASLMEVCLGGSLEMKFSKKLSPVGGEVTGTQQKSLMPNKKGWVIEEVMELQGVLLGDFFTLHIKYQVEDLAPKQRASNVQVSLGIEWSKTSRHQKRIEKNVLSSSSARLKEMFNLALRELSHAR

SEQ ID NO: 7678 - protein, 623 aa, Zea mays
  VARIANT 453..623: note = Derived polymorphism lacks residues 453 to 623
  VARIANT 196..623: note = Derived polymorphism lacks residues 196 to 623
  VARIANT 81: note = Ancestral polymorphism is M, Derived polymorphism is K
MPLVDEILDELAGATFFSSLDMTAGYHQIRMKPGDEYKTAFKTHHGHYEFLVMPFGLTNAPATFQCTMNSILAPYLRKFAMVFIDDILVYSATLADHISHLRLVLTALRDHQFFLKQSKCKFAKSELSYLGHIITDAGVATDPSKVAAMLQWPVPTNFTELRGFLGLTGYYRRFVQHYGLLAKPLTNLLRQKQFHWTVAAQTAFQNLKTAMTTTPVLTLPRFDLPFEVETDASDGGLGAVLMQQVKPVAYLSKALGEQNKHLSIYEKEFLALMMAVDRWRPYLQRTPFTIRTDHKALSFLEQQELQSDLQRKAMTKLMGLNYKIQYKKGKENRAADALSRRGHSSLATTVTEIIPSWIQEVINSYATDPAAQALLLKLAICSPDDQGYSLQQGLIKRHNQVWIGHNSALRTRLLSFHDSAIGGHSGTLATYDRIKKFFYWKGLKQDVVDYIQQCTTCQQAKTEKSHPAGLLQPLPTPTTVWHDIAMDFIEGLPSSDGFNTILVVVDRFSKMAHFIPLKHPFSALQVAQELLDQVIKLHGLPKTIVSDRDRIFTSNLWQHLFTRFNTKLLLSTAYHPQTDGQSERVNQCLEMYLRCAVAETPKKWKRWLALAEFWYNTSFHTSL

SEQ ID NO: 7679 - protein, 218 aa, Zea mays
  VARIANT 197: note = Ancestral polymorphism is A, Derived polymorphism is V
MRASQDHAPQPLPLPLPPPPLSLPSPPAPPRRGRHRSSYSSSSSASSISSASSTFCPSPSPSPRASTATSLVPFSWERQPGVPKNSSRVGLASPTGTGTPLPPPPLRPAPRRRRARDDDPFVAAFAECTRDDDDDSIRKLWPVTAKPAAESSGRAERWWWIAAGGGGGLVAFLDLHGCKSAVDVADGAAFHPRRLVAAAAAAAGPRAVGRPGKPKMSN

SEQ ID NO: 7680 - protein, 152 aa, Zea mays
  VARIANT 126: note = Ancestral polymorphism is A, Derived polymorphism is V
  VARIANT 115: note = Ancestral polymorphism is Y, Derived polymorphism is C
  VARIANT 111: note = Ancestral polymorphism is G, Derived polymorphism is R
  VARIANT 102: note = Ancestral polymorphism is D, Derived polymorphism is N
  VARIANT 99: note = Ancestral polymorphism is D, Derived polymorphism is N
  VARIANT 89: note = Ancestral polymorphism is L, Derived polymorphism is I
  VARIANT 86: note = Ancestral polymorphism is S, Derived polymorphism is Y
  VARIANT 85: note = Ancestral polymorphism is T, Derived polymorphism is I
  VARIANT 84: note = Ancestral polymorphism is A, Derived polymorphism is S
  VARIANT 69: note = Ancestral polymorphism is P, Derived polymorphism is S
  VARIANT 65: note = Ancestral polymorphism is Q, Derived polymorphism is H
  VARIANT 62: note = Ancestral polymorphism is G, Derived polymorphism is V
  VARIANT 55: note = Ancestral polymorphism is R, Derived polymorphism is I
  VARIANT 17: note = Ancestral polymorphism is A, Derived polymorphism is T
  VARIANT 3: note = Ancestral polymorphism is G, Derived polymorphism is W
MRGRHLLFASSLNYRRTGSVGSEKGEDARRRVNMQLADHDSADRPCNWCYFLGNRFCLHLTGVNQDETPLLYSLVFGEGVVNDATSVVLFNAIENLDINNFDAIVLLNFIGKFLYLCFTSTIHGVATGLLSAYIIKKLCFARSAHNSLSLWG

SEQ ID NO: 7681 - protein, 842 aa, Zea mays
  VARIANT 442..842: note = Derived polymorphism lacks residues 442 to 842
  VARIANT 457..842: note = Derived polymorphism lacks residues 457 to 842
  VARIANT 481..842: note = Derived polymorphism lacks residues 481 to 842
MGSTEVAEGSGEKEMSSAREEEKESGAEMRSDESVPSPPPLVRVGRHRAHFKPGADEASVPVAARLGGFENPRIVEVIGHVVADDLRVEQRGGRPHPGRGGGRLGVPGVARGGVLGEVELGAAVAEAERGGVVGERGVLGSGCDQSHEQVDPEALDRSFFMRVMAARSPNVRLQKAIDRKNQSSMLKCPHSAPPKRPRARFARLSAETEAAEKAPVEPKPRVERICAMRASPIRTKTARVECPSERKKALTTPRSKAVRSRQELFHNVKHQKESLAAAARKGTVVKSLFMSTTRKKEPVQTLAADKSKGAVSEVCSKLRKLNLACREVPSRYISQPQPKNTKTAKKSEETTVAKSEKRGLESKTNAKKKILGRSVKRANAGPNGENRNGCSTAADESSLAETAGSHQERKVVLRELRIEVDASRRGNSDDNKENVSSALSEEALDNSSHYGSENRLLENNENVPLKENVALKKKVHQEQAGKLKKTTNPRVLWDGGQYDPALWAGKVGNSWHTTDDITVTWKSMTYIADKNNKWASYAGPGGWDDPDMLEVGNGGMTLAEYLSHFSIWALMKAPLLIGCDVRNMTSETMEILSNKEVIQVNQDPLGVQGRKILGQGKYGCREVWAGPLSGNRLVVALWNRCSDTANVTMKLPAVGLDGYAAYSVRDLWKHETLSENVVGTFGAQVDVHDTKMYIFSPATIVASEYYDPNRSMLELVFAPVDEWIGRSDTEIIDATIEELAKLFPNEIAADQSKAKILKYHIVKTPRSVYKTVPNCEPCRPLQRSPIEGFYLAGDYTKQKYLASMEGAVLSGKLCAQSIVQDYSRLALRSQKSLQSGEVPVPS

SEQ ID NO: 7682 - protein, 115 aa, Zea mays
  VARIANT 100: note = Ancestral polymorphism is G, Derived polymorphism is V
  VARIANT 98..115: note = Derived polymorphism lacks residues 98 to 115
  VARIANT 88: note = Ancestral polymorphism is S, Derived polymorphism is R
  VARIANT 82: note = Ancestral polymorphism is S, Derived polymorphism is F
  VARIANT 55: note = Ancestral polymorphism is G, Derived polymorphism is D
  VARIANT 53: note = Ancestral polymorphism is S, Derived polymorphism is L
  VARIANT 52: note = Ancestral polymorphism is L, Derived polymorphism is F
  VARIANT 48: note = Ancestral polymorphism is A, Derived polymorphism is T
  VARIANT 40..115: note = Derived polymorphism lacks residues 40 to 115
  VARIANT 30: note = Ancestral polymorphism is R, Derived polymorphism is M
  VARIANT 25: note = Ancestral polymorphism is R, Derived polymorphism is W
  VARIANT 24: note = Ancestral polymorphism is E, Derived polymorphism is K
  VARIANT 1: note = Ancestral polymorphism is V, Derived polymorphism is M
MVDTEFLGTVYRPAGPAYKLELAERYRLLRCNVDALHPVQLGLTLFDAGCVLSSGHDGATRYVWQFNFRDFDVRQHRHVVESVAALQSRGVDLDWTRQYGVAAVAAFGLRLQDLE

SEQ ID NO: 7683 - protein, 305 aa, Zea mays
  VARIANT 20: note = Ancestral polymorphism is W, Derived polymorphism is C
  VARIANT 21: note = Ancestral polymorphism is F, Derived polymorphism is L
  VARIANT 91..305: note = Derived polymorphism lacks residues 91 to 305
  VARIANT 93: note = Ancestral polymorphism is G, Derived polymorphism is D
  VARIANT 150: note = Ancestral polymorphism is V, Derived polymorphism is F
  VARIANT 220: note = Ancestral polymorphism is R, Derived polymorphism is H
  VARIANT 227: note = Ancestral polymorphism is H, Derived polymorphism is N
  VARIANT 244: note = Ancestral polymorphism is P, Derived polymorphism is H
  VARIANT 246..305: note = Derived polymorphism lacks residues 246 to 305
  VARIANT 251: note = Ancestral polymorphism is A, Derived polymorphism is T
  VARIANT 263: note = Ancestral polymorphism is V, Derived polymorphism is A
MKRVGIVGRTGVLQIAVERWFLRWVSCAVLEDDKRKVRPAKRSCGCPTILSRFHHRAGAVSGTSAIGHCYSNGSMYANVFSFLLTLVMHIQVGCPLRCSFCATGKGGFARNLQPHEIVEQVLAIEETFKYRVTNVVFIGMGEPMMNLKSVLEAHQCFNKELKIGQRMMTISTVSVPNTIKMLASHKLQSTLAVRVSFEYTLLAGINDEKEHAEELAELLRMCGGGYHVNLIPYNPIEGSEYKRPYRKVVQAFVDALEARKITVSVRRTRGLDANVACGQLRNAFQKNPLLEIEPSPSIERTLVTA

SEQ ID NO: 7684 - protein, 142 aa, Zea mays
  VARIANT 24: note = Ancestral polymorphism is H, Derived polymorphism is Y
  VARIANT 55: note = Ancestral polymorphism is D, Derived polymorphism is Y
  VARIANT 74: note = Ancestral polymorphism is E, Derived polymorphism is D
  VARIANT 76..142: note = Derived polymorphism lacks residues 76 to 142
MSTKMWEASVEHAKTCVLTDKVHHYYPDGLNKAGVVFNVVGEVTGLISDKYVFVDDFTEKEKAEARVVVKQAYEHWKDVHTCDNETLVENPSHPFNLGSPSLHENQYNQLPTQVSTDGFSLSNGHTITQHFLNGAIECFRPL

SEQ ID NO: 7685 - protein, 261 aa, Zea mays
  VARIANT 204: note = Ancestral polymorphism is V, Derived polymorphism is A
  VARIANT 188: note = Ancestral polymorphism is R, Derived polymorphism is K
  VARIANT 184: note = Ancestral polymorphism is G, Derived polymorphism is S
  VARIANT 183: note = Ancestral polymorphism is H, Derived polymorphism is R
  VARIANT 179: note = Ancestral polymorphism is A, Derived polymorphism is V
  VARIANT 176: note = Ancestral polymorphism is A, Derived polymorphism is T
  VARIANT 171: note = Ancestral polymorphism is R, Derived polymorphism is W
  VARIANT 169: note = Ancestral polymorphism is D, Derived polymorphism is A
MMPGSMAARQPLQGKQELQPYDGRDPSALGAGGSPVLLPRQQESAAPPAVRVAPPPDMSSSSGSGRSATEARALKVHSEAERRRRERINAHLATLRRMVPDTRQMDKATLLARVVEQVKLLKRKASEAATTTTQSTPLPPETDEVSIELHTGDAGADRSVYIRASISCADRPDLVAGLAQAFHGLRLKTVRANMTSLGGRARHVFVLCMEEGWGSAGAGAGASLRSLKEAVRQALARVASPETAYGSSPFQSKRQMILESH

SEQ ID NO: 7686 - protein, 461 aa, Zea mays
  VARIANT 297..461: note = Derived polymorphism lacks residues 297 to 461
  VARIANT 290: note = Ancestral polymorphism is C, Derived polymorphism is Y
  VARIANT 238: note = Ancestral polymorphism is P, Derived polymorphism is R
  VARIANT 171..461: note = Derived polymorphism lacks residues 171 to 461
  VARIANT 124..461: note = Derived polymorphism lacks residues 124 to 461
MAMVDEGGKGEAQPPGLDPRNRRSAATRATGDMDGGGRGEEWEGPPGYVLSLPAAALPLPVAVSCLDATVRRKGRSHIRHRGHPSGWWAFRLPVPAPEEAKRPVPPASAANNPSEEDRSCPRHQRLPVRQAPAPGPHTPAPAEERPAKRVRMCLQCGAAVTPQWRSGPMGQGTLCNACGVRLKAAGALRGQVKHRPTPATARTPARPPLDSPASESSPDSPILEPGSVPDVYLVRKKPLKRGRPPPPPRTVPAAAPPLAPAVYLVKKKKKSASARKPWRPPKSAKQCLHCGSSSTPQWREGPLGRSTLCNACGVRYRQGRLLPEYRPLASPTFEPSEHANKHSQVMQLHRQRKSQGQHHPLPAEHPRAMDVLQFPQRWQVKEEYPPTPLHQPLPHPVVDGSLASGELRVGDMVDAAADAGHGGGGGKGSDLNNNAPSSLDSRLLEGPSAPLLVDGDKPLVH

SEQ ID NO: 7687 - protein, 206 aa, Zea mays
  VARIANT 200: note = Ancestral polymorphism is A, Derived polymorphism is V
MAEGKRWRFAMVCSSNMNRSMEAHSQLGRAGLDVESYGTGTHVKLPGPSLHEPNVYDFGTPYGAIYDDLRRKDPELYKRNGLLPMLKRNTSVKLAPQRWQDNAGDGVFDMIMTFEERVFDLVVEDMNNREPRLMKCVLIINMDVKDNHEEAGVGAKLAVELCQKDLLLMVPMLEAIDGDWEDIIDDLITAFEKQHKRRLAYSISFY

SEQ ID NO: 7688 - protein, 154 aa, Zea mays
  VARIANT 4: note = Ancestral polymorphism is D, Derived polymorphism is H
  VARIANT 21: note = Ancestral polymorphism is R, Derived polymorphism is H
  VARIANT 25: note = Ancestral polymorphism is T, Derived polymorphism is M
  VARIANT 41: note = Ancestral polymorphism is T, Derived polymorphism is I
  VARIANT 42: note = Ancestral polymorphism is G, Derived polymorphism is D
  VARIANT 63: note = Ancestral polymorphism is T, Derived polymorphism is I
  VARIANT 66: note = Ancestral polymorphism is G, Derived polymorphism is S
  VARIANT 67: note = Ancestral polymorphism is M, Derived polymorphism is I
  VARIANT 78: note = Ancestral polymorphism is T, Derived polymorphism is I
  VARIANT 81: note = Ancestral polymorphism is G, Derived polymorphism is S
  VARIANT 86: note = Ancestral polymorphism is W, Derived polymorphism is R
  VARIANT 96: note = Ancestral polymorphism is P, Derived polymorphism is T
  VARIANT 101..154: note = Derived polymorphism lacks residues 101 to 154
  VARIANT 116: note = Ancestral polymorphism is D, Derived polymorphism is G
MVADVAKLSTNEWYFFSFRDRKYATGLRTNRATKSGYWKATGKDRVIHTPCSWPAAAAGHHCTVVGMRKTLVFYRGRTPNGVKTSWVMHEFRMENPHTPPKEDWVLCRVFYKKKADAMDYADCSDQDAIAVHMPRGSADPRGAAVAASGRGGRQ

SEQ ID NO: 7689 - protein, 217 aa, Zea mays
  VARIANT 143: note = Ancestral polymorphism is P, Derived polymorphism is L
MIVQHIRTKLRQHDLCKIYPNVHVVQSTFQIRGMHTLIRDRDITTPEIALEEQDRNPPFDIGSYGEQILDTLSSRTNNTGTASFSEIVSGRPKFEIARTFSALLQLVNSRSVDLDKGKATNELVCYTAENPFHVRLIGPNRRPEMEARFARKRVKSPLQNAGKVRESSLAQHECPNKPLCKNGKITVTTATKLTQDGKRRRRSSAHLMQPINLESSG

SEQ ID NO: 7690 - protein, 107 aa, Zea mays
  VARIANT 89: note = Ancestral polymorphism is D, Derived polymorphism is E
  VARIANT 87..107: note = Derived polymorphism lacks residues 87 to 107
  VARIANT 79: note = Ancestral polymorphism is E, Derived polymorphism is G
MEGDSVGVGEGDSLLPPTATPSCRPDSSYRPPPALPIQDQWPSPGHAPPLASSGPSINCLMWKEGVMIFCCFCSEKLKEGEDIYIYQGDKSFCYEDDHRVLVCEFIL

SEQ ID NO: 7691 - protein, 102 aa, Zea mays
  VARIANT 26: note = Ancestral polymorphism is P, Derived polymorphism is L
  VARIANT 6: note = Ancestral polymorphism is S, Derived polymorphism is P
MGKRKSRKAPPSKKVAQKVATAFDCLFCGHSGSVECSIDLKDRVAKAECGVCMAVYATIANALTEPVDVYSEWIDECEKANEGVNNADESRQRGRRRRRRLT

SEQ ID NO: 7692 - protein, 116 aa, Zea mays
  VARIANT 5: note = Ancestral polymorphism is G, Derived polymorphism is R
MQKSGKDHSLLLVLPSGVYRYRCVVDGERRCLPDLPCETDAMGNAVNLLDVNDFVPESVESVVEFEPPLSLDSSYSFQAPEDKDFAKEPPALPAQLHLGVLNSQNSEESCARPQHI

SEQ ID NO: 7693 - protein, 206 aa, Zea mays
  VARIANT 71: note = Ancestral polymorphism is P, Derived polymorphism is L
  VARIANT 74: note = Ancestral polymorphism is R, Derived polymorphism is H
  VARIANT 75..206: note = Derived polymorphism lacks residues 75 to 206
  VARIANT 105: note = Ancestral polymorphism is S, Derived polymorphism is L
  VARIANT 113: note = Ancestral polymorphism is S, Derived polymorphism is F
  VARIANT 114..206: note = Derived polymorphism lacks residues 114 to 206
  VARIANT 135: note = Ancestral polymorphism is C, Derived polymorphism is F
  VARIANT 138: note = Ancestral polymorphism is C, Derived polymorphism is S
  VARIANT 143: note = Ancestral polymorphism is C, Derived polymorphism is Y
  VARIANT 145..206: note = Ancestral polymorphism lacks residues 145 to 206
  VARIANT 163..206: note = Derived polymorphism lacks residues 163 to 206
  VARIANT 169..206: note = Derived polymorphism lacks residues 169 to 206
MLPSALLQCIAPAPKSEETTEPSSLRHAMFGMASYRRTLLLGLPLPRLLCAPVRAFLFLDTPRPPVGPRSLRLRRCIPLPPLKLVEMFREYHFLHVGDEMLQSKSLDRDSYVFECFALLVDDPEHGEVLITNVECPHSCRMFYAYCKVAWHAGVTCTEFKFQRPRKDEQDREDLLPRKVEQESKWQMCPECKIYVERIGDCVFIIY

SEQ ID NO: 7694 - protein, 101 aa, Zea mays
  VARIANT 73..101: note = Derived polymorphism lacks residues 73 to 101
  VARIANT 6: note = Ancestral polymorphism is S, Derived polymorphism is L
MGKRKSRKAPPSKKVAQKVATAFDCPFCGHSGSVECSIDLKDRVAKAECGVCMAVYATIANALTEPVDVYSEWIDECEKANEGVDAEESRQRGRRRRRRLT

SEQ ID NO: 7695 - protein, 414 aa, Zea mays
  VARIANT 125: note = Ancestral polymorphism is A, Derived polymorphism is E
  VARIANT 34..414: note = Derived polymorphism lacks residues 34 to 414
MPVTDHQSSSPSPFSFGRSLLSLRRDPTAMPSGEEADLEAFQRHVASTLAELLPAAEAGVGGSDATAGAGEEFLSAAWIRRLLEAFVLCQEEFRVFVAQARRRAGALPAAAEKTVAEFHERAVKALDVCNAARDGVDQVRRWERLADIAASALRAPGEVHEGQLRRARKALTDVAALLVDDTAASGAGGVASFLSSHRNRSFGRARASPSRSAGASASASASASHFRSLSWSVSRTWSAARQLQAIGAGLAAPRAHEPGLAAPVYSMGCVLHLTAWALVVAVPCPDRGNALQAHHLPGAPPRATFPWAPPLLTLQERLTEEGKRKDRRHSCGLLKEIHSLERSTQRLAEAIDAAPIPLFGDREADVREAAAELAAVCEAMRDGLEPLERLLREVFHRIVRSRVDGLDSSMHNAD

SEQ ID NO: 7696 - protein, 597 aa, Zea mays
  VARIANT 246..597: note = Derived polymorphism lacks residues 246 to 597
  VARIANT 126: note = Ancestral polymorphism is D, Derived polymorphism is Y
  VARIANT 42..597: note = Derived polymorphism lacks residues 42 to 597
MKALFLSKSSSYSCRAVITGDPYIGLDVVGVPDEVARRMTVQECVTNYNIARLQDMMEKGLCLTYTDLNTNTYDLDGKKGNKKCIMPRVGETVERRVLDGDLVFLNRPPSTDMHSVQALYVHVHDDHTIKINPLICGPLGADFDGDCVHIFSPRSVPGRVEAAELFTVEKQLLNSHNAKLNFQIKNDYLLALKIMCVRSYSREKASQIAMFSSGMILPGDWTIPQILQTTDALRTLPSHPNKQSVGASVTAIISSTLSEKGPRGAIKLINLLQPLLMESLLMDGFSISLKGLDGRCAMQKANQSSSLETDKFNKLTVDSIVNSSALGLLVDPKKDSTLKKLVEQIGFLGQQLQRTGRLYSSNLVEDCYNFLERCSGSTKCYDPSKGHDFVTSSFYNGLNPYEELLHSISVREKIERSSSKGLAESGNLFKNMMAMLRDVTVCYDGTMRTSCSNSIVQFDSTNVSSSVTPGDPVGILAATAFVNAAYKAVLDPVFGHSVEHPPGAQNPRMIASRRQGHMNVASLGALQLRLGSAAPPSSAMAAFSSGNSGRSGWPASGSKTSSSLEPKKKSELTGGHRGEEEREQLLVRENFPAAEYV

SEQ ID NO: 7697 - protein, 321 aa, Zea mays
  VARIANT 9: note = Ancestral polymorphism is A, Derived polymorphism is V
MDPRFTLPAAIGGGAGRVHHRRAHSESFLCFSDADLLLDPDGDLSFSDLDFPSLSDDSPAASDPTPPPPLPQPAPAPRPAGGAHTRSLSLDAAFFEGLAFQGPSGSAGGGPGHKRSGSMDGATSPFEGESALSSGLPDYAKKAMPAERIAELALIDPKRAKRILANRQSAARSKERKVKYTSELEKKVQTLQTEATTLSAQLTLLQRDTTGLTAENRELKLRLQSMEEQAKLRDALNETLREEVQRLKIAAGQVGNMNGNPFNGGLQQQIPSYFVQQQQMSYFGGHQAQAQHHSQNHHHRSPSNGRQSPSDQSLNDSMDFV

SEQ ID NO: 7698 - protein, 82 aa, Zea mays
  VARIANT 3: note = Ancestral polymorphism is A, Derived polymorphism is V
  VARIANT 5: note = Ancestral polymorphism is R, Derived polymorphism is Q
  VARIANT 24: note = Ancestral polymorphism is A, Derived polymorphism is S
  VARIANT 29: note = Ancestral polymorphism is V, Derived polymorphism is I
  VARIANT 37: note = Ancestral polymorphism is D, Derived polymorphism is G
  VARIANT 38: note = Ancestral polymorphism is D, Derived polymorphism is E
  VARIANT 41: note = Ancestral polymorphism is D, Derived polymorphism is H
  VARIANT 44: note = Ancestral polymorphism is R, Derived polymorphism is H
  VARIANT 70: note = Ancestral polymorphism is M, Derived polymorphism is I
MFADRVFDLFDTKHNGILEFEEFARALSVFHPSAPMDDKIDSIRNGNVVVFLIDCQVKKMVVATLAESGMNLSDDIVEGIID

SEQ ID NO: 7699 - protein, 579 aa, Zea mays
  VARIANT 279..579: note = Derived polymorphism lacks residues 279 to 579
  VARIANT 160: note = Ancestral polymorphism is R, Derived polymorphism is C
  VARIANT 106: note = Ancestral polymorphism is G, Derived polymorphism is C
MEGTTISIEIDGEAICLDSVGDNEQEAAENGEMHQTIYTDENGEQVAFDNQEQGREEDLAGNGEEDRDHNSIIPSREELTEELRNKVAYSEEEAYRLYCDYGHRMGFSVRKGKQYYFTGTKTIRTKDYYCSKEGLKDDEQLTEANFNKPETRTNCKAMVRFRVDSEGQWRVIQIIPEHNHELVRPEEIHLLRSVRTLSVPKSGVLNAMVNAEIQAMHDNLHINEDGTECHSQLSIRSYTLLEPKECEALEHPWLTDLYQQRHKWCSALHKDAFDGGIESMDRNESLNNVLSNIDDESASLSTFVLELDKLAGSWRKTESLEDIQCNQAAPECTVKHNRILQHAAEVYTHKVYKSIETDFLDGCSATSYQAAQCNETLHKFEFLLENSPNVSVVFLNTSTMELSCTCKKFETMRILCSHALNALVLKNVDRIPERYILNRWTKYARKGTYPFPVDEFAEQDRTEVAFVYRNRAMWFVYDLLTKSKSHHNTRKLILDALENGEKSLERNVKQAVLPQTADPVFVDPPNQDQYFAAEDIASNQSVGRPFFYQGYPMTVVSTSQIQGHTNMHSEPQCASQVLN

SEQ ID NO: 7700 - protein, 388 aa, Zea mays
  VARIANT 148..388: note = Derived polymorphism lacks residues 148 to 388
MERNRKSVVVHTPFRRPSAADDTGPPLFHRSPAAQAGALLQIPSTGSPQGLILGRSLHQTAASQLPSPGGVQSSDAGIPSTESGQRVVAQYPLARFHGQNLEENAHFIGTTSRVSHVDIETDDGIEENRKGSRLIWKHDEDVRVMSAWLEHSLDPVRGNNKKSDKYWQDVADEYNLSTVANRVRTRSQVKERWHKINRWTHMFNDCWIKARRLFTSGYSYQMWIEKAQKFYEVDNNGSHFVHMEVWHMVRNQAKWIAYNEKSHNKRKVTENNTTLEEDGAEDFDLPRPMGQKAAKKLKSRAKVQNGVYANRLKIIEMQQRMSNDKIEVSRNTLQAAKDQKEAKVLEKETKMLETYTCLLKEDMSGMPEEVRFEHVILCLNYCIYHNIF

SEQ ID NO: 7701 - protein, 212 aa, Zea mays
  VARIANT 11: note = Ancestral polymorphism is D, Derived polymorphism is G
MGKDCGKHGDDDLRRSCRRLLATIVVLALTVGVVALIVYLVLRPTHPRFYLQDASLRQLDLSNATTSTSTLLSTAIQVTLASRNPNERVGVYYDRLDVYASYKYQQLTVAASLPPAYQGHGDVGVWSPVLAGPNVPLAPYLADALRQDCQAGYLVLQVKVDGRVRWKVGSWVSNHYHLFVTCPAFLVTAGGNGAPGAAGFRFQTTTYCHVEV

SEQ ID NO: 7702 - protein, 416 aa, Zea mays
  VARIANT 46: note = Ancestral polymorphism is A, Derived polymorphism is S
  VARIANT 95: note = Ancestral polymorphism is R, Derived polymorphism is S
MSAAESSSRARQEAESEAEAEPPQRRWVALVSIPVILASGDERARSMLAHATNVELDLHDPPQPSYLLLHPSIVGLKPVAQQPSVYILATDGSGSLVFRVTNHGSNGPDEDDVMYFCDAHARRAISMPALYPRDSVLLGDKLLCCSTATFQWFVKPLLTSATTRMRNPSADTGVVAHAGRLYWLALAYGVFVCDPFADTAHLRFLALPADCDLGEKPYRINRAYVAQCRRVAPSEGQLRYVEIRGLSYEAYVAPAVAPPPVHPTVWMWTLVDPEATEPWRFEYEAPFAEVWAHESYAAAGLPHGEVPHVALVDPDDHGIVYFFQGSKSKLFGLDVRARRVVSCEECSVRDDLKMKDWNSRPIVDAWEVPPPSPPCSELSSPSPQGSDELAPVAKRVIEILRLMSDTDDDDGGYATI

SEQ ID NO: 7703 - protein, 66 aa, Zea mays
  VARIANT 26..66: note = Derived polymorphism lacks residues 26 to 66
MGRAINKIVMVVELIKISTGRGWDLKGRPVLLFYTYYPAGTEMLTNTAKLYKAPLGNCFETDDIGC

SEQ ID NO: 7704 - protein, 272 aa, Zea mays
  VARIANT 68: note = Ancestral polymorphism is Q, Derived polymorphism is P
MAATTPAPPSHGGGRNGTLPPPLPSNESFSKFFESWISEQSRDLEELRAAASADPPAPESELRRLVGQVLGHYAQYYRAKAAAAADDVLCMFTPSWTSTTENLYLWCGGWRPTAAIQLLYTKSGMQLQHQLPAFLDGGGLKDDLGDLGAAQLQAADQLQRRTIRREREIEDAAASAQEALTTATMVELAGGGGRDAGAMDREMQAKAEGMRRVLEMADALRLETMREVVALLRPAQAVHFLLAAAELHLAVHDFGRRKDGRAGNVAAAAPPE

SEQ ID NO: 7705 - protein, 264 aa, Zea mays
  VARIANT 49: note = Ancestral polymorphism is A, Derived polymorphism is P
MMKNYPGPASSSSVAVEVKKGSWSPEEDALLTRLVEQHGPHRWSLISAPIPGRSGKSCRLRWCNQLSPDVHHRPFTPHEDALILAAHARYGNKWATIARLLPGRTDNSIKNHWNSNLRRCRRRAAAAAVASRPQVQDSDDAPAAAAAHDDQPAAVVAAGGLGGGNSSSGLPPAAAGAATAEAEPSLSLSLGLPLPAAEPAEAAADDESRNSQGQASPLLEEGEGNAQLLAVVRRMVREEVQRQTGQLAYSLMAAAAARAKGHHR

SEQ ID NO: 7706 - protein, 118 aa, Zea mays
  VARIANT 6..118: note = Derived polymorphism lacks residues 6 to 118
  VARIANT 17: note = Ancestral polymorphism is L, Derived polymorphism is R
  VARIANT 23: note = Ancestral polymorphism is D, Derived polymorphism is G
  VARIANT 24: note = Ancestral polymorphism is R, Derived polymorphism is G
  VARIANT 33: note = Ancestral polymorphism is S, Derived polymorphism is F
  VARIANT 35: note = Ancestral polymorphism is P, Derived polymorphism is L
  VARIANT 54: note = Ancestral polymorphism is L, Derived polymorphism is F
  VARIANT 65: note = Ancestral polymorphism is S, Derived polymorphism is F
  VARIANT 76: note = Ancestral polymorphism is Y, Derived polymorphism is H
MGLSDQDIVALFGGHTLGRCHKDRSGFEGAWTSNPLIFDNSSSMELLSGEKEGFLQLPRDKALLSYPSFCPLIDKYVAVYISLILVICSVSVYVNLGGCNKYLSALCFVIFFSLEWFI

SEQ ID NO: 7707 - protein, 847 aa, Zea mays
  VARIANT 648..847: note = Derived polymorphism lacks residues 648 to 847
MADSRGTTPKSGDNDNTSTRPARLRVMRPEVKEFLTSPRRRRPKKQPPPPPPPPPRNVKLKERKNKEKGKAATEEDKFERAQYNCPFQDEGEGGRDFAPPELVWGKVRSHSWWPGQVFDAADASEIALQHRKAGALLIVYFWDRTFAWSSPSALLPFRSNFTRLSAQSTMSSFVSAMDSALQEVGRRVEAGLSCGCFTSSIATKQEVQNSGIRQGAYGAAVDSVYTRDAFHSKTFLDYISALGKKPLAGADLLVLATVKAQLRALNRSRGSRDLPEFEMFEGTDEITEMTHTDGDDTLSRGKKSKRMKSSSKKKTDISKHLDGLKTGSVADSRTLAKKAVGDALSERKSGRTLRSTSKKEDALEGLKRLAKDGIQELTGKSKDAPILKEKNQGHGAGSAHKKGRITEDGYHRLGDSNAKDPIFPGKRRLGHNENSISKRVPISEHGRKKKKLSELMAETGKPNSASSGKSKTRGKRSLHDSAEKTEDPEHHSKDTLMTRKRKKLNTLGDLSSLSEPLSRKKSTKVGELMSKVAGSSMLQAAPAVKANSAVSQTKPRRAKYRQVNAADKSPCPVKVNQGNSEAVSKESLSCGEMLWQLSVAACGLQQREKIVPTSVNFFTGFRKNKFSSSDVNEGMPEKAANTESTLSEQPIADHMQDDYWADILINVEEPLSNLKKKIDESKKRVNKKAPQVKKPPVNSLSTVENVDEPRSEGNQDTGNEEQLRNETKLFSANGSQLNAGTKFGQEMENCFLSGLVLHFSRPCAVPSQCDLIKIFSQYGPVNEVKADVANSASSAQVIFKRRMDAEAAFAGAGKISALGPALVSFRLTDFPASASGNKASHVASKSE

SEQ ID NO: 7708 - protein, 797 aa, Zea mays
  VARIANT 19: note = Ancestral polymorphism is T, Derived polymorphism is I
  VARIANT 23: note = Ancestral polymorphism is V, Derived polymorphism is A
MASSSSLNPSSYSCFLFVTAAAVFFTASDAQVPGFVSIDCGGSTNYTDELGLQWTGDAGWFPFGQTATISVPSEKRAQYSTLRYFPSPSASSSSSSKHCYTLHVRTRTRYLVRATFLYGNFDSSNVFPEFDLYLGASHWSTIVIYDDSKVVTREAVVLAADPALSVCLSSTGTGTPFISTLELRQLNGSLYYTDYEADAFLALSARINFGAPTADPVRYPDDPYDRIWESDMVRRANYLVDVAAGTVNVSTDRPVFVAGSERPPQKVMQTAVVGSLGELTYRLDLPGFPGNGWAFSYLAEIEEFLVPETRKFKLYIPGLADVSKPTVDIGENAPGKYRLYEPGFPNISLPFVLSLALRKTNDSSKGPILNALEIYKYMHMELGSPDGPVMATLSLALASSSSSLADVAMEGGDPCLPSPWSWVKCNSEAQPRVVSINLSGKNLTGSIPPQVADLPCLAEIGFANNMLTGPIPDLSGSSNLSIIHLENNQLTGTVPSYFGSLPKLSELYLENNRLSGPIPKALLSRSIIFNYSGNVYLGTAGKQKKKHVIIIISALLGASLLLAAALCCYMLTRKAMNSSSSPQAQEKALPAEQNKLQKYPSTQQLQSIATETAHPYSLCELEEATNKFASRIGSGGFGIVYYGKLSDGKEIAVKVPSNDSYQGKKQFSNEVVLLSRIHHRNLVAFLGYCHEDGRNILVYEFMHNGTLKEQLHRRDKHISWIKRLEIAEDAAKGIEYLHTGCTPSIIHRDIKTSNILLDKHMRAKVSDFGLSKLLAAEGKDSHASTNVRGTMGYLDPQ

SEQ ID NO: 7709 - protein, 526 aa, Zea mays
  VARIANT 430: note = Ancestral polymorphism is G, Derived polymorphism is S
  VARIANT 293..526: note = Derived polymorphism lacks residues 293 to 526
  VARIANT 241: note = Ancestral polymorphism is G, Derived polymorphism is R
  VARIANT 87: note = Ancestral polymorphism is E, Derived polymorphism is V
  VARIANT 26: note = Ancestral polymorphism is A, Derived polymorphism is E
MAPLRAGAAPMAAAAATVVLAAILVALFGCCAAAASAAAATDVITAAAELDRIDRLPGQPPVNFSMYSGYVTVDAAAGRALFYWLMVASGVPAGSAPLVLWLNGGPGCSSLGYGAMEELGAFRVNPDGATLSLNPYAWNNVANVLFLDSPAGVGYSYTNTTDDLYAAGDNKTGNFGLANVLTSDDLVSSISILEKFLVLHLFAGVSCYRIFSNKAHDSYAFLINWLERFPQYKHRDFYITGESYGGHYVPQLSWLVYQNNKGIKNPTLNFKGFMVGNAVIDDYHDYMGTFEYWWTHGLISDETYAKLWEDCKNDVSENPSEECQKIYEVAEAEQGNIDLYSIYTPTCKKTSLQKRRLIRGRMPWLPRGYDPCTELYITKYCNLPEVQDAFHANVTGIPYAWVGCSDPIYEYWKDSPRSMLPIYRELISAGLRIWVFSGDTDSVVPLTATRYSIDALSLPTITKWYPWYYDEEVGGWCQVYEGLTLVTVRGAGHEVPLHRPPQGLKLFEHFLRGEPMPKPVESVQSF

SEQ ID NO: 7710 - protein, 136 aa, Zea mays
  VARIANT 21: note = Ancestral polymorphism is A, Derived polymorphism is V
  VARIANT 31: note = Ancestral polymorphism is A, Derived polymorphism is T
  VARIANT 47: note = Ancestral polymorphism is G, Derived polymorphism is A
MRWLCGIGTLLLPSVATTMAATVFQFNPRNADDIFVEFFSGSSRWYGWGGMPSMRAGGTRFCSSIFWDDIFGSTFGNGGLDVHDLHTDRRVMKAPTIEWKLSFNLEELYKGITKKISREIADEQWVSACMLFSSRS

SEQ ID NO: 7711 - protein, 1405 aa, Zea mays
  VARIANT 356..1405: note = Derived polymorphism lacks residues 356 to 1405
MVSRGLFGWSPPHVQPLTPVSETSEPPESPSPYAADLGLGGDGAPPPDDDAQPPLDDADDDPDPPPAAVPFKRLFACADRLDWALMVAGSLAAAAHGVALVVYLHLFGKAINSLHAHGRHTHDLFHDINQAIAYALFIPLLTHPHALYFLYIAIGVFFAAWIEVSCWILTGERQTAVIRSKYVQVLLNQDMSFFDTYGNNGDIVSQVLSDVLLIQSALSEKVGNYIHNMATFFGGLVIGLVNCWQIALLTLATGPFIVAAGGISNIFLHRLAENIQDAYGDAASIAEQAILYIRTLYSFTNETLAKYSYATSLQATLRYGILISLVQGLGLGFTYGLAICSCALQLWVGRFLISHGRANGGEVVVALFAIILSGLGLNQAATNFYSFEQGRIAAYRLYEMISRSTSTVNQDGSTLSSVQGNIEFRNVYFSYLSRPEIPILSGFYLTVPARKTVALVGRNGSGKSSIIPLMERFYDPTLGEVLLDGENIKNLKLEWLRSQIGLVTQEPALLSLSIMENIAYGRCATTDQIEEAAKTAHVHAFISSLEKGYETQVGRAGLSLTEEQKIKLSIARAVLSNPSILLLDEVTGALDFEAEKAVQEALDILMLGRSTIIIARRLSLIRNADYIAVMEEGQLVEMGTHEELLNLDGLYAELLRCEEAAKLPKRTPMRNYKEPSSFQIERDSSAGHNFQESSSPKMSKSPSLQKTHGFLTFRTSDANHNSHESPNIQSPPSEQMAEARLPMVASERAPSIKRQDSFEMKLPDLPKIDVPLHRQSSNTSDPESPISPLLTSDPKNERSHSKTFSRPLVIFDSFHAEDSKQQHTKAPSFWRLAELSFAEYFYALLGSAGAACFGSFNPLLAYTISLIVVAYYKIGVRDVHAEVNKYCSFIVGMGIITVLANFLQHFYFGIMGEKMTERVRRMMFSEFSNSVYCIPAILRNEVGWFDDEENSADILSMRLANDATFVRAAFSNRLSIFIQDTSAILVALLLGMLLQWRVALVALATGIQEMHRKASLVLEDAVRNIYTVVAFCAGNKIMELYRLQLGNILKKSFIHGMGIGFAFGFSQFLLFACNALLLWYTAAAVKDGHLSLVTAVKEYIVFSFATFALVEPFGLAPYILKRRKSLTSVFEIIDRVPKIDPDDASGLKPPNVYGSIEFRSVEFCYPTRPEMMVLSNFSLRVSGGQTVAVVGVSGSGKSTIISLIERFYDPTAGQVLLDGRDLKLFNLRWLRSHMGLVPQDPVIFSTTIRENIIYARHNATESEMKEAARIANAHHFISSLPHGYDTHVGMRGVDLTPGQKQRIAIARVVLKNAPILLLDEASSAIESESSRVVQEALDTLIMGNKTTILIAHRAAMMKHVDSIVVLNGGRIVEQGSHDSLVQLNGLYVKLMQPHFSKGFRQRRLI

SEQ ID NO: 7712 - protein, 613 aa, Zea mays
  VARIANT 203: note = Ancestral polymorphism is E, Derived polymorphism is A
MDPPNPNPNDAPSLPAESAARLAALSLCGTRDLPPDFHTAEILDDDEGYLTSASRGGSSTSAWKEAPEGLHDDDKDGDDVSQPSPRSSGYAGERGSSLDDDADPDPDPDQDWARGKKHPHEDDASSSWRKRKKHFFILSNSGKPIYSRYGDEHKLAGFSATLQAIISFVENSGDHIKFVRAGKHQIVFLVKGPIYLVCISCTEESYEGLRGQLELMYGQLLLILTKSVNKCFEKNPRFDMATLLGGTDAVFLSLIHAFSWNPATFLHAYTCLPLAQSTRQAASAVLQDIADSGVLFALLMCEHKICPLDVPVLKFCELQCKVATCVEIQWDVSFFISLVLFFLCFFYIVLDYFQVISLVGAQKATLHPDDILLLANFILSSGSFRTSESFVPICLPRYNPMAYLHAYVHFFDEHTYVTLLTTRSDAFYDLKDSRAHIQNALLKSNVLIEVQRSLHENALRVEDLPTNPSSQSASHPPESSQDISSQSLSSEMAIGGPGGLWHFIYKSIYLDQFVSSEFPSPISNKKQKKGLYKAYQKLYASMHDKATGPHKTQFRRDEDYVLFCWITQDFELYAAFNPLADKTQAIKMCNRVCQWVRDLENEIFVYGESTLSW

SEQ ID NO: 7713 - protein, 108 aa, Zea mays
  VARIANT 49: note = Ancestral polymorphism is L, Derived polymorphism is I
MALKLGWRRGGGGWLALPLGNRTTASSSACSSSNLFVGGLSYDTNETALKDVFSQCGDVIAAKVICHPTSGKSKGFGFVKFSSQNQADAALQKMNGQARLSSFIYIII

SEQ ID NO: 7714 - protein, 419 aa, Zea mays
  VARIANT 315: note = Ancestral polymorphism is C, Derived polymorphism is G
  VARIANT 313: note = Ancestral polymorphism is G, Derived polymorphism is D
  VARIANT 245: note = Ancestral polymorphism is A, Derived polymorphism is T
  VARIANT 171: note = Ancestral polymorphism is R, Derived polymorphism is W
MGHVLSCSRDGADLFRAVQHGDLDALLAVDPELARRATTIYDRLSLLHIAAANGQLQVLSMLLFDDGGAGGNVDVLNRKKQTPLMLAAMHGRTDCVLSLLDAGANILMFDSVHARTCLHHAAYYGHAHCLQAILSAAKTTPVADSWGFARFVNVRDEHGATPLHLAARQGRPQCVRHLLHAGAIVSAPTASYGFPGSTALHLAARRGNLDCVRELLAWGADRLHRDSAGRIAYAVALKHSHRECAALLNPAAAEPMVWPSPLKFISELSPEAKVLLEGALMEANREREKRITDTTTKTNNDGGLDDDDEQLCGICLEQACTMEVQDCGHQMCAACTLALCCHSKPNPTTLALQPPACPFCRATITRLLVANSKTTATSNSFRGLTSAIRSLSLSRIARGSGRVADSSLPQSFFEEQGSK

SEQ ID NO: 7715 - protein, 255 aa, Zea mays
  VARIANT 166..255: note = Derived polymorphism lacks residues 166 to 255
  VARIANT 161..255: note = Derived polymorphism lacks residues 161 to 255
  VARIANT 160..255: note = Derived polymorphism lacks residues 160 to 255
  VARIANT 106: note = Ancestral polymorphism is P, Derived polymorphism is S
MGAGANNHEESSPLIPAAVAAPAYEKPPQAPAPEAANYYADGVPVVMGEPVSAHAFGGVPRESWNSGILSCLGRNDEFCSSDVEMLNQELTTYCLDVSGLLGTVAPCVLYGSNVERLAAGQGTFANSCLPYTGLYLLGNSLFGWNCLAPWFSHPTRTAIRQRYNLEASVLCTQLFGSFEAFTRQCGCCGDLVEDEERREHLEAACDLATHYLCHPCALCQEGRELRRRVPHPGFNNGHSVFVMMPPMEQTMGRGM

SEQ ID NO: 7716 - protein, 161 aa, Zea mays
  VARIANT 146: note = Ancestral polymorphism is R, Derived polymorphism is C
  VARIANT 124: note = Ancestral polymorphism is R, Derived polymorphism is C
  VARIANT 122: note = Ancestral polymorphism is P, Derived polymorphism is L
  VARIANT 111: note = Ancestral polymorphism is G, Derived polymorphism is V
  VARIANT 103: note = Ancestral polymorphism is P, Derived polymorphism is S
  VARIANT 100: note = Ancestral polymorphism is D, Derived polymorphism is Y
  VARIANT 95: note = Ancestral polymorphism is D, Derived polymorphism is Y
  VARIANT 75: note = Ancestral polymorphism is V, Derived polymorphism is I
  VARIANT 74: note = Ancestral polymorphism is V, Derived polymorphism is A
  VARIANT 73: note = Ancestral polymorphism is A, Derived polymorphism is V
  VARIANT 71: note = Ancestral polymorphism is G, Derived polymorphism is D
  VARIANT 67: note = Ancestral polymorphism is P, Derived polymorphism is A
  VARIANT 64: note = Ancestral polymorphism is A, Derived polymorphism is V
  VARIANT 63: note = Ancestral polymorphism is K, Derived polymorphism is R
  VARIANT 55: note = Ancestral polymorphism is F, Derived polymorphism is Y
  VARIANT 44..161: note = Derived polymorphism lacks residues 44 to 161
  VARIANT 38: note = Ancestral polymorphism is V, Derived polymorphism is M
  VARIANT 37: note = Ancestral polymorphism is A, Derived polymorphism is V
  VARIANT 18: note = Ancestral polymorphism is D, Derived polymorphism is E
  VARIANT 12..161: note = Derived polymorphism lacks residues 12 to 161
MYVTMDRYENDWDVVKRDWDAQVLEEAPYKFKSALEAVKTLRAQPKANDQYLPPFVIVDDSGKAVGPVLDGDAVVTINFRADRMVMLAKALEYADFNNFDRVPVPEIRYAGMLQYDGELKLPNRYLVSTPEINRTSGEYLVKNGIRTFACRQVLYVFQPFS

SEQ ID NO: 7717 - protein, 82 aa, Zea mays
  VARIANT 27: note = Ancestral polymorphism is T, Derived polymorphism is I
  VARIANT 14..82: note = Derived polymorphism lacks residues 14 to 82
  VARIANT 13: note = Ancestral polymorphism is L, Derived polymorphism is M
MGCEVSMIFQEKLQRLYDDGYKLVIFTNESNIVRWKNKRQQAVDSKVGRLDNFIECVKAPIQVCCKLVFFISNLSSHSNKKE

SEQ ID NO: 7718 - protein, 82 aa, Zea mays
  VARIANT 30: note = Ancestral polymorphism is A, Derived polymorphism is D
  VARIANT 50: note = Ancestral polymorphism is D, Derived polymorphism is N
  VARIANT 53: note = Ancestral polymorphism is L, Derived polymorphism is F
  VARIANT 60: note = Ancestral polymorphism is R, Derived polymorphism is Q
  VARIANT 72: note = Ancestral polymorphism is P, Derived polymorphism is L
MSAHVYYFPAPTSEGIQGLPFVPLPASPQDVLIDPSRKNLLEQIEYYFSDDNLCKDLYLRQHMDGQGWVPLPLIAGFRQSAV

SEQ ID NO: 7719 - protein, 314 aa, Zea mays
  VARIANT 254: note = Ancestral polymorphism is H, Derived polymorphism is Y
  VARIANT 163: note = Ancestral polymorphism is H, Derived polymorphism is Y
  VARIANT 76: note = Ancestral polymorphism is L, Derived polymorphism is R
  VARIANT 20: note = Ancestral polymorphism is H, Derived polymorphism is P
  VARIANT 14..314: note = Derived polymorphism lacks residues 14 to 314
  VARIANT 13: note = Ancestral polymorphism is P, Derived polymorphism is Q
  VARIANT 1: note = Ancestral polymorphism is M, Derived polymorphism is I
MEPTERSKKMVHPWINASVHFLLCFAVGALLAVAPLAATGASSASSIRSAFLGPFGDVHRAVAAPPPAAQDLGLLLIVTVTRPDDGMAQDASVARLAHTLRHVAPPLLWIVVGAKNRTATARTVQLLRGTGLMFRHLTYDATNFSGDGAGDEVDHQRNVALSHIDRHRLNGVVHFAGASSVYDLRFFQTLRQTRDFSAWPVATISNSMGASKNSSYDHPTINTSGIGFRSSLLWNSDRSLIRRNSSGATRDFMHIVQEIVTLDENKLKGIPSECFESQIMLWHMDMPTFTLKTAEEKKIQQQQNLTKSNEDPTT

SEQ ID NO: 7720 - protein, 256 aa, Zea mays
  VARIANT 203..256: note = Derived polymorphism lacks residues 203 to 256
  VARIANT 202..256: note = Derived polymorphism lacks residues 202 to 256
  VARIANT 201: note = Ancestral polymorphism is R, Derived polymorphism is L
  VARIANT 39: note = Ancestral polymorphism is F, Derived polymorphism is L
  VARIANT 17: note = Ancestral polymorphism is A, Derived polymorphism is E
MATEERRLMDLARTVPAILLLVGTSGKAVASIKCARELFAGKQWGFDDSDDPESPPSNTDRGGNCSVGEPMETSTGGDDDHNGSAVPWKTTRGSQSQTRLPSWAVVQHGGYWANILAFALSPVEGHLPVAYREITRLVSLHAEAGHVFVNCAEGLGLKPHPAAPWERWMDLREAAVCHAHDALLALSSAAAAATAAEDFLRWQFPESPRGKGWWSAARQLVEDAWRSLGEAKNAARLMDNAVLCEFFTTWMILTRA

SEQ ID NO: 7721 - protein, 194 aa, Zea mays
  VARIANT 18: note = Ancestral polymorphism is V, Derived polymorphism is L
  VARIANT 24: note = Ancestral polymorphism is C, Derived polymorphism is Y
  VARIANT 33: note = Ancestral polymorphism is R, Derived polymorphism is K
  VARIANT 56: note = Ancestral polymorphism is A, Derived polymorphism is T
  VARIANT 117: note = Ancestral polymorphism is A, Derived polymorphism is G
  VARIANT 125: note = Ancestral polymorphism is A, Derived polymorphism is S
  VARIANT 148: note = Ancestral polymorphism is G, Derived polymorphism is S
  VARIANT 166: note = Ancestral polymorphism is E, Derived polymorphism is D
MEMEMESTWKTLFQRRVVLAAKHCYNVHERLLKVLVPLNADLQDRRRYPGPFAEATRRELEGASMELGLAVASMGAARHLALRGGAPCPSAPFDSVDDLAGDPGVWCALEKLANAAALATRVHDALELACGHLRAGEVLLALDEAGDGDEQSPSSEQLIGVMVLSEAMLKAADLATETAEAREAAFGFIGRRVK

SEQ ID NO: 7722 - protein, 312 aa, Zea mays
  VARIANT 30: note = Ancestral polymorphism is E, Derived polymorphism is D
MSTAVHAAAMAEDAAADLRRRMKDKRAAIERRITDSRDRAAAASSAFSAALLEARSIANQTVSNRGISNSWPPTSTTRLFFPPSALASPSSPIFGLVSIMDQPAKLSEQKQHLRKLESDLAQALSVQASRRSKHKFMTESISNTTATNEHLRHLAMDRRSTRDECMNAISNQLKDIESLEAESDAHGDKSLETALMWYDKFLGFQVVGGEGVKFVFNKIDVQNPDKKYSFCIKLAGERYILVWCVPSVDDAEELVKDLNCSNDLYKFVRAMREMFQAATISGNLLPSSFCPDVSSITSSSFSALSLDSRSEK

SEQ ID NO: 7723 - protein, 337 aa, Zea mays
  VARIANT 108: note = Ancestral polymorphism is S, Derived polymorphism is I
MEEEEGSSTSSVAVPVPPPPNKYDSWTTDPEELMMMMVDEAAVQQEGPRRRRDSMLNKLISTVYSGPTISDIESALSFTGGGDVDARNYNNSSAGPGALSSPEKVLMSKMENKYTLKIKTCGNGSSLAEDGYKWRKYGQKSIKNSPNPRSYYRCTNPRCNAKKQVERSTDEPDTLVVTYEGLHLHYTYSHFLHHQQPPPQPKKPKLGAGPPQQPIVVMDDDLLHGPAQQDIITTGPLGAAVMAPAPAPPPAAASFCYDLDDDVPAFFDDHDHHHHQQQHITNGGLLEDMVPLLVRRPCTTTTTTSAGSTSPDLSASSSVSWNPTSPYIDMAILSNIF

SEQ ID NO: 7724 - protein, 407 aa, Zea mays
  VARIANT 359..407: note = Derived polymorphism lacks residues 359 to 407
MRRSRRSQVSLFPTFPAGPLFQAMAKLPVLARSSIRSKPNENMRLVVVTIVGAVFGFLIGISFPTVNITKLHFPSSIVSYIEDKNSGISAQAILNHAWTAARNARGNGSQPISLDNFKVYVPTNPRGAESLAPGIVVPESDFHQHRLWGNPDEDLPFKPKYLVTFTVGISQKDNINRAVKKFSKDFAILLFHYDGRVTEWDEFEWSKRAIHVSVRKQAKWWYAKRFLHPDIVAAYEYVFIWDEDLGVDHFNGEEYIKLVKKYRLEISQPGLEPDRGLTWQMTKRRGDRQVHMFVEIMAPVFSRDAWRCVWHMIQNDLVHGWGLDFALRKCVEPAHEKIGVVDSQWIVHQVIPSLGNQGQSENGRAPWEGVRERCRKEWGLFQTRMAEAEKAYYEMMGITPPNVTFVS

SEQ ID NO: 7725 - protein, 569 aa, Zea mays
  VARIANT 283: note = Ancestral polymorphism is R, Derived polymorphism is C
MAALPLLRRLLAHRRLLSTTATTPAASSSNPPTPEAVLYAIHSLSKDPSQALAVFRRSAAAGKPVGSAAYNLMLRTLASHPSSAQRHFWPFLREMQEAGHSVDQGTYLAALASFKKASLTADYASLTAHYDKFRKGDKSAAAAAAEAVRDHDAAGLDSRLADIGLLPLTETAVITVLRELREHPIKALAFFRWAGRQQGYTHSSVSYNAMARVLGREESVPEFWELIREMKGAGMYVDIDTYLKLSRNFQKRHMVREAVELYELMMDGPFKPGQQDGPIIIRRISLGPSPDLELVNRVVNKFEAVWGVKTKELLDGVHRALTSNGLFDEAAEIVQTMRDQGHQPDNITYSQLVYGLCKADKLENARKVLDEMEAEGCVPDLKTWTLLIQGHCVAGDVDRAVQYFTEMIEKGLDADGDVLDVILKGLCSHEKVEEAYSLFVEMVDKAELRPWQGTCQHLIGDLLRVNKLEEALALLKTMKTCKFPPFADPFPPYIAKYGTVEDARNFFKALTVKTSPAPAAYLHVLKLFFAEGRYSEAQDLLYKCPIYIRKHPHVAKLFESIKIESASAS

SEQ ID NO: 7726 - protein, 112 aa, Zea mays
  VARIANT 58: note = Ancestral polymorphism is S, Derived polymorphism is N
MQGMATFELYRRSTIGTCLTETLDELVSSGAVSPELAIQVLVQFDKSMTEALEMQVKSKVSVKGHLHTYRFCDNVWTFILTDATFKSEEIQETLGRVKIVACDSKLLQPQHP

SEQ ID NO: 7727 - protein, 281 aa, Zea mays
  VARIANT 17: note = Ancestral polymorphism is G, Derived polymorphism is R
  VARIANT 30: note = Ancestral polymorphism is R, Derived polymorphism is C
  VARIANT 31: note = Ancestral polymorphism is E, Derived polymorphism is K
  VARIANT 53..281: note = Derived polymorphism lacks residues 53 to 281
  VARIANT 123: note = Ancestral polymorphism is C, Derived polymorphism is Y
  VARIANT 140: note = Ancestral polymorphism is G, Derived polymorphism is R
MERDYSSTDGGGCEMPGKKARKPYTITKPRERWSTEEHARFVDALLMFGRDWKKIEEHVGTKTTVQIRSHAQKYFLKVQKLGLAAGLPPMYPRRHFAIQQQSSVAGGSSAAAMPLLHGRQPTCAPVGMPGMQGLDLEWARASVTGAAAAAFAAGGNRFIGAPSLSGTSIDWAGGGGGGGGSASEASAMGVVEDQQQIELPLSPEDMPFAHVYRFVGDMFDADAPVPVEAHLQKLKEMDDITAKTVLLVLLNLENNLLAPQFEPVRRLLSTYDPTRALSGQL

SEQ ID NO: 7728 - protein, 761 aa, Zea mays
  VARIANT 31: note = Ancestral polymorphism is P, Derived polymorphism is R
  VARIANT 445: note = Ancestral polymorphism is S, Derived polymorphism is Y
MEDGAEKATTPDSSSSQAAPPALSAVYVNRRLVAGNRAMAAVHVALVATVIGQRALALLSAGTSSASPASRSLQVQHVAMALADLTLLFVWALSQSGLWRPVTRAAFPGRLLAAVPRGALPRVDVLVVTADPDKEPPLGVVNTVVSAMALDYPGGKLSVYLSDDAGSPLTLLAARKAYAFAARAWVPFCRRHSVQCPWPDRYFAGDDDDADGDRRREELAEERARVRKLYEKLKADIEAAKNDETISGSWSKDKRQNHDAYVEIIEDGDGVEEIPALVYVAREKRRAWPHHFKAGALNALLRVSGVVSNAPYVLVLDCDMACNSRASALDAMCFLLDRRPPPDSLAFVQFPQLFHNLSHKDIYANELRYIFGTRWFGLDGVRGPPLSGSGFYVRRDALYGATPTADFMPDATAVAELKTRFGHSDRLVASLRSPGVPPEAEAMMSLAALASCAYEAGTAWGAGVGFMYQSVVEDYFTGFQRFFARGWTSAYCYPEPRPAFLGSVPTNLNDVLVQNKRWMSGMLAVGVSRRHSPLACRPLLRASLLQAMAYAYFGFAALCAVPVLCYATLPQLCLLRGVPLFPCPAATAAAFASSLLQHMAEVCVSRRGRLDLRTWWNEQRFWVLNALTAQLFGCVSAAQELLGARALDFDLTSKAAVDGSLYQDGVFDFTGCSALLLPATTLSVLNAAAIVAGTWKMSSSSSSSSGGFHFAPQLFLMCYGAALSYPLLEGMFLRRDPARVPPRITALSVALAAVLLAAMLG

SEQ ID NO: 7729 - protein, 151 aa, Zea mays
  VARIANT 136..151: note = Derived polymorphism lacks residues 136 to 151
  VARIANT 72: note = Ancestral polymorphism is R, Derived polymorphism is H
  VARIANT 67: note = Ancestral polymorphism is L, Derived polymorphism is F
  VARIANT 54: note = Ancestral polymorphism is D, Derived polymorphism is V
  VARIANT 53: note = Ancestral polymorphism is A, Derived polymorphism is V
MHTALAPFLGLTTSHEAVKQAEKLVMQSLGVIESVWLKGDAKFLLGSPQPSIADLSLVCEIMQLEMFGDEVRDRFLGAHERILVWMDKVKKATSPHFEEAHELLFQVKKARMVQGSSSKAFEPRQSSKQHQSSDDQRQNKRQTDRQIDLVI

SEQ ID NO: 7730 - protein, 146 aa, Zea mays
  VARIANT 84..146: note = Derived polymorphism lacks residues 84 to 146
MGNAGSAPDQPKNSADGAGAADAESRRGPPSTVRFFPDAERHKARQPPPIKLEEEEGVPPPPATEEEMAPRNLWQWAFFSLLPSDRDGIGCSMAVHNIGHICLIGVMVYALGAFIVLRWAWAKRKENQDRKDSPDAGDGNAPDRST

SEQ ID NO: 7731 - protein, 1053 aa, Zea mays
  VARIANT 457: note = Ancestral polymorphism is D, Derived polymorphism is Y
  VARIANT 433..1053: note = Derived polymorphism lacks residues 433 to 1053
  VARIANT 234: note = Ancestral polymorphism is R, Derived polymorphism is C
  VARIANT 64: note = Ancestral polymorphism is P, Derived polymorphism is T
MAFPADALVLEITDTSSSATAAAARAPSSPSPPPLSISDLARFDPLPSPTVAANRELLLLPRAPRRQLQVSENLSLELLLQVSGDWAGISSALCVDAVNPAESMCVWAAIWRLLCKCCATFLSLPRALTSRTTISSPCWRCYPKSPTSLIIQGALFLAVESLLVECQRWFGTIASQTSAMSVPLDFIIEVWYFAEEHGEFFCYSVLTFPGVTFVQDICQKFLAQNFVGTITALCAYSLRNIFPGDAHAISGRSFNKIPYDLLCSAIKCPHLTVDSEKQLCEAILYWVSENMKACEQSNPNSVDGHLFILSKQVKICLLPLGFAAGTMRHWFDFGNKIICTILDLLKDSLKTLLDAVDDGNLDRYCIRITEYSKVIHSPCTLCIKDNNFILQNIVLSGCPQVTTAFLYISVLPNDLSVSLKRRIVSSYTQVDHQTFVLYEELEKATKTLSFKNVHMVDISKCPNVHFGAAIDWLKLGFPELRVFRVSHCLSFQFDDLLYLLMRCPWIDEIDMTIDTSTVTPRHSVISSSSEVLSKAKPNQKRYGIHCSAYDRQPNSVFLNISRLTLEGRNDIDDMDLLEISVLKNSLCYINIRNCFLLTDDGISNLLMKCTKIHSMVLSYTSFGNRSIQMLCAANPSGHNSGHAHVMASYMQELHLDGCKGIDSVALSQLVSIISITKFLSLRETSLTDGALCKFVGSSLEYLDVSETVISMVSLAPVIQRNCKLNCLKTAGCCSLLLQCANVEHINGNKYGDFLQELGTTYCLEDVEMGWGFCPIRIEDLVPSFSKVRKMKIGLGTSLAENVLCALPMICPFLESLILRFQVISDRVVRRLLESATNLQVLCLHYCLGSLTSFSFQTKAPALRVLRLHWVTSWLTNDDLTILTENCNLAELSLSGCKLLDSSSQDIISSGWPNLALLHLEECGKVTVEGVSSFFNCKALEDVLLRHTVISESWEPQGRGIGRSIIDDAIRELPLLRKLALDLCDACEDGYDSPNDAEGKMIRSVRMSRCKKMAGSCLEVPRQGSSTSRPVHKDTVVLEWSSRMFTTTIVKERV

SEQ ID NO: 7732 - protein, 348 aa, Zea mays
  VARIANT 65: note = Ancestral polymorphism is E, Derived polymorphism is Q
MTERRAGMAVAVAVALLLLSSFGVASAAGRGRPTKKTLKPGEKPSPKSKFFPLSRTKFGHKRNYEASCADEGGPACYVGCPAECPNSCLVFCEYCLSFCQCDIFPGTSCGDPRFTGGDGNTFYFHGSKDQDFCIVSDAGLHINAHFIGNHNPALNRDFTWVQALGVTFVAAGGDHHHRLYVGARRAAEWDEDEDHVQVTFDGEPVDVDAARNARWASKALPGLSVRRTKDVNAVTVELDGAFAISAAAVPVTDEDDRVHRYGKTGRDSLVHLDLGFQFHNLTADVDGVLGQTYRPGYVTKLDISAKMPIMGGAPKYLSEGLFSTDCAVSRFHHRRDAAGAAVVTTYAS

SEQ ID NO: 7733 - protein, 511 aa, Zea mays
  VARIANT 62..511: note = Derived polymorphism lacks residues 62 to 511
MAAAAAAAVAHLSIHGRLRRSPEHRPSITTTTTSSSSSSAHRPSLLRCRAFKQEAGDGDPAEADARKRRKGPLYKLKAAIQGLAGSRSAAAEVYGGEYQYQRAVEKAEEIFFSVTTQLGRYVITMMSSGVVLGVGFQLSGGDSQMNELIWYSWLGGVIIGTMIGANSVLEEHCKAGPRNVVITGSTRGLGKALAREFLLSGDRVVITSRSPESVLQTIKELEENIQEGLSVAKKKQRNILSHAKVVGTDCDVCKPEDVKELVNFAINELGSVDIWINNAGTNKGFRPLVTFSDDDITQIVSTNLVGSLLCTREAMNVMQYQEKGGHIFNMDGAGSGGSSTPLTAVYGSTKCGLKQFQGSLLNESRRSKVGVHTASPGMVLTDLLLSGSSLRNKQMFNLICELPETVARTLVPRMRVVKGSGKAINYLTPPRILLALVTAWVRRGRWFDDEGRAVYAAEADRIRNWAESRARFSFTDAMEMYTENTWVSVFSLSVVCAFIILSSSGGPLPGT

SEQ ID NO: 7734 - protein, 143 aa, Zea mays
  VARIANT 36: note = Ancestral polymorphism is G, Derived polymorphism is R
MARSSFKLEHPFGSSLRFLIPPSSSGLQLMLLVVLGFRLLGCGENDDALPVVAKTPKRRTTLESQLIKFEDEDNEKARAAADAMSPVQDGLLIRKPPGMRFPSRRNVPMSADPVGHLHNGSSFDAFFETSAPKKDVYQLFAEK

SEQ ID NO: 7735 - protein, 308 aa, Zea mays
  VARIANT 272: note = Ancestral polymorphism is P, Derived polymorphism is L
MQGGGGDEEDALAGRRPPRGGGDDEKMEIGWPTDVRHVAHVTFDRFHGFRGVPEELLQQQAAAAVVVDVVDGIVRAPSASKTVFGVSTESMQCSYDGRGNSVPTVLLHLQRRLVDQGGLRAEGIFRVAADGAQEQYARDQLNNSGVVPDGVDVHCIAGLIKAWFRELPGGLLDALPADEVTRCQTEEDCARLCGARLPAPRAALLDWAVNLMADVAREEKANKMGTRNVAMVFAPNMTRADDPLTALAHAVQLMNFLNMLVERALKHEHHRLASSSSSSSARAPTRPHSESEMRSSHDDADRSPDLIK

SEQ ID NO: 7736 - protein, 472 aa, Zea mays
  VARIANT 230..472: note = Derived polymorphism lacks residues 230 to 472
MGRLTEEQAAREAGSAGTNAMSLKLTHRALSDVSCLSSFKNLEHLDLGFNCLVTLEGLSSCANLKWLSVKENKLVSLKGVEGLSKLQVLNAGKNELTKMDEVTSLTSLGALILNDNNISSICKLDQLQQLNTLVLSKNPVFTIGNALVKAKSMKKLSLSHCQIENIGSSLVKCVELKELRLSHNKISTIPSDLAKNVKILSLDLGNNFIERSSDLKVLSELRYLRNLNLQGNPVSKKDSLVKKVKKSVPTLRILNAKPLEATSKSDKRSTKENPPSKDEDLIGIDAKKKDKRKGSKQEVKGLEELEVQSVSTGITTSNPGKLEVPDSKEKKKVKEAKTKKSEEPYHANNSSLKNKEVQSFVYDTSTKDKKEAKRKKFVDEEDVDAEGIDNTEISFADLMFSNVGNPETKLKNISTLEAAPDGKSVGGLVIDHTKKRKKPKGVVTITDSSALKMFSSMPEVGAGGLGLSGWDE

SEQ ID NO: 7737 - protein, 503 aa, Zea mays
  VARIANT 16: note = Ancestral polymorphism is G, Derived polymorphism is E
MAMLCRATRVLRKVCGLGPAAAARRLSAAEAFAACEGSLLRPLPGLDLPPCLPDNLSRSPTRITTLPNGLRVATEDVPCGLILKLIYGARLRQGPSACIGFFVDSGSIYESGETTGVSHLLERMAFKDTKHRSHLNIVSELELAGGNVGASASREQMVYSYDTLKGYMPEALEILIDCMRNPLFLQEEVERQLVLAREEVNELQKNPEKFLHEQLNLVGYSGALANPLIAPEDALARINDKIIQKFYHENFTADRVVLAASGVDHEHLLGYADLLLKDWHKGTPMEKPKSTYVGGDSRHRADSDMTHVALAFEVPGGWLQERDATIMTVIQTLMGGGGSFSSGGPGKGMHSRLYRRVLNKYHLVDSFSAFNNVYDSSGLFGIYLTTPSDFVAKAVDIAVSELIAVATPGEVTEVELQRAKNSTISSVLMNLESRVVVAEDIGRQLLSYGCRKPIDYFLQCMEEITLDDVATFARKMLATQPTMASWGNVDKVPPYEFICKRLQ

SEQ ID NO: 7738 - protein, 298 aa, Zea mays
  VARIANT 102..298: note = Derived polymorphism lacks residues 102 to 298
  VARIANT 86..298: note = Derived polymorphism lacks residues 86 to 298
  VARIANT 43: note = Ancestral polymorphism is T, Derived polymorphism is I
MGFFHGLMLEAKKEISERFDNDESRYKVAWDIIDKRWDSKLKTPLHLVGYYLNPYFYYPKMSKIEHDGSFRAGVINCITKMIGDEETQDKIIEELYMYQDQQGTFGHEIAIRQRRNKNFNPAKWWLNHGTNTPNLMILASIILNLTCSSSACERNWSIQKRRNKLLDDRMRGLVFVKFNSKLRGKKERTDRDPLQREVDDVVGDDENEFITGIVPLPNDVVEPAQDGRSHEEQTSQAQVQVQAKRKRSMKPRKKLRSLQSLMRDVQVQVQQSSSDSEDGDIAMESSESDKSPHAFDSD

SEQ ID NO: 7739 - protein, 346 aa, Zea mays
  VARIANT 203..346: note = Derived polymorphism lacks residues 203 to 346
MAASAAAAGPATFLPRLPSPRSPSPMLPPLGRRAHPVAAPLCLSAKRRACAAMGSSSSSNSGNQTSLMLPFSFTFDEDSSSSRRLYRWKRVLLKVSGEALAGNHTENIDPKITMAIAREVASVTKLGVEPLQVAIVVGGGNIFRGASWAGCSGLDRSSADYIGMLATVMNAIFLQATMESIGIPTRVQTAFRMSEVAEPYIRRRAVRHLEKGRVVIFAAGTGNPFFTTDTAAALRCAETVNAEVVLKATNVDGVYDADPRQNPNARLLETVSYHEVTTRDLSVMDMTAITLCQENNIPIVVFNLQEPGNIAKAIVGEKVGTFIGCTRDQELNGNTLVQERRLVNEA

SEQ ID NO: 7740 - protein, 377 aa, Zea mays
  VARIANT 145: note = Ancestral polymorphism is P, Derived polymorphism is A
  VARIANT 8: note = Ancestral polymorphism is R, Derived polymorphism is G
MNYGGGSRSSSRLRDRLARMFRPSALLRSTCNTAAAASSCSSSSPASTAKPPPPPVAAAASACSSSRALLGAVVDGDSSFLASSRRDLAVAGRAESFSAAVDRRRRSRSSLDAAPPPSRFSVDAPAALAETGRDKEEKKKKKKSPRDDDDDEHRLGVGGSSKNDSRMKLLLSNPYGFSSSDDTDVFSSDGEDDDRAAGRGSKRPGESAAETFFSSSRSFSSDSSEFYTNNKKQHKKKTATKAKAKAKGMAKAKPPAAAPSDRSSKAPASSSRRRPQYHRRAASSCDTCGVRDGFRPVVVVSAAAEEQVRRGFAVVKRSRDPYGDFRSSMVEMIVGRQLLGAPDMERLLRSYLSLNAPRHHPVILQAFSDIWVVVHGG

SEQ ID NO: 7741 - protein, 387 aa, Zea mays
  VARIANT 261: note = Ancestral polymorphism is T, Derived polymorphism is A
  VARIANT 226: note = Ancestral polymorphism is A, Derived polymorphism is D
MPPPNSAPRLALPAMARSQTQTQSQGDLDFPSLISDLTSLLLHSPASAGAGGSGPVFSSSSLSIPTPKPKPNPSPTSAAPPTPLARAAIGACAGAAAGAFTYAALLPIDAVKTRLQVQAAAAPSVTSWQVFLDILRTDGPLGLYRGLSAVILGSASSSAVYFGTCELAKSLLRPHLPPFLVPPLAGASGNVSSSAIMVPKELITQRLQSGAATGRSWQVLLGILRADGFLGLYAGYAATLLRNLPAGVLSYSSFEYLKAFALRRRGGESLTPGESVLCGALAGAISAAVTTPLDVVKTRLMTRVGGAEGSRTVLGTMREVVAEEGLVGLSRGIGPRVLHSACFAALGYCAFETAKLAILQCYLERCQSKEPGAAAQPETEPGAAAAT

SEQ ID NO: 7742 - protein, 206 aa, Zea mays
  VARIANT 45: note = Ancestral polymorphism is P, Derived polymorphism is L
  VARIANT 44: note = Ancestral polymorphism is R, Derived polymorphism is W
  VARIANT 18: note = Ancestral polymorphism is G, Derived polymorphism is D
MALAYAAARLVHPCISMGMVSKQHPRTPPPSSCCLHLHHIFYLRPVASSHHLARHSVDVTKDDKPLEPPAPAPAAETERESTHQQEDEDGGPKLDPRRFEEKFAVLNTGVHECRSCGYRYDQTAGDPSYPVPPGLPFMQLPDDWRCPTCGVARSFFESKSVEIAGFAQNQQFGLGGNSLTSGQKGLLIYDSLLIGFLFFISGYFLQ

SEQ ID NO: 7743 - protein, 69 aa, Zea mays
  VARIANT 55..69: note = Derived polymorphism lacks residues 55 to 69
  VARIANT 53: note = Ancestral polymorphism is E, Derived polymorphism is K
  VARIANT 34: note = Ancestral polymorphism is T, Derived polymorphism is M
  VARIANT 26: note = Ancestral polymorphism is P, Derived polymorphism is L
  VARIANT 13..69: note = Derived polymorphism lacks residues 13 to 69
MINICKRSYITHQVGYELYFGKTVYPEPERCRRTDDKKWRCSNEAVPVSKYCERQMHRDHNHSRKHVKK

SEQ ID NO: 7744 - protein, 789 aa, Zea mays
  VARIANT 179..789: note = Derived polymorphism lacks residues 179 to 789
MALPIRLLSWLALATLLSVPGAAAQPVTNITAGNSLQAAAGAAWPSPSGRFAFGFYVTDGGLAVGVWLATTPNVTVTWTANRNVTPSTGGALWVTYDGRLVWTGPADGQDRPLAVPPRPATAAAMRDDGSFVLYGADGAMVWSTFAAAPTDTLLPGQDLVPGAQLFSSVSPTNSATGRYRLTNQINDGNLVLYPVQTENTANAAYWATGTFQIGFPLTLRIDTTGVLYVTGNGGNYTKNLTLPWAAPSPGEADVFYRVTLDPDGVLRLYRHAVTRGGAWTTGVQWVGPNDRCHVKGACGLNSYCVLSRDAQPDCRCPPGFGFIDAADATLGCTETSSAGGCAAAGSSAAPAMAAMQNMSWADTPYAVLGAGTSAADCQAACVADCLCAAVLLDSSDGTCTKQQLPLRYGHAGGGFTLFVKNAVGGPALDGGRDRRVGRSTTVALVCIGILTFVSLAALVAAVRLVLANRRTTAEPDAAEALDEEAPLRSYSYQELDHATWSFREPLGRGAFGTVFRGTLLYSGGEKAIAVKRLEKMVEEGELEFQREVRAIGRTSHRNLVRLLGFCHEGANRLLVYEYMSNGSLAERLFKNSGGGGPPGWDERMGIALDVARGLRYLHDELDSRVIHCDVKPQNILMDASGTAKIADFGLAKLLQPEQTRTFTGVRGTRGYLAPEWYRGAGPVTVKADVYSYGVVLLEIVTCRRSMELEEAGEERTLMECAHEWLVRGEVWRVVGGDDAVDVTEVERAVKVAVWCAQAEPQARPDMRSVILMLEGLVEVPFPPPPPASL

SEQ ID NO: 7745 - protein, 166 aa, Zea mays
  VARIANT 37..166: note = Derived polymorphism lacks residues 37 to 166
  VARIANT 45: note = Ancestral polymorphism is A, Derived polymorphism is T
  VARIANT 52: note = Ancestral polymorphism is G, Derived polymorphism is S
  VARIANT 60: note = Ancestral polymorphism is E, Derived polymorphism is K
  VARIANT 114: note = Ancestral polymorphism is A, Derived polymorphism is T
  VARIANT 164: note = Ancestral polymorphism is L, Derived polymorphism is H
MIAATLEIIRAAPIEGVIKLGVVPRFVQFLTREDLSQLQFEAAWALTNIASGTSRNTKFEAAWALTNIASSTSENTKVVIDHVIVPTFVKLFASGSDDVREGKPQPSFDQTKPALPTLARIIHSNDEKVLTDACWALSYLSDDTNDKIQAVIEAGVCPWLVELLMY

SEQ ID NO: 7746 - protein, 362 aa, Zea mays
  VARIANT 316: note = Ancestral polymorphism is V, Derived polymorphism is G
  VARIANT 25: note = Ancestral polymorphism is S, Derived polymorphism is R
  VARIANT 19: note = Ancestral polymorphism is L, Derived polymorphism is I
MAFKKAAIGLSSLLLILVLLLVAPSATAARPTRQLTSDDDDDGTGAAAPAAAPAIAHPAADAPVTADASPPVVGGAGVVAAPGGAVAADAPVAANAIPAAAAAAPVAASTIPVGAGAGAAGAGAASGADGHGMVFFMHDILGGTNPSARIVAGIVDNAAVTGQLPFARPNGAVLPLNSGVNVNSGAAGAIDNNNIPFLTGLGGATNAAKSVGSNGNGNGNGNGVPVFAGGSLPQGTTLQKLLFGTMTVVDDELTEAPELGSAAVGRAQGFYIASSEEGVSQTVAVTAMFKEGGFDDTISFFGVHRTADSESHLAVVGGTGKYVGAKGFAKVAVVRPGGVAASGALLETDGVESVLQFTVFLV

SEQ ID NO: 7747 - protein, 861 aa, Zea mays
  VARIANT 19: note = Ancestral polymorphism is C, Derived polymorphism is W
  VARIANT 405..861: note = Derived polymorphism lacks residues 405 to 861
MSVALPIAVVGLLALVGACRSAATDTLSPRQVLAGNDTLVSNNSKFTLGFFKAPDGAAGSADKWYLGIWFTAVPGRTTVWVANGANPIIEPDTGSPELAVTGDGDLAVVNNATKLVTWSARPAHDANTTTAAAVAVLLNSGNLVLLDASNSSSTAAAAPRRTLWQSFDHPTDTLLPSAKLGLNRATGASSRLVSRLSSATPSPGPYCFEVDPVAPQLVLRLCDSSPVTTYWATGAWNGRYFSNIPEMAGDVPNFHLAFVDDASEEYLQFNVTTEATVTRNFVDVTGQNKHQVWLGASKGWLTLYAGPKAQCDVYAACGPFTVCSYTAVQLCSCMKGFSVRSPMDWEQGDRTGGCVRDAPLDCSTGNNSNASAPSSTSDGFFSMPSIGLPDNGRTLQNARSSAECSTACLTNCSCTAYSYGGSQGCLVWQGGLLDAKQPQSNDADYVSDVETLHLRLAATEFQTSGRRKRGVTIGAVTGACAAALVLLALAVAVIIRRRKKTKNGRGAAAGGGLTAFSYRELRSATKNFSEKLGQGGFGSVFKGQLRDSTGVAVKRLDGSFQGEKQFRAEVSSIGVIQHVNLVRLVGFCCEGERRFLVYEHMPNRSLDIHLFQSGGGVFLDWSTRYQIAVGVARGLSYLHDGCRDRIIHCDVKPENILLGASLLPKIADFGMAKFVGRDFSRVLTTMRGTKGYLAPEWIGGTAITPKVDVYSYGMVLLELVSGRRNAGEQYCTASGSGDDDAAREELAFFPMEAARELVKGPGVVSVSSLLDGKLCGDADLVEVERACKVACWCIQDDEADRPTMGEVVQILEGVLDCDMPPLPRLLETIFGRPHSSTEQQTTTVSGTSTSQPFTSGSGSHN

SEQ ID NO: 7748 - protein, 202 aa, Zea mays
  VARIANT 19: note = Ancestral polymorphism is V, Derived polymorphism is M
  VARIANT 18: note = Ancestral polymorphism is T, Derived polymorphism is A
MMEKRHGGDGGAGAGGFTVLHLLGAGVLAFLLPRAAGATDDAKWHAHAHSAAGSNGAVTVGHGAPAPHVHAAGLPPLSAPAPTAGADDLPPPPAPVPTSVSSPPSREPGPHFGFPLQPGPGTASAAAPGLGPGGEGYPFIGSNPTVPLPTGTTNTATVLPLTDTGDAAAAATKVVGLAASLGARVSMIGLGISLATLSLSKI

SEQ ID NO: 7749 - protein, 167 aa, Zea mays
  VARIANT 20..167: note = Derived polymorphism lacks residues 20 to 167
MAAFATGSTTARATLASPTSCQPAARRAPARWMPLRCSPPALGLRGGARSRRSATLRVEAKKQTFSSFDELLEKSEKPLLVDFYATWCGPCQYMVPILQEVSEKLGDKIQVVKIDTEKYTSIASRYRIEALPTFIIFKDGKPCYRFEGALPVDQMIEQIENALAVTK

SEQ ID NO: 7750 - protein, 136 aa, Zea mays; identical to SEQ ID NO: 3315
  VARIANT 99: note = Ancestral polymorphism is A, Derived polymorphism is V

SEQ ID NO: 7751 - protein, 266 aa, Zea mays
  VARIANT 96..266: note = Derived polymorphism lacks residues 96 to 266
  VARIANT 241: note = Ancestral polymorphism is G, Derived polymorphism is D
MSSAQDPFYIVREEIQESIDKLQSNFHRWEQTASNTGEYVHLTKELLTSCESIEWQVDELEKTISVASRDPSYYGLDEVELSRRRNWTGSAHKQVCIRSYCSNSSVICQCTLIFYMDPHLHFMHEHIQVGTVKRAIEKGKSNVATSKYQDTSRTNHYSAQDNDDFISSESDRQLLLMRQQDEELDELSESVQRIGGVGLTIHEELSGQERILNDLSLEMETTSNRLDFVQKRVAMVMKKAGIKGQIMLIVFLVVLFIILFVLVFLT

SEQ ID NO: 7752 - protein, 183 aa, Zea mays
  VARIANT 39..183: note = Derived polymorphism lacks residues 39 to 183
  VARIANT 11..183: note = Derived polymorphism lacks residues 11 to 183
  VARIANT 1: note = Ancestral polymorphism is V, Derived polymorphism is M
MSSSPDFADGQDPPQPPPTLQPQGAPSAPSDVCEGLVAQVDQFLREALEKPRERLSVLRMEQEILKFIHDPSRTEYEFNGLPTSYLRLAAHRLAQHYFLQSIAIPDNSLPDGTGSRIILRKTTFDCRLPAVRLADIPVNLPQEDISVAKVAIKQRPQKNFHGMNSSSAHSSRDNLQKSVEERK

SEQ ID NO: 7753 - protein, 558 aa, Zea mays
  VARIANT 141: note = Ancestral polymorphism is G, Derived polymorphism is A
MEDGLEEPPPAGSAAANASSTSGGGSGGSKGSPCEECGEQPWKYRCPGCGRLTCSLPCVQAHKRRTACTGKRPRTDPVPLARFDDNQLISDYNLLEEVKQAHDSAHRLIGGFGRNYGGRGSGGAQLPRWLFYLSKAAHRRGVKLCFLPRGMARREQNRSQHNYRKDCIFWTLEWKFNSTDVVLTDHGIDEHTTLLSLLEKHLIPGPWKDQLTQYRNTKLHDLKLFIQKCAKQSESPYRLLNIEEPLRPQLRGILVVEYPTINVFLPSDNCDFEMEKMVNRLPKDGKGPGSMTDEPPVEGSKFHEEEIEEGELSPETEIIDLKDHGTSNACKISPADVTSESKIVNNVDSSVLSYPGCQAQALHGQPKGLNQYSKISPNGTSGPAETKSRMEVCPLDMEKTRESGLSSEGRVVDLKGYGISYPVSTAEAGGAALSKIDTKATYPLVPSSTSIVVSDGATGPQLEHSQQNKRTPSSTPEALKRKSCMKVYPLDIDEGLFPEVPDLAFEQEMLDTYPELFENMDVDDFLSCDFAMVNRDEPVDATSGLPRDDLEEGEIPTL

SEQ ID NO: 7754 - protein, 79 aa, Zea mays
  VARIANT 56: note = Ancestral polymorphism is S, Derived polymorphism is P
  VARIANT 34: note = Ancestral polymorphism is V, Derived polymorphism is A
MDFVLQVLLRVVMRRSIRRLQEVVDIAVDIGTAVFVAVRVSGLVFRRRLPTPTTTSSSSTTYYYSPGTSSSIGMHVQED

SEQ ID NO: 7755 - protein, 79 aa, Zea mays
  VARIANT 68: note = Ancestral polymorphism is V, Derived polymorphism is A
  VARIANT 63: note = Ancestral polymorphism is E, Derived polymorphism is K
  VARIANT 31: note = Ancestral polymorphism is Q, Derived polymorphism is L
  VARIANT 24: note = Ancestral polymorphism is R, Derived polymorphism is K
  VARIANT 12: note = Ancestral polymorphism is I, Derived polymorphism is V
MARKEKVPKGFIPILIGQGEERERILVHMEQFKQSYFLELLDLAAQEFGYEQQGILRIPCTTEAFRSVVIGAVVRKPKS

SEQ ID NO: 7756 - protein, 85 aa, Zea mays
  VARIANT 51..85: note = Derived polymorphism lacks residues 51 to 85
  VARIANT 45: note = Ancestral polymorphism is G, Derived polymorphism is R
  VARIANT 13: note = Ancestral polymorphism is S, Derived polymorphism is L
  VARIANT 1: note = Ancestral polymorphism is M, Derived polymorphism is I
MVISEIDSSIATSLQAVKLLALYLTGDKEGAISSLKEWLSDSATGSNLVLRLIAGIIFMREQDYNEALKHTHSGGTLDLYVYLFP

SEQ ID NO: 7757 - protein, 743 aa, Zea mays
  VARIANT 267..743: note = Derived polymorphism lacks residues 267 to 743
MLLRLRPPRHPSTAAATTLSSFLPSTSFRRLIPLPRWRPPPRRRLSAAAKDSIGRLDPRQERYDVIVVGGGHAGCEAALASARLGARTLLLTLNIDRIAWQGTDSVPSIRSVVLLQLIFCPTQPCNPAVGGPAKSQLVHEVDALGGEIGKITDRCYLQKRVLNSSKGPAVRALRAQTDKREYAIEMKNSVESTENLFIREAMATEVLIGKNDSIEGVRTFFGMDFYAPSVVLTTGTFMSGKIWVGRTSMPAGRAGESASHGLTENLQFLGFETDRLKTGTPPRIDRRTVDFSGLEPQHGDEEVGWFSFDPEFHVEREQMCCYLTRTTKETHQIVIDNLDETPTYGGWVEAKGPRYCPSIEDKIVRFKDKESHQIFLEPEGRNVPELYLQGFSTGLPERLQLSLVRTIPGLENCLMLRPAYAVEYDYLPAYQCSRSLMTKKIEGLFFSGQINGTTGYEEAAAQGIISGINAARHSDGKSLIILERESSYIGTLIDDLVTKDLREPYRMLTSRSEHRLLLRSDNADSRLTPLGREIGLIDDRRWELYQSKQARIKQEKERLRSTKVPGEHHISNVLLSGGEFAAEVTAVSNQPVKDSSTLEAILKKPHVQYKLLDEHGCGNENLSRIEKECVEIDIKYEGFIARQQSQLHQIVNQEHRKLPEDLDYHSMTNLSLEAREKLSKVRPQTIGQASRIGGVSPADMTVLLIWMESNRRMATHRRQREQLGSVAVESDGSSEEAVQASTA

SEQ ID NO: 7758 - protein, 776 aa, Zea mays
  VARIANT 8: note = Ancestral polymorphism is L, Derived polymorphism is R
MEAFYLHLLRSCAALPHVAAVHAHLARAHPNASLFLRNCLLASYCRLGVGAPLHAARLLDEMPRRNAVSYNLVIVAYSRAGLPALSLATFARARAWARVVDRFTYAAALAACSRALDVRTGKAVHAMVVLGGLGNGLFLSNSVASMYARCGEMGEARRVFDAAEERDDVSWNALLSGYVRAGAREETLEVFSLMCRHGLGWNSFALGSIIKCCASSSSYAAAGDVGGGRIAEAVHGCVVKAGLDADLFLASAMIDMYAKRGALTNAVALFKSVPDPNVIVLNAMIAGFCREEAADVAREALGLYSELQSRGMQPSEFSFSSILRACNLAGEFGFGKQIHGQVLKHSFQGDVYIGSALIDLYSGSGCMEDGYRCFRSLPKQDVVIWTSVISGCVQNELFEEALRLFQESVRCGLRPDVFAMSSVMNACASLAVARTGEQIQCLAVKSGFNRFTAMGNSFIHMCARSGDVDAATRRFQEMESRDVVSWSAVISSHAHHGCARDALCVFNEMLDAKVAPPNEITFLSILTACSHGGLVDEGLRYYGIMNDEYGLSPTIKHCTCVVDLLGRAGRLADAEAFIRDSAFHDDAVVWRSLLASCRIHGDMERGQLVADKIMDLEPTSSASYVILYNMYLDAGELSSASKTRDLMKERGVKKEPGLSWIELSSGVHSFVAGDKSHPESKAIYRKVAEMVSKVAGISSREQDLAGCHSEKLAVAFGMIHLPQSAPIRVMKNLRVCRDCHSTMELISKSERREIILRDAIRFHRFRDGSCSCGGYW

SEQ ID NO: 7759 - protein, 379 aa, Zea mays
  VARIANT 331: note = Ancestral polymorphism is F, Derived polymorphism is S
  VARIANT 330: note = Ancestral polymorphism is A, Derived polymorphism is S
  VARIANT 280: note = Ancestral polymorphism is G, Derived polymorphism is R
  VARIANT 276: note = Ancestral polymorphism is V, Derived polymorphism is I
  VARIANT 195: note = Ancestral polymorphism is G, Derived polymorphism is E
MGGGGSKAPFSNTNTDAASPEKLPPLERLPPARYGKHITMLSIDGGGIRGLIPLVILESLEKKLQDLDGKQARIADYFDVIAGTSTGGLIAAMLAAPDEERKRPRFRVQEITSFYKDHGHNIFKRDGLLGLLYRAIPLMPVLMGPKYDGVYLRDRIEEKMKGLTMGDTRTNIVVPAFNVRSMMPVVFSSFGPRRGPWSRLADICIATSAAPTYFPAHNFPIRSSTTNGSQYHHDLVDGGLAANNPTMIAMAMVAQQINHYRNRYFPPRLDYDKLIVVSLGTTYAKEIDSYTAGDVAQWGALRWVRDGPRRTPLFDMLSCANDYLVNVNIAFLFHSKKFQNNYLRIQDVTLVNNLISATIYILLYHTVNLTIITLKTKEY

SEQ ID NO: 7760 - protein, 394 aa, Zea mays
  VARIANT 101: note = Ancestral polymorphism is R, Derived polymorphism is S
  VARIANT 96: note = Ancestral polymorphism is R, Derived polymorphism is C
MATRILSRQNLRKLASFTLQNISQRQLVPPYPPALRSTIVSPSKFLSPLYLSGHSLAVRWATYGSVNLVLSDDGKPKFQIEEVEPSTKRRYLTKKRLKLQRKKEKKKRKEANKNDPRRIRPKGKKIKQKFPTPEARLKYKIEKAKLKEARLVEKLKKYEIAKAQGPMAKVDDLSGEERFYLKKVSQKKSNYVPVGRRGVFGGVILNMHLHWKKHETVKVICKPCKPGQIQEYANEIARLSGGIPVNVIGDDTIVFYRGKSYVQPEVMSPVDTLSKKKALEKSKYEQSLETVRRFIAISEKELELYYRHVALYGISQSQKSDLVCGDDREASLLKMEGLDRGKGQEPHLATNHFSDLHIGDVSESDEEDSSGSEYDADDDDNETESMASVSEDAS

SEQ ID NO: 7761 - protein, 429 aa, Zea mays
  VARIANT 171: note = Ancestral polymorphism is A, Derived polymorphism is T
  VARIANT 304: note = Ancestral polymorphism is G, Derived polymorphism is R
MAAPSHVLPFLSPAGGCAASSARAHSGYRAGLLRCSAAAGQAGFFTRLGRLIKEKAKSDVEKLFSGFSKTRENLSVVDELLTYWNLADTDRVLDDLEEVLLPTTASVLPLTLSAACPICSVLMMLLADAHPVTQALLVSDFGPKISFRIVDTLREEIRDGKLKSGAEIKAALKRCILELLTSKGGNSELNLGFRKPAVIMIVGVNGGGKTTSLGKLAYRFKNEGVKVLMAAGDTFRAAARDQLEVWAERTGSEIVIDNDKKAQPPAVLSQAVKRGKREGFDVVLCDTSGSMVVTTDFDYHLFIGIYLLLAEINDIGAPFAGLHTNYGLMEELVSCKKVLAKALPGAPNEILLVLDGTTGLNMLQQAREFNDVVGVTGFILTKLDGTARGGCVVSVVDELGIPVKFIGVGEGMEDLQPFDAEAFVEAIFP

SEQ ID NO: 7762 - protein, 171 aa, Zea mays
  VARIANT 133: note = Ancestral polymorphism is D, Derived polymorphism is G
MLLRLKIVVGVHSVVLPVPVRGGFGHGACYAALEPCWRRSRRPALAAAGGLVTRRPRSATVVMALKEEPEGSRRGFVGSGSSWDPGLEIQVPSDPFLLWIRKESLNVGDHIYSWKATCFLSFQVVDAKVIHLGYNNSCIFLSLKDVKVMVETTLGKEELKEAVLMCTNRVS

SEQ ID NO: 7763 - protein, 565 aa, Zea mays
  VARIANT 304: note = Ancestral polymorphism is F, Derived polymorphism is S
MPLDELADKGPSSSEEVQLAPSDSKFRSLSPSPIPLPTLPSIRSLVHSVSDESVNVDVAASHQSENGSISTVSSLESERAAYEFLAQTPVRSTDAHLVEFSEAMRTVAKALRRVAEGKAAAQAEAAEWKRKYELETAHKHRSKIKGYSSCINNDLDKLVSQLTLETPTSDQLGCCGKHGICAHEILQDEVPGPIPRSNHKVVGRKASFKLSWGCNGDKNGQHKHDFVSFEKGDITTAERSNKQILLKWESPPQTVLFITKPNSNSVRVLCAEMIRWLREHKNINIFVEPRVSKELLTEDSYYNFVQTWDNDEEIKMLRTKVDLIITLGGDGTVLWAASLFKGPVPPVVAFALGSLGFMTPFPSEQYRELLDNVLNGPFSITLRNRIQCHVIRDEAKDEIVSEEPFLVLNEVTIDRGISSYLTNLEVYCDSSFVTCVQGDGLIISTTSGSTAYSLAAGGSMVHPQVPGILFTPICPHSLSFRPLILPEYVTLRVQVPFNSRGNAWASFDGKDRQQLSPGDALICSISPWPVPTACLVDSTTDFLRSIHEGLHWNLRKSQSFDGPRD

SEQ ID NO: 7764 - protein, 331 aa, Zea mays
  VARIANT 273: note = Ancestral polymorphism is E, Derived polymorphism is V
MEVKAHTARVLVARLRGATAARDGAAAAAVSEIRLATKTDPEIRAPLADAGALPLLAAQLQRASPAAVDAAAALLNISISARDQVASAPGVLDALTAALRSGDAAHHAAAVVHSLLCGGEPHRAAVCERRPLLAALVALLRAPPHRPGATRATKDALRALFGAALYPPARAALVSLGAVQALFALVLTDARDGVVEDATAVVAQVAGCAESLEAFRWVSGVRILLDLVESGGAATPRARENAAAALLNLVVAGGEAAAADVVAVGGAEETVRELAEDSAASPRGKAKAEALLRALEDAAVRRREHRLADFLDGLVQSDPYISSPASASTHG

SEQ ID NO: 7765 - protein, 292 aa, Zea mays
  VARIANT 215..292: note = Derived polymorphism lacks residues 215 to 292
MMAPSPVTCSPSAARHRPLQLRSPAPRAAVVAALPLRRREALPHALWIAADPWASARAWTSLGLGTGRRDAARCAAAGQVAGTSSAGVGRSAGMEVVVAAAAVVAMGTGNRVLYKLALVPLRKYPFFLAQFATFGYVVVYFSILYLRYRAGIVTDEMLSLPQKPFLAVGLLEAFGAAAGMAAGGPGFVLYERSVICFVFVGVAVLSGASIPILSQTYLVWQLLLSAIFLKRRYRINEIAGCFLVAIGVIITVASGSGTSASFKSSGILWPLLMIISFFFQAADTILKVENLV

SEQ ID NO: 7766 - protein, 170 aa, Zea mays
  VARIANT 93: note = Ancestral polymorphism is E, Derived polymorphism is D
MVVAVAARSSSSATSSSSELGSLFAAFDADADGRISAAELRECVRATLGPDAAAVSAEEAEALVAGADADGDGLLDAAEFARLVAGLHAGAAEEDRHRCLRQAFRMYSSDDDAAEGRGSSCITPDSLRRMLARLGAHQDVDDCRAMICRFDLDGDGVLSFHEFKVMMGAA

SEQ ID NO: 7767 - protein, 515 aa, Zea mays
  VARIANT 296: note = Ancestral polymorphism is W, Derived polymorphism is R
MSAARRRSPIPVLLFFLLLHSASPSPIKTVVVLVMENRSFDHMLGWMKRLNPEIDGVTGREWNPANASDPAAGRVYFRDGAAYVDPDPGHSFQEIRQQVFGSDDDAADNPPRMDGFAQQARSIGGGAMSDAVMRGFNPADVAVYRELVSQFAVCDRWFASVPSSTQPNRLFVHSGTSGGATSNNPTLLAEGYPQRTIFDNLHDAGLSFGVYFQDVPAVLFYRNLRKLKYLLDFHPLRPSFADHARRGTLPNYAVIEQHYLDSKLDPANDDHPSHDVYQGQMLVKYVYETLRASPQWNQTLLVITYDEHGGFFDHVPTPVAGVPSPDGIVGPPPYNFTFDRLGVRVPAILVSPWIDRGTVVHGPHGPTPTSQYEHSSIPATVKKIFGLPQDFLTRRDAWAGTFEGVVQGRTEPRTDCPEQLPTPTRIRQTEADEEAKLSEFQQEIIQLASVLNGDYHLATLQDRIKNDMNVREGIDYMKAAVKRYFQAGAFARRMGVDGDQIVKMRPSLTTRIQRP

SEQ ID NO: 7768 - protein, 86 aa, Zea mays
  VARIANT 42: note = Ancestral polymorphism is A, Derived polymorphism is V
  VARIANT 41: note = Ancestral polymorphism is R, Derived polymorphism is W
  VARIANT 33: note = Ancestral polymorphism is A, Derived polymorphism is V
MAAAAAAASSSSSSEVPIAARTCVSVGEVAVGAVATGSGDRVAADCGVCAICLDRIALQETALVKGCDHAYWFADIPYPFLQMITA

SEQ ID NO: 7769 - protein, 245 aa, Zea mays
  VARIANT 201: note = Ancestral polymorphism is G, Derived polymorphism is D
  VARIANT 77: note = Ancestral polymorphism is R, Derived polymorphism is C
MAGEKTASSGATDLVDPATATATAQKKPRGRPLGSKNKPKPPVVVTRESEAAMRPVVLELAAGCDVVGAVAAFARRRRVGVSVLCGRGAVAAVTLRLAASSAAVTLHGRFEVLALSGTVVPSSSSASASAPAFSVSLAGEGGQVIGGTLAGEMTAADGVVVVAAVFGSAQVHRLPAAGAEDEDSGGGREEGMRAQVAVGLGGTGTGGGLVVVGRQHAQQLPEVGLWGQQPTPAHVRGPVHALPRF

SEQ ID NO: 7770 - protein, 228 aa, Zea mays
  VARIANT 59: note = Ancestral polymorphism is A, Derived polymorphism is T
  VARIANT 38: note = Ancestral polymorphism is G, Derived polymorphism is D
MGNGPSLSPCLNPHLPESSATVRLVYWGGRARQLALTGGGDDAIVTAGDVAAELPPPATGYAVCPADAFFIGLPIPAMSPGEELLPGRTYFVLPAARLPCLKALTPATLAALSQSHGRKKQQPIFAVAGCPFEHVKGAHGGAPLIRVLPEFIEKLITACDAGANASANKDTAAKQAAELCSTPELKRHYAQLVGAGRSRPWSPRLETIAERGRSRWMRLAARTMLSSR

SEQ ID NO: 7771 - protein, 515 aa, Zea mays
  VARIANT 274: note = Ancestral polymorphism is D, Derived polymorphism is Y
  VARIANT 207..515: note = Derived polymorphism lacks residues 207 to 515
  VARIANT 53..515: note = Derived polymorphism lacks residues 53 to 515
  VARIANT 15: note = Ancestral polymorphism is A, Derived polymorphism is P
  VARIANT 8..515: note = Derived polymorphism lacks residues 8 to 515
MPLPSAAQSALVVAAVAIATATVLLPFPRTPPRDRFADMVLANGTIYTADPARPFADAMSVRGGRVLRVGTYESVKELKGPRTRELNLSGNVVLPGFIDSHVHFIDGGLQLARVPLRGVRSKDDLVARVKEAVRDKQPGQWILGGGWNDDFGGDGLPAAVWLDDISPDNPVWLSRMDGHMGVANSLAMKIAGIDKNTNDPIGGTIIRTTEGEPTGLLVNTAMKPIFDVIQNVSNHERREALLRASRHALMRGVTTVVDVGSYFPGASAEKTWQDFAVLIPLQKSINGLTLWKNDFESMLILPNAHMDLISEHGRSLSQWIHLGGVKAFLDGSLGSSSALFHEPYEGDPDNYGLQMTDLDSLLNRTLESDKSGLQVAIHAIGDKANDILLDMVDKIVDLNGAKDRRFRIEHAQHLAPGAANRFGKHGTIASVQPDHLLDDADHAWSKIGVERSERSSYTFRSLLDGGAQLAFGSDWPISDINPLQAIRSAVFRKPPGWEVPWIPAERLTLDESLKA

SEQ ID NO: 7772 - protein, 446 aa, Zea mays
  VARIANT 339..446: note = Derived polymorphism lacks residues 339 to 446
MGKAEMKQFAKSDIFVLKQHYEKKLDDLEQENKALQKEIENLHHALTNVCSSMDENAQKLKENYLQKLNALESQVHELKKQKSDEAAKRLQEDIQHIKSQKDQLQQKAKQESEKFMSWKAAPEKEVIQLKKEGRRNEYDMHKLLALNQRQKMVLQRKTEEAAAATKRFMELLEAKNSSLETYGSGNASGMQALMRAVDDELEVTIRAHELRSYYQRQMQERAAISKEIAKLEEEPKHKMSDCPQAMSPSARSFRISALENMSSSSSAMVSMASQLSEAEERERVFNGKGRWYHVRSLPEAENIMNHLFQLASSSRCKEKEHTIMELKEKLFNGLNNSKKSARSNGTGFAPRQRFGYSKDNFNWVDDMDISDSEQLDELEARDTEAAPRNSADIPLKLPRAMATPAESNPTLTDRNAAKPDKSVSTGIKDSTGAAATRPPSQLRLLR

SEQ ID NO: 7773 - protein, 146 aa, Zea mays
  VARIANT 75: note = Ancestral polymorphism is E, Derived polymorphism is K
MPAVRRLAGVPLRLSRAPRPHRGPSHVCGQRGLFRLRPPTIFVPACLWDLVERLFEVHRRAMDQSELNHNLVPLEVREEYELRRDLKVRAFRTYHAIPSQGYVIYSVKQKLKQEFIGLPGSEIKRLKLSGVEVCLAWWLWSSKIEA

SEQ ID NO: 7774 - protein, 238 aa, Zea mays
  VARIANT 70: note = Ancestral polymorphism is E, Derived polymorphism is K
  VARIANT 65: note = Ancestral polymorphism is Y, Derived polymorphism is C
MMFETCSCALQLWVGRHLIHHGKSDGGEVVVALFSVILSGLTNQEGTTLPQVQGNIEFRNVYFSYLSRPEIPILSGFFLTVGRAGLTLTDEHKIKISIARAVLSNPSIILLDEVTGGLDFEVEKAVQEALDVLMLGRSTIIIAKRLCLIKNADYIAVMEEGHLVEMGTHDELLNLDGHTPFNKLLNHASIFELQSHQARQTSTPDSLSRLISLPGRPMNSCLSFCFTEYITYPCIHTI

SEQ ID NO: 7775 - protein, 246 aa, Zea mays
  VARIANT 229..246: note = Derived polymorphism lacks residues 229 to 246
MNKLIGNSKRCQYKKLLLKHCSINSMAACCGYEGSVNEAIKMFNPMVHAGFIQNMWHVPAICFVAVYNELCFLQCLYLPAQLHLAVEECLFGSFRITGLTNNSYFDGAHEVRHYLRKHSDLGCIVLEVAKLPHGSENNNYIDQIRSMSQLYKPIIIQSLARNGILRLYSQYIKLWLLTKYKWLYATINYPHLMQKAIFEWRKPMIPHNEDAIQLAVLHVGLSICKKGPWFDETCKSGERKMEFMLT

SEQ ID NO: 7776 - protein, 420 aa, Zea mays
  VARIANT 299: note = Ancestral polymorphism is T, Derived polymorphism is M
  VARIANT 266: note = Ancestral polymorphism is P, Derived polymorphism is S
  VARIANT 265: note = Ancestral polymorphism is D, Derived polymorphism is E
  VARIANT 192: note = Ancestral polymorphism is R, Derived polymorphism is W
  VARIANT 158: note = Ancestral polymorphism is T, Derived polymorphism is I
MKTKTHAPCEAHLPICMRPISHGNPNPQPRHPALRPRPWLARLHPRSWPPVPCAPAACQPPPPHPSLKYFYFTADGRKSPDVEIPVDAPTMMHDCDVSPWPRQSHRDVRFSDEHLTDSGAHELTKDTRLTPFLLWLLLLHRNTTSHHSTVCDNDFAVTENHAIIPDQQIVFKLQEMVLGGSPVVYDRNKTARFGVLPKRATDASRLRWVDVPDCFCFHLWNAWEDEATGEIVVIGSCMTPADAVFNESAAGEESFRSVLSEIRLDPRTGTSSRRAVLSDADQVNLEAGMVNRQLLGRRTRYAYLAIAEPWPKVSGFAKVDLEAGTVEKFIYGDGRYGGEPCFVPHLDAPAGAAEDDGYVLCYVHDEGRGASEMLVVNARDMRAEAAVKLSGRVPYGLHGTFIASKNICSLQSGTALRVDV

SEQ ID NO: 7777 - protein, 146 aa, Zea mays
  VARIANT 116: note = Ancestral polymorphism is G, Derived polymorphism is R
  VARIANT 27: note = Ancestral polymorphism is M, Derived polymorphism is T
MLLQFYANIFYGLSGCCCNSMQRSALTKFQEDPTCMALVMDGTAALGLDLSFVTRVFLMEPIWDRSMEEQVISRAHRMGATRPIHVETLAMRGTIEEQMLKLLQDSNACRKIVDKRTGSTDNEGGRSHRSLHDFAESSYLAQLSSV

SEQ ID NO: 7778 - protein, 1151 aa, Zea mays
  VARIANT 127..1151: note = Derived polymorphism lacks residues 127 to 1151
  VARIANT 126..1151: note = Derived polymorphism lacks residues 126 to 1151
MAAAGERRKLCGYLRAVVSIPGGDVAAAASILPLSPCTLSACGAVALAPLPDDVRAQPRWPRSRAPGVVRLLRTLVANRCVEVEGTLLRVVTRRRPGEGEGDGAAVEARAVVLLDVYIPVAAWSGWQFPRSRSAAAAVFKHVRCNWDARKALLDFDWASHDNTHCDDQSVWRCTDCHVLDCEDHKIASISNKEKSFDLHEIFKTLPGVRMEKNMQVARITPDERALELGIWSVPDDVLHKVLILLKPRDLVRVAATCHHLRTLAATVMPCMKLKLFPHQEAAVEWMLKREQNVHVLAHPLYKDFCTEDGFPFYINVISAEISTGDAPTINDFCGGLFCDEPGLGKTVTTLSLILKTHGTMAYPPQGVDVSWCMHKPDKKCGYYELSPSFSSNRNSSSVSKKLLGEDVIADCPSPDDSVCSTRSSRKRGRLLSPDPTKVMLHAAIENSPSSSNSKVQPMPAMHILKFTKNSRQVRKNPMDAYSDVSVGNKRKIDTTSEVSETWVQCDACRKWRRVSDGTVLDSTTVWFCTMNPDPTRQKCTAPEESWDFKRKITYLPGFYKKNSLPGNEENVSFFTNILKDYVTMINSETKKALLWLAKLSPTKLLEMEFVGLTRPVLDTRATTGKGAHPYYKIFQAFGLVRKIEKGMTRWYYPSMLDDLAFDSAALGAALENPLDSTRFYLSTATLIVVPANLIDHWTTQIQRHVSSDTLNVFVWGDHKKPSAHNLAWDYDIVITTFSRLSAEWGPQKRSPLKQIHWFRVILDEGHTLGSSLALTNKLQMAVALVASNRWILTGTPTPNTPTSQVAHLHLMLKFLHDETYGQNYQSWDSGIHRPFEAQMEEGRVRLVQLLQRTMISARKADLKTIPPCIKKITFLDFNEGHAKSYNELVVTIRRNILMADWNDPSHVESLLNPKQWKFRAATLKNVRLSCCVAGHIKVAEAGQDIQETMDELVQQGLDPSSDEYQLIRYSLLNGASCFRCSVWCRLPVITPCRHLLCLDCVALDSEKCTLPGCGYHYEMQSPETRARPENPNPKWPVPKDLIELQPSYKQDDWDPDWQSTSSSKVAYMIEKLRSLREAHMNHGNNITNSVGHSNTLSYQPQAMLDKVIIFSQFLEHIHVIEQQLTIAGIIYSGMYSPMPLASKVCFIICGV

SEQ ID NO: 7779 - protein, 208 aa, Zea mays
  VARIANT 133: note = Ancestral polymorphism is G, Derived polymorphism is S
  VARIANT 125: note = Ancestral polymorphism is V, Derived polymorphism is D
  VARIANT 122: note = Ancestral polymorphism is V, Derived polymorphism is D
  VARIANT 120: note = Ancestral polymorphism is T, Derived polymorphism is I
  VARIANT 52..208: note = Derived polymorphism lacks residues 52 to 208
MANKLATTSLLAAVLLALAAPSLAGDPDMLQDICVADYKSLQGPLRLNGFPCKRPENVTADDFFSNALASPGSTCNALGSAVTPADVRTLPGLNTLGVSVSRIDYAPWGVNPPHVHPRATEVIFVLQGSLDVGFVAATATGGSRRPPRNSGGSPAAVLSAFDSQLPGTQPVAEALFGASPPVPTDVLARSFQVDGGLVEAIRSNFPPK

SEQ ID NO: 7780 - protein, 982 aa, Zea mays
  VARIANT 671..982: note = Derived polymorphism lacks residues 671 to 982
MSTAKVLDPAFQGAGQKVGTEIWRIEDFKPVALPKSDYGKFYCGDSYIVLQTTCTKGGAYLYDIHFWIGKDSSQDEAGTAAIKTVELDAILGGRAIQHRELQGYESDKFLSYFKPCIIPLEGGFASGFKKPEEEKFETRLYICRGKRAIRVKEVPFARSSLNHDDVFVLDTENKIYQFNGANSNIQERAKALEVIQHLKEKYHGGVCDVAIVDDGKLQAESDSGEFWVLFGGFAPIGKKTVSDDDVVLETTAPKLYSINDGQLKLEETALTKAVLENTKCFLLDCGAEIYVWVGRVTQMEDRKSATKAVDEFLINQKRPKTTRVTQVIQGYESHAFKSKFESWPVGNAAGNPGTEEGRGKVAALLKQQRVDPKGAAKSTTPVNEEVPPLLDGGGKLEVWCVDGNTKTALPKEDIGKFYSGDCYIILYTHHSGDKKEEYYLSYWIGKDSLVDDQVSASQIINTMWNSLKGRPVLGRIYQGKEPPQFVALFQPMVILKGGIGSGYKKLIEEKGAMGETYTTEGIALIRVSETSIYNNKTLQVDAVATSLSSTESFVLQSGNAMFTWFGNSSTYEQQQWAAKVAEFLKPGVAVKHCKEGTESSAFWFALGGKQSYTNKNTPQDIITREPHLYAFSFKNGLIQVTEIFNFSQDDLLTEDMMVLDTHGEVFIWIGQYVESKEKQKAFDIGQKYVEHANSIEDLSPHVPLYKVMEGNEPCFFKTYFSWDNTKSLVHGNSFQKKLSLLFGLRSEGAPRSSGNGGPTQRASALAALSSAFNPSSQQRLSNERPKSTGDGPTQRASALAALSNAFNPSLKPKTSPPSRSGRGSQRAAAVAALSSVLTAEQSGSSEFLRSKASNTAYKTDVDRIVITPAGPSGPSSPQSEAGESNVFHQEKDAAADGAPPDTDGAVAEAGEEETTENVGEATFSYDRLISKSTDPVRGIDYKRREAYLSDSEFQTVFGMTKDAFYRQPNWKQELQKRKADLF

SEQ ID NO: 7781 - protein, 259 aa, Zea mays
  VARIANT 47..259: note = Derived polymorphism lacks residues 47 to 259
  VARIANT 67: note = Ancestral polymorphism is P, Derived polymorphism is L
  VARIANT 238: note = Ancestral polymorphism is R, Derived polymorphism is S
MSGSTAPPHVVEDFLGVIQIFSDGSIVRGDESTIMPAGPCPDVPGVQWKDAVYEATRGLKVRVYKPPPTPGGGNQGKLPVLVYFYGGGYCGGAYDHPLFHSCCQRFAAELPAVVLSVQYRLAPEHRLPAAVEDGAAFFSWLRAQAQAQPAAPGAADPWLAESADFSRTFVSGGSAGANLAHHILWRMALPVGAIRDHPLANPFGPGSPSLEPLPLPPALVVAPERDVLHGHVWRYAARLREMGKPVELAEFAGEGHGFS

SEQ ID NO: 7782 - protein, 533 aa, Zea mays
  VARIANT 7: note = Ancestral polymorphism is P, Derived polymorphism is L
  VARIANT 122: note = Ancestral polymorphism is W, Derived polymorphism is C
  VARIANT 174: note = Ancestral polymorphism is L, Derived polymorphism is H
  VARIANT 225: note = Ancestral polymorphism is S, Derived polymorphism is F
  VARIANT 238: note = Ancestral polymorphism is K, Derived polymorphism is N
  VARIANT 239: note = Ancestral polymorphism is A, Derived polymorphism is V
  VARIANT 335: note = Ancestral polymorphism is L, Derived polymorphism is F
MDAAVAPLLAVAVLLFLGLRRRGGHRNHCPYPNPVLGNVVPLVRNLHRFLDWATDQLTAAPSSTIEVRGALGLGRGVATADPGVVNHMLRARFPNYVKGARFAGPFGDLLGSGIFLADGRLWSLQRKLASYSFSSRSLRRFSGRVLRGHLHRRLLPLLASAADSGEAVDLQDVLKRFAFDNICGVAFGVEGSTLLELEEAGGRGRGRPRRHDTFFEAFDAAVEISFARMLHPTAVVWKAMQLAGVGSERRLREAIRIVDEHVAAIMESEERSRGVGDGGGCDEQHLLSRFAAAMEEEEGSELGAMFRSPEAKRRFLRDIVVSFVLAGKDSTSSALTWFFWLLAANPRCERRVYEEVASLSLHRYGVDDEGGYDELRGLHYLHAALTEAMRLYPPVPINSRVAAAGDVLPDGTTVRAGWFADYCAYAMGRMPQLWGDDCREFRPERWLDGGGEFVAVDAARYPVFHAGPRACLGKEMAYVQMKAVVAAVVRRFAVETVRAASMEAPPPYEMTVTLRMKGGLPVKVKERSCIHRS

SEQ ID NO: 7783 - protein, 853 aa, Zea mays
  VARIANT 12..853: note = Derived polymorphism lacks residues 12 to 853
MTWVEIPRAEKKPLPTDDCIQIGWFPKDCMQIGQRLGYRRARRTVCRSDSGWGTGVQIGWFKKVLEKQSRESRAPSCRAGTDGRPGRKKRGRRAGRGVDDGWVDSVTLSKRFCRLGYRFGSLWIHAVLQTKHAIAEKHNFLIFEDRKFADIGNTVTMQYEGGIFRILDWADIVNAHIVPGPGIVDGLKLKLMNHGTHTNCRVLALKGSPKGRGLLLLAEMSSAGNLAHGDYTAAAVKIAEQHSDFVMGFISVNPASWSVTPSSPAFIHATPGVQMAAGGDDLGQQYNNPESVINYRGSDIIIVGRGIIKASDPLKTASCALGLAMPPRPDSAAKNFHVLVASFLPLAHSAAPRKMSSQELFSPVRAAQSATTHTPPTNTMDAAAKEALILDLHAVEAVKLGTFVLKSGITSPIYLDLRVLVSHPRLLASVASLLGALPATRPYDLLCGVPYTALPFAAALSVAASVPMLLSRYDTKRVEGAFRAAQTVLIVEDLVTSGASVLETVAPLRAEGLVVADAVVVIDREQGGRENLAASGVALHSLMTLTEMLAVLARHGKVGEEKIAEVRRFLQANRKVAVPGVPAGPPKPSATARRKSFAERAGLATNPMGRRLFEVMEAKQSNLCVAADVGTAKELLELADKVGPEICMLKTHVDILSDFTPDFGANLRTIAGKHNFLIFEDRKFADIGNTVTMQSEGGIFRILDWADIINAHIVPGPGIVDGLKLKGLPKGRGLLLLAEMSSAGNLAYGDYTAAAVKIAEQHPDFVIGFISVNPASWSPAPSSPAFIHATPGVQIAAGGDALGQQYNTPFSVINDRGSDIIIVGRGIIKASNPVETARQYRMEGWQAYQSGFS

SEQ ID NO: 7784 - protein, 286 aa, Zea mays
  VARIANT 45: note = Ancestral polymorphism is S, Derived polymorphism is F
MAMDAAALESLILDLHAIEAVKLGSFVLKSGITSPIYLDLRALVSHPRLLSAVSSLLHALPTTRPYGLAYTALPIAAVLSVDRSVPMLMRRKEAKAHGTAKSIEGSFRPGDTVLIIEDLVTSGASVLETAAPLRAEGLLVADAVVVVDREQGGRENLAANGITLHSLMTLTEVLAVLLKHGKVTEEKAHEVRQFLDANRKVAVPGAAPVKPRVLRKPFSERAKLANNPMGKKLFELMEAKQTNLCVAADVGTAKELLELADKEIHGFDPSSGFLGASDFMESEVFG

SEQ ID NO: 7785 - protein, 249 aa, Zea mays
  VARIANT 47: note = Ancestral polymorphism is V, Derived polymorphism is A
MSNTSTPTLSMKLLIDRKAQRVLFAEATKDVVDFIFSLLRLPVATAAKLVGKTAMVGCIGNLYAGVDKLDSIYLQDGVAKDALLCPTVVSQAAKNANSSLLPLPKPSVQPKMYRCANNYSECPNYITDEHGKACPRCRCSMTTEVQYLPSASHRSGSGQVVASASQQRKAGGFVQGIVTYTVMDDLTVTPVSAIVSSVALLKTFAMRNTGDLQQKTVQLGYNEVVRSIAVSSPFIYIYPPSPASPYSTY

SEQ ID NO: 7786 - protein, 92 aa, Zea mays
  VARIANT 44: note = Ancestral polymorphism is G, Derived polymorphism is S
  VARIANT 38..92: note = Derived polymorphism lacks residues 38 to 92
  VARIANT 31: note = Ancestral polymorphism is T, Derived polymorphism is M
MNRNIVYLHDYPTFAATARYWTEAFAKSASTGMEEKVQKLVEMGFPEDQVRSALNIAWMATRTWLSKSPALALGEPFSWGQYMSSCTFHSAC

SEQ ID NO: 7787 - protein, 280 aa, Zea mays
  VARIANT 5..280: note = Derived polymorphism lacks residues 5 to 280
MLRGWRQPPAASKTGGERRGGGAMAATAAEGVAATALRAVLGRAGMAAERSGCAAEAVRVVAVGKTKPVSMLRQLYDAGHRCFGENYVQEFVTKAPQLPQDTRWHFIGHLQSNKVKPLLECQLSLVYPFFSAAVPNLDMVEGVDNEKIANHLDRAVNSLGRQPLKVLVQVNTSGEESKSGIDPSKCVDLAKHVKLACPHLIFSGLMTIGMKDYSSTPENFKALVNCKLEVCKALDIPTEQFELSMGMSGDFEQAIEMGSTNVRIGSTIFGPREYPNKRQN

SEQ ID NO: 7788 - protein, 339 aa, Zea mays
  VARIANT 2: note = Ancestral polymorphism is G, Derived polymorphism is W
MGYFQKAGLLDLFGSWASAFNLAQEQPMEPTPQRFSPTCNLSGISLLRKPSAFAGPFSLLSHASQAPTGTASPHPTGVALPLSGCSLLLLACACSCWASAPAQRRQRLEFLNGQPRGCGGHHHLHGGAERRSSDFVSFISCWNLVGLLMQNFVPANGGGDVAAVDQDDVWEDVSDSHGHASTLDREWIHRQNQFQKMGYRDGITQGQKDSAQEGFNAGFRQSVNAGYKWGLVRGVASSALANLPDSLKEKLVPDVQCRGKLQDLHSSVREISADDALQMFHESIRQSNPPSEGSGSYVVASATDGATEPNRMKSLPKDLVLLLRECSDIKVSKELAWDS

SEQ ID NO: 7789 - protein, 356 aa, Zea mays
  VARIANT 224..356: note = Derived polymorphism lacks residues 224 to 356
MVQRKPARKRKEPKCPDAVPAWGGGRGPGSRAGDGGIAPAQLPNYMRATSCSGAKAGAAQAHSAPQPGRASVARAAAAAPRAGRATCSSAMKGPGARACPYAFCSVKGHAHAPPLRSFVAARRRGQQSMKLKGASPFRKPTVGWDASRGDVSAEGLGAASVGGSCASSGVVSVERSTTTRHRGREEKKALVVEVADHECDDDLGAGESDISEELGANHGGNSTEGGISSVDSISSSLSGISYQDVSSACAYGASSHHHHQRRRTSEEKGAQQLRPSKPGPKAEKVGLRHEAVDGRRAAEEWMVDYALRKEVKRLARAQKRKVEMLVQAFESVLPTVAIASEKKPGQHDGLRKHACS

SEQ ID NO: 7790 - protein, 231 aa, Zea mays
  VARIANT 67: note = Ancestral polymorphism is A, Derived polymorphism is T
  VARIANT 125: note = Ancestral polymorphism is R, Derived polymorphism is T
  VARIANT 130: note = Ancestral polymorphism is E, Derived polymorphism is D
  VARIANT 142: note = Ancestral polymorphism is V, Derived polymorphism is L
MMSGGAVKVIGALDSPFSHRAEAALRLKGVPYELVLEKDLRDKSELLLRHNPVHKKVPVLLHGGRRTVCESLVIVEYVDEAFRGPPLLPADPSARAAARFWARFIDDKCSTPFWLAMWTEGEAQRGFVKEIKENLKLLEGQVKGKRFFGGGDVGYLDVAASVFAHWLPVCEEVAGVSLVTAEEYPDLCRWAREYTSHDAVKRCLPGREELLARFSARKDSFVAAARSMAHG

SEQ ID NO: 7791 - protein, 235 aa, Zea mays
  VARIANT 113: note = Ancestral polymorphism is F, Derived polymorphism is L
  VARIANT 98: note = Ancestral polymorphism is A, Derived polymorphism is G
  VARIANT 91: note = Ancestral polymorphism is D, Derived polymorphism is N
  VARIANT 10: note = Ancestral polymorphism is I, Derived polymorphism is L
MSSPPPVKLIGFFGSPYAFRAEAALCLKGVPYELILEDLFGSKSELLLHHNPVHKKVPVLLHGDGRAISESLVIAEYVDEAFDGPPLLPADPYARAAARFWADFIETRLTKPFFMAIWVEEREARLRFEEEAKELVALLEAQLEGKRFFAGDRPGYLDVAASALGPWRSVIEELNGVALLSEDDHPNLCRWTRDYCAFEALKPCMPDREKLLAYFTKNFDRYKAAVNATLSQSQQ

SEQ ID NO: 7792 - protein, 71 aa, Zea mays
  VARIANT 60..71: note = Derived polymorphism lacks residues 60 to 71
  VARIANT 51..71: note = Derived polymorphism lacks residues 51 to 71
  VARIANT 37: note = Ancestral polymorphism is S, Derived polymorphism is T
  VARIANT 34: note = Ancestral polymorphism is R, Derived polymorphism is H
  VARIANT 10: note = Ancestral polymorphism is D, Derived polymorphism is G
MAKEESSRWDSGSTVGEFDGHSKRVLSCDFKPTRPFTIVIGGEDILANFYEGPPSKFKHSIRSVVIAGFLT

SEQ ID NO: 7793 - protein, 226 aa, Zea mays
  VARIANT 222: note = Ancestral polymorphism is A, Derived polymorphism is S
  VARIANT 220: note = Ancestral polymorphism is A, Derived polymorphism is T
  VARIANT 172: note = Ancestral polymorphism is V, Derived polymorphism is A
  VARIANT 164: note = Ancestral polymorphism is M, Derived polymorphism is T
  VARIANT 124..226: note = Derived polymorphism lacks residues 124 to 226
  VARIANT 97: note = Ancestral polymorphism is W, Derived polymorphism is L
  VARIANT 92: note = Ancestral polymorphism is A, Derived polymorphism is V
  VARIANT 91: note = Ancestral polymorphism is R, Derived polymorphism is H
  VARIANT 89: note = Ancestral polymorphism is H, Derived polymorphism is L
  VARIANT 78: note = Ancestral polymorphism is F, Derived polymorphism is S
  VARIANT 69: note = Ancestral polymorphism is V, Derived polymorphism is A
  VARIANT 46: note = Ancestral polymorphism is A, Derived polymorphism is T
  VARIANT 33: note = Ancestral polymorphism is I, Derived polymorphism is V
  VARIANT 27: note = Ancestral polymorphism is G, Derived polymorphism is R
MSPPVKIIGHFTSPFSHRVEAALRLKGVPYELVQEDLSNKSELLLAKNPVHKKVPVLLHGDRAICESLAIVQYVDEAFDGPPLLPADPHDRAVARFWADFMDKLVVPFWMAHWAEGEAQKALVEEAKQKLALLEVQLQGKRFFGGDTLGYVDIAAGVLGPWLSMVEEVTGVAVLDEDEYPALRRWSEEYNSYEALRQCVPDRDQLVAFYTENKDKYKMFAKAWLKQ

SEQ ID NO: 7794 - protein, 97 aa, Zea mays
  VARIANT 79: note = Ancestral polymorphism is E, Derived polymorphism is K
  VARIANT 61: note = Ancestral polymorphism is G, Derived polymorphism is S
  VARIANT 42: note = Ancestral polymorphism is V, Derived polymorphism is M
MKLARENLALLEEQLQLNGKKKNNRFLGGDSIGLADIAGAGVLAHWLGVLEEVAGVSVVGGDGEYPAVRRWGREYLADEAVRACQPSGTSSWPTSTP

SEQ ID NO: 7795 - protein, 203 aa, Zea mays
  VARIANT 17: note = Ancestral polymorphism is S, Derived polymorphism is I
  VARIANT 20: note = Ancestral polymorphism is V, Derived polymorphism is I
  VARIANT 42: note = Ancestral polymorphism is G, Derived polymorphism is A
  VARIANT 56..203: note = Derived polymorphism lacks residues 56 to 203
MATTEPAAVRLVGSFASPFVHRAEVALRLKGVPYELILEDLANKSELLLAHNPVHKLVPVLLHGDRAISESLVILEYVDEAFDGPPLLPAEPHARADARFWAHFIDQKFARPFWMSFWTDDEERREAMAKEAKENLALLEAQLRGQRFFGGEAIGFVDIAACALAHWVGVIEEAAGVVLVGGEEFPALREWADAYINDATVKA

SEQ ID NO: 7796 - protein, 227 aa, Zea mays
  VARIANT 174..227: note = Derived polymorphism lacks residues 174 to 227
  VARIANT 142: note = Ancestral polymorphism is R, Derived polymorphism is S
  VARIANT 102: note = Ancestral polymorphism is D, Derived polymorphism is N
  VARIANT 24: note = Ancestral polymorphism is Q, Derived polymorphism is R
MSPPVKILGHYASPYSHRVEAALRLKGVPYELVQEDLGNKSELLLAKNPVHKKVPVLLHGDRAVCESLLIVEYVDEAFDGPSILPADPHDRAVARFWANFLDTKFSQPFWLAYWAEGEAQKAVVKEAKENLALLEAQLGGKSFFGGDTPGYLDIAACALGPWIGVLEEVTGVALLDADEFPALCQWARDYSSSEALRPCLPDRDRLVAYFTENKEKYKTFAKATLHQ

SEQ ID NO: 7797 - protein, 161 aa, Zea mays
  VARIANT 41..161: note = Derived polymorphism lacks residues 41 to 161
  VARIANT 18: note = Ancestral polymorphism is R, Derived polymorphism is H
MKAFGNKLAVAKIEELFRQADTNSDGIVDIDELAALLAAQQEEEPLISNCHVHGEDLGKYDNINDMVHMTLCLDEGTGNQIMTGGFLTDKHASYGWMFKLSEWAHFSTYDVGLYSGSTTSHILGFDRRTKRIVEEVIDGKIVLSMRALYQSKVGPTLINTG

SEQ ID NO: 7798 - protein, 232 aa, Zea mays
  VARIANT 23: note = Ancestral polymorphism is D, Derived polymorphism is Y
  VARIANT 30: note = Ancestral polymorphism is E, Derived polymorphism is D
  VARIANT 39: note = Ancestral polymorphism is S, Derived polymorphism is L
  VARIANT 50: note = Ancestral polymorphism is A, Derived polymorphism is V
  VARIANT 84: note = Ancestral polymorphism is L, Derived polymorphism is I
  VARIANT 85..232: note = Derived polymorphism lacks residues 85 to 232
  VARIANT 87: note = Ancestral polymorphism is I, Derived polymorphism is N
  VARIANT 94: note = Ancestral polymorphism is V, Derived polymorphism is A
  VARIANT 101: note = Ancestral polymorphism is I, Derived polymorphism is T
  VARIANT 168: note = Ancestral polymorphism is G, Derived polymorphism is R
MVMGIGVEKTLMEVILCIREDMYIIDLEDETIDAEILNLMAVTNDHFKTALGTSNPSALHETVVEVPNVSWEDIGGLENVKRELQENSSTRMTVSLLVVAIVFYIKDNISHDSDLYDILSMVSLVGVMAYVIALSFGMGAIPWIIMSKVYFKLCIFVNPPVSIKSLAGSFATLANWLRSFGITMTTNLLISWSARGTFTSYMIVSAFTLVFVIAWVLETKGRTLEEIQWSFR

SEQ ID NO: 7799 - protein, 194 aa, Zea mays
  VARIANT 54: note = Ancestral polymorphism is R, Derived polymorphism is H
  VARIANT 63: note = Ancestral polymorphism is R, Derived polymorphism is W
  VARIANT 88: note = Ancestral polymorphism is M, Derived polymorphism is T
  VARIANT 104: note = Ancestral polymorphism is E, Derived polymorphism is K
  VARIANT 110: note = Ancestral polymorphism is A, Derived polymorphism is V
  VARIANT 136: note = Ancestral polymorphism is G, Derived polymorphism is V
  VARIANT 142: note = Ancestral polymorphism is E, Derived polymorphism is K
  VARIANT 144: note = Ancestral polymorphism is A, Derived polymorphism is V
  VARIANT 148: note = Ancestral polymorphism is R, Derived polymorphism is H
  VARIANT 153: note = Ancestral polymorphism is P, Derived polymorphism is L
  VARIANT 158: note = Ancestral polymorphism is Q, Derived polymorphism is K
  VARIANT 160: note = Ancestral polymorphism is R, Derived polymorphism is H
  VARIANT 162: note = Ancestral polymorphism is M, Derived polymorphism is K
  VARIANT 163: note = Ancestral polymorphism is I, Derived polymorphism is V
  VARIANT 170: note = Ancestral polymorphism is G, Derived polymorphism is S
MGKIRMPVPSLFRRRSSKPPPPQPQQQAPAAGDGDGSGSPERATAEEEMARVFRKFDANGDGRISRSELAALFESLGHGASDDEVARMMAEADADGDGFISLPEFAALNATVAGDAAAVEEDLRHAFRVFDADGSGAISAAELARVLRSLGEPASVAQCRRMIEGVDQNGDGLISFDEFKVMMARGGACFAKIA

SEQ ID NO: 7800 - protein, 192 aa, Zea mays
  VARIANT 107: note = Ancestral polymorphism is P, Derived polymorphism is T
MKLSIQSLARKLSLPSPKRGGGGIVEDGKKKKKRSLSRGEAPSFASSSSSSSSSSATTTPRSVLAAAPAPALEIPRRELEAVLRRLGHAEPSDAELDAVAALAAQPPPCDADADADGDLMEAFRVFDADGDGRITAEELRAVLDAVLGGGCSLDDCRRMIGGVDADGDGFVGFQDFARMMMASAGTADARAF

SEQ ID NO: 7801 - protein, 185 aa, Zea mays
  VARIANT 4: note = Ancestral polymorphism is S, Derived polymorphism is N
  VARIANT 6: note = Ancestral polymorphism is A, Derived polymorphism is V
  VARIANT 19: note = Ancestral polymorphism is Y, Derived polymorphism is H
  VARIANT 23: note = Ancestral polymorphism is L, Derived polymorphism is I
  VARIANT 27: note = Ancestral polymorphism is R, Derived polymorphism is K
  VARIANT 33: note = Ancestral polymorphism is K, Derived polymorphism is N
  VARIANT 62: note = Ancestral polymorphism is R, Derived polymorphism is Q
  VARIANT 67: note = Ancestral polymorphism is Q, Derived polymorphism is K
  VARIANT 73: note = Ancestral polymorphism is S, Derived polymorphism is L
  VARIANT 84: note = Ancestral polymorphism is R, Derived polymorphism is W
MVDSLAKLSMDVGDKDLVYSLLLVFSRMLMDENGKECIMDNIQITICVLSELVSYPHMMVVQETTLQCLVAFSTFPHPKIYHVRRKVLIDFGMSFTSTIPEDKAVDLYVLERALISMHSSCGDVISPVAIGFMLFPFVRGILFSMVFMQMEKILAAYRKASKQWCSTKNKLAQVRQRVWKRTMVG

SEQ ID NO: 7802 - protein, 299 aa, Zea mays
  VARIANT 204: note = Ancestral polymorphism is A, Derived polymorphism is S
  VARIANT 203: note = Ancestral polymorphism is K, Derived polymorphism is E
  VARIANT 198..299: note = Derived polymorphism lacks residues 198 to 299
  VARIANT 73..299: note = Derived polymorphism lacks residues 73 to 299
  VARIANT 66: note = Ancestral polymorphism is M, Derived polymorphism is V
  VARIANT 58: note = Ancestral polymorphism is P, Derived polymorphism is R
  VARIANT 15: note = Ancestral polymorphism is R, Derived polymorphism is C
  VARIANT 4: note = Ancestral polymorphism is P, Derived polymorphism is L
  VARIANT 1: note = Ancestral polymorphism is M, Derived polymorphism is V
MGNPGTSANPAVRHRLSPHLVGQPPVPRASDPLDLASVAAPSGSTPAMESTVNPKAYPLADVQLTMGILDIIQHSTNYKQLKKGANEAMNTLNRGISEFVVMAADTEPLEILLHLPLLGEDKQQVVRNWSSLRAVRKRALRFESSNLLIMVEFVRRELRFVPEGSGFMIFIGSKEPMAVRRELSNHDFHWQVVIFKMELTFLKAYAVMHIQNHLIQEAASMSASADSVAPEDCLARQLPEILGDLADRTGDGDSSASITADSSGLQHGLCGSFGWLQFFFGRKDNGSRFSRPSYLTIEI

SEQ ID NO: 7803 - protein, 69 aa, Zea mays
  VARIANT 40: note = Ancestral polymorphism is G, Derived polymorphism is R
MDQNNSNRQQQQAPPPPPAGYPTAGAEQQGGSGRKQGRRGKTTSRGEKGFIEGCIAALCCCWICEMCCD

SEQ ID NO: 7804 - protein, 719 aa, Zea mays
  VARIANT 113: note = Ancestral polymorphism is D, Derived polymorphism is A
  VARIANT 126: note = Ancestral polymorphism is A, Derived polymorphism is V
  VARIANT 305: note = Ancestral polymorphism is G, Derived polymorphism is V
  VARIANT 489: note = Ancestral polymorphism is A, Derived polymorphism is S
  VARIANT 494: note = Ancestral polymorphism is P, Derived polymorphism is T
MDDDLTASPCPPPAYSTLHTPSLPPLGSIPSHPTKAPTAVAAPGHAMAMARAAVDVEDLLVRVKTGAEADLAAAAREVAALAANGRLGEDDDEDGLLVAALLARLAAAAATADARVSVMAALRRLAGCVAGESKERLASTEALSSIVRSLSRDADERREAIAVLLDLSDIPQVRQRIGRIKGCVVMLVTLRNAHEPGTGDDADKLLAILSSNPQNVLLMAEAGYFRPLIQYLKQGSDMNKVLMATAISKMFLSEHMKSSLGEDGAIEPLVDMFKHGNLEAKHSALGALCNLSSSLQNAELLINSGITGPLLQLLFSVTSALMALREPASAILAAIAQSERILLHKDVAPQMLSLLNLSSPVIQLHLLRALNSISGHANAKRARSKIRQNGGVQLLLPFLTEKNVGIKIAALHLMFHLSKDSSQELAEQFRETHLDIFVKIISSPTSRDEKAAAVGILSNLPATDKKATEILMRANLLPILITLFEANMAAAVTPQRMWLLEGIAGVFIRFTVTWDRKLQSSAVGHGVVPCLVKLLSEGSVDAKSKAATSLAQLSQSTMALRKSKTPRWLCVPPSAESYCTVHSCQCTVKSTFCLVKAGAVHPLVQTLEGEERGADGAALEALGTLMEDEVWENGSRVIERASGIHALLRIAEAGEPSSQDKAIWMLERMFRLEAHRERYGEIAQALLIDLAQKGDPALKPMIGKILAHLELLQTQSSYF

SEQ ID NO: 7805 - protein, 140 aa, Zea mays
  VARIANT 35: note = Ancestral polymorphism is I, Derived polymorphism is M
MSILRTIYEELPPEYKERLQVFYFLHPGLRSRLAIATLGRLFLSGGSVFFHLVLRHYWLYWKIKYISRLEYLWGDIKKREVEIPDFVIEHDKVLEHRPLTDYGIEPDPLHLADVPAVGYSLGRYEDKWTPEDRWYSRNYM

SEQ ID NO: 7806 - protein, 473 aa, Zea mays
  VARIANT 211..473: note = Derived polymorphism lacks residues 211 to 473
  VARIANT 215: note = Ancestral polymorphism is I, Derived polymorphism is N
  VARIANT 278..473: note = Derived polymorphism lacks residues 278 to 473
MHGSMAPRTSQQRQGMDISVVLLSSGLDKSLMTVLQLGSCTFDLFCLSRMLMPNVITHSSCIYQFFNTFKGHMLNSAFFSGYSRPTSLQDRGKDSDDEDFRDRDYDVAALASNLSQAFKYGIYSSEDIDEAQASLERDDEDVYFDDESTAGMHDEIEDDQFESIFVQADPFGERQQSTDAMDEDVVEDHSETDGDYSNEHIEAVTTDKVPELKLIEDIFVQSDHAVAADNLPEQVRDCEITLETTSLIVDEKQQIMVTVDGDLVKDDSETDNVHDDEQMEVVTADEVLEDTGITVEDVEEKQKSTFTVDKDAVDDHFFKTDDVHADEQMEASTTDEVPELTEADYEVVEEKQQSTYTMNGCFENDHFKIHVAHADEKKEVVATDVPEVTGTDGEIEEKTPVIVDEKKLSTFTMDGDVVVDHADGQKEVIVTEVPDEVTVTGDEGVEEKAAMITEGTPDHGTAPSTLLNPWWRC

SEQ ID NO: 7807 - protein, 134 aa, Zea mays
  VARIANT 72..134: note = Derived polymorphism lacks residues 72 to 134
  VARIANT 18: note = Ancestral polymorphism is I, Derived polymorphism is S
MTCTGGGDFGDKHYSRQSCELYALLLAIVSPASLWHLVSMAPAVTASMLLGASVALMLCGSITFTIGLLMPWVTSITLLFGFVGTVNTLSSPPTPLRLFLYNNTKQPPPWAFASTDPYRDRICGWVGRQSGEGH

SEQ ID NO: 7808 - protein, 339 aa, Zea mays
  VARIANT 292: note = Ancestral polymorphism is R, Derived polymorphism is S
MSGSTAPPHVVEDFLGVIQIFSDGSIVRGDESTIRPSGPCSDVPGVQWKDAVYEATRGLKVRVYKPPPTPGGGNQGKLPVLVYFHGGGYCGGAYDHPLLHSCCQRFAAELPAVVLSVQYRLAPEHRLPAAVEDGAAFFSWLRSQAQAQPAAPGAAAADPWLAESADFSRTFVSGGSAGANLAHHIVVRIASGQIALGAAVRVAGYVLFSAFFGSVERVATESDPPAGVYLTVETIDQLWRMALPVGATRDHPLANPFGPGSPSLEPLPLPPALVVAPERDVLHGHVRRYAARLREMGKPVELAEFAGEGHAFFVGPWSEARDELMRILKRFVNQSAALG

SEQ ID NO: 7809 - protein, 352 aa, Zea mays
  VARIANT 224: note = Ancestral polymorphism is P, Derived polymorphism is R
  VARIANT 207: note = Ancestral polymorphism is T, Derived polymorphism is M
  VARIANT 188: note = Ancestral polymorphism is Y, Derived polymorphism is S
  VARIANT 55: note = Ancestral polymorphism is Y, Derived polymorphism is H
MQAAASNWTMMASRQSENNAQEETSPLTTPNANIARIIPSLPLETRWPPFPLRRYANFWLPEVALKEGVPGVHSCFEPRPTDVFLASFPKSGTTWLKALAFATLKRSTHPPFDDDHPLRHCNPHDCVRFLELDFNQQKDELEALPSPRVLATHLPYSLLPGSITGDGERSGCRIVYVCREPKDVLVSSWLFTRKAAPACGVDARSFTIQEALELFCDGRCLGGPQWNHVLHYWKESVRRPDRVLFLRYEEVLIEPEAHVRKLANFMGCGFSEEEEERGVVSAIVELCSLGKLRDMEVNRNGSTLLGIKNESFFRKGVVGDWSKHMTQEMAQRLDKVVEDALQGTGFTFASTA

SEQ ID NO: 7810 - protein, 343 aa, Zea mays
  VARIANT 232: note = Ancestral polymorphism is D, Derived polymorphism is G
MMASRQSENNAQEETSPLTTPNANIARIIPSLPLETRWPPFPLRRYANFWLPEVTLKEGVPGVHSCFEPRPTDVFLASFPKSGTTWLKALAFATLKRSTHPPFDDDHPLRHCNPHDCVRFLELGFNQQKDELEALPSPRVLATHLPYSLLPGSITGDGEHSGCRIVYVCREPKDTLVSYWLFTRKAAPACGVDARSFTIQEALELFCDGRCPGGPQWNHVLQYWKESVRRPDRVLFLRYEEVLIEPEAHVRKLANFMGCGFSEEEEERGVVSTIVELCSLGKLRDMEVNRNGSTRLGTKNESFFRKGVAGDWSNHMTPEMAHSLDKVVEDALQETGFTFSSTT

SEQ ID NO: 7811 - protein, 344 aa, Zea mays
  VARIANT 146: note = Ancestral polymorphism is L, Derived polymorphism is P
  VARIANT 193: note = Ancestral polymorphism is A, Derived polymorphism is S
  VARIANT 199: note = Ancestral polymorphism is T, Derived polymorphism is M
  VARIANT 216: note = Ancestral polymorphism is P, Derived polymorphism is R
  VARIANT 261: note = Ancestral polymorphism is G, Derived polymorphism is R
MMASRQSGNNAQEAASPLASPPHSNIASIIPSLPLETRCPPFPLRRYANFWVPEVILKADLPGIHSCFKPRPTDVFVASFPKSGTTWLKALAFATLKRSTHPPLDGDHPLRRCNPHDCVRFLDANFNQQKDELEALPSPRVLATHLPYSLLPGSITGDRERSGCRIVYVCREPKDALVSAWLFTRKAASALGADARSFTIQEALELFCDGRCMCGPQWEHVLQYWEESVRRPDRVLFLRYEEMLIDPEAHVRKLAKFMGCGFSEEEEEHGVVSAIVELCSLGKMRDMEVNRNGSNMLGVKNESYFRKGVAGDWSNHMTPDMAQRLDKVVEDALQGTGFSFTSKA

SEQ ID NO: 7812 - protein, 248 aa, Zea mays
  VARIANT 216: note = Ancestral polymorphism is K, Derived polymorphism is T
  VARIANT 116: note = Ancestral polymorphism is R, Derived polymorphism is G
  VARIANT 104: note = Ancestral polymorphism is P, Derived polymorphism is S
  VARIANT 41: note = Ancestral polymorphism is T, Derived polymorphism is M
MSTTTATPTLSMKLLIDRRTQRVLFAEASKDVVDFLFSLLTLPVATAVKLVGKDALVGCVCNLYASVEKLDSVYLQAGVAKEALLCPKVVLPAANTNSSLLRLPEPPVVEPNNMYRCTGNTYGMCRTYITDEYGKMCPHCRCSMTTAAQYLLSARGSCGGSGQVAAPKSAAGGFVQGIVVTYTVQDDLTVTPVSSISSVSLLSTFSVRDIYDLQEKTVQLGYNEGLAIFKASLKSKSVLTDVFLHGKN

SEQ ID NO: 7813 - protein, 447 aa, Zea mays
  VARIANT 386: note = Ancestral polymorphism is R, Derived polymorphism is Q
  VARIANT 385: note = Ancestral polymorphism is A, Derived polymorphism is T
  VARIANT 356..447: note = Derived polymorphism lacks residues 356 to 447
  VARIANT 339: note = Ancestral polymorphism is L, Derived polymorphism is Q
  VARIANT 139: note = Ancestral polymorphism is P, Derived polymorphism is A
  VARIANT 137: note = Ancestral polymorphism is L, Derived polymorphism is P
MVQDEGSSSSVTSSPLHNFSTMPLHASPGGAPAPTPPWLVRELRSDERGLCLIHLLLNCAAAAGAGRLDAANAALEHIASLASPDGDAMQRVAAAFAEALARRALRAWPGLCRALLLPRAGPTPAELAAARRHFLDLCPFLRLAGAAANQSVLEAMESERMVHVVDLGGADAAQWVELLHLLAARPEGPPHLRLTAVHEHRDVLTQTAVALTKEAERLDVPFQFNPVVSRLEALDVESLRVKTGEALAVTSSLQLHCLLASDDDSGKHHQGSGDHKRQRSPESGVSPSTSRADAFLGALWGLSPKVVVVTEQEASHNAAPLTERFVEALNYYAALFDCLESAAPRGSVERARVERWLLGEEVKNIVACDGADRRERHERLDRWAARMEGAGFARVPLSYYALLQARRAAQGLGCDGFKVREEKGAFFLCWQERAIFSVSAWRGRRFD

SEQ ID NO: 7814 - protein, 588 aa, Zea mays
  VARIANT 177..588: note = Derived polymorphism lacks residues 177 to 588
  VARIANT 90: note = Ancestral polymorphism is S, Derived polymorphism is I
MRPLPKKPNAALPVPKQLKVHHPENESLSRFFLEKWRAMMQEPDGLSQNNYLAFANANRSLCSSKEPIRTLKDFSNVKGVGTWLINHMKSFFEKSSQDLSPAKGKKAKGTKSYLPRKNTAAYAILITLHRAKTSGKDFMMKQELIDAAEASGLSRDAIGPNKSKAKQSYGKDWYTGWSCMKTLLSNRLVTKWSNPAKYMLTQEGEGTARDCLSRSGLDDSARPLTIIGAHNTSAMDPSVARHSPELVSDSSLTKKKSNCYRQVQATNYEGIICCDSDSEEPCGKDIPLKGMEPITSCGPPDISRPFQGTPKLQSSTMGSAKLAMPPRRANENFLEAYEVILILDDREKFGSRSRKVADNICSLSHFAVDVRQLPVGDGIWIARHKEDHTEYVLDFIVERKEVMDLDGSIEDNRYRDQKLRMKKCGLRKLIYLVEGDLNRAPKRVKTACFTTEILDGFDVQRTTGFADTQKRYVDLTRSVIAYYDASFSIVGKASPVCPTYDDFKRKCYDLKKKTVSDIFGCQLMQVPQVTEEAAQAVVELYPTPLLLAKAYSILGGDTSAQEKMLKKKNEMVNAGASRNIFHLIWGDG

SEQ ID NO: 7815 - protein, 252 aa, Zea mays
  VARIANT 232: note = Ancestral polymorphism is S, Derived polymorphism is L
  VARIANT 80: note = Ancestral polymorphism is N, Derived polymorphism is I
  VARIANT 51: note = Ancestral polymorphism is G, Derived polymorphism is R
  VARIANT 21: note = Ancestral polymorphism is R, Derived polymorphism is W
  VARIANT 20: note = Ancestral polymorphism is Q, Derived polymorphism is H
MPKTKATALSMKLYIDRKAQRLLFAEASKDVVDFLFAILALPVATAVELVGKEAMVGCVGNLYASVEKLDSTYLQAGVANVDLLCPTVVSPYAIANTRRSLLCLPKAKNLFRCGKTVAGSTYCGNYITDMYNKKCPGNCGNHMTAAVQYLSSAVPSNDSGKVAAAAPQSAAEGIVQGVVTYMVLDDLTVTPMAGVSSVATVLNTFAVRDIGDLQEKTVQLGYKEGLAILKASLKSKSVLTNVFVHANNSSVA

SEQ ID NO: 7816 - protein, 402 aa, Zea mays
  VARIANT 69: note = Ancestral polymorphism is A, Derived polymorphism is T
MAMPDADRNAMSAPLLPRPACLTASFSSSSSSSSSFASFSSSNSSDPSPPSAFPPAGPCKALAVLRDHAGSVSSLSLCGEFLLSASTAGDVVAWQQPDLRRFARFGHGGRSENAFKLVAALPTARDYLGRVFRQDSYVQTTATTAARRAHHRRLWIEHADSISCLAVAVHDAALLYSGSWDRTLKVWRVADLRCLESIRAHDDAVNAVAADAGIVYSASADGRVKAWEKGKASHFLQGVLVARDGVSWNALAVAADDRRLYAAGSDGHVAAWDRLGGRTAARWTLACDVRAHDAAVLCLCVARDLLCTGSADKTIGLWRRQSAGELAKVGVVRGHEGPVKCIQASWCRLTNGCMVYSGSLDKTIRVWWVPGALQHANDKEQQQQQQKDGFKDHKHKASLFLR

SEQ ID NO: 7817 - protein, 398 aa, Zea mays
  VARIANT 119: note = Ancestral polymorphism is I, Derived polymorphism is F
  VARIANT 125: note = Ancestral polymorphism is V, Derived polymorphism is A
  VARIANT 133: note = Ancestral polymorphism is A, Derived polymorphism is P
MATKLVVLGIPWDVDTEGLREYMAKFGPLDDCVVMKNVLDCEHVLGSRTLEVKIATPKEEMKSQGTKKATRIFVARIPQSVDESMFRRHFEAFGEILDLYMPKVRKIKTWFAWNTASGFLQLVIVLFHNVHNAAMLFDLFDVMILDYKGEHHNEASQADINGYVALHVWGKLEVDMTMILLKFALHTHRNMVQRGIVELGLSRFRVQEEDVRYPPSRPSQGGYGAYNAYISAATRYATLGAPTLYDHPGSAYGRGYYGSSQAVGKKIFVGRLPQEANTDDLRHYFGRFGRIVDAYIPKDPKRSGHRGFGFVTFADEGVAERVSRRSHEILGHEVAIDTAAPLENDSAGGGYIDPMDLYGAYGSMRSFGRFCGGLDYNYGYGPSSGSSRSRSDWRYRPY

SEQ ID NO: 7818 - protein, 551 aa, Zea mays
  VARIANT 106..551: note = Derived polymorphism lacks residues 106 to 551
MGTVGGGELPVAAPAAADADRARLQQLGYKQELKRGLSVVSNFAFSFAIISVLTGVTTTYNTGLRYGGPASMTLGWLVVATFNGCVALSMAEICSAYPTSGGLYYWSAKLAGNEWAPLASWVTGWFNIVGQWACTTSVDFSLAQLIQVIILLSTGGANGGGYLASKYVVLAIYTAILVVHGLINSLHIQWLSWFGQLGALWNVAGVFVLVILVPSVAKERASAEFVFTHLNTDNGMGIHSKAYILAVGLLMSQYSSIGYDTSAHMVTTEHARPRLHGRRCADVSISTERARSVDYILQTEETKKADWSGPMGIVYSVALSSVFGWVYLLALTSVVTDIPYLLDTGNDAGGYAIAQALYDTFRRRYGTGAGGIACLVIIAVAVFLCGTACVTSNSRMGYAFSRDGAMPFSHLWYRVNKQEVPFNVVWLSVSVAFVMALTSLGSQVAFQAMVSIATLGLYIAYALPIFFRVTTARKSFVPGPFHLGRCGIAVGSVAVLWVALVTVLFCLPVAYPVAKDTFNYTPVAVGGVLVLSLVAWVLHARFWFRGPITNV

SEQ ID NO: 7819 - protein, 304 aa, Zea mays
  VARIANT 41: note = Ancestral polymorphism is G, Derived polymorphism is D
  VARIANT 149: note = Ancestral polymorphism is A, Derived polymorphism is S
  VARIANT 199: note = Ancestral polymorphism is T, Derived polymorphism is R
MTADDLPPPSEVVQLYKSNGIANMRVYSPVGEVMEALRGSGIGLVLGVANEDVASLATCAPCAASWVEANVRPYHQDVNILYIAVGNEVDAAAAAQTILPAMRSLQAALAAAGLAGSIKVSTCVRLDVVTDTFPPSSGAFAQPYMVDVARFLAAAGAPLLANVYPYFAYRGSPGDVGLGYALFQPGAAVRDGGSGLVYTNLFDAMVDSVHAALEKAGAPDVRVVVSESGWPSAGGAAASVQNAQAYVQNLVDHVAQGTPKRPGPLETYVFAMFNENQKPGEPTEKNFGLFYPSKAPVYPIVFRR

SEQ ID NO: 7820 - protein, 339 aa, Zea mays
  VARIANT 25: note = Ancestral polymorphism is P, Derived polymorphism is A
MARQRQVASMLAAALLVATTFASIPTTVHSIGVCYGTLGNNLPSSSDVVQLYRSKGIKGMRIYSPDAKALAALRNSGIALILDTGNGGGVLGQLARSASFADSWVQSNVRPYYPAVGIKYVAVGNEVQGDDTRSLLPAMRNLDAALARAGFPGIKCSTSVRFDVVANSFPPSSGSFAQGYMADVARYLAGTGAPLLANVYPYFAYRDNPRDISLGYATFQPGTTVRDNGNGLNYNNLFDAMVDAVVAALEKAGAPNVRVVVSESGWPSAGGFGASVDNARKYNQGLIDHVGRGTPKRTGPLETFVFAMFNENQKGGDPTEKNFGLFYGNKQPVYPIRFN

SEQ ID NO: 7821 - protein, 351 aa, Zea mays
  VARIANT 96: note = Ancestral polymorphism is P, Derived polymorphism is L
MAAQGAGASASPLSGFHVALLLLLTILASILARAASVGVCYGTSGDNLPPASAVVGMLRDNGFTVVRLYWPDGDALAALGGSGIRVVVGAPNEALPALASGAAAAAAWVRDNVQAHPAVAFRYVVVGNEVPLEQAPLLVPAMENVHAALAAAGLGHVKVTTAVSQGAIAVHLPPSAGEFTEEARSFMGYVVAFLARTRAPLLANLYPYFVYTLGLGHLGMDFALFTAPGTVVQDGEYGYQNLFDATVDALYAAVGRLGVAGGDGVRVVVSETGWPTAGGAAASLENARTYNQNLVRHVWKGTPRRPRRVEAYVFAMFNEDKKDAGVEQNWGLFYPNMERVYPITFGAGRRH

SEQ ID NO: 7822 - protein, 391 aa, Zea mays
  VARIANT 34: note = Ancestral polymorphism is K, Derived polymorphism is R
  VARIANT 36..391: note = Derived polymorphism lacks residues 36 to 391
  VARIANT 56: note = Ancestral polymorphism is H, Derived polymorphism is Y
  VARIANT 110..391: note = Derived polymorphism lacks residues 110 to 391
  VARIANT 153..391: note = Derived polymorphism lacks residues 153 to 391
  VARIANT 158..391: note = Derived polymorphism lacks residues 158 to 391
  VARIANT 185: note = Ancestral polymorphism is S, Derived polymorphism is L
MHKWWRSPGPALLAAALAIVVAALRPATEHAAAKGRPPLRFGPGGAFKVALFADLHYGEDAWTDWGPAQDAASDRVMAAVLDAENPDLVVYLGDLVTANNLPVPNASLYWDRAVSAARGRGVPWATVFGNHDDMAFEWPPEWFSPDGVPPLRWPPGPGSGCGFRGTPRTDLMAAETGANRLLSYSSSGPRELWPGVSNYVLQVLSRGRRARGDGHDHDPALLMYFLDSGGGSYTEVVSSAQVRWFHTQSQFLNPDGRIPELIFWHIPSTAYAKVAPKAKSEIRKPCVGSINEEEVAPQAAEWGMMDALAKRSSVKAVFVGHNHGLDWCCPYDGEEREQELWLCFARHTGYGGYGDWPRGARILEVTEEPFSAVSWIRMENGTRHSDVTLTS

SEQ ID NO: 7823 - protein, 334 aa, Zea mays
  VARIANT 7: note = Ancestral polymorphism is V, Derived polymorphism is I
MARQGVVASMHALALLLGAFAAIPTGVQSIGVCYGVNGDNLPPASDVVQLYQSNGINLMRIYFPDANALNALSGTSIGLIMDVPNTDLASLASDPSAAAAWVQSNVQAFPSVSFRYIAVGNEASGGDTGSILPAMKNLNAALANAGLGGSIKVSTAVQSDVTQGFPPSQGTFSQGYMAPIAQYLQSTGAPLLCNVYPYFSYIGNPAQIDLSYALFTSPGTVVQDGSNAYQNLFDALVDTFVSALQNAGAGNVPVVVSESGWPSAGGDAATAANAQTYNQNLINHVGQGTPKRPGPIETYIFAMFNEDQKTGAESERHFGLFNPDKSPAYPINFS

SEQ ID NO: 7824 - protein, 252 aa, Zea mays
  VARIANT 29: note = Ancestral polymorphism is S, Derived polymorphism is R
MSTTTATAGLTMKLLIDRKAQRVLFAEASKDVVDFLFSLLVLPIATAVKLIGKEAMVGCVGNLYASVDKLDSATYVQAGVGKNALLCPTVVSPAANTSSSLLRLPAPSSVQPKQLYRCTNTNNMNVNNCRAYITEQYGRACPACGCSMSTTANYLPFAGGSSASVGQSVAQSAAGGFVQGTATYTVLDDLTVTVTPKSSISSITLLNTFAVRDIGDLQEKTVQLGYNQGLAILEASLKSKSVLTDVFLYANK

SEQ ID NO: 7825 - protein, 132 aa, Zea mays
  VARIANT 9: note = Ancestral polymorphism is A, Derived polymorphism is V
MQFHEHLIAETKVPWTATTLQAPLPVIASKVALTTFRVQKPLNSRNRHKDNGSDAFGNILCPGARMARGSYLCFLRSNVSHLAPKWVFHCSCSSHVQCCRDLRETVLKKGIPLGRKFPHLDPAKDFRSKSAD

SEQ ID NO: 7826 - protein, 185 aa, Zea mays
  VARIANT 168: note = Ancestral polymorphism is L, Derived polymorphism is R
  VARIANT 137..185: note = Ancestral polymorphism lacks residues 137 to 185
  VARIANT 88: note = Ancestral polymorphism is P, Derived polymorphism is L
  VARIANT 24: note = Ancestral polymorphism is Y, Derived polymorphism is H
  VARIANT 16..185: note = Derived polymorphism lacks residues 16 to 185
MTASAGFYLNATNEKWKNWRMYDYIVKELPKVLSDNFEQLNTSQASIFGHSMGGHGALTIYLKNTDKYKFWNMTATCLIKKNSKVSTPILIDQGQSDKFLAEQQLLPRNFEEACKSVGATLTLRMQPGYDRSHCAPLSVSQEPLTAELSFCEMCRVRKTRRGRAPWFRRRLFAQPIPTVFSCLPA

SEQ ID NO: 7827 - protein, 91 aa, Zea mays
  VARIANT 86..91: note = Derived polymorphism lacks residues 86 to 91
  VARIANT 47: note = Ancestral polymorphism is P, Derived polymorphism is S
  VARIANT 37..91: note = Derived polymorphism lacks residues 37 to 91
  VARIANT 6: note = Ancestral polymorphism is E, Derived polymorphism is V
MAAALEQLSSSKMFDGFNLRFRHQSATLGCAMTFSIYLPPSPASNISVLYWLSGLTCTDENFIMKGAPPPPTASPLSRLTPPHVMSKLNPL

SEQ ID NO: 7828 - protein, 592 aa, Zea mays
  VARIANT 104: note = Ancestral polymorphism is G, Derived polymorphism is E
MECSPPRHSWRLPRSPSPRPRRLAVLVGAGDGCGVLRGGGLRGVPAGGEPRRLRHHRRCRPHVRLRRREAGPIAGPHPHLCDYVTTIKRFLQVLWAIGALGSVGTYLVAARPLDEGLVQYVVDHPAVLWFVGPTFVVLTGLVFKEGPLQQSTIEDSGFFYFNTHEWYTIFGADSPAIQENKVATMQYISGTGSLRVESEFLASLFLKASSGRTLITAQIPLVASHPDVHEPCDDSFALVDALLSDKAQLLTLQPRLCMEVGFGSGYVITSLAIMLRQLGSGAQYLATDINQHAAETTQATLEAHGVHADVIVTDIMSGLDKRLAGMVDVAVVNPPYVPTHVEEVVCRGIAASWAVGLNGRQVIDRILPAVREMLSERGWLYMVALEDNDPSDICHLMSEMGNLREMFQIDAADYMMSICGDDSLKELSSPGKSGSIFYLSQDERFVIKTLRKTELKDYSERRKKVRFVVMRNMFCTELRIHRKYDLKGSTQGRSTKKQNINENTTLEDLDLSYVFHVDKPWPDALFRQEEHTHEDLKEQQVVHGEVENTLGPGSINLALENPIPKDWRTIHMIGVESNLLDIVSNSVGTSIT

SEQ ID NO: 7829 - protein, 267 aa, Zea mays
  VARIANT 191..267: note = Derived polymorphism lacks residues 191 to 267
  VARIANT 166: note = Ancestral polymorphism is S, Derived polymorphism is F
  VARIANT 164: note = Ancestral polymorphism is P, Derived polymorphism is L
  VARIANT 161..267: note = Derived polymorphism lacks residues 161 to 267
  VARIANT 159: note = Ancestral polymorphism is D, Derived polymorphism is Y
  VARIANT 140: note = Ancestral polymorphism is P, Derived polymorphism is L
  VARIANT 26: note = Ancestral polymorphism is A, Derived polymorphism is V
  VARIANT 22..267: note = Derived polymorphism lacks residues 22 to 267
MATTTATAALSMKLLINKKAQQVLFAEASKEVVDFLFSLLALPVATAVKLAAAAKDALLCPTVVSPAANTRSSLLRLSELSSVRPNKMYRCLGNSYSNCRNYITDEHGKACLQCRVSMTTEVQYLPSAGPSSGSGQVAAPQSMAKGFVQGIVTYTVLDDLKVTPMSAISSITLLNTFVVADLGDLEEKKVQLGYNEGLAILKASLQSKPVLTDVPAGCVPGRAVVRLVLVLEWLAPGVNETRFGCSSRTMGQLAATSSVPAFWFVSH

SEQ ID NO: 7830 - protein, 190 aa, Zea mays
  VARIANT 180..190: note = Ancestral polymorphism lacks residues 180 to 190
  VARIANT 177: note = Ancestral polymorphism is Y, Derived polymorphism is H
  VARIANT 173: note = Ancestral polymorphism is S, Derived polymorphism is N
  VARIANT 166: note = Ancestral polymorphism is W, Derived polymorphism is R
  VARIANT 155: note = Ancestral polymorphism is G, Derived polymorphism is S
  VARIANT 139: note = Ancestral polymorphism is A, Derived polymorphism is V
  VARIANT 137: note = Ancestral polymorphism is R, Derived polymorphism is W
  VARIANT 134: note = Ancestral polymorphism is P, Derived polymorphism is L
  VARIANT 129: note = Ancestral polymorphism is I, Derived polymorphism is L
  VARIANT 125: note = Ancestral polymorphism is N, Derived polymorphism is K
  VARIANT 124: note = Ancestral polymorphism is L, Derived polymorphism is P
  VARIANT 117..190: note = Derived polymorphism lacks residues 117 to 190
  VARIANT 109: note = Ancestral polymorphism is G, Derived polymorphism is S
  VARIANT 107: note = Ancestral polymorphism is D, Derived polymorphism is Y
  VARIANT 105..190: note = Derived polymorphism lacks residues 105 to 190
  VARIANT 101: note = Ancestral polymorphism is P, Derived polymorphism is A
  VARIANT 100: note = Ancestral polymorphism is E, Derived polymorphism is K
  VARIANT 99: note = Ancestral polymorphism is C, Derived polymorphism is Y
  VARIANT 97: note = Ancestral polymorphism is S, Derived polymorphism is F
  VARIANT 96: note = Ancestral polymorphism is S, Derived polymorphism is N
  VARIANT 95: note = Ancestral polymorphism is A, Derived polymorphism is T
  VARIANT 93..190: note = Derived polymorphism lacks residues 93 to 190
  VARIANT 86: note = Ancestral polymorphism is L, Derived polymorphism is P
  VARIANT 83: note = Ancestral polymorphism is G, Derived polymorphism is D
  VARIANT 78: note = Ancestral polymorphism is P, Derived polymorphism is T
  VARIANT 75: note = Ancestral polymorphism is A, Derived polymorphism is V
  VARIANT 74: note = Ancestral polymorphism is E, Derived polymorphism is K
  VARIANT 68: note = Ancestral polymorphism is A, Derived polymorphism is T
  VARIANT 65: note = Ancestral polymorphism is Q, Derived polymorphism is L
  VARIANT 61: note = Ancestral polymorphism is D, Derived polymorphism is N
  VARIANT 53..190: note = Derived polymorphism lacks residues 53 to 190
  VARIANT 50: note = Ancestral polymorphism is T, Derived polymorphism is I
  VARIANT 44: note = Ancestral polymorphism is E, Derived polymorphism is K
  VARIANT 24..190: note = Derived polymorphism lacks residues 24 to 190
  VARIANT 21: note = Ancestral polymorphism is H, Derived polymorphism is L
  VARIANT 12: note = Ancestral polymorphism is R, Derived polymorphism is Q
MRPPLHLAIPIRLGRRARRHHLPQARPLLPVRYFVEEVITGYDEIDLYKTWLQVGKGLSKDDKAQKLALQHWLEAIDPRHRYGHNLHLYYDIWCANSSCEPFFYWLDVGKGRDLHHQKCPRSKLNSQLIMYLGPNERAAYEVVVEEGRLLYKQSGDLVNTNEEYKWIFVLSTSRSLYVRSQSECSVQLAF

SEQ ID NO: 7831 - protein, 216 aa, Zea mays
  VARIANT 165: note = Ancestral polymorphism is A, Derived polymorphism is V
  VARIANT 175: note = Ancestral polymorphism is G, Derived polymorphism is D
  VARIANT 185: note = Ancestral polymorphism is R, Derived polymorphism is C
MPSGFTTVSAPTGSAHQRPTRLGNPEMHFSTDQLIGSAFIAFGLTLFVCFFYVVVVSKLLLPHQNGFLAAIQNDCVQPVQTIQEIHAFFVMLQVLLSACVVDASCNNCGCLPALAQHEDVQAHMKQSCSFLPVSESWSKSRVYYCVRSHRVCASETDKTGKSIDAFFYRSADWLGVHCLWAHIVRVFLLLCRCVQAASATSKWIPGRHPKRLVRNI

SEQ ID NO: 7832 - protein, 306 aa, Zea mays
  VARIANT 205: note = Ancestral polymorphism is Y, Derived polymorphism is C
  VARIANT 204: note = Ancestral polymorphism is R, Derived polymorphism is C
  VARIANT 112: note = Ancestral polymorphism is R, Derived polymorphism is S
  VARIANT 100: note = Ancestral polymorphism is A, Derived polymorphism is V
MAEQTQPQGEGGASPKHESLMEKLADKLHVGGGKADSSSSSDSDSDERPRPSAPPADELKQPSFSDAAATAAAEAKAKVFRLFGREQPIHKALGGGKRMVLFPTLPMLLAIRLEISRSDLAADVFLWRNKNISAGVLGGATAIWILFELLGYHLLTFVCHGLIFALGVLFLWSNASSFIHKAPPKIPEVIIPEDLVVNIALSTRYEINRAFANLRQIALGRDLKKFLMVIAGFWLLSVLGSCCNFLTLVYIVFVVLHTVPVLYEKYEDQIDSYGEKGWVEIKKQYAVFDEKVLSKVPRGPAKDKKH

SEQ ID NO: 7833 - protein, 290 aa, Zea mays
  VARIANT 158: note = Ancestral polymorphism is L, Derived polymorphism is H
  VARIANT 179..290: note = Derived polymorphism lacks residues 179 to 290
MPSGFTIVSAPTGSAHQRPTRLGNPEMHFSTDQLIGSAFIAFGLTLFVCFFYVAVVSKLLPPHQNGFLAAIQNDCVQLVQIIQEIHAFFVILQVLLSACAVDASCNNRGCLPALAQHEDVQARMKQSCSFLPVSESWSKSRDAIIYAMQLQKSKPWVLPFYTYLVISMCLPLFRDEGTERDTNPLIYYVPILLLLSVAPISSSDVSLPTSSLDLPDVADLFAPPADNASRKRESNGSALHDSRNKFPRMQSQSQGIGSAAGNALIPPQLRGRSNVVTEDMSKLFVAKRKE

SEQ ID NO: 7834 - protein, 253 aa, Zea mays
  VARIANT 44..253: note = Derived polymorphism lacks residues 44 to 253
MGILDTLITVVDAGRGEGESKWCEQPGMVVRKFEARCSESYGDWTTMFLEDLEKRICEVKRDLENCRRRRSIYQEQVNPENMSGTDGESLEAGGRELCAGFQVLRKLETLAVQMSLEWVAQLGMPRTSLETDAMQQPWDWLLNGDVDRSPNGFTTMSAPTGSAHQRSTRLGNPEMDFPTDQLIGSAFIAFGLTLFVCFFYVAVVSKLLPPHQNGFLATIQNDWYYCLLVPLSLPVIIVVVYLHWLSMKMFKHA

SEQ ID NO: 7835 - protein, 1054 aa, Zea mays
  VARIANT 343..1054: note = Derived polymorphism lacks residues 343 to 1054
MSSLLRASPLSLLSRLKPRPSPVNLRRLLPLSTTSDSVPAPQLRTLESAGATNTAATPPEEVAAPAPAGAKVERLQPLQWPPRDALCSELGAGDAGRRVKRSTPATSDSGMVKLLADILHHTAPSTWTFALAAPLLRQRLTSAHVSSLLILPASLRRPDLSRRFLLLLPSHLVSPVSLSLLALSFLSSSPSSSASSPHADSLLLSLASSTPSASSSFSYLSHANTLAIFRPGAATAAATLLASSYLRIRRARDAATVLRLSLSSGIAMKQYTASQILFALIKIRQFALARDLFDEMLQYKFPLDEYVYTAGIRAYCEIRNLDGARRLLARMESEGVKGSAVPYNVLMYGLCRNNRVLEAVEVKNNMVGRGIVADEVTYRTLVYGLCRTDELKMALEMTDDMLSLYFVPSEASCSFMLDGLRKRGHIDKAFRLACHLGELGMVPNLFACNALIDRLCKDGRYREAEKLFRGMADRGLDPNEVTYAILIHSLCKRGMMEDALCMFDRMREKGIRMTVYPYNSLINGYCKHNNFHQARGLLNEMVAKGLTPSPASYSPLIAGLCRKGDLASAMELHREMTRNAVSGNVYTFTALISGFCKDGNMDEATRLFHKMMESSLVPNEVTFNVMIEGYCRVGNIRKAFQLYDQMLDRGLTPDNYTYRSLISVVCLTLGAMKAKEFVADLENNCAVLNSFSLTALMHGFCKEGRLTETYQVWDDMRARGVKLDLISFTVIAYAAQKLHDREKISMLFGEMKAKGVKPDNVFHTCMIHVHSKEENIVQALNCWDKMIDDGCSPNVITYTVLINHLCKSGYLSSAEILCKEMLAGHFLPNSYTYNCFLDYLANEGELEKAKVLHAAMLEGCLANTVTFNTLIKGFCMAGQIQGAIDLMQKNTESGFFPDCISYSTIINELCKVGDTNKAFELWNEMLYKGLKPDIVAYTILIRWCNIHGEFDKGLGIYSDMVTVLPEYPEVYNIVNKLRVESVVAVEGVIQPRPVDAINADMRTGTIELNTVGLECWDLCRPQMQSNLRLRHNVVKLIRRYLEDEHEFVEEYNTL

SEQ ID NO: 7836 - protein, 180 aa, Zea mays
  VARIANT 23: note = Ancestral polymorphism is G, Derived polymorphism is R
  VARIANT 25: note = Ancestral polymorphism is V, Derived polymorphism is M
  VARIANT 31: note = Ancestral polymorphism is P, Derived polymorphism is S
  VARIANT 51: note = Ancestral polymorphism is T, Derived polymorphism is I
MPEKTCVLDARQVFDGRVQMVLGGVVYTVVPFYKRVLMVEVEVVEHVAEVTEKLVADAASSLPENGSLHKVVVEVECVAEAVDKDAHKVEAVIDKGWYSTIINEFRKVGNTNKAFELWNEMLYKGLKPDIVAYTILIRWCNIHGEFDEGLGIYSDMVKNGVQPIWDTKLNQDGCKMQKSI

SEQ ID NO: 7837 - protein, 182 aa, Zea mays
  VARIANT 14: note = Ancestral polymorphism is D, Derived polymorphism is N
  VARIANT 62: note = Ancestral polymorphism is G, Derived polymorphism is D
  VARIANT 86..182: note = Derived polymorphism lacks residues 86 to 182
  VARIANT 97: note = Ancestral polymorphism is Q, Derived polymorphism is E
MIEYISPRPRVELDQATTTLQKAYKFLKLLTRATATATTCTSTTTSGAQTPAASPSSTEREDGVRSRRGGRSAAVQVERRSGEHERGVQVDLRAEHQQVAVCQDGTVAPMELDGVIRLDWVWMGWMDSARAEVEREHAWLAGDHILVHLFSWVMLTVMSYYATSNICLCERSTKIVSLHSYS

SEQ ID NO: 7838 - protein, 179 aa, Zea mays
  VARIANT 42: note = Ancestral polymorphism is P, Derived polymorphism is H
  VARIANT 67: note = Ancestral polymorphism is R, Derived polymorphism is W
  VARIANT 154: note = Ancestral polymorphism is C, Derived polymorphism is Y
MLAGGSSYLATMGRRSFPYHRLKKLPAAAPSPPHPPATTAGPATAAAAIEDSYRSYYRALVARRRRRGSGRRLRRARVWGALARALRRRAAAAGARVRASVARVARRLRDGRPYVGDLFAGNYMFLQVAPSPMTITGSHGGGAVVPFAEYYYGYKARARARAAAVQLHRYPTGAVLYET

SEQ ID NO: 7839 - protein, 171 aa, Zea mays
  VARIANT 126: note = Ancestral polymorphism is C, Derived polymorphism is F
  VARIANT 125: note = Ancestral polymorphism is A, Derived polymorphism is T
  VARIANT 124: note = Ancestral polymorphism is P, Derived polymorphism is S
  VARIANT 75: note = Ancestral polymorphism is V, Derived polymorphism is M
  VARIANT 71: note = Ancestral polymorphism is V, Derived polymorphism is G
  VARIANT 69: note = Ancestral polymorphism is V, Derived polymorphism is I
  VARIANT 60: note = Ancestral polymorphism is P, Derived polymorphism is S
  VARIANT 59: note = Ancestral polymorphism is D, Derived polymorphism is G
  VARIANT 58: note = Ancestral polymorphism is V, Derived polymorphism is M
  VARIANT 41: note = Ancestral polymorphism is T, Derived polymorphism is M
  VARIANT 36: note = Ancestral polymorphism is Q, Derived polymorphism is L
  VARIANT 33: note = Ancestral polymorphism is R, Derived polymorphism is Q
MYRGQDADTSCLALPDDENGVRDVLHDLLRSTRPLQHLGLTDLEWESLLSQQNVSWLVDPVLRARYAVVSVWQAVELHVCYDAVQMLMMTCKESSDSGAVGGDAEAECSVCLVALRESEAVELPACAHAFHRRCISEWFAHKSTCPLCRDDVAKYLEPKLQRQFANFDYAM

SEQ ID NO: 7840 - protein, 480 aa, Zea mays
  VARIANT 287..480: note = Derived polymorphism lacks residues 287 to 480
  VARIANT 78..480: note = Derived polymorphism lacks residues 78 to 480
  VARIANT 39..480: note = Derived polymorphism lacks residues 39 to 480
MVALLTKNCDAKEKKRKEKQRERDEIDLDNSGGDNSSEEESEHGNDVIVLKSTKGGSSSRLATSGTIDKFYKPESIEESIQKNKRGLSTSQKIQTQLTTQKREERRDRACEYICQFFYEAGIAHNTVTLPSFAHMVEAIGAFGREGFWKNVDMAVNFFEPLANVLRRMDSDVPAMGFLHGCMLEAKKEIAMRFDNNENRFKVAWDIIDKRWDNKLKTPLHLAGYYLNPYFYYPNKSEIELDGSFRAAVIACITKTVEDEETQDNIIEELNVYQEQQGTFGHDIAVRQRRNKNFNLAKWWLNHGTSTPNLRLLATRILNLTCNSSGCERNWSDFEQVHTKKRNKLLHDRMRDLVFVKFNSRLRQKRENKSKDPLEREMNDVLEDDANEFITGLVPNANSDKDEEHGDAQVGATIHEPQLSQPQPKRKRLVRPRKKKIRSLHSLLYGGLENEAVASSSESEDNGDGDISMHQYSDSDDLGDE

SEQ ID NO: 7841 - protein, 181 aa, Zea mays
  VARIANT 123: note = Ancestral polymorphism is C, Derived polymorphism is Y
  VARIANT 75: note = Ancestral polymorphism is V, Derived polymorphism is M
  VARIANT 56..181: note = Ancestral polymorphism lacks residues 56 to 181
MYRRQDADTSCLALPDDENGVRDVLHGLLRSTRPLQHLGLTDLEWESLLSQQNVSWLVDPVLRARYAVVSVWQAVELHVCYDAVQMLMMTCKDSGAVGGDTEAECSVCLVALRESEAMELPACAHTFHRRCISEWKPISFYIFQQALIHFVGFYCAIGCQMGRYKKGKEGSESIKSSTTAI

SEQ ID NO: 7842 - protein, 147 aa, Zea mays
  VARIANT 128: note = Ancestral polymorphism is R, Derived polymorphism is G
MINDEGVLQSVDCPGRPRRATPRRGPQVVVAAAAVRPAIQFIQGTDEQTIPDVRLTKSRDGTNGVAIFTFEQPSVFDSSAELGDITGFYMIDDEGVLQSVDVSAKFVNGKPARIEAKYVMRTPRDWDRFMRFMERYSQANGLQFVKN

SEQ ID NO: 7843 - protein, 344 aa, Zea mays
  VARIANT 232..344: note = Ancestral polymorphism lacks residues 232 to 344
  VARIANT 212..344: note = Derived polymorphism lacks residues 212 to 344
  VARIANT 180: note = Ancestral polymorphism is R, Derived polymorphism is L
  VARIANT 106: note = Ancestral polymorphism is S, Derived polymorphism is I
MYRRQDADTSCLALPDDENGVRDVLHGLLRSTRPLQHLGLTDLEWESLLSQQNVSWLVDPVLRARYAVVSVWQAVELHVCYDAVQMLMMTCKDSGAVGGDTEAECSVCLVALRESEAVELPACAHAFHRRCISEWTSIEFLSRQSMTSGDRRFTLHLRCYVSVHISTGNGRPNLVLMYRRQDADTSCLALPDDEDGVRDVLHGLLRSTQPLQHLGLTDLEWESLLSQQNVSWLVDPVLRARYAVVSVWQAVELHMCYDAVQMLMMTCKESGAVGGDVEAECSVCLVALRESEAVELPACAHAFHRRCISEWFSHKSTCPLCRDDVAKYLEPELQRHFANFDYAM

SEQ ID NO: 7844 - protein, 429 aa, Zea mays
  VARIANT 217: note = Ancestral polymorphism is P, Derived polymorphism is S
MAQLLLLAVVSALSLLSPRTAAAATSTTSGGKPLVTAITRDAATKLYTAPLKDELPLVLDLSGPLLWATCAAPHPSYECHHAACAHAHAHHPPGCPRTGHGVADEFDPFRCRCRAHPYNPFARRAGSGDLTRARVTANTTDGANPLAAASFTAVAACAPPTLLAGLPAGAVGVAGLARSRLALPAQVARKQKVARRFALCLPGEGGGMGVAIFGGGPLFLLPPGRPDVTASLAGTTPLRRNPGVPGYFVSATGIAVNHVQVQVQQQGPLTVALCSRVPYTVLRPDVYAPFVRAFEAMAMAGRKRMTPPTPPFELCYDSRELGSTRLGYAVPQVDLMLESGTNWTVFGGNSMVQVSDDTACFAFLEMKEEKQQGGHGYGGGAPAPTVVIGGFQMENNLLVFDEENGQLGFSGLLFGRQTTCSNFNFTLAG

SEQ ID NO: 7845 - protein, 354 aa, Zea mays
  VARIANT 54: note = Ancestral polymorphism is D, Derived polymorphism is V
  VARIANT 88: note = Ancestral polymorphism is M, Derived polymorphism is I
MGRRGLLKAALLLCFLAACSGRELTIKQNPSTTIYNSTLAKILVEYASAIYTADLTQLFTWTCARCGDLIEGFEMIEIIVDVENCLQMYFDLQLTVYICVQCVKCTLLPPTVLIIQFLSIQNWIEDLLWKQLDLDYPGMPEAMVHRGFYSAYHNTTLRDGVVSGIQRTRKAYGDIPIMITGHSMGGAMASFCALDLVVNYGLDGVNLMTFGQPRIGNAAFASYFKTYLPQAIRVTHAHDIVPHLPPYFSFFPQKTYHHFPREVWTHNIGLGTLVYPVEKICDDSGEDPTCCRSVSGSSVRDHIYYLGVSMHAEDWSSCRIVMDYSKLQYQMDLNGNLVLSKQPGLSNARGFSAQ

SEQ ID NO: 7846 - protein, 111 aa, Zea mays
  VARIANT 47: note = Ancestral polymorphism is A, Derived polymorphism is V
MAMEASAADGGVARLASQRAVVIFGTSNCCMCHAVKTLFSELGVGWALHELDTDPGGKDMEKALARMVGRSPPVPAVFIGGKLVGPTDQVMALHLRGKLVPLLREAGALWL

SEQ ID NO: 7847 - protein, 200 aa, Zea mays
  VARIANT 54: note = Ancestral polymorphism is C, Derived polymorphism is Y
  VARIANT 100: note = Ancestral polymorphism is D, Derived polymorphism is Y
  VARIANT 101..200: note = Derived polymorphism lacks residues 101 to 200
  VARIANT 107..200: note = Derived polymorphism lacks residues 107 to 200
  VARIANT 126..200: note = Derived polymorphism lacks residues 126 to 200
  VARIANT 133: note = Ancestral polymorphism is S, Derived polymorphism is L
  VARIANT 135..200: note = Derived polymorphism lacks residues 135 to 200
MLGSPRRSPSPSSSCGDETRMSQAMSSSIINSWNSSIHSPRGSFQKRVVDVWSCGVTLYVMLVGSYPFEDPEDPRNFQKTISRILGVQYSIPDYVRVSSDWRRLLSQIFIVDPSKRITIPEIKHHQWFLKNLSREISEREKANYKDTDAAEPAQAVDEIMRIVEEAKTPGDMSKVVDPALLAEMAELESDEEEADTDGTY

SEQ ID NO: 7848 - protein, 783 aa, Zea mays
  VARIANT 28..783: note = Derived polymorphism lacks residues 28 to 783
  VARIANT 50: note = Ancestral polymorphism is S, Derived polymorphism is F
  VARIANT 55..783: note = Derived polymorphism lacks residues 55 to 783
  VARIANT 71..783: note = Derived polymorphism lacks residues 71 to 783
  VARIANT 73: note = Ancestral polymorphism is F, Derived polymorphism is C
MDAEAGVAGADQLPRRQYYMNLLLLAYQSFGVVYGDLSTSPLYVYKSTFSGKLNQYQDEETVFGVLSLIFWTFTLIPLLKYVTIVLSADDNGEGGPFALYSLLCRHTKLSLLPNQQAADEELSSYYRNGFAPSNGSSPWLRRFLEKHKKMRVVLLLIVLCGASMVIGDGVLTPAISVLSSMSGLQVRATGLKHSSVVLLSCIVLVGLFALQHRGTQKVAFVFAPIVIIWLLSIGGIGLYNILHWNPNIYQALSPYYMVKFFRKTGKDGWIALGGILLSMTGSEAMFADLGHFTSASVRVAFITVIYPCLILQYMGHAAFLSKNTFHMPTGFYDTIPEPVFWPVFVVATLAAVVGSQAVISATFSIVKQCHALGCFPRVKVVHTSRWIYGQIYIPEINWILMVLCVAVTIAFRDTTLIGNAYGIACMTVMFVTTFLMALIIIFVWQRNIIFALVFLVFFGSIEAVYLSSSLMKVTQGGWVPLVLAFIFMSVMYIWHYGLRRKYQFDLQNKVSMRSILSLGPSLGIVRVPGIGLIYTELVTGVPSIFSHFVTNLPAFHEVLVFLCVKSVPVPYVSPDERYLVGRIGPKEYRMYRCIVRYGYKDVQRDDDNFENMLVMNIAKFIMMEAEDASSSASYDVSNEGRMAVITTTDASGSPLAMRDFDGLADSMTMRSSKSETLRSLQSSYEQESPSVSRRRRVRFEVPEEDGMGRQVKEELMALVEAKHAGVAYIMGHSYIKARRSSSFLKKFAIDVGYSFLRKNCRGPSVTLHIPHISLIEVGMIYYV

SEQ ID NO: 7849 - protein, 118 aa, Zea mays
  VARIANT 106: note = Ancestral polymorphism is R, Derived polymorphism is K
  VARIANT 90..118: note = Derived polymorphism lacks residues 90 to 118
  VARIANT 85: note = Ancestral polymorphism is P, Derived polymorphism is L
  VARIANT 83: note = Ancestral polymorphism is E, Derived polymorphism is A
  VARIANT 70: note = Ancestral polymorphism is Q, Derived polymorphism is K
  VARIANT 59: note = Ancestral polymorphism is F, Derived polymorphism is V
  VARIANT 52..118: note = Ancestral polymorphism lacks residues 52 to 118
  VARIANT 36: note = Ancestral polymorphism is V, Derived polymorphism is A
  VARIANT 27: note = Ancestral polymorphism is Y, Derived polymorphism is C
MPAKKRIESKWSAYKSDDKQYSLNFSCISLLADIHAGLQQTNPTPSRHMKRQGMLRKRFIGTFTVIISTQHNSDILQQRNQSEGPEDEGKHTEHCLLILVLIELSRECAFINVKRRCA

SEQ ID NO: 7850 - protein, 366 aa, Zea mays
  VARIANT 180: note = Ancestral polymorphism is R, Derived polymorphism is S
MAAAEIKIGQVDDVQELHRTGLQTVPDRYIRDGDDRPDGDNVCAVAHIPVIDVAELQRDDVGLDKLRLACEEWGFFQVVNHGIAHELLDEMERLAREFFMLPLEEKEKYPMAPGGIQGYGHAFVFSEDQKLDWCNMLALGVEPASIRQPRLWPTAPAGFGETLETYSAEVGELCRRLLARIAETLGLAPATFADMFGEAVQAVRMNFYPPCPRPDLVMGLSAHSDGSAVTVLQQDAGCAGLQVRGKGGAWVPVHPVPHALVVNIGDTLEVLTNGRYKSVEHRAVANGEQDRLSVVTFYAPAYDVELGPLPEFVTDEAPCRYRRFNHGEYSRHYVTSRLEGKKTLEFAKIDPLAGEHDGTAPEETST

SEQ ID NO: 7851 - protein, 292 aa, Zea mays
  VARIANT 207: note = Ancestral polymorphism is P, Derived polymorphism is T
MNNHLSFEEGWKVLEQGIVKCSKILECTSTRPTVNEYMNYYDCAYRMAVQKQHYCPEMYNGFKMMLAECVRTMVLPHLMHKQNDSFFRELVKMWSNYCIMIRCVIGFFSYLDRCYVKQYKLPSLSNTAATSFFDPVFSYFNDEARTALLTMIQQERDGIRMDSSLRDVMHGICCSEAKSIMQNAFLDEIYGYYSVRSSEWIKHYSLPDYLAKVEESMEMETKRLAYYLEISSGDSYPLCLQVSFYCHAVNAPLMETYVSYVTEKQIGGQLMLETYKIVEEELLGRCSSLTLG

SEQ ID NO: 7852 - protein, 245 aa, Zea mays
  VARIANT 52: note = Ancestral polymorphism is F, Derived polymorphism is S
  VARIANT 32: note = Ancestral polymorphism is T, Derived polymorphism is I
MVAVVLRALIDFCQSGKCGLFGKGGLIMFDVTADYVTYHLIHLHPVITLGVFGGILGSLYNFFLDKVLRLYNRINEKGKAYKLLLAATVTVCTSCCIFGLPWIAACKPCPTDTREACPSIGRSGNFKKFQCATDEYNDLASLFFNTNDDTIRNLYRAGTDDEFHISSILVFFIASYFLGIFSYGLALPSSLFVPVILTAAAYGRLVGMLIGSQSTLDHGLFAVLGSAALLRGSMRMTVSVCVIIL

SEQ ID NO: 7853 - protein, 106 aa, Zea mays
  VARIANT 69: note = Ancestral polymorphism is R, Derived polymorphism is S
  VARIANT 63: note = Ancestral polymorphism is Q, Derived polymorphism is R
  VARIANT 54: note = Ancestral polymorphism is N, Derived polymorphism is H
  VARIANT 50: note = Ancestral polymorphism is S, Derived polymorphism is F
  VARIANT 22: note = Ancestral polymorphism is R, Derived polymorphism is W
MGAFKVGNITNENFFEIINGLRPANTAGCSSSTDAPNIPHDGTSVIELLSDSMHQLSIKNENQLDKSRRNEESCSFTSSNRESWGICSSLGAASDESFSGDNNDKQ

SEQ ID NO: 7854 - protein, 478 aa, Zea mays
  VARIANT 109: note = Ancestral polymorphism is L, Derived polymorphism is R
  VARIANT 336..478: note = Derived polymorphism lacks residues 336 to 478
  VARIANT 361..478: note = Derived polymorphism lacks residues 361 to 478
  VARIANT 384..478: note = Derived polymorphism lacks residues 384 to 478
MRGMAAARRLEMRGMAAARSSSDPIARSSSFPAVSDPPGFTKSTPPHATATDRVHRPHLPAWRPCCSPPWKGRVHKRQGRAPARPRATAAALDVWTSEPAPVQERRRKLLQMLGLAGDPALARLEMGRSVSYDDGPVPVRPTPASPPISRSRSDGGAVPALATKPPLGGRSPGSSEATPEGEEEEEADPRCLIRNLDDGSEFVVKEGSELREVGTGRQLTMKEFVDLCVGHSPIVQELMRRENVASSGSSTPVQRSNSDSSNGATRHRRRRLHSSWLRGIQNVAGSVVASSRDCRSSDDKDTCSEKGGRRSSSATDDSQDSAGAVRHGPVRVKVRQYGKSYKEFSGLFMNQEIQAHDGSIWSIRFSPDGRYLASAGEDCVIHVWEVSEFDRKHEENGACNPFVAMVCNGSPEPTLAVASSVYGSNREKKRWARFLEGRRSVSSDRLMLPEHVFALSEKPIRTFMGHSEDVPHDQFSLL

SEQ ID NO: 7855 - protein, 179 aa, Zea mays
  VARIANT 134: note = Ancestral polymorphism is P, Derived polymorphism is Q
MADHHHHHHHGHPPDGPGGAGDQLEVIKEQDRLLPIANVGRIMKQILPPNAKISKEAKETMQECVSEFISFVTGEASDKCHKEKRKTVNGDDVCCAFGALGFDDYVDPMRRYLHKYRELEGDRAASSRGGGGGPAGAADPASASAAAGPSPSAASAGHFMFGAAMDRPDNNSSAGARPF

SEQ ID NO: 7856 - protein, 166 aa, Zea mays
  VARIANT 121..166: note = Derived polymorphism lacks residues 121 to 166
MSHTSNFTGFSQLEHPQPQRNSRASSSTTHDANVRHDNNLLPIANVGRIMKDALPPQAKISKHAKETIQECTTEFVGFVTGEASERCRRERRKTINGDDICHAMRSLGLDHYADAMRRYLQRYRETEELAAALNSGGGGHDGNAIQIDVRDELSIFKGSNQQGGRD

SEQ ID NO: 7857 - protein, 394 aa, Zea mays
  VARIANT 59..394: note = Derived polymorphism lacks residues 59 to 394
  VARIANT 209..394: note = Derived polymorphism lacks residues 209 to 394
  VARIANT 277: note = Ancestral polymorphism is L, Derived polymorphism is F
  VARIANT 293: note = Ancestral polymorphism is T, Derived polymorphism is I
  VARIANT 304: note = Ancestral polymorphism is G, Derived polymorphism is R
  VARIANT 309: note = Ancestral polymorphism is C, Derived polymorphism is Y
  VARIANT 311: note = Ancestral polymorphism is A, Derived polymorphism is D
  VARIANT 329: note = Ancestral polymorphism is S, Derived polymorphism is F
  VARIANT 340..394: note = Derived polymorphism lacks residues 340 to 394
  VARIANT 360..394: note = Derived polymorphism lacks residues 360 to 394
  VARIANT 365: note = Ancestral polymorphism is D, Derived polymorphism is Y
MGKKLKKPGQAGGRYGSSHPSGTSWAQAPDHGAATRGNPRPPSQTSRHVLTPPLANGWQWQSRPRPSGSEVKKDDAPPSGSVPEVENFDGNNTSDDDDDDLSDDISDDYDSDASEKSFETRKTNKWFKEFFEVLNTLSLEQINEQTRQWHCPACKNGPRAIDWYKGLQPLVTHARTKGSTRVKLHRELAALLEEELSRRGTSVLPAGEQFGKWKGLQESTDREIVWPPMVIVMNTFLEKDEDDKIGRSTKEYTEALNDLLESDDKFGFIIMDGNGTLFVTLSGNTCEVLHRFTVDLPKQHGRGGQSALCFARLRMEKHHNYVRKTAELSTQFFINPATSQPNVVGLILADSANFKTELSQSDMFDQRLEAKILNAVDVSYGGENLFNQAIELSA

SEQ ID NO: 7858 - protein, 108 aa, Zea mays
  VARIANT 7: note = Ancestral polymorphism is P, Derived polymorphism is L
  VARIANT 42: note = Ancestral polymorphism is T, Derived polymorphism is M
MDEQTIPDVRLTKSRDSTNGVAIFTFEQPSVFDSSAELGAITGFYMIDDEGVLQSVDVSAKFVNGKPPREWEPIPQLAHGRTVNSRSDSDPIRFICCPSNAKSKQTSR

SEQ ID NO: 7859 - protein, 276 aa, Zea mays
  VARIANT 1: note = Ancestral polymorphism is M, Derived polymorphism is I
  VARIANT 134: note = Ancestral polymorphism is E, Derived polymorphism is D
MEALGTTGIGSSLTAERSIQAYATGIEFFPRQTTTSGERGFALHLRCYVTLIVNIGNGRPNRVFMYRRRDADTSCLALPDDEDGVRDVLRGLLKSTLPLQRLGLTDREWESILPQEKVSLLVDPVLRARHAAAEILLAVEMHVCHDAAQILMTTCKESSDIDGGSGAVGGDAEAECSICLVALRESEAVELSACAHAFHRHCISEWFGRKSTCPLCRDDVAKYLDPELQQYFDGDMDAHYFANFDDDALQQYLANFDDDDPALDQFYLANFDDDAM

SEQ ID NO: 7860 - protein, 520 aa, Zea mays
  VARIANT 306: note = Ancestral polymorphism is Y, Derived polymorphism is C
  VARIANT 307: note = Ancestral polymorphism is S, Derived polymorphism is L
  VARIANT 325: note = Ancestral polymorphism is L, Derived polymorphism is R
  VARIANT 326: note = Ancestral polymorphism is V, Derived polymorphism is A
MDSGGGGKHFILLHGLAHGAWCWYKVVAQLRAAGHRATALDMAASGVHPARLHEVASFEDYSRPLLDAVAASPDSDRLVLFKRTIKPDFFMDSTTTIVNTEQGPRTALLFGPNLLASKLYDQCPAEDLELAKLLVRPGFQFMDDPTMKDETLLTDGNYGSVKRVFVVAKADRSSTEEMQRRMVELSPGADVEEVAGADHMAMLSKPTEQKVTMWMINKHGGKAPVQTKGPSIDRELCGSPRQREAMEVGGGEKHFVLVHGLCLGAWSWYKVATALESAGHRVTALDLAASGAHPARLQEVRSFEEYSRPLLDAVAAAPDGDRLVLVGHSHGGASLALAMERFPRKVAAAVFVDAAMPWVGKHIGVTTEGFMKKAASKGLLMDCQIVAITDGTGSEEGAGQRGTAIVMGPEFLKKCYKESPAEDLTLATLLVRPGNQFMDDPVMKDEALLTAANYGSVKKVFVVAKAAHGSSASAEEVQSWLAATNPGTEMQEIAGADHAVMNSKPRELCDVLVGIASRYD

SEQ ID NO: 7861 - protein, 289 aa, Zea mays
  VARIANT 260: note = Ancestral polymorphism is H, Derived polymorphism is L
MMPGQSITNSPRRCTHRAQLAAIMEVVGGGRHFVLVHGLCHGAWCWYKVATALESAGHRVTALDLAAAGAHPARLHEVRSLEDYSRPLLDAVAAAPDGDRLVLVGHSHGGVSLALAMERFPSKVATAVFVAAALPCVGKHLGVTLDEFMRRNASEGLLMDCQQVPIPGVGQQGTAIVMGPRYMEEKYYQESPAEDLTLAKLLVRPGNQFMDDPLMKDAALLTAANYGSVRKVFVVANADCSSTEEMQRWMVAMSPGTEVHEIAGADHAVMNSKPGELCDVLGRVASRCG

SEQ ID NO: 7862 - protein, 269 aa, Zea mays
  VARIANT 31: note = Ancestral polymorphism is A, Derived polymorphism is T
MESGTERRRRRHHFVLVHGTCHGAWCWYKVATLLSSAGHRVTALDMAACGASPGRAEEVPSFEEYSRPLLATVAGLAPEEKVVLVGHSFGGVSLALAMEQYPDRVAVAVFVATGMPSAGKPMAFVFEQFLQEEYPADRYMDCEFETSGDPQRPVETFRFGPQYLKQRLYQLSPPEDLTLAMAMVRPSQRFRDDATMKGGILTAERYGGVRRVCVVAEDDASVPAGFQRRMASWNPGTEVTGLQGADHMSMLSKPGELSELLMEVANKYS

SEQ ID NO: 7863 - protein, 283 aa, Zea mays
  VARIANT 249: note = Ancestral polymorphism is G, Derived polymorphism is S
  VARIANT 203: note = Ancestral polymorphism is S, Derived polymorphism is N
  VARIANT 140: note = Ancestral polymorphism is G, Derived polymorphism is R
MATAAAARHQHQHQQRRGAQRGRRRGSGIRCSSPAQEFASLAAVFRRRLVVGATTAAAAAVGANFGGVTSFLLGLSPELGRSLRLDVLYPVGGFTRCLDSDNGFEFIYPSSWVGDQTLLYREAKKAELQRSLDPPPLPNGGSPSGPRNISEPVAAFGPPGSNGELNVSVIVSTVPRDFSIETFGSPKDVGEVVLRRIARTRRSPDINATLIDAAVREDAGRVKYYKLEFRVESPSFRRHNVAVCCVRDGRLYTMNAQAPESAWKAVQKEFLAMADSFGLVSDA

SEQ ID NO: 7864 - protein, 386 aa, Zea mays
  VARIANT 92: note = Ancestral polymorphism is S, Derived polymorphism is Y
  VARIANT 77: note = Ancestral polymorphism is E, Derived polymorphism is K
  VARIANT 71: note = Ancestral polymorphism is P, Derived polymorphism is S
  VARIANT 68: note = Ancestral polymorphism is A, Derived polymorphism is P
  VARIANT 60: note = Ancestral polymorphism is G, Derived polymorphism is C
MGSGEEPSQMRRALVDSLAGAISGGISRTVTSPLDVIKIRFQVFPPPLISPFSSRSTFSGRAVAVLLAGAPPPFVRELAISILDVKRLPQYSLQVQLEPTTSWGILRRDIYGPSKYTGLLQATKDILREEGLPGFWRGNVPALLMYMPYTAIQFTVLHKLKTFASGSSKTEDHLHLSPYLSYVSGALAGCAATIGSYPFDLLRTILASQGEPKIYPNMRSAFVDIIKTRGVQGLYSGLSPTLVEIIPYAGLQFGSYDTFKRSMMTWNRYKYSHLNFGSEDDSVSSFQLFLCGFAAGTFSKAACHPLDVVKKRFQIEGLKRHPRYGARIESSTYKGMYHALKEIVAKEGFGGLYKGLFPSLVKSAPAGAVTFVAYEYISDWLESILM

SEQ ID NO: 7865 - protein, 321 aa, Zea mays
  VARIANT 49: note = Ancestral polymorphism is T, Derived polymorphism is A
  VARIANT 101: note = Ancestral polymorphism is G, Derived polymorphism is S
  VARIANT 122: note = Ancestral polymorphism is G, Derived polymorphism is D
  VARIANT 131: note = Ancestral polymorphism is S, Derived polymorphism is W
  VARIANT 255..321: note = Derived polymorphism lacks residues 255 to 321
  VARIANT 274: note = Ancestral polymorphism is K, Derived polymorphism is N
MATTRPLELTLISAKDLKDVNLLSKMEVYAVASLSGDPRSRQRIQADRAGGRNPTWNATLRFAVPATGASSSLHILLRAERALGDRDVGEVHIPLSELLSGAPDGPVPAKFVAYQVRKISSGKPQGVLNLSYRLGEVTQTTGANGYAPAQAAYTQAAAYPPTSAYQPPSGKADTYPPPSGKADAYPPPAAYPPAAKADGYPPPGGAYPPAAGKPAKAGEPVTAYPAAGPSTAAPYAAPPSQYGGYGYPPPQAAAYGYPPPPQAGYGYQQQPKKKNNFGMGLGAGLLGGAVGGLLVGDMISDSSAYDAGYDAGFDDGGGFDF

SEQ ID NO: 7866 - protein, 449 aa, Zea mays
  VARIANT 102..449: note = Derived polymorphism lacks residues 102 to 449
  VARIANT 206: note = Ancestral polymorphism is L, Derived polymorphism is P
  VARIANT 256: note = Ancestral polymorphism is R, Derived polymorphism is M
MATPASAPATPNPNPVSGDPPSLLLQQQQEEEVPAPVPETAPTPLTTSIDPTPSGGEEGESDDSSSVWSAPSSAPTPVLAPAPAPAAPSPAAKDILHISFNQDYGCFAAGTKSGFRIYNCDPFREIFRRDLAAEGGVGAGGGGIGVVEMLFRCNILALVGGGDNPHYPPNKVMIWDDHQSRCIGELSFRSPVRGVRLRRERIIVVLENKIFVYNFADLKLLHQIDTLSNPKGLCAVSQQPGSIVLVCPGAQKGQVRVEHYKTRKTKFINAHTSRVACFALSQDGRLIATASTKGTLVRIYNAAEGNLLQEVRRGADRAEIYSLAFSNDLQYLAVSSDKGTIHVFNLKINVGSTANDKPMPSPDPEVPHIRPSLSFIKGVLPKYFHSEWSVAQFRLQEGEHYIVAFGHEKNTVAVVGMDGSFYRCRFDPVNGGEMLQLDCYSFLKPSDQP

SEQ ID NO: 7867 - protein, 221 aa, Zea mays
  VARIANT 104: note = Ancestral polymorphism is S, Derived polymorphism is L
  VARIANT 117: note = Ancestral polymorphism is Q, Derived polymorphism is E
  VARIANT 123: note = Ancestral polymorphism is L, Derived polymorphism is I
MAPLKLYGMPLSPNVVRVATVLNEKGLDFEIVPVDLTTGAHKQPDFLALNPFGQIPALVDGDEVLFESRAINRYIASKYASEGTDLLPATASAAKLEVWLEVESHHFYPNASPLVFQLLVRPLLGGAPDAAVVDKHAEQLAKVLDVYEAHLARNKYLAGDEFTLADANHASYLLYLSKTPKAGLVAARPHVKAWWEAIVARPAFQKTVAAIPLPPPPSSSA

SEQ ID NO: 7868 - protein, 178 aa, Zea mays
  VARIANT 95..178: note = Derived polymorphism lacks residues 95 to 178
  VARIANT 109: note = Ancestral polymorphism is P, Derived polymorphism is L
  VARIANT 117: note = Ancestral polymorphism is D, Derived polymorphism is N
  VARIANT 126: note = Ancestral polymorphism is F, Derived polymorphism is L
  VARIANT 139: note = Ancestral polymorphism is P, Derived polymorphism is L
MEGRAAHSSPLMEGRASSRSPRQPRLGRARSPQIGHAPRRGRHVQGAGVRGPPYSFLSGCNREMRKMKAEADDGLRLDVRDHNYLPRLMPHFLAWKQKYGEPFLYWMGPRPRVCLFDYESVRQVLFNKFGHFFKDDAHPTILAMLDKGLVLVEGTDWVRHRRVVNPAFAMDKLKVPIN

SEQ ID NO: 7869 - protein, 98 aa, Zea mays
  VARIANT 8: note = Ancestral polymorphism is N, Derived polymorphism is K
  VARIANT 30: note = Ancestral polymorphism is G, Derived polymorphism is D
  VARIANT 32: note = Ancestral polymorphism is D, Derived polymorphism is H
  VARIANT 40: note = Ancestral polymorphism is G, Derived polymorphism is R
  VARIANT 45: note = Ancestral polymorphism is G, Derived polymorphism is R
  VARIANT 50..98: note = Derived polymorphism lacks residues 50 to 98
  VARIANT 52: note = Ancestral polymorphism is R, Derived polymorphism is M
MEVDGAENNEDDTKDADGEGQEAGSGATEGSDRRTFNTGGFRRDGSLWMQRRVDYNSLPEPAPRELPRNEDPSLVRRNKRMLGQLLVGTLEVKQFSAY

SEQ ID NO: 7870 - protein, 96 aa, Zea mays
  VARIANT 50..96: note = Derived polymorphism lacks residues 50 to 96
  VARIANT 64: note = Ancestral polymorphism is G, Derived polymorphism is R
  VARIANT 88: note = Ancestral polymorphism is D, Derived polymorphism is H
MTAGGLGVMIALPGALKALTGRCVEAAAPKFLGTWMSFLLLSVLPSSTMSVVRRKNVGQRSMTGNDGEATVVASSVRGQRGEEFGMVDRHRLQLQL

SEQ ID NO: 7871 - protein, 89 aa, Zea mays
  VARIANT 9: note = Ancestral polymorphism is V, Derived polymorphism is I
  VARIANT 16: note = Ancestral polymorphism is A, Derived polymorphism is V
MASSKDAVIAAIFIQVLLLMASSYCAEAKICTKPNPFYLTLCQSDKACGDSCIHFGIGTSGFCKGRRPPTRVCTCNFECPGQERSNTFT

SEQ ID NO: 7872 - protein, 236 aa, Zea mays
  VARIANT 49: note = Ancestral polymorphism is D, Derived polymorphism is G
  VARIANT 70..236: note = Derived polymorphism lacks residues 70 to 236
  VARIANT 116: note = Ancestral polymorphism is S, Derived polymorphism is L
  VARIANT 151: note = Ancestral polymorphism is G, Derived polymorphism is V
  VARIANT 158..236: note = Derived polymorphism lacks residues 158 to 236
MAAEMVKAAMSGKLKEMDWEKKIKICELVEQDPGAYARKKGRNNVTLDDLIHVITLKGRYALCIAPLLIQGTAAAASGREVLQPRHRPRPRVLRLQQLPASTSCDFRGGNVASLRSYLHIIGTHDGLGHNPEQQDAELLFGPGCTGLADLGNRYFEKQSLKAAFASALADPTVDLNMQIDGNGGGLARDGGGAAAGERNQREKVPQDSEGFRQPDMHHGMEVRLGLSKGPICPSFS

SEQ ID NO: 7873 - protein, 800 aa, Zea mays
  VARIANT 723: note = Ancestral polymorphism is P, Derived polymorphism is L
  VARIANT 300..800: note = Derived polymorphism lacks residues 300 to 800
MAAPRQPHPPAAEEGAAPAGPLPAAAPGPRPYDVTVAATELRPVDCNLAALCDHVQAEGFGSGAFSDLVVEAMGATYRLHRLILSRSAYFRNMLHGPWRESGAPTVVLHIDDANVDSDAIAIALAYLYGQPPKLTDSNAFRVLAAASFLDLQDLCTICTDFIISELWTSNFLQYQLFAESQDYGSHGERVRNACWGYLCQSATMELREVLPKLSSQTLHALLTSDELWVPNEEKRFELALLTLLAKVAMCEIQVSGNETNLPSADRSMRKGKTPMNESGEELLMDSELQNLKLHDNLGNEISHNIIAISDMNGEAPKRMEIDCSTGGPSGESTSYQFNENNWISSEQTANNYFSRTSSSVVVPTEWGRPNAPLWGGRVVGRRQIRYIRGSSCLSTDEYNAFMNIFERGSLLYCNMSFDALLSVRKQLEEFGFPCKAVNDSLWLQMLLCHRVQAIVADTCRNCCLMNSSCACKQAYVSSHTHYRQEHDRSSASDNIGNVYLADGQGDGNGVLGPVRVNVRGAVDGLAGIGRGNSNVPGAAWAPTRYVFSRVPYGLGSRNGQQFAIDESEPRIDRNGDISADGLTALVNLSQENNAAHLQDQSLFETGMQTRYRSVPSVSTPGGSSVQMQESKEHELGSDWETTKDATISLDMKTPLSHFPPFRFGVEFEDVHRLADGQVKHSTEVFYAGSLWKVSVQPFNDEDPHGRRTLGLFLHRRKAELLDPLRKAHLYVDPREKVTARYQLICPSKREVMIFGSLKQAGTLLPKAPKGWGWRTAILFDELADLLQGGALRIAAVVQLV

SEQ ID NO: 7874 - protein, 224 aa, Zea mays
  VARIANT 162: note = Ancestral polymorphism is R, Derived polymorphism is C
  VARIANT 140: note = Ancestral polymorphism is R, Derived polymorphism is C
  VARIANT 129: note = Ancestral polymorphism is A, Derived polymorphism is S
MAITRIQPLSAHLHPRAVAATPAAGKQQQQAVYTVWMKSLVLGGHGCTVYGDDGRVAYRVDNYACSRSREAYVMDGDGRTLLKLLKKHFAAFATWKGYSYRTADSDPAGAAAGVEQEESPRPWFSVRKARRVLKQKGRQRGGGAVATVCVGGEVYRIDGVPRKSEYRIRGPGGEVVAETRRKQTGSGVALGEDVLSLTVGPAAHAERLLLVGLVVVCGLIGHSI

SEQ ID NO: 7875 - protein, 219 aa, Zea mays
  VARIANT 79: note = Ancestral polymorphism is G, Derived polymorphism is W
  VARIANT 185: note = Ancestral polymorphism is V, Derived polymorphism is A
  VARIANT 205: note = Ancestral polymorphism is V, Derived polymorphism is M
  VARIANT 207: note = Ancestral polymorphism is G, Derived polymorphism is R
MAKIQPLPAAPSAAAPPSSSSADEPWQVYTVWMKSLVFNGNGCTVYGADGGVAFRVDNYGCRGGREAFLMDRTGRTVVGIHRRSCFGMLRRWEVCRYSDKPESGGGGGGGGEEAGTPWFAVRKARRGGGAAVTVHGGSGRSSSTTTTAYAIVGGGCSRKPDYRILGGADGAAVAAVARKQTPGGAVLGDDVLTLTVAPGTDHLLVLGLVVVFGLMNRCL

SEQ ID NO: 7876 - protein, 262 aa, Zea mays
  VARIANT 186: note = Ancestral polymorphism is K, Derived polymorphism is E
MPLPTMTHSSAYLLPAPTAPSDPSGAAPTTYALVVLNQRLPRFAPLLWSRARLRVCADGGANRVFDGMPELLAGEDPAEVRTRYKPDVIKGDMDSIRPEVKEYYSKLGTNIVDESHDQDTTDLHKCVSFITSNLPIPEKSNLCILVLGALGGRFDHEMGNINVLYRFSSIKIILLSDDCSIFLLPKTHSHEIHIKKSVEGPHCGLIPMGGPSATTTTTGLRWNLDNTNMMYGGLISTSNIVDDDKVTVTSDSDLVWTISLRN

SEQ ID NO: 7877 - protein, 246 aa, Zea mays
  VARIANT 10: note = Ancestral polymorphism is R, Derived polymorphism is Q
  VARIANT 218: note = Ancestral polymorphism is R, Derived polymorphism is C
MEVHAAVGKRLWSYVRAAFFMARNGVLSNKRKLLLSVPHLLANRRRGTTRAVANLLSSHRGSTAAAAYALRRRDYEFSSCSNSSAGPSSFSSSRRRLPYFPCLSAAAEEDERQYDGYGSLSLPVEPAPPLARIDYHASAAASSPGLMLRGRGDGDDLAPEDEEEYVYAFASSSSSPALLLPGAASGEFSVRVSNYSSEDEAAGCDCDAVDADAEDFIRRFYDQLRRQNTHALLPCYMQQESVASSS

SEQ ID NO: 7878 - protein, 281 aa, Zea mays
  VARIANT 126: note = Ancestral polymorphism is G, Derived polymorphism is D
MPKTPTAAPPPRTPRTPRAIHRELRLHARVPKPPAAIPPTANPARDSPRSPPARPRAENPSRHASGRERQRAPTAAIPGADKPVAPRAAAARTLGIKKALVFYAGKAPRGVKTDWIMHEYRLADAGRRAKKGSLRLDDWVLCRLYNKKNEWEKMRLGKGAVVGAAKEEEAMDMSTSHSQTHSWVETRTPESEIVDNDPPFPDLPAPAPAMMVPKKERVDDGGSARTSDLFVDLSYDDIQGMYSGLDMLPPAGEDLYSSLFASPRVRGNQPTGATGLGLGPF

SEQ ID NO: 7879 - protein, 215 aa, Zea mays
  VARIANT 120..215: note = Derived polymorphism lacks residues 120 to 215
  VARIANT 103..215: note = Derived polymorphism lacks residues 103 to 215
MVGGALADKYGGKKVMAGVAALWSLATILTPWAASRSTLMLLVVLLFGLAEGVAFPTMSTFLPKWFPTHERATVVAISMGGFHLGNVISFLATPIIMSHIGPSGTFTFFASLGYLWLSVWMVNVESDPIDSRTISKSELQLILDGRIGSKVQGSKFPSVRELFSKTQFLAVTLANVVNNWGYFVLLSWMPVYFKMVYNVNMKQAAWFSTMSRIRH

SEQ ID NO: 7880 - protein, 324 aa, Zea mays
  VARIANT 45: note = Ancestral polymorphism is V, Derived polymorphism is A
  VARIANT 48: note = Ancestral polymorphism is G, Derived polymorphism is A
  VARIANT 109: note = Ancestral polymorphism is S, Derived polymorphism is L
  VARIANT 191: note = Ancestral polymorphism is R, Derived polymorphism is W
MGKKGKEAARERREQRRREVALLRSLPYEPHQRWWDRLAPRAVAVVTGANRGIGFEAARQLALHGLHVVLACRDAAKGQDAAERILAEAPDDTVVSVESRKLDVADAASVEAFAAWAVETYGGIHVLVNNAGVNFNKGADNSVEFAEQVIETNYYGTKRMIDAMIPLMKRSAYGARIVNVSSRLGRANGRRNRIGDVSLRDRLLKDDCLSEQLIDEMITKFLEQAKQGTWSLNEWPQMYTDYSISKLAVNAYTRLMARRLSDRPEGQKIYINCFCPGWVKTAMTGWEGNVSAEEGADTGIWLALLPQETDTNGKFFAERCEISF

SEQ ID NO: 7881 - protein, 166 aa, Zea mays
  VARIANT 77..166: note = Derived polymorphism lacks residues 77 to 166
  VARIANT 105: note = Ancestral polymorphism is T, Derived polymorphism is I
MANLNITNILEKMTGKDKDYRYMATSDLLSELNKESFKADQDLEPKLTITVLQQLEDASRDVSGLAVKCWVGVPILQALFVKEHNAVCDAIKVHTVDWTVELLKTKTMRAGMRANWYGLLGKKIEDTFGHIGGPTLGGLVGLKKPINHGIPYSLTEEFTSVYRMHS

SEQ ID NO: 7882 - protein, 184 aa, Zea mays
  VARIANT 26: note = Ancestral polymorphism is K, Derived polymorphism is E
  VARIANT 44..184: note = Derived polymorphism lacks residues 44 to 184
  VARIANT 76: note = Ancestral polymorphism is F, Derived polymorphism is S
  VARIANT 77: note = Ancestral polymorphism is P, Derived polymorphism is L
  VARIANT 110: note = Ancestral polymorphism is S, Derived polymorphism is A
  VARIANT 123: note = Ancestral polymorphism is L, Derived polymorphism is V
  VARIANT 129: note = Ancestral polymorphism is T, Derived polymorphism is A
  VARIANT 131: note = Ancestral polymorphism is I, Derived polymorphism is T
  VARIANT 132: note = Ancestral polymorphism is R, Derived polymorphism is W
MNSSMHHLASIEKYVVCLEYASFVGEVCHICSSPLFNLDLDTLRYVSYIPNHCLLLYEAVTYAIHNAVLAGGLWGSPQKAKELLRVIGLQEEGSSLEFLRRGYKHMMETSRVTIIEFLCCRMVHGGNRTLIWRLRLPEKLEVLHLLAECFSDLELGMKIPPMSVHVLLYCRDASNQSLVADVVV

SEQ ID NO: 7883 - protein, 212 aa, Zea mays
  VARIANT 159..212: note = Derived polymorphism lacks residues 159 to 212
  VARIANT 146..212: note = Derived polymorphism lacks residues 146 to 212
  VARIANT 82: note = Ancestral polymorphism is E, Derived polymorphism is K
  VARIANT 74: note = Ancestral polymorphism is A, Derived polymorphism is T
  VARIANT 67: note = Ancestral polymorphism is K, Derived polymorphism is T
  VARIANT 59: note = Ancestral polymorphism is E, Derived polymorphism is K
  VARIANT 58: note = Ancestral polymorphism is P, Derived polymorphism is L
  VARIANT 57: note = Ancestral polymorphism is L, Derived polymorphism is P
  VARIANT 49: note = Ancestral polymorphism is A, Derived polymorphism is V
  VARIANT 11: note = Ancestral polymorphism is R, Derived polymorphism is C
  VARIANT 3: note = Ancestral polymorphism is V, Derived polymorphism is I
  VARIANT 1: note = Ancestral polymorphism is M, Derived polymorphism is K
MYVLFLLSFSRTLTELAALTGYDYVVVDMEHGSGGIPKALACLRALDAARTPVVLRLPEASAVWAKKALDLGPAGLMLPATESPEAAAEAVSHCRSAATRRAGSAALHTPSSAPWRRGSGDVGALLIPHEVCPIQGAPRGEARQGRGYMEGVYGIVQRERWLSLAFNKFDNTSDTLSAGDGSGVPPRTVPKTCKHVKDLGALQQQHKWDNTS

SEQ ID NO: 7884 - protein, 377 aa, Zea mays
  VARIANT 25: note = Ancestral polymorphism is G, Derived polymorphism is R
  VARIANT 26: note = Ancestral polymorphism is G, Derived polymorphism is R
MMPLNQSHLLQMSGLLAEALGAAAGGCALLLIVIIIIVLCLQHRKRTSDSSESGFSDQALPESQEARCLSLEELNFATRNFSNGNLIGQGTFGEVYKGLLQDGTIVAVKRRHSPPSQEFIQEVNYLASLCHWNLVKLLGYCQEDGMQMLVYEYISNGSVSTHLHGNSHALGSRLEFKKRLSIAHGTAKGLSHLHSLTPPAVHMNFKTSNVLVDEDFAPKVADTGIPGMLDRLGVTGLSSRTFNDPFVEPRMKEAMNLNFSIQSDVYSFGVFLLELISGRKAVSDQCIIQWAQSFQESSDISVIADSRMAGGFTSQSMKELLSLTARCVNPTSEQRPSMSSVEAEIQRIREQEISLTAVMAEGTPTVTLGSQLFRTSR

SEQ ID NO: 7885 - protein, 278 aa, Zea mays
  VARIANT 228: note = Ancestral polymorphism is S, Derived polymorphism is R
  VARIANT 238: note = Ancestral polymorphism is K, Derived polymorphism is T
MVPTTRNLLLHHDVDGKSSRGRPCYHPAGHQYYVGIAAQLEASAASAAWQQDHQSKPSRSPRLLGMADDDEQPDAAAGPSTSSASPGGAGAGNGRGGDWLQLGLAAAAASASSSGDNSTMDPDPPAPTELELSAYDKRNACRMRRPPLFPLPLRSYHPPYGYGRYRPAAAAASRSMPFMPPSRCSSSDAIIRVISPPRRRTEAPRLWLTLQAAPNQSREPVLPQIAKSYLRIKDSNMTVEVVMKYLAEKLGVARSRSRSRSHQVCINSCTITLLFGVL

SEQ ID NO: 7886 - protein, 423 aa, Zea mays
  VARIANT 178: note = Ancestral polymorphism is R, Derived polymorphism is G
  VARIANT 137..423: note = Derived polymorphism lacks residues 137 to 423
MAAPRKGTATPLGAVFSPEETKRAVARVAESIAGRRAELGHLLGFVADNAALVSLVNRLPVELSHEIMVPFGGAAFFPGRLIHTNELLVLLGEGYYAERSAKQTTDILHRRGQELEAQVEAMKATITDLEAEANFFESTATEASVGSLSYWFCTYGRVLLKSGKKASIATGVMFDNDREHAQIMARLVELEREEKEAGNTCEDDDDDGDDDGDAGTSEDGEENKEPGNALSDGNEDHSSGSGALFFGNGGNDRSNGNIKLKSALKKPGGDEMLKDISHTPSADTSHPVFGGQTSVCCLSFFVYLLHCIQIMYHIADLCVSPHVLLAAVSFEDDKFVVSSSKSPTLLVGSIQSDPGLKSSSDPTPSCDRKIISSGRKAFTGSIVEHDDDDLSTIQPSAGNSLAKPGTSASSRPMSKFKMQKGGR

SEQ ID NO: 7887 - protein, 253 aa, Zea mays
  VARIANT 114: note = Ancestral polymorphism is H, Derived polymorphism is Y
MAAATNTTTPTTAPLSMKLLIDRKARRLLFAEASKDVVDFLFSLLVLPVGAAVKLLGKDGVAGSVGSLYGSVEGLDYAYVQPGAAKDALLRPAVLCSLLDGSSLLRLLPPPPGHHPTTTSSRSLLLYRCTSIFNSSCRTYITDAYGKACPTCGNLMTAAAQYLPPAAQMPAAAAGFVQGVVTYTVMDNLTVMPMSAISSFTLLHAFAVTDLAALQEKTVQLGYNEGLEILRASLQSKTVLSDVFLGRKDRGDA

SEQ ID NO: 7888 - protein, 372 aa, Zea mays
  VARIANT 330: note = Ancestral polymorphism is K, Derived polymorphism is N
  VARIANT 89: note = Ancestral polymorphism is E, Derived polymorphism is D
MAAPSGTMRAVQYDRYGGGARGLKHVEVPIPSPKKGEVLIRMEATSINVVDWKFQNGFARPFMPRRFPFISGTVTARRAEPWLRVRTGDLHRRVIVFAFWRTGFDLAGEVVELGAGVSSFKPGDKVIAINFPNGGGLAEYAVASASRTAARPPEVSAVEGVCVPIAAVTALGSLRTAGVTVTLDDPARAPATPKNVLVTAASGAVGHFAVQLARMGGHNVTATCGARNLGLVRSLGADEALDYKTPEGAKLRSPSGRKYDAVVHCAAKGLPWSVFRPVLAASGTVVDITPGFVAVVTAILQVATFSKKRLVPLIVTPKKEEMELLLGMLKQGRLKTVIDSRHPLGSAHEGWAKSMSGHATGKVVIEIGAAQP

SEQ ID NO: 7889 - protein, 579 aa, Zea mays
  VARIANT 206: note = Ancestral polymorphism is M, Derived polymorphism is I
MAIPVRSAAAPRRLVPSIPPASSGHVRGLACFGTRTGPRGARGLSMVVADSTSRRAKQADGGDGVLGAPVLGGLGMEGLGDQLSVVMKFGGSSVSSAARMAEVAGLILTFPEERPVVVLSAMGKTTNNLLLAGEKAVGCGVIHVSEIEEWNMVKSLHIKTVDELGLPRSVIQDMLDELEQLLKGIAMMKELTPRTSDYLVSFGECMSTRIFSAYLNKIRVKARQVLLDIFLICTYDAFDIGFITTDEFGNADILEATYPAVAKRLHGDWIQDPAIPVVTGFLGKGWKSGAVTTLGRGGSDLTATTIGKALGLREIQVYVWKDVDGVLTCDPNIYPHAKTVPYLTFEEATELAYFGAQVLFLLSEESKVLHPQSMRPAREGDIPVRVKNSYNPKAPGTLITRQRDMDKVVLTSIVLKSNVTMLDIVSTRMLGQYGFLARVFAIFEDLCISVDCVATSEVSVSVSLDPSKIWSRELIQQASELDHVVEELEKIAIVRLLQQRAIISLIGNVEQSSLILEKTGRVLRKSGVNVQMISQGASKVNMSLIVHDSDAKALVEALHQAFFEDDVLSQVEAENLLVG

SEQ ID NO: 7890 - protein, 76 aa, Zea mays
  VARIANT 63: note = Ancestral polymorphism is G, Derived polymorphism is C
  VARIANT 59: note = Ancestral polymorphism is E, Derived polymorphism is K
  VARIANT 19: note = Ancestral polymorphism is G, Derived polymorphism is D
  VARIANT 18: note = Ancestral polymorphism is R, Derived polymorphism is C
  VARIANT 13: note = Ancestral polymorphism is R, Derived polymorphism is H
MSRSVNKNFVLRRDVEERGGLIADRGAIIGEVGEGANGDEGDIMLVSEEGHNVALHLHEVPSGCVLQDTPNGCKGL

SEQ ID NO: 7891 - protein, 247 aa, Zea mays
  VARIANT 17: note = Ancestral polymorphism is D, Derived polymorphism is N
  VARIANT 22: note = Ancestral polymorphism is R, Derived polymorphism is L
  VARIANT 26: note = Ancestral polymorphism is A, Derived polymorphism is V
  VARIANT 41: note = Ancestral polymorphism is A, Derived polymorphism is V
  VARIANT 44: note = Ancestral polymorphism is V, Derived polymorphism is A
  VARIANT 179: note = Ancestral polymorphism is D, Derived polymorphism is Y
  VARIANT 192: note = Ancestral polymorphism is T, Derived polymorphism is I
MATTTAAAALSMKLLINKKAQRVLFAEASKEVVDFLFSLLALPVAKAVKLVGKDAMVGCVGNLYASVDKLDSTYLQAGAAKDALLCPTVVSPAANTRSSLLRLPEPSSVQPENLYRCTGNSYITDEYDKECPQCGYSMSMETVVHNYRPSARAARGQTVAQSAVGGFVQGIVTYTVLDDLTVTPMSAISSITLLNTFAVADLGDLEEKKVKLGYNEGLAVLKASLQSKTVLTDVFIHGKAASSSARA

SEQ ID NO: 7892 - protein, 762 aa, Zea mays
  VARIANT 1: note = Ancestral polymorphism is M, Derived polymorphism is V
  VARIANT 43: note = Ancestral polymorphism is A, Derived polymorphism is T
  VARIANT 90..762: note = Derived polymorphism lacks residues 90 to 762
MEDGETEEAQRDAITARMRAQDYAGARALLLRTLQTNPRLEGALEMLPVLEVLCCAAAGRGGVDWYRVLQVLPVDDAARIEARYKSIVAQVEPAMGALPGAELALKLVDEAYAVLSDPEKREGFDSSNVFTRFVRSGVVDAPPPGGTLVRPDRVSSLHTNKIMALNGTSNAVSRTNHADRPCFDGRDSRLSNVASSSGTKRMDPCFLADDGELQSPDGTHVNKGQKSVSEKDVYCMSPSQENWDTCFDDPSHAKEEDLDACFDDPSGTKEGELCSSKSYEYHNFEEDRAIENFAPGQVWAAYDWGRFPRRYALIVKVLTDKMQLYVSWFMPCPQTPEEKKWSLVGLPLVCGTFVADEHRISLTCPTMFCHQISNNNMNQDLEVYPQEGEIWAIYRNWDIGWYTDPRMWKNSDFSIVEILTSYSNESGYTVAHLTKVDGYGSVFQRHFKSGTEHLLHIHGQNLIMFSHRIPSFKFTHDAGTMFELDHSAVPEKMHQKNTSACISHLSELSGLPDDTDGFPETAVAQFSNPSATSKMEAGSPTQAMMSYNTKWFPKDFLEGQIWAVFDSRDRMPRSYVRIIHVVSSTSVFVLKLEPHPMLNEEIQWVEDGLPVASGVFRAGTETTYKDIWEFSHPVECDWSAKRSFYRIFPQKGEIWAMLKNWRITLNTTDIDKCEPRMVEILSEYSDENGVNVCSLARVKGCFTFFHRVAVEDFCLTRWIPRSEMLSFSHRVPAFDIVDIKDHDIPQGSWYLEPSALPTRIIH

SEQ ID NO: 7893 - protein, 277 aa, Zea mays
  VARIANT 40: note = Ancestral polymorphism is A, Derived polymorphism is D
MSANENSPPVEAAAAASTPRSRLPRWTRHETLVLIQARRAMERRGVQLPAVRPRPKWAAVSAYCRRHGVERGPMQCRKRWGNLSWDLKKIVAWEGKAIAGAGAGAAQHESFWDMRGDQRRARQLPSSFDREVYDALVCGASAGEDAAAAAVLPPDFGDGEPEGVYRQPPIMVMPISVTESDQKKAGAAASDKNSTSSQHDGGFKDSDATFVADQAEGTATASIGKQVVEALERGNRALAQQLEAHRSWWDADREQRAALLRAMDRVADAVCRIADKL

SEQ ID NO: 7894 - protein, 672 aa, Zea mays
  VARIANT 614..672: note = Derived polymorphism lacks residues 614 to 672
  VARIANT 437..672: note = Derived polymorphism lacks residues 437 to 672
MDASPLNPPPLVEEELVLRRSARCLNRPTRPSYAEQEPPKKPGGRGRSKRKRDEEKPELAPAQQGAKSPDRKDSKDEAGEKKPTPMIAALPVSCAGVAAEDDATGTGKSAKLRVKETLRAFNSHYLHFVQEEQKRAQAALQEINAKSGLKRQTKGGEKKRPSKRPDLKAITKMQEMNAVLYPEKTIGHLPGIDVGDHFYSRAEMVVLGIHSHWLNGIDFMGLKYQGKEYSNLTFPLATCIVMSGVYEDDLDKADEIIYTGQGGNDLLGNHRQIGSQQLKRGNLALKNSRENGNPVRVVRGHLSKNSYTGKIYTYDGLYKVVDDWVQKGVQGHVVFKFKLKRLEGQPSLTTSEVRFTRAEAPTTISELPGLVCDDISGGQENIPIPATNLVDDPPVPPSGFKYLKSLQIPKDIKIPSSIIGCDCEGGCASNKKCLCAQRNGSDLPYVSYKNIGRLVEPKAVVFECGANCSCNHDCVNRTSQQGLQYRLEVGIPLSKSVEVFKTASKGWGVRTWDTILPGAPICEYTGVLRRTEDLDGSQNNYCFDIDCLQTMKGLDGREKRAGSEMHLPNLHPENDSDAQPAPEYCIDAHSIGNFARFINHSCQPNLFVQCVLSSHNDVKLAKVMLFAADTILPLQELSYDYGYRLDSVVGPDGKIVKLACHCGAPDCRKRLY

SEQ ID NO: 7895 - protein, 251 aa, Zea mays
  VARIANT 97: note = Ancestral polymorphism is G, Derived polymorphism is D
  VARIANT 96: note = Ancestral polymorphism is A, Derived polymorphism is V
  VARIANT 92: note = Ancestral polymorphism is G, Derived polymorphism is D
  VARIANT 88: note = Ancestral polymorphism is L, Derived polymorphism is R
  VARIANT 32: note = Ancestral polymorphism is A, Derived polymorphism is T
MASAAGGGAAGEGEWLKVSQLRPMVEAQDPNAKAVDNLTLRRFLRARDHDVDKASAMFLKFLKWRREAAPGGSVPEEQVRRELSQDKLCMGGVDRAGRPILVAFAARHFSAGRDMAEFKSFVVYFFDKICARIPRGQEKFLCIVDLKGWGYSNCDVRAYIAAIEILQNYYPERLGKALMIHVPYIFMKAWKMIYPFIDTNTRDKFVFVEDKSLQETLRREIDEGQLPEFLGGKMDVIPLKDYGVQQQPQAV

SEQ ID NO: 7896 - protein, 251 aa, Zea mays
  VARIANT 219: note = Ancestral polymorphism is R, Derived polymorphism is Q
  VARIANT 66: note = Ancestral polymorphism is A, Derived polymorphism is T
  VARIANT 59: note = Ancestral polymorphism is F, Derived polymorphism is S
  VARIANT 54: note = Ancestral polymorphism is A, Derived polymorphism is T
MANAGGGAAGEGEWLKVAQLRALVQEDHRAKEVDNLTLRRFLRARGHNVDKAAAMLLKFLRWRAEAAPGGGTVREEQVRGELEQDKIYMGGVDRTGRPIIVGLLAKHYSANRDMAEFKSFVVYFFDKICARIPRGQEKFLAIMDLKGWGYANCDVRAYIAAIEIMQNYYPERLGKALMINVPYIFLKVWKTMIYPFIDANTRDKFVFVDDKSLRETLRREIDESQLPEFLGGKMPLVSLKDYAQQPQPVCE

SEQ ID NO: 7897 - protein, 418 aa, Zea mays
  VARIANT 3: note = Ancestral polymorphism is R, Derived polymorphism is Q
MRQWVLAVAILAAASAAALLLGAEAQQQGHQTERISGSAGDVLEDNPVGRLKVYVYDLPSKYNKKLLKKDPRCLSHMFAAEIFMHRFLLSSAVRTFNPEEADWFYTPVYTTCDLTPSGLPLPFKSPRMMRSAIELVATNWPYWNRSEGADHFFVTPHDFGACFHYQEEKAIGRGILPLLQRATLVQTFGQKNHVCLKDGSITIPPFAPPQKMQAHLIPADTPRSIFVYFRGLFYDTSNDPEGGYYARGARASVWENFKNNPLFDISTDHPATYYEDMQRSVFCLCPLGWAPWSPRLVEAVVFGCIPVIVADDIVLPFADAIPWEDIGVFVAEEDVPRLDTILTSIPTDVVLRKQRLLANPSMKQAMLFPQPAQAGDAFHQILNGLARKLPHGDGVFLKPGDERVLNWTAGPPGDLKPW

SEQ ID NO: 7898 - protein, 173 aa, Zea mays
  VARIANT 38: note = Ancestral polymorphism is G, Derived polymorphism is D
  VARIANT 24: note = Ancestral polymorphism is S, Derived polymorphism is N
  VARIANT 20: note = Ancestral polymorphism is P, Derived polymorphism is S
  VARIANT 2: note = Ancestral polymorphism is L, Derived polymorphism is M
MLQLLMAAAFSAAPLTLYVSPVRNLSLFVEVMEVVSHGVVARFRVSLSRVLAGLAQPISTGSNCPFLTPLTAHPRWCLGMGVIYETTKSGVGVASMGVMRLKLVMKSIVLVVMARVLDIYDLIIVAIISAGINPKAKPYFLDGYAHLSFELVCSLDGLAVGMAIRIVRDTRVR

SEQ ID NO: 7899 - protein, 252 aa, Zea mays
  VARIANT 89..252: note = Derived polymorphism lacks residues 89 to 252
  VARIANT 90..252: note = Derived polymorphism lacks residues 90 to 252
  VARIANT 139: note = Ancestral polymorphism is Y, Derived polymorphism is H
  VARIANT 141..252: note = Derived polymorphism lacks residues 141 to 252
  VARIANT 172..252: note = Derived polymorphism lacks residues 172 to 252
  VARIANT 207..252: note = Derived polymorphism lacks residues 207 to 252
  VARIANT 217: note = Ancestral polymorphism is I, Derived polymorphism is F
  VARIANT 229: note = Ancestral polymorphism is A, Derived polymorphism is T
  VARIANT 238: note = Ancestral polymorphism is D, Derived polymorphism is G
MWPPSSPEPYNAKCLAKDRGTTSVLLGFRVSGVRVVGPEGAVWWTERPEVKAMDTVGVCRVLRRYVSSVADEGMDCVLAAAVERGSGLRQAKGTRRCCRASLSVPIAAQMDPSSKPVYMPVEPYDSGFLKVSDVHTIYYEQSENPQGHAAMFLHGGPGAGTSPDNRRFFDPEFYKIVLFDQFILATHLFFFLNRGACRSTPHDCLEQNTTWDLVADIEKLREHLGIIQAIIFFFNNTDYSLFSAGTQCFQPM

SEQ ID NO: 7900 - protein, 193 aa, Zea mays
  VARIANT 1: note = Ancestral polymorphism is M, Derived polymorphism is I
  VARIANT 7: note = Ancestral polymorphism is P, Derived polymorphism is L
  VARIANT 8: note = Ancestral polymorphism is G, Derived polymorphism is S
  VARIANT 14: note = Ancestral polymorphism is V, Derived polymorphism is A
  VARIANT 17..193: note = Derived polymorphism lacks residues 17 to 193
  VARIANT 24: note = Ancestral polymorphism is T, Derived polymorphism is M
MYIFKQPGIGGEVVPHQDNTFLYTEPRTCTGLWLALEDATINNGCLWAIPGSHKKGLVRLMVRDENGTHFDRPSPVYDQKEFVPLEVKSGALVVIHGDLIHQSFENLSPASRHAFSLHVVDTEGCKWSEDNWRKQATPTKEASALYAAQSHLVQGERFLIPVWWPNPFYVITKGSFISSLDCCRPNFLPHPSS

SEQ ID NO: 7901 - protein, 419 aa, Zea mays
  VARIANT 179: note = Ancestral polymorphism is P, Derived polymorphism is R
MGTGAGSARALAVAFAVSLLACSGAVAVARAQDTERIEGSAGDVLEDDPVGRLKVYVYELPTKYNKKMVAKDSRCLSHMFAAEIFMHRFLLSSAIRTLNPEVADWFYTPVYTTCDLTPWGHPLPFKSPRIMRSAIQFISNRWPYWNRTEGADHFFVVPHDFGACFHYQEEKAIERGVLPLLRRATLVQTFGQKDHVCLKEGSITIPPYAPPQKMKTHLVPPGTPRSIFVYFRGLFYDTANDPEGGYYARGARASVWENFKNNPLFDISTDHPPTYYEDMQRAVFCLCPLGWAPWSPRLVEAVVFGCIPVIIADDIVLPFADAIPWEEIGVFVAEDDVPRLDTILTSIPMEVILRKQRLLANPSMKQAMLFPQPAQAGDAFHQILNGLARKLPHGEDVFLKPGQKVLNWTEGPRGDLKPW

SEQ ID NO: 7902 - protein, 451 aa, Zea mays
  VARIANT 28: note = Ancestral polymorphism is Q, Derived polymorphism is L
  VARIANT 39: note = Ancestral polymorphism is A, Derived polymorphism is G
  VARIANT 228..451: note = Derived polymorphism lacks residues 228 to 451
MGAHATAAAAAVLLVATCVAAAAAAPLQQHEPGRISGDAVGVLDDDPVGKLKVFVYEMPRKYNRMLLDKDSRCLHHMFAAEIFMHQFLLSSAVRTLDPEEADWFYTPAYTTCDLTPQGFPLPFRAPRIMRSAIRYVATTWPFWNRTDGADHFFLTPHDFGACFHYQEERAMERGILPLLRRATLVQTFGQRNHVCLQDGSITVPPYADPGKMQAHLISPGTPRSIFVYFRGLFYDMGNDPEGGYYARQVKSAPVHSIQCQCQYSTCLFIYMPWLVDDHACRGARASVWENFKDNPLFDISTEHPSTYYEDMQRAIFCLCPLGWAPWSPRLVEAVVFGCIPVIIADDIVLPFADAIPWEDISVFVAERDVPRLDSILTSIPLPDILRRQRLLARDSVKQALLFHQPARPGDAFHQVLNGLARKLPHGEGVFLQPGEKALDWDAGLQSDLKPW

SEQ ID NO: 7903 - protein, 182 aa, Zea mays
  VARIANT 113: note = Ancestral polymorphism is A, Derived polymorphism is S
MGCAASAADGAELRRRGWARAGEPGHSEASTSGLLAPPHQQEGQEAESSSGGRRRGCKVAPEPKELEEGTAALPSMPGSPSFRYYCQKKTAAVDRIVADAIDADDTVRIRATARQLSNRSEITANKAQDSNEVSQPKGGTKWLRFSGLSIVAAAWHKHNLFSRQRSKPSPPPAAASDASSQP

SEQ ID NO: 7904 - protein, 149 aa, Zea mays
  VARIANT 2: note = Ancestral polymorphism is A, Derived polymorphism is T
  VARIANT 83: note = Ancestral polymorphism is A, Derived polymorphism is V
  VARIANT 111: note = Ancestral polymorphism is K, Derived polymorphism is T
  VARIANT 122: note = Ancestral polymorphism is S, Derived polymorphism is A
MAPKAEKKPAAKKPAEEEPAAAKAPAGKKPKAEKRLPAAKSSGKEGGDKKGKKKAKKSVETYKIYIFKVLKQVHPDIGISSKAMSIMNSFINDIFEKLAGEAAKLARYNKKPTITSREIQTSVRLVLPGELAKHAVSEGTKAVTKFTSS

SEQ ID NO: 7905 - protein, 266 aa, Zea mays
  VARIANT 178: note = Ancestral polymorphism is L, Derived polymorphism is S
  VARIANT 131: note = Ancestral polymorphism is R, Derived polymorphism is C
  VARIANT 3: note = Ancestral polymorphism is G, Derived polymorphism is S
MEGRRPGAPVAGLPIGFRFRPTDEELLLHYLRRKALACPLPAGVIPDADLARLHPWDLLPAAAPGGSGADADGERFFFHRPATQCWRKGGGAARAAGTGVWRPSGKETLVLSPRCKRPVGTKRTLVFCPRRGRARTHWAMHEYRLLPAGLHPYGCAAGAGANAPPPTNVSARQPAADSLFRVPESVIQVSSHGGDAAADWVVCRIFRRARPAHRARLGGGAREELEEEHAAEESPSSCVTDASETLDQEEDDGDEGSSSSTVASSN

SEQ ID NO: 7906 - protein, 370 aa, Zea mays
  VARIANT 22: note = Ancestral polymorphism is P, Derived polymorphism is A
MTELECRVAACGRTMMDGMFRPAVHLQISKEFTGREPINVSASLPHARSCRFIANLWPWTFQHAPPPRHHHPAPLLLLKPTPSRSPPRHSPPVPMAAVTTATAAASSSSFLHRRSPACLRATLRAAPRHCRNSSSRLACRAAEVSGAESSSAAAEGAGGGGGASWVPVVPLAALPRGERRVIVQDGEEILLLWYKNQVFAIENRSPAEGAYTEGLLNAKLTQDGCIVCPSTDSTFDLRTGEIKEWYPKNPVLRALTPALRKLFTYRVKTDEENIYISFSGADGAGSAEIIFSGKAQPGVTASDVNVEEVRMVVDEDVGGFGFTSDNELINGKAAIIGFLLLIDFELLTGKGLLKGTGFLDFIYAVSGAFN

SEQ ID NO: 7907 - protein, 1046 aa, Zea mays
  VARIANT 5..1046: note = Derived polymorphism lacks residues 5 to 1046
MAMRSLCLPLLLFSVSISIPPAVSANEELASLLAFKVAAISGGYGDPLASWNESSAGGGGYCSWEGVRCWGKHRQVVKLSLPSRGLTGVLSPAIGNLSSLWTLNLSNNGFHNSIPASLGRLQRLHNLDLSHNAFSGKLPANLSSCTSLVSLGLSSNQLHGRVPPELGGSLKRLRGLDLFSNNFTGTIPASLANLSSLTTLDLGLNQLEGSITPDLGGIQGLQWLSLDYNKLSGELPRSLLNLSSLITMQVQGNMLHGGIPSDIGSKFPNITILSFGKNQLTGSIPASLSNLTTLQDVDLITNRLSGHVPRALGRLRALESLSLHDNMLEANDTEGWEFMASFTNIGLTGWLPASIVNLSTTMQGLMLADTGIVGSIPLEIGNLFNLQFFSVSNTSVSGAVPDSIGKLVNLVELNLYNTNLSGLIPSSIGNLSELAALVAFNSNLEGPIPKSIGRLKNLYALDISSNRLNGSIPVEIFQLPLLSRYLGLLHNSLSGTLPAEVGSLINLNILALSRNQLSGEIPGSIGDCTVLQELGLDDNLFEGAIPQSLSNIKGLTGLNLSMNKLSGVIPEAIGSMRNLQQLYLAHNNLSGTIPIILQNLTLSELDLSFNNLQGEVPKEGIFKILANLSITGNNDLCGGVTELRLPPCHINVVKSNKKEKLKSLTIGLATTGALLFLAFAIAAQLICKKLRQRQTRSFQPPKIEEHYERVSYQTLENGTNGFSEANLLGKGSFGEVYKCTFQDEGNIAAVKVFRLEQTRSIKSFVAECEALRRVRHRCLIKIITCCSSINHQGQEFKALVFEFMPNGILNDWIHSKSAMPTLRNSLSLEQRLNIAVDIIDALDYLHNHCQPPIVHCDLKPSNILLAEDMSARVGDFSISRILPESASKALQNSNSTIGIRGSIGYVAPEYGEGSSVSTIGDVYSLGILLLEMFTGRSPTDDMFSGSLDLHRFSGDALPERIWEIADTTMWIHTGAFDSTTRYRIEKCLASVFALGISCSKKQPRERTLIHDAATEMNAIRDSYLHISRSPMVECGVDNSAVICNDN

SEQ ID NO: 7908 - protein, 153 aa, Zea mays
  VARIANT 13: note = Ancestral polymorphism is A, Derived polymorphism is P
  VARIANT 35: note = Ancestral polymorphism is G, Derived polymorphism is D
  VARIANT 51: note = Ancestral polymorphism is S, Derived polymorphism is L
  VARIANT 66: note = Ancestral polymorphism is E, Derived polymorphism is K
  VARIANT 87: note = Ancestral polymorphism is A, Derived polymorphism is P
  VARIANT 120: note = Ancestral polymorphism is A, Derived polymorphism is T
MAATVMTTTTSKAGRKSLISRTLQRCKSGLSAGGGGSCGRSSTSSPPGCFSVYVGAERERFVVRAECANHPLFRRLLDDTEREYGYAAQGPLALPGCDVDSFLDVLWQMERADGANEEVAAASSPMCGLHSGSKGRAAGYRMLSSPPMVGRRR

SEQ ID NO: 7909 - protein, 132 aa, Zea mays
  VARIANT 15: note = Ancestral polymorphism is G, Derived polymorphism is V
  VARIANT 108: note = Ancestral polymorphism is L, Derived polymorphism is R
MMRGDDEYRYQQQHGPGGGAPHGLIMAVVVGLVVAGPLFLGDGGEAVTSAVADLLGPTGLLLLPVGLVLVIRVLSSDRGAAALAGALSLGGSPDSVHRVGGSPVGVALALALIAALLYYRSALFGGGGGDDE

SEQ ID NO: 7910 - protein, 152 aa, Zea mays
  VARIANT 96: note = Ancestral polymorphism is W, Derived polymorphism is G
MSSTAADVLRALPPIRTNKPRAPEPACSSAASSSPSPVPAPDAESVAAPPPAEEQKQGETRGPEAPQEAEPATPTSEGSLLRRPAECPPAPRKPAWAPPPPPTPASKRSRPSPPSSAAPAPAPARRAFFPVARDLTTVFRALAPPKKRIRAG

SEQ ID NO: 7911 - protein, 496 aa, Zea mays
  VARIANT 14: note = Ancestral polymorphism is S, Derived polymorphism is F
MEEDSIKGMISAISWVPRGAAKSVPVVADPPTQEEIAEAMKTFDLGRDSGSDADEDDDAATMELDGAAETVEEVDEAARAKAVAKALCKGSSKADDVADELRELNMDAYDDEDEEVDIFGSGLGDLYYPSNAMDPYLKKNNEDDEEDDDDDEEIEDKMIMPTDFVIVCAHSEDDIFSLQVNILEETNDGEQNIFVHHDVPLADFPLCTAWMDFNLKGGEKGNFVAVGTMDPAIEIWDLDMVDEVQPHMVLGGLSKKKKKTKGKKGKKYKKGSHRSSVLGLAWNKEVRNVLASASADTTVKIWDIAVGKCAVTLEHHDDKVQAVAWSPQSPEVLLSGSFDKTVAMNDMKDGGQNCHKWSVEADVESLAWNPHNEHSFVVSLENGMVQAFDKRTASSSSSGQSMYTLHAHDKAVSSISFNPSAPNFLATGSVDKMVKLWDLSNDKPSCIASQNPKLGAIFSVSFSNDSPFLLACGGSKGKLKVWDTLTEPAVANKFSK

SEQ ID NO: 7912 - protein, 208 aa, Zea mays
  VARIANT 38: note = Ancestral polymorphism is R, Derived polymorphism is C
  VARIANT 22: note = Ancestral polymorphism is K, Derived polymorphism is N
MVKHNNVIPNGHFKKHWQNYVKTWFNQPARKQRRRIARQKKAVKIFPRPTAGPLRPIVQCQTLKYNMKSRAGRGFTLEELKAAGIPKRLAPTIGISVDHRRKNKSLEGLQANVQRLKTYKAKLVIFPRRARKVKAGDSTLEELTTATQVQGDYMPITRGEKRSVEVVKVTDEMKAFAAYGKLRLERMNKKHLGARQKKAAEAEKEDKK

SEQ ID NO: 7913 - protein, 177 aa, Zea mays
  VARIANT 138..177: note = Derived polymorphism lacks residues 138 to 177
MFPEIATSSFGLLAPIDLSAGSPAGAMSLIYLLSPPAPPRQMASHRKGVLAPSPHPGRPLLSRRRLPSGGPRSPRTATGGKPLAVHDISTSVWHGARLRDVLLRCGVVGAADGATNVCFVGGDGDNCKVGLQGETAPQAKKSWGSEIAGSGGRSSSDVSKPYATMSCASMPDATVDK

SEQ ID NO: 7914 - protein, 472 aa, Zea mays
  VARIANT 179: note = Ancestral polymorphism is I, Derived polymorphism is T
  VARIANT 194: note = Ancestral polymorphism is S, Derived polymorphism is L
MGEVAALRQLVGQVQELWDLYGANGNPVPRQGERANENLLASSSSSSSSSLSLSLPVVWWYLPDFEHGSIKDDYCGGSSGYNSELLKIMETNQSPPCKRPRRDRNREKAPSSNKIEVMEQEIWRDFPEDLFETVIARLPVAAIFRFRTVCRRWSSLLGSDSFSRQYSEAPHGLPWFYTITHENSNNNVAMYDPLLKKWHHQSVPLNHTKIVIPVASVGGLVCLLDLSHRNFYICNPLTQSLKEIPPRSVHGWSRVVVGMVLNGRSSSDGYKVMWLDIDGTCEVYDSTKNVWSCPGTFPPSIKLPLALNLRSQPVAVGSMIYFMCAEPDGVLSYDVSTGIWRQFAIPLPLHLTDHTLAEFQGRVMLVGLLCKNAATCICIWELQKMTLLWKEVDRMPNLWCLEFYGKHMKMKCLGNSGLLMLSLKAKHMNRLVTYNLLKREWQKVPDCMLPWSRKRQWITCGTAFDPVPCALV

SEQ ID NO: 7915 - protein, 138 aa, Zea mays
  VARIANT 4: note = Ancestral polymorphism is P, Derived polymorphism is S
MTMSRKQTQRDLRRLEKAERAAQLERSIENELKERLNKDIYGVYNIPFKKFDDVLDMQRNGVAAEEEEEEEGELVYVEGDDMEEMDDMEDFEGLSDGKDEAQMNEDDVLDDPVSKKAKGSSSYSKQNAGKRSRKVMTE

SEQ ID NO: 7916 - protein, 635 aa, Zea mays
  VARIANT 563..635: note = Derived polymorphism lacks residues 563 to 635
  VARIANT 403: note = Ancestral polymorphism is S, Derived polymorphism is L
  VARIANT 348: note = Ancestral polymorphism is I, Derived polymorphism is N
  VARIANT 343: note = Ancestral polymorphism is A, Derived polymorphism is V
  VARIANT 305: note = Ancestral polymorphism is I, Derived polymorphism is S
  VARIANT 303: note = Ancestral polymorphism is E, Derived polymorphism is V
  VARIANT 228..635: note = Derived polymorphism lacks residues 228 to 635
  VARIANT 213..635: note = Derived polymorphism lacks residues 213 to 635
MRWPAAGLETVGWRLGPAAYSQILIPSAITIHAISGSAKQSAKSQRPCIHHSCSQITTMAPSKKRKRRKEVEEFIESQRGAMDKFVRTNTRTSSNEDQPNLAIVVVAEQPNTNEEDHDPTLEENVDINTNGNDVTGHDPIFDSSHIGNDSFDEQSVPTEDIYDPRNWGNLDNKSRDILVEKGPIREENIVFPLDANGRHFSYTHYSRKMRNGEVHDRKWLVYSKHVDKVFCFCCKLFNSEKCKSSLGYDGFGDWRHTSERLKEHEASMEHITSMNSWNELRVRLRKTETIDKEFQHQIAKEKERIRQVLLRIIAVVKFLGKRTLAFRGSSERIYNDQNGNFLACLEMIAEFDVVMQDHLRRIQNNDIQYHYLSHKIQNELISLLASNITKSIIKIVKEAKYFSVILDCTPDVDDTSGEGLFNSLLDSIKYFGLNIEDVRGQGYDNGSNMKGKHKGVQRRLLDINPRALFMPCACHSLNLTLCDMAKSCAKAISFFGIVQRIYVLFSSSTKRWDVLKGHVESLTVKSWCNTRWESRIKSVRAIRFEAPNIRSALLQLSTDKDVESKDRSDAKNLFDVLGTFEFILGMVIWYEILFTVNKVSKQLQSPSMCLDATLKNIEGAMKFLNIIEMKGLLLA

SEQ ID NO: 7917 - protein, 550 aa, Zea mays
  VARIANT 226: note = Ancestral polymorphism is S, Derived polymorphism is L
MDGGAGAGAGRRNVSSSSGSRRRVLPAENGHGHDAPPPSRRSSVSLSRGHSTSLTGERTVKRLRLSKALTIPDHTTVHEACRRMASRRVDAVLLTDSNALLCGILTDKDITTRVIARELKMEETPVSKVMTRNPVFVLADTLAVEALQKMVQGKFRHLPVVENGEVIAILDIAKCLYDAIARMERAAEKGKAIAAAVEGVEKHWGAAVPGPNNFIETLRERMFRPSLSTIISENPKVVTVAPSDMVLTASKKMLELKVSSAVVAIENKPGGILTSRDILMRVIAQNLPPESTTVEKVMTQSPECATVDTPILDALHTMHDGKFLHLPVLDRDGNVVTVVDVLHITHAAIATVGNSGAAGSEATSAMMQRFWDSAMSIGPIDDDDDSRSEGSTRVVSEATDIGRPAFFPASGLSNTFGFKIQDKQGRMHRFNCETSGLAELITSILQRVGDDIDRKHLPQILYEDEDRDKVVLSSDSDLIAAVDHARKIGWKSIRLHLDYAGVGRRKGGGGPSDLEYAGKDAAWASAYSAVAAGAALVAGLGVMAYLKRSG

SEQ ID NO: 7918 - protein, 148 aa, Zea mays
  VARIANT 107..148: note = Derived polymorphism lacks residues 107 to 148
  VARIANT 90: note = Ancestral polymorphism is R, Derived polymorphism is C
  VARIANT 86: note = Ancestral polymorphism is S, Derived polymorphism is F
  VARIANT 83: note = Ancestral polymorphism is L, Derived polymorphism is H
  VARIANT 82: note = Ancestral polymorphism is E, Derived polymorphism is D
  VARIANT 75: note = Ancestral polymorphism is Q, Derived polymorphism is H
  VARIANT 73: note = Ancestral polymorphism is S, Derived polymorphism is L
  VARIANT 62: note = Ancestral polymorphism is N, Derived polymorphism is D
  VARIANT 40: note = Ancestral polymorphism is T, Derived polymorphism is S
MSHYKFKHSRHGSLSFLPRKRSSHHRDKETHKLRVRRSYSSGSMGKKICSTDGTSTPTRSMNQQVCIISVSISLQGLGLSGELAASSLCRVRGLVALSLASNGFEGQVPVGLAALGVILQVLDLGENLLSGVLHPALFGNLTSLLNCY

SEQ ID NO: 7919 - protein, 225 aa, Zea mays
  VARIANT 62: note = Ancestral polymorphism is L, Derived polymorphism is R
MLLVSGLTTILHTFLGSRLPLIQGSSFVYLAPALVIANSEEFRNLTDNKFKHIMRELQGAILVGSVFQIILGYTGLISLFLSADFLKLSSLPVGKIGALLASIPLALAASVLCFTWALIVALGMSTLRYTQAASSRNMIIVGFTLFISLSIPAYFQQYEPSSNLILPSYLLSYAAASSGPVHTASSGLNYALNALLSIDVVVALLVALILDNTVPGSRQERGVYI

SEQ ID NO: 7920 - protein, 192 aa, Zea mays
  VARIANT 187: note = Ancestral polymorphism is P, Derived polymorphism is T
  VARIANT 183: note = Ancestral polymorphism is V, Derived polymorphism is A
  VARIANT 181: note = Ancestral polymorphism is D, Derived polymorphism is Y
  VARIANT 172: note = Ancestral polymorphism is A, Derived polymorphism is V
  VARIANT 170: note = Ancestral polymorphism is Y, Derived polymorphism is C
  VARIANT 133: note = Ancestral polymorphism is P, Derived polymorphism is S
  VARIANT 121: note = Ancestral polymorphism is A, Derived polymorphism is T
  VARIANT 120: note = Ancestral polymorphism is T, Derived polymorphism is S
  VARIANT 115: note = Ancestral polymorphism is R, Derived polymorphism is H
  VARIANT 110: note = Ancestral polymorphism is A, Derived polymorphism is V
  VARIANT 93: note = Ancestral polymorphism is V, Derived polymorphism is A
  VARIANT 76: note = Ancestral polymorphism is I, Derived polymorphism is V
  VARIANT 74: note = Ancestral polymorphism is R, Derived polymorphism is S
  VARIANT 70: note = Ancestral polymorphism is R, Derived polymorphism is S
  VARIANT 56: note = Ancestral polymorphism is G, Derived polymorphism is R
  VARIANT 50: note = Ancestral polymorphism is I, Derived polymorphism is F
  VARIANT 49: note = Ancestral polymorphism is A, Derived polymorphism is V
  VARIANT 25..192: note = Derived polymorphism lacks residues 25 to 192
MYTARKKIQKEKGLEPSEFEDSVAQAFFDLENGNQELKSDLKDLYINNAIQMDVTGSRKAVVIHVPYRLRKAFRKIHVRLVRELEKKFSGKDVVIVATRRIVRPPKKGSAVVRPRTRTLTAVHDGILEDVVYPAEIVGKRVRYRLDGSKIIKIFLDPKERNNTEYKLETCTAVYRRLCGKDVVFEYPMTENA

SEQ ID NO: 7921 - protein, 296 aa, Zea mays
  VARIANT 45: note = Ancestral polymorphism is S, Derived polymorphism is F
  VARIANT 55: note = Ancestral polymorphism is E, Derived polymorphism is K
  VARIANT 56: note = Ancestral polymorphism is I, Derived polymorphism is V
  VARIANT 84: note = Ancestral polymorphism is T, Derived polymorphism is I
  VARIANT 86: note = Ancestral polymorphism is T, Derived polymorphism is I
  VARIANT 186..296: note = Derived polymorphism lacks residues 186 to 296
  VARIANT 220..296: note = Derived polymorphism lacks residues 220 to 296
  VARIANT 244: note = Ancestral polymorphism is I, Derived polymorphism is F
MEYTLLPNLAPHKIHAKIQVHISRKWLFQGATDSGPLQHVDMVLSDREGNAIYAEIPRNLAEQKAINIEEGGVYDISRFRVCATKTVFKIVDGDKMIQFTFHTIVKRATSAPTTFPLYAYWLTLFDQIEPHVQTTNNFVDVLGVITEIHELTPVHVRSQLTPTVTRTIIIKDLSQSTKTIVLQLPQNLQHPPAMETKPIVEHKSLYELLTINPNDFPKYQLNTNGGFHLAQNAIKQQSLRLQVFTVNHAIGIDTDLMQTRVISIAQKKMMAIRKPHRFKQGTIRIGKEMDIKSSKN

SEQ ID NO: 7922 - protein, 565 aa, Zea mays
  VARIANT 274: note = Ancestral polymorphism is F, Derived polymorphism is S
  VARIANT 413: note = Ancestral polymorphism is L, Derived polymorphism is F
MHEASVSRLAKEKVYLAVKDDAKQCELSLQWALSFIPPQKSLVVVFVNKPVTVIPDEVLGAPVKASMLHEKIVSSYSKNARNKIENSLRESLQNFKVEAKILIIDKHHVAPALVEIVKKRKITTLVMGAKSRNDWKSKTAIALEKQADPSCNILYLHDGILISSRHQRANVFAVKKNGMSLGGCHFSGSSNTTTNHQNLGRTHWKHMSSWPAVLEYIVSILNTLRTRLMQSQACDGFTREGLLEAAEKPLRRLFTVASVVCVHQVRKSPEMLFSVLNMYTSLTDATPALWDVFYTDSISRDAEGLLAKLKDSATEIVKELRSLVQNYSSRRAVQEQDGGIMSLTAYLMRYIRLLTKHKSSLDTMLGHGHTDHLLTVEVIINPTARLLLELIADLDSVLEKQTESFSSRELQCLFLMNNTHFVLQEVKRSDVRLMVGSMWIGKRQDRFKKHMKGYLSASWGPVISNLETAKGMTPSKRLKTNVLNFLHSSPTPVQNFSWSFDETCQTQMSRKVPSPVLREELRGEILALLTGAYHAYLERVKNPVKGNAADFKLEWKSKINELFEG

SEQ ID NO: 7923 - protein, 390 aa, Zea mays
  VARIANT 77: note = Ancestral polymorphism is S, Derived polymorphism is L
MRTRSGSRYSNGGEVVALVGQKRKRSPSAVAGECDCGGRRKRPAGEPDYLDALPDDLVLSILSKLAAASSAPSDLLSVHLTCKRLNELGSHDMVFAKASPASLAVKAAAWSEPAQRFLKRCADAGNLEACYNLGMIRFYCLGSRSGGAALLARAAVGGHAAALYSLAVIQFNGSGGAKSDRDLRAGAALCARAASLGHVDALRELGHCLQDGYGVRRDPAEGRRLLVAANARELTLALSAAASRHAVAALPFAAAAGVVGGGGGCPLLSDFGWSLPEAEPHAANQFMVDWWASRCAAQAGGKKDGDGSGVDGDGDGAELRLCSHVRCGRRETRRHEFRRCSVCGAANYCSRACQALDWKRAHKAQCVPMDRWLLAGVAVGGGVEAQQHQQ

SEQ ID NO: 7924 - protein, 203 aa, Zea mays
  VARIANT 129: note = Ancestral polymorphism is D, Derived polymorphism is H
  VARIANT 95: note = Ancestral polymorphism is P, Derived polymorphism is L
  VARIANT 87..203: note = Derived polymorphism lacks residues 87 to 203
  VARIANT 64: note = Ancestral polymorphism is A, Derived polymorphism is T
MEMGGMSDAERLFFFEMACKNSEVAYEQNPNDADNLTRWGGALLELSQVRTGPDSLKLLEDAEAKLEEALQIDPNKSDALWCLGNAQTSHGFFTPDNAIANEFFTKATGCFQKAVDVEPANELYRKSLDLSMKAPELHLEIQRQMVSQAATQASSASNPRQSRKKKDNDFWYDVCGWVILGAGIVAWVGLARASMPPPTPPAR

SEQ ID NO: 7925 - protein, 570 aa, Zea mays
  VARIANT 408: note = Ancestral polymorphism is L, Derived polymorphism is S
MAAAPPPPPDGQEKVIAAAQHIVKSLANSKNAADDMIRILSRFDNRFSLMSDLFPPPPTAVDSILEADEGTSQGEGDEPDLDPEGDAAARAEAEWDAAAEVVERWESPTADALVFDSREGEEYLAAAACLTGAPGPRAEAALQTAMARLEDEFRHLLIRGAPPLAAEDLQVSLLRRLSLTVPSFNSSAVDLDCPSFAQHHAAVAAEGVNEQQGGRSSASDDEISPYLIAPDTVSVLRDIADVMLRAGYAPELCQVYGEVRRDTLMECLAVLGVDKMSLEEVQRVEWGVLDGKMRKWIQALKVVVRGLLAEERLCGTIEEFANDIQGDTSRRALPGGEIHPLTRYVMNYVWLLADYNASLNKLLECWDTELTGVDNPNMTPLGHCVLMLITHLQCKINEKSRLYEDEALQNIFLMNNLLYIVQKVKDSELKTLLGDNWIRKRRGQIRQYSTGYLRSSWTRVLACLRDDGLPHTMGSSSTLKAALKDRFKNFNLAFEELHRTQTSWRVVDPQLREELKISISEKVLPAYRSFVGRFRGQLEGGRGSARYIKYNPDDLENHVSEFFEGRKSNA

SEQ ID NO: 7926 - protein, 427 aa, Zea mays
  VARIANT 196: note = Ancestral polymorphism is V, Derived polymorphism is M
MGAPSSRALALGAAFLLLLVALPSAFLYLTSSAATRATLLDLKPFSARCAPAVAPLRVFMYDLPARFHVAMMGAAAGAGFPAWPPSAGGIRRQHSVEYWMMASLQDGGAGPERGREAVRVRDPDAADAFFVPFFSSLSFNVHGRNMTDPDTEADRLLQVELVDILWKSKYWQRSAGRDHVIPMHHPNAFRFLRAMVNASILIVSDFGRYTKELASLRKDVVAPYVHVVGSFLDDDPPDPFEARHTLLFFRGRTVRKDEGKIRSKLEKILKGKEGVRFEDSIATGDGINISTEGMRSSKFCLHPAGDTPSSCRLFDAIVSHCVPVIVSSRIELPFEDEIDYSEFSLFFSVEEALRPDYLLNELRQVPKRKWVDMWLKLKNVSHHYEFQYPPRKGDAVNMIWRQVRHKIPAVNLAIHRNRRLKIPDWWG

SEQ ID NO: 7927 - protein, 376 aa, Zea mays
  VARIANT 285: note = Ancestral polymorphism is E, Derived polymorphism is V
  VARIANT 280: note = Ancestral polymorphism is F, Derived polymorphism is I
  VARIANT 167: note = Ancestral polymorphism is P, Derived polymorphism is L
MGGQQNALHQLVSFILGASAAAVLLFFLTTATSGARFTGISSWANGTTGFDDDAPVQAAPATRANHADAKFLDTVVCGSCPARSRVVKQGAAAEQEDELQRLLRAVADEDRTVIMTSVNEAWAAQDSLLDLFLESFRSGERIAHFVDHLLVVALDGGALERCRAVHPHCYLLPTAAARNLSGEKVFMSKDYIDLVWSKVRLQQRILELGYNFLFTDVDILWFRNPFERMSVAAHMVTSSDFYFGDPYSPMNLPNTGFLYAKSSRRTVGAFEAWHAAREAFPGKHEQQVLNEIKVELLATRGLRIQFLDTEHNAGFCNNTRDFNTLYTMHANCCVGLGAKLHDLGNLLQEWRAYRQMDDEERARGPVRWKVPGICIH

SEQ ID NO: 7928 - protein, 447 aa, Zea mays
  VARIANT 301: note = Ancestral polymorphism is R, Derived polymorphism is S
  VARIANT 228: note = Ancestral polymorphism is I, Derived polymorphism is T
  VARIANT 214: note = Ancestral polymorphism is Q, Derived polymorphism is L
  VARIANT 177: note = Ancestral polymorphism is A, Derived polymorphism is T
  VARIANT 130: note = Ancestral polymorphism is V, Derived polymorphism is I
  VARIANT 109: note = Ancestral polymorphism is D, Derived polymorphism is G
  VARIANT 46: note = Ancestral polymorphism is Y, Derived polymorphism is N
MESMDLKVQVVESSFIAPSEPTPRKGLWLSSLDILVANIGHTPTIYLYSSNDAAAADFFDVGRLKKAMAKALVPFYPLAGRLGNNSDDGRTEISCNGEGALFVVAHADDELTIDDVKKLKPSPELRRLFVPRIEPSSIMLAIQVTFLKSGGVVLGTALHHAAIDASSAFHFFQTWSAFCKHGDRAAVELPCHDRTLLRARSPPTVHPGTLLTLQPRLTLSDLEGPLAIEVFTISKDQVASLKHLCGGTSTFCAVSALIWQCTCVARRLPPDSQVRMVFPAELRRRMRPPLPNHYFGNAVFRLYVTGAAGDIGTAALGSVATRIKGAIKRLDDELVRSAIDYFENEKAAEMNKRRALRGTLPKTFLNITSWLGRPQYDADFGWGKPQFMSLAESFCGGFVHLMNDERTTYYGGATGDVRMIVCMEAVDMKELGRLLYVKLKQAACAMH

SEQ ID NO: 7929 - protein, 139 aa, Zea mays
  VARIANT 54: note = Ancestral polymorphism is I, Derived polymorphism is T
  VARIANT 66..139: note = Derived polymorphism lacks residues 66 to 139
  VARIANT 129: note = Ancestral polymorphism is R, Derived polymorphism is P
MLRSKFCSCPFFRLRKRILILMRWGDGFRRESINRPPTPSAVEDRDKEPSLVEIINIKFVESGEKEKLTELLRERLVECGWMDEMKAFCRDYVRKKGRNNVRVDDLIHVIVPKGRASVPASVKAELLQRIRSFMATTLR

SEQ ID NO: 7930 - protein, 203 aa, Zea mays
  VARIANT 12..203: note = Derived polymorphism lacks residues 12 to 203
  VARIANT 40..203: note = Derived polymorphism lacks residues 40 to 203
  VARIANT 101: note = Ancestral polymorphism is K, Derived polymorphism is N
  VARIANT 113: note = Ancestral polymorphism is A, Derived polymorphism is E
MLDAFSAAPCHQLRPAAWCRSTRFASQACRATAPFARADWQAACAIHASNSTGGGGHDASSNTQPTPRVNSGMWTQVMLKTLGNNLYVTVLSPRVTDQGLKKHFSTEGEVIDASIVYDPWTMEPRGFGFVTMAATKEADHYIKYLDCSVLQGQVIIVKKNILLFCLHHRESEIASHSLHIHKVLLDCDDVQADALIVDRLASL

SEQ ID NO: 7931 - protein, 412 aa, Zea mays
  VARIANT 337: note = Ancestral polymorphism is R, Derived polymorphism is S
MALRLNDVALCLSPPLAARRRRSRSRSSGRFVAVASMTSAVSTNLQQASSGGEDACLLSRVENKKPFAPPREVHVQVTHSMPPHKIEIFKSLDDWARDNILTHLKPVEKCWQPQDFLPDPASEGFHDEVKELRERAKEIPDDYFVCLVGDMITEEALPTYQTMLNTLDGVRDETGASPTAWAVWTRAWTAEENRHGDLLNKYMYLTGRVDMRQIEKTIQYLIGSGMDPRTENNPYLGFIYTSFQERATFISHGNTARHAKDFGDLKLAQICGIIASDEKRHETAYTKIVEKLFEIDPDGTVVALADMMRKKISMPAHLMFDGQDDKLFEHFSMVAQRLGVYTARDYADILEFLVDRWKVVNLTGLSGEGNKAQDYLCTLASRIRRLEERAQSRAKKAGTLPFSWVYGRDVQL

SEQ ID NO: 7932 - protein, 236 aa, Zea mays
  VARIANT 130: note = Ancestral polymorphism is K, Derived polymorphism is N
MPVLADKYHAIAFDWLGFGFSDKPQPKYGFDYTLDEYTSSLEFLVNAVAPDKLSIVVQGYFAPVAVKYASEHQDKLNHLVLVNPPITDKHLNLPSTLASFSNFLLGEIFSQDPLRASDKVLTSCGPYMMKEEDAMVYRRPYLVSGSSGFALNAISKAMKKDLKAYIESMRSILRSSSWKTKTTVCWGMRDRWLSYDGVEEFFGGLNQKIVELPMAGHHVQEDRGEELGNIIKSILR

SEQ ID NO: 7933 - protein, 134 aa, Zea mays
  VARIANT 96..134: note = Derived polymorphism lacks residues 96 to 134
  VARIANT 70..134: note = Derived polymorphism lacks residues 70 to 134
  VARIANT 60..134: note = Derived polymorphism lacks residues 60 to 134
  VARIANT 40: note = Ancestral polymorphism is P, Derived polymorphism is S
MDGHATPDFSPAAGSFVHTTARSENSAEGEGGEPRATYPPPEKVALDPPSPAIRLSCDSWATVVAAALLQVPRSSPVPLPPPCRRRAPARKEAEPWGRESQLLSHLLRSGWTSLTLSFPAHSATTGVVLSAELT

SEQ ID NO: 7934 - protein, 238 aa, Zea mays
  VARIANT 227: note = Ancestral polymorphism is F, Derived polymorphism is S
  VARIANT 180: note = Ancestral polymorphism is I, Derived polymorphism is N
  VARIANT 175: note = Ancestral polymorphism is T, Derived polymorphism is I
  VARIANT 140: note = Ancestral polymorphism is T, Derived polymorphism is M
  VARIANT 47: note = Ancestral polymorphism is Y, Derived polymorphism is H
  VARIANT 45: note = Ancestral polymorphism is K, Derived polymorphism is N
  VARIANT 33: note = Ancestral polymorphism is P, Derived polymorphism is A
MEPRSPVNWSINFGSHHRGRGGDQQEWHALLRPASSQPTTAWGMKLYNKNYLLLSTYMISIKYKNVYYNFMPGQAQLLQTWMNKNVIRLLPQAIHKTGTDKRKPHLLLILNWKHYTTSEIKAKVATFGFGGPTEVLLVATYAFKLYASACLNIRRIGLVKKGEKLLNDDSFHLHTIGSQIVVKIVKNKHAQPFKTSQFELEFGKWICHSPELFEQNFWSSCSCKTISWVLKPPPFGST

SEQ ID NO: 7935 - protein, 417 aa, Zea mays
  VARIANT 347..417: note = Derived polymorphism lacks residues 347 to 417
  VARIANT 334..417: note = Derived polymorphism lacks residues 334 to 417
  VARIANT 255..417: note = Derived polymorphism lacks residues 255 to 417
MTPSLTVPSDDPPQGPVANDAWQKRFFSVAPPATLVFFFVLIFVAGAIVTLDHKESLAILQLQPRGVIAAEQMRPPATSELRAEPAAEEPDICENKCRPAGSEALPRGIVQDKSNFEMESLGGNPERKEKKGNGRHSKSLLAIPVGIKQKAIVDKLVSKFPDTNFIVMLFHYDGEVDGWRDLEWSGRAIHVGVRDQTKWWFAKRFLHPDLVAEYDYVFLWDEDIEVDSFDPLRYLRVVREERLEISQPALDRRSQIHHRLTARAARSGGVHRRYYKTSGHGRCYGNSTGPPCAGWVEMMVPVFSRAAWRCAWHMIQNDLIYAWGMDYKLGYCAQGDRSRNVGVVDSQYVLHRGIPTLGDGGKATATAAASALGTADRLAVRQRSYTELQLFNRRWKKAVAEDGCWTDPYPNPATTTG

SEQ ID NO: 7936 - protein, 165 aa, Zea mays
  VARIANT 19: note = Ancestral polymorphism is G, Derived polymorphism is A
  VARIANT 69: note = Ancestral polymorphism is P, Derived polymorphism is A
  VARIANT 71..165: note = Derived polymorphism lacks residues 71 to 165
  VARIANT 75: note = Ancestral polymorphism is L, Derived polymorphism is I
  VARIANT 85: note = Ancestral polymorphism is S, Derived polymorphism is P
  VARIANT 87..165: note = Derived polymorphism lacks residues 87 to 165
  VARIANT 94..165: note = Derived polymorphism lacks residues 94 to 165
  VARIANT 95: note = Ancestral polymorphism is S, Derived polymorphism is L
MENVKGMQSLNLKETQLFGEFPDNIKKCSFEALDFSGNWIEGKLPRSLSACKDLEILDVGSNQISDSFPCWMSVIPRLEVLVLRPNKFSGQVAQLLNEEENACAFPSTTIVDLSSTNFSGPLPRDQWFKSLESMIFRDPDASLVMDHGVSGSLENYKYMHCGDHT

SEQ ID NO: 7937 - protein, 108 aa, Zea mays
  VARIANT 95..108: note = Derived polymorphism lacks residues 95 to 108
  VARIANT 89: note = Ancestral polymorphism is R, Derived polymorphism is W
  VARIANT 57..108: note = Derived polymorphism lacks residues 57 to 108
  VARIANT 54: note = Ancestral polymorphism is S, Derived polymorphism is Y
  VARIANT 37: note = Ancestral polymorphism is C, Derived polymorphism is Y
  VARIANT 19: note = Ancestral polymorphism is R, Derived polymorphism is H
  VARIANT 14: note = Ancestral polymorphism is R, Derived polymorphism is S
MAGGSARDSPKTTSRRSSRSGTSSKLLTRATATATTCTSTTTSGARAPAASPSSTGWMSAKAETCITRNAHEASSTHSSSCTSDQTRGRRTKSSWRKAGCCTSRSAIW

SEQ ID NO: 7938 - protein, 196 aa, Zea mays
  VARIANT 162..196: note = Derived polymorphism lacks residues 162 to 196
  VARIANT 132..196: note = Derived polymorphism lacks residues 132 to 196
  VARIANT 123: note = Ancestral polymorphism is W, Derived polymorphism is C
  VARIANT 64: note = Ancestral polymorphism is S, Derived polymorphism is L
  VARIANT 5..196: note = Derived polymorphism lacks residues 5 to 196
MGSPQAIASSAFSSPLCSGGSSDAHTALTDYVVASGRALKDFPFANLFTNSLSSARYSRSSSTSMFCSYESLYIEIYIFVISTDTLIVAVAPKPPVNHLLDDDVEDKEEDELKFRIPQMTTLCKRKFFMFLRDKLRLPDIILMLLFSLSMKAWIIIAMWFLLAPIAQKYDIGPLYIIGTGFLIILINLGRRQQGDV

SEQ ID NO: 7939 - protein, 380 aa, Zea mays
  VARIANT 11: note = Ancestral polymorphism is R, Derived polymorphism is H
MDSFSLLKYLHGGVAAGAQRAPAASTTIAASACENGDGDGDDDAASFFDLEFAVPGDESAASDAEEERVEFNFAVAPGAADTVAVAVDAPAAEAEAESEADAEAPPPAPLLRPATRFRVLLLKLRKPKAPPADGAGAGSAQAPPRQPAVASRFLVKFRVEDAPLASLFTRDNSSRTSDAGVDRRAPAAAAAVEAQQQEEEEASASASVTAEERRFAKEVVLRYLSSKIKPLYVKVSRRYGERLRLGGAASEGEETDAEPDPSPAPPSQAPSSSAPAPAPAPQPVVVACGVRAPRAGVPAGLRQVCKRLGKSRSASSAVAAAPSPAAAAALTGPQAQRRDDSLLQVQDGIQSAIAHCKRSFNASKEPRSMTATTGGAGEGA

SEQ ID NO: 7940 - protein, 1079 aa, Zea mays
  VARIANT 178: note = Ancestral polymorphism is E, Derived polymorphism is K
  VARIANT 242..1079: note = Derived polymorphism lacks residues 242 to 1079
MAGNEWINGYLEAILDSRTSSGGGGGGGGGDPRSPVAGASPTKGASPRGPHMNFNPSHYFVEEVVKGVDESDLHRTWIKVVATRNARERSTRLENMCWRIWHLARKKKQLELEGIQRISARRKEQEQVRREATEDLADDLSEGEKGDTLAELVPVEAAKKKFQRNFSDLTVWSDDNNEKKLYIVLISVHGLVRGENMELGRDSDTGGQVKYVVELARAMSMMPGVYRVDLFTRQVSSPDVDWSYGEPTEMLCSGSNDGEGMGESAGAYIVRIPCGPRDKYLKKEALWPYLQEFVDGALAHILNMSKALGEQVGNGRPVLPYVIHGHYADAGDVAALLSGALNVPMVLTGHSLGRNKLEQLLKQGRMSKEEIDSTYKIMRRIEGEELALDASELVITSTRQEIDEQWGLYDGFDVKLEKVLRARARRGVSCHGRFMPRMVVIPPGMDFSNVVVHEDIDGDGDSKDDIVGLEGASPKSMPPIWAEVMRFLTNPHKPMILALSRPDPKKNITTLVKAFGECPPLRELANLTLIMGNRDDIDDMSAGNASVLTTVLKLIDKYDLYGSVAFPKHHNQADVPEIYRLAAKMKGVFINPALVEPFGLTLIEAAAHGLPIVATKNGGPVDITTALSNGLLVDPHDQNAIAQALLKLVADKNLWQECRRNGLRNIHLYSWPEHCRTYLTRVAGCRLRNPRWLKDTPADAGADEEEFLEDSMDAQDLSLRLSIDGEKSSLNTNDPLSSDPQDQVQKIMNKINQSSALPPSMSSVADGAKNATEATGSTLNKYPLLRRRRRLFVIAVDCYQDDGRASKKMLQVIQEVFRAVRSDSQMSKISGFALSTAMPLSETLQLLQLGKIPATDFDTLICGSGSEVYYPGTVNCVDAEGKLRPDQDYLMHISHRWSHDGAKQTIAKLMATQDGSGDTVELDPASSNAHCFTFLIKDPKKVKTVDEMRERLRMRGLRCHIMYCRNSTRLQVVPLLASRSQALRYLFVRWGLYVGNMYLITGEHGDTDHEEMLSGLHKTVIVRGVTEKGSEGLLRSPGSYKKDDVVPSETPLAAYTTGEMKADEIMRALKQVSKTSSGM

SEQ ID NO: 7941 - protein, 75 aa, Zea mays
  VARIANT 8: note = Ancestral polymorphism is L, Derived polymorphism is P
  VARIANT 11: note = Ancestral polymorphism is T, Derived polymorphism is A
MASKSGEPRMTLLGVVLLLGLLQLSQHAAPVGADESAAPTKKNTSFSFHNTAGGRTLSSFSVNGAYSKKPVGKGN

SEQ ID NO: 7942 - protein, 427 aa, Zea mays
  VARIANT 162: note = Ancestral polymorphism is A, Derived polymorphism is V
  VARIANT 124: note = Ancestral polymorphism is R, Derived polymorphism is S
  VARIANT 48: note = Ancestral polymorphism is S, Derived polymorphism is F
MDYLKVQVVESSFVVPSEPTPTKALWLSCLDMVQSNKAHTPTIHLYSSNDAAAADFFDLGRLKKATAKALVAFYPLAGRLVDSDDGRKEISCNGEGALFVVARADGDLTIDEVKKFKPSPELRRLFIPLIEPSSIIMAIQVTFLKCGGVVLGTAIHHAATDVSSAFHFFQTWSAFCKHGDSAAVELPCHDRTLLRARSPPTVHPDALSTLQPRLVLTEPEGPLAIEIFTISRDHVASLKQLCGGTSTFCAVSALIWQCACVARRIPPDSQVRVMFPADVRRRMRPPLPTHYFGNAVIRLYAAGPAGDIGTAALASVAARIKGAVERMDDELVRSAIDYYEMAETNKRRTGTGILPRTDLNITSWLGRPQHDADFGWGKPQSMSRAESVRGGSMHLMNDDGGTGDVRVLVCLEAENIKELGRLLYAKL

SEQ ID NO: 7943 - protein, 140 aa, Zea mays
  VARIANT 82: note = Ancestral polymorphism is R, Derived polymorphism is C
  VARIANT 64..140: note = Derived polymorphism lacks residues 64 to 140
  VARIANT 61..140: note = Derived polymorphism lacks residues 61 to 140
  VARIANT 55..140: note = Derived polymorphism lacks residues 55 to 140
MPISNLSSKDNAGAINTEGDKSTLGKRNGNHNEQNSSLGSAPSGEDLKSNNQNFQRSANAEPEQMHIRDTENGEFRFKAKTCTEPKGAFDRMDEKANTYAEVYIQNRKKPLLAIMPKSTMIWKAVTDIQKRAAQRTLLMR

SEQ ID NO: 7944 - protein, 593 aa, Zea mays
  VARIANT 107: note = Ancestral polymorphism is L, Derived polymorphism is Q
MSMPQSFLLLPSFLPPPPLVRLASRPPSSPSLTALRFHRVDAKLSPPLLAASHSPPGGFRGYCDSGGSDGGSGGDGGRGMDSPGPGDGWWWERWLQALHPEFFLLFLLLQSGAASALAEALSTSGDDAGDVWEVRGGKRTRLMPDPTWTSYLIAGDDGTKREDGDEKVGSISKDLAALRRQLGRSWRRYAEVAVHLLLPDGYPHSVSSDYLNYSLWRGVQGVASQISGVLSTQALLYAVGLGKGAIPTAAAVNWVLKDGLGYLSKIMLSKFGRHFDVNPKGWRLFADFLENMAYGLEILTPVFPHLFVPIGAAAGAGRSAASLIQSATRSCFYAGFAVQRNFAEVIAKGEAQGMVSKFVGIGLGIALANHIGSSVPLALISFAGITAVHMYCNLKSYQSIQLRTLNPYRASLVFSEYLLSGQVPSVKEVNDEEPLFFNLSLGASRQSKILSAEAKDAADRICRRLQMGSKLSEIIESKEDACALFDLYKNEQYLLMDYKGKFCIVLKEGSSPEDMLKSLFHVNYLYWLERYMGFKPSNVASECRPGGRLEVSLDYAQREFSHVKHDGSDGGWVMDGLIARPLPVRIRIGDGTS

SEQ ID NO: 7945 - protein, 188 aa, Zea mays
  VARIANT 47: note = Ancestral polymorphism is P, Derived polymorphism is L
MSREQPSPAPAQRRFIAIPSFSSSGCRSHSSVDVVDTARHAGNGKKPHPQGAETGAVPGGASAGGKGESLVARLLRGFKNLSQIFAVYEDEEEEEEREMVIGLPTDVKHVAHIGWDGSTSTTSSLRSWNRAAPPPPASSSSSAPAAAAPKEQEQYPLPLPALSMQQFELAMAAQAGGGGGGAAHRRHS

SEQ ID NO: 7946 - protein, 117 aa, Zea mays
  VARIANT 16: note = Ancestral polymorphism is A, Derived polymorphism is V
  VARIANT 38: note = Ancestral polymorphism is V, Derived polymorphism is M
  VARIANT 50: note = Ancestral polymorphism is M, Derived polymorphism is V
  VARIANT 67: note = Ancestral polymorphism is Q, Derived polymorphism is E
MHSPVPLLLLLLLCTAAAASDGSQPQAQAPGAARRGMVPVAPAEAELGTMVALALNGTRRRLGGSFQLCAPCTCCGGASGACILAPCCYSINCNIPNRPFGYCSFTPKSCQCVGCNL

SEQ ID NO: 7947 - protein, 551 aa, Zea mays
  VARIANT 319..551: note = Derived polymorphism lacks residues 319 to 551
  VARIANT 306..551: note = Derived polymorphism lacks residues 306 to 551
  VARIANT 240..551: note = Derived polymorphism lacks residues 240 to 551
  VARIANT 215..551: note = Derived polymorphism lacks residues 215 to 551
  VARIANT 120..551: note = Derived polymorphism lacks residues 120 to 551
  VARIANT 118..551: note = Derived polymorphism lacks residues 118 to 551
MGVWREGAGWCFCSGGGGDDGGRSERVKAAIFSARASALAAVRAQGRHHGSGLLIHRNLLLTTHGNLPSAAAAEDADALLGQGRLVARLEPHRFFISSSILDLTIVGIDYTEGDSTLQGQQPHYLKTSCKPSLDHGSPVYLLGHTGKKELVIGEGKVVIGTDNLIKLSAEGVTWCPGSAGFDAQGNLAFMICDPMKLASSPTARSSSASSSSSHSWKKDQPMQFGIPISVVCDWLYQHWQGSLDEVSKPKLPLVRLMSSRSDHSSTSFTRRHVFKPDDENDDASVCSKPKHQQVSGSTATARISHEANPIVDLRTSCEQGVTTPEIYESPRRSSCQAQKNAAAPIQLLDINFPPRVPKTIFLPLPLKQMLSDENNVETSKPKYRSKDNGFPSGLIWHRNIEAECRDPPVALQHMDCSSEGQSSSSPAEIPEYGCQDQYDSEEETMYSAETMESRNIPSPREKHVGRSQSCVTYSRWSSPRTSSMQNGTLRKQHTLIPVRKTHSQNTTLPQRSHDYLSPTVSSAMKKRNSMEQQQATKPRRSTIQSSPKWMF

SEQ ID NO: 7948 - protein, 493 aa, Zea mays
  VARIANT 383..493: note = Derived polymorphism lacks residues 383 to 493
  VARIANT 376..493: note = Derived polymorphism lacks residues 376 to 493
  VARIANT 347..493: note = Derived polymorphism lacks residues 347 to 493
MAGAAAVETAAAAAAANGKACCHAAKGPGYATPLEAMEKGPREKLVYVTCVYNGTGINKPDYLATVDLDPSSPTYSQVIHRLPVTHIGDELHHSGWNSCSSCHGDPSAKRRFLILPSLLSGRVYVVDTATDPRAPSLHKVVESEDIAENTGLGFPHTSHCLASGDIMISCLGDKEGNAAGNGFLLLDSEFNVKGRWEKPGHSPLFGYDFWYQPRHKTMISSSWGAPAAFRTGFDLQHVQDGLYGRHLHVYDWPGGELKQTLDLGDTGLLPLEVRFLHDPSKDTGYVGCALTSNMVRFFKTADGSWSHEVAISVKPLKVRNWILPEMPGLITDFVISLDDRYLYFVNWLHGDIRQYNIEDPAKPFLAGQVWVGGLLQKGSDVVYVTDDGQEQQYNVPQVKGHRLRGGPQMIQLSLDGKRIYVTNSLFSRWDEQFFGDDLVKKGSHMLQIDVDTEKGGLAVNPNFFVDFGTEPDGPALAHEMRYPGGDCTSDIWI

SEQ ID NO: 7949 - protein, 153 aa, Zea mays
  VARIANT 5: note = Ancestral polymorphism is A, Derived polymorphism is V
  VARIANT 31: note = Ancestral polymorphism is G, Derived polymorphism is D
  VARIANT 54..153: note = Derived polymorphism lacks residues 54 to 153
  VARIANT 55: note = Ancestral polymorphism is D, Derived polymorphism is N
MDLPADVKERELHNLLCWLLGFETSEMNFKGNQPMGFALFSTVHQAITAKAMFQDTVFDAETKVALQTDMAKKNLFVKRSKDHLSRAFAEWVARLPLTPLTTQPQQQCIVPCAFSLSPSLLNNWCLVQDVDDAGAERGHPKVHVGGGEDKGHK

SEQ ID NO: 7950 - protein, 971 aa, Zea mays
  VARIANT 16..971: note = Derived polymorphism lacks residues 16 to 971
  VARIANT 33: note = Ancestral polymorphism is G, Derived polymorphism is S
  VARIANT 70: note = Ancestral polymorphism is L, Derived polymorphism is V
  VARIANT 80: note = Ancestral polymorphism is G, Derived polymorphism is S
  VARIANT 107: note = Ancestral polymorphism is L, Derived polymorphism is H
  VARIANT 116: note = Ancestral polymorphism is R, Derived polymorphism is C
  VARIANT 133: note = Ancestral polymorphism is S, Derived polymorphism is L
MEQLRTIGRELAMGSQGGWGQSKEFLDLVKSIGEARSKAEEDRIIARELEHLKRRLADPDVPRRKMKELLLRLVYAEMLGHDASFGHIHAVKMTHDESLPLKRTGYLAVALFLDERHDLVILVVNTIQKDLRSDNYLVVCAALTAACRLIGEEAIPAVLPQVVELLAHPKEAVRKKAVMALHRFYQRSPSSVSHLVSNFRKRLCDNDPGVMGATLCPLYDLILEEPNSYKDLVVSFVNILKQVAERRLPTSYDYHQMPAPFIQLQIKLLKILAVLGSGDKQASGHMYTVLGDIFRKGDTASNIGNAILYECICCISFIFPNPKMLEAAAETTSKFLKSDSHNLKYMGIDALGRLIKINPDIAEEHQLAVIDCLEDPDDTLKRKTFELLYKMTKSTNVEVIVDRMIEYMINITDHHYKTEIASRCVELAEQFAPSNQWFIQTMNKVFEHAGDLVNIRVAHNLMRLIAEGFGEEDEGADSQLRSSAVDSYLRIVGEPKLPSSFLQIICWVLGEYGTADGKYSASYIIGKLCDVAEAHLTDDTVKAYAISAILKTFAFEITLGRKIDLLPECQTLVDELSASHSTDLQQRAYELQALLGLDKTAVESVMPADASCEDIEVDRSLSFLNSYVQQALENGASPYIPESERSGVISVGSYRSQEQQETSAHTLRFEAYEMPKPSLPLATSQTSMSTPPTDLVPVPEAGYYKEDNQTSMSQPPSDAISGEFGVKLRLDGVQKKWGRPTYSSSTPSSSISSQPTPNGASHSDGGGSSSQPRESSYGSKRQQGTEVSAEKQRLAASLFGSAAAKADRKAQASRKTAKDSPSTEKVATTNVTAQPVKEQVIPAAPPPDLLDLGDEPVSSSPPSADPFSQLEGLLGPASAAPVLSGTPATSTSKAPGLLSIFSDDVPTGVTSVSTDPTLGDVNSMGSRKGAAAVASMKGPSLQDALQKDAAARQVGVTPTVNNPNLFKDLLG

SEQ ID NO: 7951 - protein, 196 aa, Zea mays
  VARIANT 182: note = Ancestral polymorphism is V, Derived polymorphism is A
MLNSGSCLAGGHDGNNDQPNGDGGGQQYEGTGGKKQLESSRLKKSSGNKDKADAAEDDYPNPKYCTNNTSGGTSVAGAPYCVGVGVGGGGGGYGNSSRCGGGGDGDSYGNSCPYGTGGNAPYNNAPAAFWAPQDGARSPLYINTQAVHVYGMPCVSNNDNSNDDDKRTKRGNGFFGPVFHAAGHFLDRKFGFDGRD

SEQ ID NO: 7952 - protein, 155 aa, Zea mays
  VARIANT 129: note = Ancestral polymorphism is T, Derived polymorphism is I
MGKMRQLICLVAAVAAAAILLTASAKKSGDVTELQIGVKYKPESCTLQAHKGDKIKVHYRGTLTDGSVFDSSYDRGDPFEFTLGNGQVIKGWDQGLLGMCVGEKRKLKIPAKMGYGERGSPPKIPGGATLIFDTELIAVNGKTSGGAKAESDSEL

SEQ ID NO: 7953 - protein, 437 aa, Zea mays
  VARIANT 24: note = Ancestral polymorphism is R, Derived polymorphism is S
  VARIANT 60: note = Ancestral polymorphism is D, Derived polymorphism is Y
  VARIANT 106: note = Ancestral polymorphism is H, Derived polymorphism is R
  VARIANT 146: note = Ancestral polymorphism is F, Derived polymorphism is S
  VARIANT 216: note = Ancestral polymorphism is Q, Derived polymorphism is L
  VARIANT 298: note = Ancestral polymorphism is G, Derived polymorphism is V
  VARIANT 312: note = Ancestral polymorphism is D, Derived polymorphism is N
MESIDLKVQVVESSFIAPSEPTPSKGLWLSSLDILLVNIGHTPTIYLYSSNDVAAADFFDVGRLKKAMAKALVPFYPLAGRLGNNSDNGRTEISCNGEGALFVVAHADGDLTIDDIKKLKPSPELRRLFIPLIEPSSIIMAIQVTSLKCGGVVLGTAIHHAAADASSAFHFFQTWSAFCKHGDRAAVAVELPCHDRTLLRARSPPTVHPDALLTLLPRLTLSDPEGSLATEVFTISSDQLASLKHLCGGASTFCAVSALLWQCACVARRLPPDSQVRMLFPADLRRRMRPPLPSHYFGNAVFRLCATGRAGDIGTVALGSVAARIKGAIDRMDDELVRSAIDYYEYETAEVNKRRTPTGTLPQTDLNITSWLGRSQYDADFGWGTPQFMSRADSDRGGFVHLINDEGGGTATGDVRVLVTVGAENIKELGRLLYAKL

SEQ ID NO: 7954 - protein, 41 aa, Zea mays
  VARIANT 21: note = Ancestral polymorphism is V, Derived polymorphism is M
MIDAFRKIVRHGVGALYKGLVPNSVKVVPSIGIAFVTYEVV

SEQ ID NO: 7955 - protein, 294 aa, Zea mays
  VARIANT 58: note = Ancestral polymorphism is P, Derived polymorphism is L
  VARIANT 75: note = Ancestral polymorphism is A, Derived polymorphism is G
  VARIANT 78: note = Ancestral polymorphism is A, Derived polymorphism is V
  VARIANT 111: note = Ancestral polymorphism is A, Derived polymorphism is T
  VARIANT 117: note = Ancestral polymorphism is A, Derived polymorphism is S
MAVYIRLDDAVRARLRGDAAAGCTSSGSDHDASACLSGLVQAFLETGASAAEAGGPGPAPKECDSDEEDGPGRAAAAVASVRALLDPPAEEDVFRIRLAAAVAAAAEAEAALRAHGAAFRRAVAWRLRGAGYDAGVCRSRWEASGGITAGAYEYVDVVAPAPVGPGARQRARYIVDADFRAGLEVARATPEYAAVVAAVPAPAVVAREEAVGHAVRVASDAARRSLRAHGLHVPPWRKTRYMLAKWLGPYKRSTATSPAAVGAMPMPGGAGLDVKCRAVGFFAPPSTAPAPRIK

SEQ ID NO: 7956 - protein, 113 aa, Zea mays
  VARIANT 6: note = Ancestral polymorphism is G, Derived polymorphism is D
  VARIANT 40..113: note = Derived polymorphism lacks residues 40 to 113
  VARIANT 45..113: note = Derived polymorphism lacks residues 45 to 113
  VARIANT 77: note = Ancestral polymorphism is E, Derived polymorphism is V
MKQFEGGYGTDGVFANEAEAQQHSKLDKLYISTCAAKHFQRDIVRGVEGYIVTGSKQVEIGGQMNSRVSFIEHMKFEFRNWNKLCEDGKKYGTENTCSSGSTLSKAALSFAKA

SEQ ID NO: 7957 - protein, 128 aa, Zea mays
  VARIANT 43: note = Ancestral polymorphism is P, Derived polymorphism is T
  VARIANT 40: note = Ancestral polymorphism is S, Derived polymorphism is Y
  VARIANT 33: note = Ancestral polymorphism is H, Derived polymorphism is Y
MANGCSTTTTSSLLLFFLLSYLLIGHALCSQGHNGRTSGSSLPCADYVVQYLHQELPGKHIVLQETVKGLNKGILPKYARRMLIGSIAPICTYNECRGCRFKCTAEQVPVDANDPMNSAYHYKCVCHR

SEQ ID NO: 7958 - protein, 299 aa, Zea mays
  VARIANT 42: note = Ancestral polymorphism is C, Derived polymorphism is Y
MAFLSPAAASSKRLRVYSSAAIDGAVTGSSKHVGTHNDNFHCVEILDTLDVVLDVGVSMIPVNIAIIITRRASVSQHRHDHHQKGFSEVFEHGFDTKLSSVGLVYKHFGKEIIAKELGVNEDHEDVHRLYLSIYKSFVESVRFHVKSWLPARSIILECLLSRGNIDPSREIMVLDRFCPIVSVRTCSRIGTIRVAGRRKASNAAALVAVLIVAVAAAAAGAIKLCGVDESAVDACTPYCKAGSTQAAPGQLCCAKVKSARWSCLCDYRSALSSDIDAARVMDLATKCKCDYPPASCDDN

SEQ ID NO: 7959 - protein, 106 aa, Zea mays
  VARIANT 47: note = Ancestral polymorphism is S, Derived polymorphism is L
  VARIANT 19: note = Ancestral polymorphism is V, Derived polymorphism is I
  VARIANT 11: note = Ancestral polymorphism is A, Derived polymorphism is V
MAGRKVSSSSAVAMAIMAVALLVMAAEAGTCNVDADAVVNHCKSACSSWWWGGGARPSQGCCNALRYADFGCVCRNYWGILRSTPYAGCAMAIPSRCNIRGAPSSC

SEQ ID NO: 7960 - protein, 137 aa, Zea mays
  VARIANT 42: note = Ancestral polymorphism is A, Derived polymorphism is T
  VARIANT 56: note = Ancestral polymorphism is P, Derived polymorphism is A
  VARIANT 57: note = Ancestral polymorphism is A, Derived polymorphism is S
  VARIANT 61: note = Ancestral polymorphism is S, Derived polymorphism is G
  VARIANT 71: note = Ancestral polymorphism is G, Derived polymorphism is V
  VARIANT 72: note = Ancestral polymorphism is E, Derived polymorphism is Q
MEAQDDCKWRQIPAFGDWNVWDGDMPVTQYFQAGAFFFAAPAEKGDADLFKVPQLPAKPYGYKKCVVRVKGEKETAVPPAARKGRRRRCVSEQHKWKPKGAVDEDLYKISPQLLCKVKKKKLLRNLLGGCLGLGCIA

SEQ ID NO: 7961 - protein, 168 aa, Zea mays
  VARIANT 118: note = Ancestral polymorphism is R, Derived polymorphism is W
  VARIANT 95..168: note = Derived polymorphism lacks residues 95 to 168
  VARIANT 91..168: note = Derived polymorphism lacks residues 91 to 168
  VARIANT 80: note = Ancestral polymorphism is A, Derived polymorphism is V
  VARIANT 66: note = Ancestral polymorphism is G, Derived polymorphism is D
  VARIANT 57: note = Ancestral polymorphism is R, Derived polymorphism is S
  VARIANT 54: note = Ancestral polymorphism is V, Derived polymorphism is F
  VARIANT 38..168: note = Derived polymorphism lacks residues 38 to 168
  VARIANT 32: note = Ancestral polymorphism is Q, Derived polymorphism is R
MAALPLATAEACDANAALIMNGDLRSLQPIFRIYGGRQIFAGPVVTLKIFEDNVLLREFLEEKGHGRVLVVDAGGSMRCAVLGGNLAQLMQNNGWAGIVVNGCIRDVDEINGCDVGVRALNSHPMKSNKKGVGEKHVPVTFAGTRICDGEWLYADSDGILISRSELSV

SEQ ID NO: 7962 - protein, 175 aa, Zea mays
  VARIANT 11: note = Ancestral polymorphism is V, Derived polymorphism is A
  VARIANT 12: note = Ancestral polymorphism is V, Derived polymorphism is A
  VARIANT 70: note = Ancestral polymorphism is E, Derived polymorphism is D
  VARIANT 75: note = Ancestral polymorphism is A, Derived polymorphism is V
  VARIANT 98: note = Ancestral polymorphism is A, Derived polymorphism is D
MAAALWTLLVAVALSAALASNRPVAATATAAAEAANEVLRAHQLPGGLLPAGITAFRHDAATGAFEARLDAPCTARFEVGLRYNATVSGVISPGQIADISGVAAQDLFMWFPVHDIKVDIPSSGVIYFNVGVVKKHLPLAVFDAPPACTPDPLLQRLEDVGEGGLAVVGAAASRR

SEQ ID NO: 7963 - protein, 258 aa, Zea mays
  VARIANT 55..258: note = Derived polymorphism lacks residues 55 to 258
  VARIANT 66: note = Ancestral polymorphism is E, Derived polymorphism is K
  VARIANT 67: note = Ancestral polymorphism is P, Derived polymorphism is L
  VARIANT 72: note = Ancestral polymorphism is P, Derived polymorphism is L
  VARIANT 74: note = Ancestral polymorphism is S, Derived polymorphism is Y
  VARIANT 160: note = Ancestral polymorphism is A, Derived polymorphism is D
MAFDSTTSLSLSDPAAAAAPDLYMSSDTDIVSSGSNSGASDPPRRVISVSARFCQKTNSRLRRILEPRLPLLLSSRRSFSDSPMSPRLPGRSPSPCRESRGGDSPSRGRSWEASPNGHMVQALANAPSIINFAAEWRCINAQTDATLLVQSFTAEGLIVASREETLQSFKKRYAHEHEPVKDLLGAVKAIRPTALIGSAGVGQSFTKEVIEAMSSINELYDQVTGDVICHGEKTSYKMGARAILVAIRGVGKALSISS

SEQ ID NO: 7964 - protein, 477 aa, Zea mays
  VARIANT 59: note = Ancestral polymorphism is R, Derived polymorphism is G
MAPAFSAQVPALRRGALRVRWVTAALFSSGILAGNKPILVRDFVRSALYDPNHGYFSKRAGPVGVLDASIRFNQLEGGLLNLLRVAHFLSSYRIASSNGKFSVCSGIAGMGRYLCFVSSSCWHFNEQVSHLGRVPWYAYTIAASILRTANLSVPLKIYEIGGGSGTCAKCILDYMMLNAPPKVYNDMKYISVEISSSLAEKQLETVGEVQSHLSKFTVEHRDAINRPGWGRTDPHPCWVLMLEVCSAGTSQKIHSDAYNSNYLSMEYQVLDNLPHDLVYSPDQVSPWMEVWIEKVKGRFVTFVFSEPLLCTTTKKPGEVLSSLRGAAWKKLMDTLHQALPSMSLIASDFSYLPDVSIPGDRAPLVSSKKDGKTSDHRNYFDAQGDADIFFPTDFRLLEQIDHNCAGFSKEQKNPGAFKPVKKRRTIILDTAAFMEEFGMPLKTRTKDGYNPLLDDFKNTKFYLSVPTHNVPTHSRRN

SEQ ID NO: 7965 - protein, 113 aa, Zea mays
  VARIANT 8: note = Ancestral polymorphism is N, Derived polymorphism is S
MAGRLLANLIVMGGTVVGRAMLQAYRQAIVNANKTGAAQEAINGIRRASKAMTEQEARQILGISENSTWEEIVQKYDTMFERNNKNGSFYLQSKVHRAKECLEPLYQKPDVLN

SEQ ID NO: 7966 - protein, 754 aa, Zea mays
  VARIANT 403: note = Ancestral polymorphism is L, Derived polymorphism is P
  VARIANT 398..754: note = Derived polymorphism lacks residues 398 to 754
  VARIANT 176: note = Ancestral polymorphism is S, Derived polymorphism is P
MIWRNIYSRPLLTSRSGHSHMPQSPKPYTSLSATVIAIAMAGRRPAPVAILLLLAAAFAPISSAVRPVSDAHRSAAVELFAPSADGSFGDLESTYEAVRTFQILGLENYKSLSGKACKFAAENLASPGSTTKDLFHAVRISGALGCAVDAGVYDGVVARLKAVIQDTNSLLELYYPVGGLLGIKEQGHNVVLSDAEGTFHATKALSQSDGRWRYDTDSAESSTFAAGIALEALAGIVSLADAAVDPSMMGVVKNDVVKLFDTIKSYNDGTFYFDEKHVDATEYKGPIITSASVVRGVTSFAAVVSGKLNIPAEKILGLAKFFLGIGLPGSAKDCFNQIESLSFLENNRQGLRSVDTITFFQSIFIDFERSAQGDNYIHILYSVAKGITFSVKMTYGAWDHNLLTSDVFFLITTLLCSNSLASFSFLSQELQYDLDNNVHYLDIAPLKIDVGKYSIVFEISLQEPEQETVYATGGRNTESVIVTGLIKVDKAEIGISDNDAGAVESVQKLDLLKDTKVSLSANHLQKLCLSFQLTTPLGHTFKPHQVFLKLRHESKVEHLFVVPGSARQFKIVLDFLGLVEKFYYLSGRYDLELTVGDAVMENSFLRPLGHLELDLPDAPEKAPRPPAQAVDPFSKFGPKAEISHIFRAPEKRPPKELSLAFTGLTLLPFIGFLIGLVRLGVNLKNFPSLPGPAAFASLFHAGIGAVLMLYVLFWIKLDLFTTLKYLGFLGIFLVFVGHRALSYLSSVSTKQKTA

SEQ ID NO: 7967 - protein, 175 aa, Zea mays
  VARIANT 16: note = Ancestral polymorphism is V, Derived polymorphism is I
  VARIANT 18: note = Ancestral polymorphism is A, Derived polymorphism is S
  VARIANT 22: note = Ancestral polymorphism is G, Derived polymorphism is A
  VARIANT 23: note = Ancestral polymorphism is D, Derived polymorphism is E
  VARIANT 27: note = Ancestral polymorphism is T, Derived polymorphism is K
  VARIANT 111: note = Ancestral polymorphism is N, Derived polymorphism is K
MALAHLPFVLLLVSSVAAFAAGDHGLTHIHLYVHETYTGANATAAAVLQSPLGANSSFGSMGVVDDEIRVGPDRSSQLVGRYQGVFFGTSVQLGAGYLSSITLVFTAGEYNGSTLSVQGPLLGFTGTIERAVVGGTGKFRLARGYMLFKMISKPTPETDVNEINLFVLMHPAGKY

SEQ ID NO: 7968 - protein, 321 aa, Zea mays
  VARIANT 127: note = Ancestral polymorphism is R, Derived polymorphism is H
  VARIANT 122..321: note = Derived polymorphism lacks residues 122 to 321
  VARIANT 4..321: note = Derived polymorphism lacks residues 4 to 321
MARQLVSVVYGGGGAAAAAGEGGVAGVAGGGGVDRLPCSGSASDPSGHAVLRPALSFVGVRYPLLSGPTASNPSSEVAFMPLRSEVPVDAAPAPTPVPEPVGRLTGTGVVLRSPDVAGQRAQGLLRHRRGRCSSRRQQPSWRTLRWVVEEEESEGGRRGCLAEARGEGERHLQGHNLGETATTSVPHDRHQDLKLAIDDFDEELIDPELRFSFQRNNKVCGVDLTDKVVDIIFHVFDANCDGNLSSEEFLRKCLFSMMSDLPSVLEAFVDRKHNKDREEKMAMPRVPGQHLLPPMSMTKTRRSTRRPFVEAMATFTLAATK

SEQ ID NO: 7969 - protein, 484 aa, Zea mays
  VARIANT 35..484: note = Derived polymorphism lacks residues 35 to 484
  VARIANT 73..484: note = Derived polymorphism lacks residues 73 to 484
  VARIANT 101: note = Ancestral polymorphism is T, Derived polymorphism is M
  VARIANT 327: note = Ancestral polymorphism is T, Derived polymorphism is M
  VARIANT 367..484: note = Derived polymorphism lacks residues 367 to 484
MSELTPAPSSKPLRALCSAAVPAPLRGPLPLRHTRRIARSGPRKRGPLLPAAPSSPSPSSLPLHLTVPIPAPWRSHPPPHSFLSLAAQALVLAISLHPLPTLAAFLASHRDELLRADITSLIKALELSGHWEWALALLRWAAKEGAADASSAGGIGGSGNKQILDARHSELFLEKAYWDETLEYESLGEHFQDEEELPKRLLLTYKPEESEDIPEPASVEEENAPVEEPVLVPPVTEVVSPPKTEVADIGESLVAIEESNALALAIVPTDIKPVAVTQVVVLVILYGQSVGSGPTIDLASRLPDLRAVVLHSPILSGLRVIYPVKRTFWFDIYKNIDKIGLVNCPVLPIPLGTSDDVVDCSHGKQLWEHCKVKYSPLWLSSGGHCNLELYPDYIKHLKKFVSSVSKKASSKPDPKETTSKDDTTSKEIEEAYPEKPQEAKKCPQISRKSLDSRFGKSKTVDVPDKLRMSSDDIDKFRRSRCLVW

SEQ ID NO: 7970 - protein, 164 aa, Zea mays
  VARIANT 70: note = Ancestral polymorphism is A, Derived polymorphism is S
  VARIANT 61: note = Ancestral polymorphism is P, Derived polymorphism is S
  VARIANT 49: note = Ancestral polymorphism is R, Derived polymorphism is C
  VARIANT 43: note = Ancestral polymorphism is V, Derived polymorphism is M
  VARIANT 42: note = Ancestral polymorphism is G, Derived polymorphism is S
  VARIANT 40..164: note = Derived polymorphism lacks residues 40 to 164
  VARIANT 29: note = Ancestral polymorphism is D, Derived polymorphism is N
MRSATHQIHGMEVEEEDPVVTTTCLGVADGALNLAGEDIQHGVASTSTRAVAATTESEETPEKTVAEADATAASTTAAAMAAALEGRYGPRWLCFLHVGKVLLTIDYSTYYMVYGFMRYNIFLFPSLKVLNLEHYEDARACCIWIFVLLIVLFGSRSSMAMSHM

SEQ ID NO: 7971 - protein, 90 aa, Zea mays
  VARIANT 12: note = Ancestral polymorphism is R, Derived polymorphism is Q
  VARIANT 35..90: note = Derived polymorphism lacks residues 35 to 90
  VARIANT 55: note = Ancestral polymorphism is D, Derived polymorphism is Y
  VARIANT 56: note = Ancestral polymorphism is N, Derived polymorphism is D
  VARIANT 57: note = Ancestral polymorphism is L, Derived polymorphism is V
MPWIWWVADLMRLMSRAKRQSTKRQHAATSAAGPQMEAAADPEERERKAAFERLDDLGRCIADVESSGEKVFRALVNTRVSLLNILSPAF

SEQ ID NO: 7972 - protein, 324 aa, Zea mays
  VARIANT 55: note = Ancestral polymorphism is T, Derived polymorphism is K
  VARIANT 61: note = Ancestral polymorphism is Y, Derived polymorphism is C
  VARIANT 67: note = Ancestral polymorphism is L, Derived polymorphism is Q
  VARIANT 73: note = Ancestral polymorphism is G, Derived polymorphism is D
  VARIANT 92: note = Ancestral polymorphism is M, Derived polymorphism is T
MVEKLRHMVLLSWVTSATSAFDGTKDIMEALRNKHTNLANELENSEEVPFPGHLTSKSDVCSFRVVLLELMIGRRSMDKSRSAGLPPEVSFMLDLWYEETLLRYYALALGFLMFAVGVNSSAKDLIETIKRPDAIAAGYIGQFVKLVTVDDPFITTDYMTQLSENAKTNKRVTGIRKELQKLHREAIQNTINSVTMVATLIASIAFVVIFNLPGQYFQDVNSGGDIGEAQTAMIVSEAVVVETRRTGRTKHLPSRGRALKGIVVDRLVGFQDLRSKDDFLTRALEHILILKTKGIIDEKKKDDEDDDEESEAKNRRVRSSTAQD

SEQ ID NO: 7973 - protein, 136 aa, Zea mays
  VARIANT 39: note = Ancestral polymorphism is E, Derived polymorphism is K
MAFPSFPSLSFARRALLLYAAAWTAVATTAVAVAAFAPEFAFVWAVGPGAPLSRACPGSSGAGDGFSVGLPLDGPPWDVVCVPVGMLGRAKPDVVVPLVFAVVVVTAAVWFTTAFGVWEDDHDDEPTSPEVFLEQV

SEQ ID NO: 7974 - protein, 320 aa, Zea mays
  VARIANT 281..320: note = Derived polymorphism lacks residues 281 to 320
  VARIANT 164: note = Ancestral polymorphism is G, Derived polymorphism is C
  VARIANT 101: note = Ancestral polymorphism is A, Derived polymorphism is S
MGILALITGKAGASGFGSASTAEQVTDGADASRLTVAITGGASGIGLETSRVFALRGAHVVIAARNTEAASEARKTIMEKNPTARIDVLKLDLSSLKSVRAFVDQFNSMKLPLNILINNAGVMFCPFQLSKDGVEMQFATNHLGHFLLTNLLLDTMKATAKSTGIEGRIVNLSSVAHHHTYPKGIDFDNLNDEKIYNDKMAYGQSKLANLLHAKELSRRLKEEGANITVNSVHPGLIMTNLMRHSFVLMKVLQVATYILWKNVPQGAATTCYVGLSPQLKGVTGKYFADCNVEKTSKLARSEELAKQLWDFSEELIKSAK

SEQ ID NO: 7975 - protein, 137 aa, Zea mays
  VARIANT 108: note = Ancestral polymorphism is G, Derived polymorphism is R
  VARIANT 90: note = Ancestral polymorphism is G, Derived polymorphism is E
  VARIANT 73..137: note = Derived polymorphism lacks residues 73 to 137
  VARIANT 63..137: note = Derived polymorphism lacks residues 63 to 137
  VARIANT 56: note = Ancestral polymorphism is K, Derived polymorphism is Q
MGGMRSVEFKVIETDPSEYCIVAPDTEIFCDGEPIKREDEERLDEVGYYDVGGVRKQMAQIRELVELPLRHPQLFKSIGVKPPKGILLYGPPGSGKTLIARAVANETGAFFFLINGPEITKFICIARITNGLQNLFS

SEQ ID NO: 7976 - protein, 125 aa, Zea mays
  VARIANT 72: note = Ancestral polymorphism is G, Derived polymorphism is V
MDKQRWFVREYGLIRSNLLVLVEYGPYPPPGKTGAKYIIRGDGQRFDLRYVKKSSDQHLELGYKVERHLNDGDFVLFNRQPSLHKMSIMVFSMAFSVLSDGARIRKCSAHGRMQRISPWLRPLLI

SEQ ID NO: 7977 - protein, 360 aa, Zea mays
  VARIANT 212: note = Ancestral polymorphism is P, Derived polymorphism is Q
  VARIANT 173: note = Ancestral polymorphism is L, Derived polymorphism is I
  VARIANT 115: note = Ancestral polymorphism is H, Derived polymorphism is Q
  VARIANT 68: note = Ancestral polymorphism is R, Derived polymorphism is Q
MGRRGSYDRLEALSLEIERKLHKALMSNSQRLQILQQLFADIALKVDDRARDAIMSESDDGIAPADEREDGWLCFYEILANHFVRVPESGRRILELIVQLWSQSFAANIFALLFQKWLFEAPLDEKEISLRYSSALVQGATNVFWIDIQTNTRHFLSLYHYLLEDVALVPERLSKISLQAGRDLFLLLSRFMFFYDQDHMLSSFLEHFPNFPNSFLVGGPADYFVIELADQLQKLKIEPVLLHYLSRMSILQGLELRLSTSTRLKACLYSFTSPGGPTYPTRAVRHAAWNTLDLLFPIGRYPRHVISLFFRLLYPWYWPSSCWNFVMTCAMTVYYYILNLLVSCWENMRRRPSHRRTHGE

SEQ ID NO: 7978 - protein, 367 aa, Zea mays
  VARIANT 210: note = Ancestral polymorphism is T, Derived polymorphism is I
  VARIANT 70: note = Ancestral polymorphism is S, Derived polymorphism is R
MELYLDSWLQAALNPGIEELTLWLFHTRRIYEFPCSLLSDGVRNSLRYLKLRCCALRPTVELAPMRSLTSLHLSFVSIKWDGLKRLLSNSLALEELELVCCDKIVCLKIPSALQRLNSLNIFGCSALKVLESKAPNLSSLSLLHFGGRLVFSRVKTLQMKKLITESTVYDARTRLPSIMPNLETLVINSFDWVVDAPMLPTKFLCLKHLIVRLSLGTTITQAFDYFSLVSFLDASPSLETFILNVSEKGMIHESISAHPQLRHTPEHHHGHLRSVKICGFSSEKSLFELTRYILENAVSLKFLTLDTFYGDRCGQGKCTSCLPTPDVFMDVSKAISGIKTYIENKVPSTVKLTVLEPCSRCHVRRVI

SEQ ID NO: 7979 - protein, 259 aa, Zea mays
  VARIANT 231..259: note = Derived polymorphism lacks residues 231 to 259
  VARIANT 189..259: note = Derived polymorphism lacks residues 189 to 259
  VARIANT 131..259: note = Derived polymorphism lacks residues 131 to 259
  VARIANT 128..259: note = Derived polymorphism lacks residues 128 to 259
  VARIANT 116..259: note = Derived polymorphism lacks residues 116 to 259
  VARIANT 110: note = Ancestral polymorphism is T, Derived polymorphism is I
  VARIANT 107: note = Ancestral polymorphism is G, Derived polymorphism is S
  VARIANT 99: note = Ancestral polymorphism is A, Derived polymorphism is P
  VARIANT 94..259: note = Derived polymorphism lacks residues 94 to 259
  VARIANT 92: note = Ancestral polymorphism is C, Derived polymorphism is Y
  VARIANT 90..259: note = Derived polymorphism lacks residues 90 to 259
  VARIANT 86: note = Ancestral polymorphism is T, Derived polymorphism is I
  VARIANT 85: note = Ancestral polymorphism is T, Derived polymorphism is M
  VARIANT 82: note = Ancestral polymorphism is D, Derived polymorphism is A
  VARIANT 57: note = Ancestral polymorphism is R, Derived polymorphism is C
  VARIANT 42..259: note = Derived polymorphism lacks residues 42 to 259
  VARIANT 40: note = Ancestral polymorphism is Y, Derived polymorphism is C
  VARIANT 28..259: note = Derived polymorphism lacks residues 28 to 259
MADAAWRPMAGSSASLPSATHALSSPCWKATPFSDILDKYIQNDCVKKQGSHSRNLRRVHLGLGLIKALFEQFLDTEGTLYDVATTAYGQVCAQFHSWAIRKAVGAGMYTLPTREQLIVRLNETGFLLLARVIAATCCVTLSASMAAQLGSTPMVAFQICLQTWLAYSLLADGLAFAGQTILASAFARKDHPKATATASRILQLALVLGLLLSILLGVGLRIGSRLFTSDQGVLHHIYIGIPTSFFDSDGISVLVSPAL

SEQ ID NO: 7980 - protein, 121 aa, Zea mays
  VARIANT 3: note = Ancestral polymorphism is T, Derived polymorphism is I
  VARIANT 8: note = Ancestral polymorphism is N, Derived polymorphism is I
  VARIANT 46: note = Ancestral polymorphism is E, Derived polymorphism is K
  VARIANT 53: note = Ancestral polymorphism is T, Derived polymorphism is K
  VARIANT 55: note = Ancestral polymorphism is S, Derived polymorphism is P
  VARIANT 57: note = Ancestral polymorphism is R, Derived polymorphism is C
  VARIANT 69: note = Ancestral polymorphism is T, Derived polymorphism is S
  VARIANT 70: note = Ancestral polymorphism is Y, Derived polymorphism is C
  VARIANT 76: note = Ancestral polymorphism is A, Derived polymorphism is D
  VARIANT 86: note = Ancestral polymorphism is N, Derived polymorphism is Y
  VARIANT 87: note = Ancestral polymorphism is S, Derived polymorphism is C
  VARIANT 91: note = Ancestral polymorphism is D, Derived polymorphism is Y
  VARIANT 108: note = Ancestral polymorphism is L, Derived polymorphism is R
MQTDNERNEVKDMSNRLEARELSTALSKNSSDAMYPIVSKESLLQEMFFSAKTTSGRLHLAKELLKLPTYVLKSFAGSKEGLSTLYSWILDSLGKNATQLLRHCVRLLVLVSTDLVAARLS

SEQ ID NO: 7981 - protein, 544 aa, Zea mays
  VARIANT 15..544: note = Derived polymorphism lacks residues 15 to 544
MADQQHLKLDDDGLEVHLLVDRGAHISTTSSSSSGVDMRSKFSVGGGGWGEIDDVHAGISDQRQIYGSLLRIFVGFSKDRRLSTREKQVRAICQTRLHQHIKENAAYWKQRGYQKAIRDGDANTAFHHAHATQRSRSNHISKVTVGEQELYSHESKMAALTNHVRSIMGQTGTSTWSFDVNELYDGRPSASDNLTAPFSEKEAVAVIAPAPENHAPATRNPANRPPTPAARPPYSSPPQTAPNPARPASVFIAAAPHANASARPPSGILAAANSSPTTHAENPARTPRTPARDSRKARQPPASSLRPLHVPREPPAQALRAPALPRLRVPLAEIQNEGLGEHRLRDLNDEINKLLRERGHWERHIVELNGRDYSRSSNAPLMTDLDGNIVAIPNPSGRGPGYRYFGAARKLPGVQELFDKPPEMRKRCTRYKIHKRINAQGRQAPDVALLQLQGPGRAAAGGIAGGPRGPPRRCWYFFNRSASRPMLLHASAQATLAHRHRRPQTCARRAADLGASVASLLCPPVAHPQTSADRRPPSGRPLDA

SEQ ID NO: 7982 - protein, 638 aa, Zea mays
  VARIANT 441..638: note = Derived polymorphism lacks residues 441 to 638
  VARIANT 418..638: note = Derived polymorphism lacks residues 418 to 638
MHVGHANRPCPFPHATSKSHTQQKVNHRVSARRRPQIHPLPASLAFPLEHVSALALLCRPAKLLTGAMNPYDLRFADPSSYHDRRSDLTVAPTFAPPAPVAAANLNPYAAAYPLPVPVPVPAAPAGGDYQRYGQGGRGRGGGGRGGGGGYGGGGRGGGRGRDGLDSLALPKPDFRSLIPFEKNFYVECPSVQAMSEADVAQYRRLRDITIEGRDVPKPVRYFQEANFPDYCMQAIAKSGFVEPTPIQSQGWPMALKGRDLIGIAQTGSGKTLSYLLPGLVHVGAQPRLEQGDGPIVLILAPTRELAVQIQEESTKFGSYSRTRSTCVYGGAPKGPQIRDLRRGVEIVIATPGRLIDMLEAGHTNLRRVTYLVLDEADRMLDMGFEPQIRKIVAQIRPDRQTLYWSATWPREVEALARQFLQNPYKVIIGSPELKANHSIQQIVEVISDHEKYPRLSKLLSDLMDGSRILIFFQTKKDCDKITRQLRMDGWPALSIHGDKAQAERDYVLAEFKSGKSPIMAATDVAARGLDVKDIKCVINYDFPTTLEDYIHRIGRTGRAGASGTAFTFFTHANAKFSRNLVKILREAGQVVNPALESMSRSSNSTGGGNFRSRGRGGFGNRGHMSGSNTFPLGGRRPY

SEQ ID NO: 7983 - protein, 311 aa, Zea mays
  VARIANT 201: note = Ancestral polymorphism is T, Derived polymorphism is I
  VARIANT 255: note = Ancestral polymorphism is E, Derived polymorphism is D
MMQDLFSVPSCFSAGEKLPDVPASAAATTRSGQSAATLVYRAGIAGHDRLVTVTWCRNLLTHGLTVSIEGSAGGGKDKSGGGREWGDADGGAASSSNKGCSTACKVEMQPWHFWRKYGAKQFHVDGRAVDVVWDLRSARYSDEPEPLSDYYVAVVSDEEVVLLLGNLKKEAFRRTGSRPSLRDAALVCKKEHVFSKKRFLTKARFHDRGKLHDISIECSSSNLGGGGVDVDMVIKIDGYVNVLVRHLQWKFRGNECISINQLKVQVYWDAHDWIFGTGVRNALFIFKPEPLPSATNEYSDFCLFLYAWKLE

SEQ ID NO: 7984 - protein, 357 aa, Zea mays
  VARIANT 224..357: note = Derived polymorphism lacks residues 224 to 357
  VARIANT 164..357: note = Derived polymorphism lacks residues 164 to 357
  VARIANT 163..357: note = Derived polymorphism lacks residues 163 to 357
MEVRGAPDLTDFMNDWFFGKALATWRYRQRDHATRVHHLVPYAPRPLRLLRPLLLIPSLPPNPRRKCRFRDAPTPDSPHGRATSISPISAVHSRHRCHTSASSAPAFAADGSSDGVARLSSFLRRQRAVVAVLAAGDRTASRPTKLVLSDASKSVSSIVAAICYAWMLPSKGDGQAAVPVVNMRRSRMAWCRQAAWLLYHVGVDASALLFTDEVDMDGLIMDQRVSLLVVGQDVLKSKAEVASVCTTLTHTYCEDAYSLLQNLDIKKLLLAVMLVHNDHSFVEYLKNTYRYSTTDDNEDRPREKKQSSSASGSSQDAKKSNSTNQRTTRGSGGRASDEASRGKNKFFLTKWFGFGSK

SEQ ID NO: 7985 - protein, 1668 aa, Zea mays
  VARIANT 350..1668: note = Derived polymorphism lacks residues 350 to 1668
MDASTAGDGDTNTLKRPCKTSPPEGETDKYKRQKRECQDFSPRRYQLDVYEVATRHNTIAMLDTGAGKTMIAVMLIKHFGKINKANNDRKLIIFLAPTVQLVTQQCEVIKSYTDFEVEHYHGAKGVDQWKAHSWQQQLLKYQVMVMTPQVLLDALRQAFLILDMVSLMIFDECHHATGNHPYTRIMKFLLFCPFEQEFYHGSEHKPNVFGMTASPIIRKGVSSDLDCKNQLSELENILDSKIHSVVDREEIELCVPSAKEVNRYYEPRTVSFDDLSEELEILCSKYDGLIIQLHNRSTNQYKDADEITKESRKRLSNSLAKICYCLEDAGLLCASEATKICIERGQRKGWLKGGSDTTDQQSGQNGPILFAEISMLHMEFFQEVLDIIGKRVQQQQGIDALLNSERGCVEAKNMGYISPKLYELMQVFLSFSDPDNVRCLVFVDRKISARVIERTMKKIGQLSCFRVSFLTGGSSSVDALTPKMQKDTLDSFRSGKVNLLFTTDVAEEGIHIPDCSCVIRFDLPRTTRSYVQSRGRARQRDSQYILMIEQGNVKQDDLISGIMRSKASMTGIASNREPEDSHPSFLPTEEINEYHISKTGAKITTDSSISVLNQYCDKLPKDKYYTPRPKFQFTHYGDGYECTVTLPSSAMFQLLVGQKARNMQKAKQLVCLDACKRLHQLGALDDHLSPSVEEPPPEISSKSSISTPGAGLGTTKRKELHGTTKVLSMSGSWGSDRSVTKLQGYKLNFVCDQVGQKYSAFVLLIDASIAKEAATLDIDLYLHDKMVKASVSPCGPLELDAWQMEQTKLFQALLFNSLFGKLFIGSKASKTPREFILKKDDVFLWNKENMYLLLPVDSTLDSHKSVCINWSVIDVVATAVGFMRSIYSDGKCNLTDKLNYEKNGEDLIHLANKSCKGNDLKNMVVLAIHTGKIYTIVVVSDLCANSKFDGTTDKKEAKFRTFAEYFEKKYSIFLCHPLQPLLVLKPTHNPHNLLSSKNRDEDNVVENKNRANSLVHMPPELLIPLDLPIDVLRVFYLFPSLMHRLESLMLASQLRSEIAYRDSDISSFVILEAMTTLRCCEDFSMERLELLGDSVLKYAVSAHLFMTFLNKHEGQLSSRRQETICNATLYRLGIERRIQGYIRDAAFDPRRWLAPGQLSRRPCPCECPVNSEVVTEDIHRIDDKSIIIGKACDKGHRWICSKTISDCVEALIGAYYVEGGLKAAFAVLKWFQIETEIEEELIMEALSSASVRNYLPKVDVVELLEAKLGYTFQMKGLLIEALTHSSQQESGATYCYQRLEFLGDAVLDILITRHLFLSHKDTDEGELTDLRSASVNNENFAQVAVKHNLHQFLQHSSGFLQDQITEYVNSLESSSMDRASLLSSGPCRGPKVLGDIVESIAGAILIDSKLDLDLVWRVFKPLLSPIVTPENLELPRFRELNEWSDKNGYFIGIKCENRGDSTMAILNLQLKDLLLVRQGCGKNKVDAKAHAASLLLRDLEEKGLIIPRNASRVEQLEKNSGTVKHCNNVLDVMDTQNVAPPRQKEVAVLSTTTPGSVLDKPLVVKVKLSKGGPRISLYESCKKLQWPMPTFEFVKVEPSVCSSSCGSSQKVAPQGFAFASTITLHIPNGDVISLTGDGRADKKSSQDSAALLMLYELQRQRRFQVQEV

SEQ ID NO: 7986 - protein, 551 aa, Zea mays
  VARIANT 150..551: note = Derived polymorphism lacks residues 150 to 551
MSKQPAVIPHAQTGSGDPPSSSGARGADVAPSQPETGRIRYAKAQSDAAGDRPRRRVTYMEGSFEAAEQPPSHDDGAGDTARPQARTQRVGPTYTPVSQRRREPAADQQPQVYGEYPRAGGREEPPAASAASSRRRGRAVPGPGEATPPQATGHSAAAGGALPPVGSLPSPGTAASTSGGIPESSGGAPPVQARWGWGGLKTNKTIERVSTLQDEPVLPSSGGALALPRRGGLKTNKTIERVSTLQNEPTPSSGGAPAPALPRRGGLKTKKTIERVSTLQNEPVGLGLDGSGGPEPPATQAHDVPQHPQPEPEPRLPQQPEGPYVYQPPKQSSSSSSGTKRPAGASPTLIRRKEKAKKLLAVCLTLCCILFWLLVVCIGLAILVVYLLYHPKGPRIHVSTATLNAGYIDELPPPHLGKALNSDLYVLAAIYNPNAKVDVALRYMQLDLYFQGRLIGTQAVWPPLYQKPGDSALRSVHLVVSEVVMTQEDAEVWKNVTTGGGLVEMHLQGKFYVQLNFGRWLPFRYTVRPTCALWLDPPPAGALRRARCSNR

SEQ ID NO: 7987 - protein, 694 aa, Zea mays
  VARIANT 138..694: note = Derived polymorphism lacks residues 138 to 694
  VARIANT 125: note = Ancestral polymorphism is R, Derived polymorphism is H
  VARIANT 122..694: note = Derived polymorphism lacks residues 122 to 694
MKLTCLSAAAGGGGGYHSPASHLLELEGVRFLLDCPIDLSALAAFAPVPLAGDAGGLIRAVPRYWLPAAVKEGGVDAVLVSSATGMLGLPFLTGLPGFTNTKVYVTEVAARIGKPMMEELVEMHREFVRYYGPDTDASPKWMEGEELNELMSMSQKAVIEGRENDLTSLVPLYRSLIGANNIQPSNQQNLIDMSCPGNVEECMHKVQSVKYGEEVCFNGIFMLKASSSGLELGNSTWTIQSPRASITYLPSSVFVSAHALDFDYSSLKENDVILFSDFSSLNDTDEDNEKLNEHSMDETDSSLCRYSVFRDDGADADERVPFVCNNDDITEEIERISFICSCIFGAVKSGGSVLIPIGRLGVILLLLELISEMLHSSSLKVPIFVISETAEEIFAFTNTLPEWLCKSRQEKLFAGEALFGHVELLKEGKLFLFPHLHSKGLLAAWKEPCIVLCPHWSLRLGPAVHLLRRWHADKRCLLVVEQGNGAELSLKPFMPLAIQVLECSFLSGVRAGKIDPLLGVLKPKFVMLPEGLKSRCSIKGVPWSFLYYSKGKTIELSNLREDIEVHLATDVAFRLQPRQLNETTAVARLRTKLLVSNGRYQLASAEKQPDQSKRHLLHCSTIDPGRLLSALREKGMVCSFAADDSPTASESSVLVTSPGDALVRITPDTTVIYCDDERTSNQIYDALSSVCKGI

SEQ ID NO: 7988 - protein, 388 aa, Zea mays
  VARIANT 263: note = Ancestral polymorphism is M, Derived polymorphism is T
MLRLQKHLSLRLQEHLLPLHRSASLIQLSLQRSLLSTGSATYSSPGHFAADDYLVSTCGLTREQAANAAKCISHWKSSSNADAVLSFLTGPALGLSNAEIALLVAKDPRVLSCSVDNTLRARLARFRSHGFSAAQISEFVRVAPCFFRKFNIDVKLGFWMPFLGSPDRFLRLVKRNFYLLSSDLDKVVKPNIQLLQECGLSIQEIGSLCVANPRLLTSKPDRIRAVLVRAGEMGVPRKTLLFRHAVTAVAGLCPETFASKLKMMANILGCSEAEVARMVQKNPLVLRRSMETIQRACEFLINVVGVGTNFILDKPTILMYSLERRLVPRHYVMKVLQDKGLMRKDHSFYTLAAISASVFCSRYVHPHKNVLPNLAAAYASGCNGKIAI

SEQ ID NO: 7989 - protein, 191 aa, Zea mays
  VARIANT 44..191: note = Derived polymorphism lacks residues 44 to 191
  VARIANT 48: note = Ancestral polymorphism is A, Derived polymorphism is E
  VARIANT 55: note = Ancestral polymorphism is E, Derived polymorphism is K
  VARIANT 77: note = Ancestral polymorphism is L, Derived polymorphism is H
  VARIANT 114: note = Ancestral polymorphism is T, Derived polymorphism is M
  VARIANT 122: note = Ancestral polymorphism is R, Derived polymorphism is C
  VARIANT 128: note = Ancestral polymorphism is G, Derived polymorphism is D
  VARIANT 154..191: note = Derived polymorphism lacks residues 154 to 191
  VARIANT 155..191: note = Derived polymorphism lacks residues 155 to 191
  VARIANT 160: note = Ancestral polymorphism is R, Derived polymorphism is Q
MSGRRQAWQFAAALVFFHGSEYVLAAAFHGRQNVTATSLLISKQYVLAMGFAMLEHLTEILILPEVKEFWFVSNIGLLMVIIGEIIRKLAVVTAGRAFTHVIRTYYEDQHQLITHGLYRFMRHPGYSGFLIWAVGTQVMLCNPLSTVAFTLVLWRFFSKRIPYEEFFLKQFFGSEYDEYAQRVHSGIPFIK

SEQ ID NO: 7990 - protein, 344 aa, Zea mays
  VARIANT 104: note = Ancestral polymorphism is Q, Derived polymorphism is L
  VARIANT 61: note = Ancestral polymorphism is G, Derived polymorphism is A
  VARIANT 41: note = Ancestral polymorphism is S, Derived polymorphism is W
MCEAPRLGNRAGAGDPAAADVDVVTTGGRRRIPAHSSVLASASPVLGSILERRLRKDRESGKPGRSVVRIRGVTDDAAAAFVRLLYAGRCGEDEDDDMEEHAVQVLVLAHAYQVPWLKRACEGAIGARLTADSVVDVLQLAGLCDAPRLHLRCARLLAKEFAAVERTEAWRFLQENDPWQELHVLQRLHEADMRRRKWRRKRAEQRVYMELSEAMDCLDHICTEGCTEVGPAGRAPAPAPCARYATCRGLQLLIRHFSQCHRKSCARCQRMWQLLRLHSALCDRTDRCNTPLCMRFKQQEQDKAAAKGGDDGDKWGLLVKKVKTARVFSSLANRKQMSTTTTQC

SEQ ID NO: 7991 - protein, 121 aa, Zea mays
  VARIANT 1: note = Ancestral polymorphism is M, Derived polymorphism is I
  VARIANT 13: note = Ancestral polymorphism is P, Derived polymorphism is S
  VARIANT 45: note = Ancestral polymorphism is A, Derived polymorphism is T
  VARIANT 54: note = Ancestral polymorphism is Q, Derived polymorphism is R
  VARIANT 61: note = Ancestral polymorphism is E, Derived polymorphism is A
  VARIANT 72: note = Ancestral polymorphism is E, Derived polymorphism is V
MASSPRSPPAPTPEFEISRQSRLFAALLLGYLPNDRALWPVAVGAEELAKKRGQYAAFKGEFLRNPYSEIMEQIDRDVKRAHPDMHFFCSDSSFAKSNQESLKNALLIFAKLNAGIGYVQG

SEQ ID NO: 7992 - protein, 513 aa, Zea mays
  VARIANT 320: note = Ancestral polymorphism is L, Derived polymorphism is Q
  VARIANT 280: note = Ancestral polymorphism is H, Derived polymorphism is D
MGKRDFERLHHVAFFEAMATELPDEYASQEVNHLTLSYFAVGGLSLLRELDRINKDEIAKWVLSFQVHPAANDDIGSGLFYGFCGSRSTQFPLPNVKDPCHNVSHLASTYSALAILKIIGYDLANIDCKALLLSLKMLQQPDGSFMPTHIGAETDLRFVYCAAAICSMLDDWTGMDKLKAKEYILNCQSYDGGFGMVPGSESHGGGTFCAVAALHLMGFIQVDLASDLRDSTSIDTCMLLEWCLQRQVTDGGFQGRRNKLSDTCYAFWVGGVLKILGAYHLIDSCALRSFLLTCQSPVIDLRTSSISLIPFSDSSGAQVLYYAVLTLRLSGHKAVYAAVERPLQFAQTAAIMEIVHGLVGLVRSPVSATLPQIGSRLFLTWGVLWSFPETQSHLLVTTLVISWSITEIIRYSFFGTKEAFGFAPSWLLWLRYSTFMLLYPTGISSEVGLIYIALPYMKASEKYCIRMPNKWNFSYDYFYSSVLALLIYVPGSPHMYRYMLSQRKKALSKAKAA

SEQ ID NO: 7993 - protein, 861 aa, Zea mays
  VARIANT 736..861: note = Derived polymorphism lacks residues 736 to 861
  VARIANT 210: note = Ancestral polymorphism is G, Derived polymorphism is R
  VARIANT 209: note = Ancestral polymorphism is D, Derived polymorphism is Y
  VARIANT 150..861: note = Derived polymorphism lacks residues 150 to 861
  VARIANT 126..861: note = Derived polymorphism lacks residues 126 to 861
  VARIANT 89..861: note = Ancestral polymorphism lacks residues 89 to 861
MLYVGMMFSWFAWHVEYHDLHSLNYMHYGAPKTWYGVPRDAALAFEDVVRVHGYGGEVNSLETFALLGDKTTVMSPEVLVDSGVPCCRQLVQNAGEFVVTFPGAYHSGFSHGFNCGEASNIATPEWLRVAKEAAVRRASINRPPMVSHYQLLYELALSLFLRDPSNGAMEPRSCRLKEKKKSEGDQFVKKIFVQNVIEDNKVLCYFLSDGSPCIILRVNYNDGSPLSTLLSKFQSTTDSRIAHDQCRSGSEMNVNSIISDAVPLNAHSALDLLASAYGDPSDSNEDVMNQKIQVPNASNELINHAIESQPITSSNGDCDGTKVSLSSKECQQGPLSQGSKCIGNSNTLNGPKGVHTRNKDLLKMVLSEGFQPKYIYSETHKKVQCEPSSSNKTSMETPCSTNYHVSHNSATICMNSKRGSTTMVNNLATSVVKPDKDSSRMHVFCLEHAIEVEKQLQAIGGADIFLLCHPVPYNRVIYEAFGYGSPSDSPVKLRTYSRRQGRTKKILLAGRWCGKVWMSNQVHPYLADRIKIHEPEETDKTFPSDQKSNAEPVEDSSREAASTRKSSSRAIEGKTSKREKESLEKANAKNPKFTEEDNSKSLEGTAEASTRKIKSRSVLEKTIKKEKEHVEKAKTKKLKHTEKVSEALKGPSEASFPAPAGMVVRSSSRIANRKSKMEEEDNGSANPPKPKAEGDKDNPAGRSRAKSPRQKTKADTKKKTKETRAEKRRAPSPASQKDEEEQAYDAEGCSITKQRLSLRKKGAKTEEKQQTEESRYRGRAPPSSPERKEEYASDIEGCSMSFGTKQALSLHKNDICPEKGCCRKFFSHKYLLQHRKVHADDRPRNARGRAAAWRSSGHGLG

SEQ ID NO: 7994 - protein, 105 aa, Zea mays
  VARIANT 89: note = Ancestral polymorphism is R, Derived polymorphism is G
  VARIANT 79: note = Ancestral polymorphism is D, Derived polymorphism is N
MAEIAGDEAPTVPPPHPHISGDQCTSTPASTGSSKPPLRTTKPGVKRLILTASVLLSFLLGLPFLLKSTEIHHSLIPSDAITALAHRLGSTPPSFPCGLHAVFLW

SEQ ID NO: 7995 - protein, 164 aa, Zea mays
  VARIANT 107: note = Ancestral polymorphism is R, Derived polymorphism is K
  VARIANT 94: note = Ancestral polymorphism is M, Derived polymorphism is T
  VARIANT 65: note = Ancestral polymorphism is Y, Derived polymorphism is C
  VARIANT 20: note = Ancestral polymorphism is T, Derived polymorphism is I
  VARIANT 7: note = Ancestral polymorphism is P, Derived polymorphism is H
MVKIPSPRRLFRSRSRSTTIIGGGGADICAMVAEHERIEWEVRPGGMLVQKRRSTEDDAAAAVEYILVRVSTTGWQWHDVSIDATATFGDLKVMLSLATGLWPREQRLLYRGKERDDCEHLHMVGVQDKDKVLLLEDPAVKERKLRSTTLAQLMGVPCHSFIQV

SEQ ID NO: 7996 - protein, 854 aa, Zea mays
  VARIANT 266: note = Ancestral polymorphism is P, Derived polymorphism is S
  VARIANT 371..854: note = Derived polymorphism lacks residues 371 to 854
  VARIANT 429..854: note = Derived polymorphism lacks residues 429 to 854
  VARIANT 433..854: note = Derived polymorphism lacks residues 433 to 854
MDKSSALEYINQMFPTEASLSGVEPLMQKIQSEIRRVDASILAAVRQQSNSGTKAKEELAAATNAVQELMHKIHEIKTKAEQSETMVQEICRDIKKLDCAKRHITTTITALHRLTMLVSAVEQLQVMASKRQYKEASAQLEAVNQLCSHFEAYRDVPKITELREKFKNIKKILKSHVFSDFSSLGTGKETEDSMLLQQLSDACLVVDALEPSVREELVKNFCSKELTSYRQIFEGAELAKLDKTERRYAWIKRRLRSNEDTWKIFPPSWHVDYLLCIQFCKITRSDFTLNSSAVLPVKILLFRAQLVDILNNLKEKPDVATLLLAFQRTIEFEEELAEKFSGGTTNARNKETTSDDEDEGGGHNKIVSDIRKKYEKKLAAPSDEDKDKQKDLSVPGAGFNFHGIISSCFEPYMTVYIELEEKSLVDQLEKLVQEERWEIEEGSQTNILSSSMQVFLVIRKSLKRCSALTKNQTLFNLFQVFQRILKAYAAKLYARLPKGGTGIVAAATGTDGQIRTSDRDERMICYIVNTAEYCHQTSGELAENVAKMINPQFADKVDMSEVQDEFSAVITKALMTLVHGLETKFDAEMVAMTRVPWATLESVGDQSEYVNGISSILSSSIPVLGTLLSPTYFQYFLDKLAASLGPRFYLNIYKCKHISETGAQQMLLDTQAVKTILLDIPALGKQSTGAASYSKFVSREMGKAEALLKVILSPVDSVANTYRALLPEGTPLEFQRILDLKGLKKADQQAILEDFNKHAPAPAPAIKHPAVAPTVATPVATASVQIVPSVATPAVSITPSMASLKGALANQEDVLARAAALGRGAATTGFKRFLALTEAAKDRKDGPFRKLFNA

SEQ ID NO: 7997 - protein, 73 aa, Zea mays
  VARIANT 9: note = Ancestral polymorphism is G, Derived polymorphism is D
  VARIANT 10: note = Ancestral polymorphism is V, Derived polymorphism is I
  VARIANT 13: note = Ancestral polymorphism is M, Derived polymorphism is T
  VARIANT 18: note = Ancestral polymorphism is K, Derived polymorphism is N
  VARIANT 32: note = Ancestral polymorphism is G, Derived polymorphism is R
  VARIANT 34: note = Ancestral polymorphism is I, Derived polymorphism is V
  VARIANT 56: note = Ancestral polymorphism is D, Derived polymorphism is E
MFIILKQIGVEKTHRDTKYVLFLDDDVRLYPGTIGAITKEMEKNPEIFIQTGYPLELPSGSLGSYCIYEYHMV

SEQ ID NO: 7998 - protein, 355 aa, Zea mays
  VARIANT 130: note = Ancestral polymorphism is C, Derived polymorphism is S
  VARIANT 145: note = Ancestral polymorphism is A, Derived polymorphism is S
  VARIANT 171: note = Ancestral polymorphism is I, Derived polymorphism is T
  VARIANT 199: note = Ancestral polymorphism is Y, Derived polymorphism is D
MSAYCGKYKDELIKNAAYIGTPGKGILAADESTGTIGKRLSSINVENVEENRRALRELLFCCPGALQYISGVILFEETLYQKTKDGKPFVDVLKEGGVLPGIKVDKGTIEVVGTDKETTTQGHDDLGKRCAKYYEAGARFAKWRAVLKIGPNEPSQLAIDLNAQGLARYAIICQENGLVPIVEPEILVDGPHDIDRCAYVTETVLAACYKALNEHHVLLEGTLLKPNMVTPGSDSKKVTPEVIAEYTVRTLQRTVPAAVPAVVFLSGGQSEEEATRNLNAMNKLSTKKPWSLSFSFGRALQASTLKAWAGKVENLEKARAAFLARCKANSEATLGTYKGDAAADTESLHVKDYKY

SEQ ID NO: 7999 - protein, 130 aa, Zea mays
  VARIANT 61: note = Ancestral polymorphism is T, Derived polymorphism is A
MALLAVQGMAMSTAAAALPSHNHGAVSSYVSTSSYALAASAAFPRARAAFAVGAVLSATVTPVLDVYCGRGDKKTKRGKRFNHSYGNARPRNKKKGTGPARLFAPPAPPRKDQFDDGEIISIEIDEDILE

SEQ ID NO: 8000 - protein, 582 aa, Zea mays
  VARIANT 317: note = Ancestral polymorphism is L, Derived polymorphism is H
MGAAVGKPAFGVAVAPKTQAEERLALAEHALLQWTRSPGADSGIWDAGASYTNRGLLAAVDEVLLLAAENPFPLPEAASARRRLDSAVGAAASRMVEEFLRVRVWNASLLRGAVHRLSLASTNQSRLIFPSARERNSSAGTGGVVDASDGSRSRASSSVPHEVAALLDTEVWDDLDLICPAGVSVLHEIALRVVRAGCTEVLFRAFANAPCDVLDSFLSILRVECSQQTTEAVIKRWTTVTEIIGKAMVAMRRQLYAQNPGAFDGFRDEYLLAIAENRILILLDFANGFTSITSHEKLVYMLGMYEALTDAAPSLLLLLSGARKEAISERTQGILTKLAGAVRIMVSGAIAKIQGDSLFPHTPSAAGGVHPLTRDAMTCVELLARHRTTLDLILAGADERGSLAGVVSDLIAGLERNLQRRFAVACADAGGSRHLFLANNISFVLSRVADNDGVASLLGDAWAARRRSRVEQHVASYAASSWGPVVALLDTTACGRGKSAKVLAEFNAAFNRSRDSEMCREVPDPVLRAVLRNAVSEMVVPAYCAFLQKQPKLGKSARYTADDLVELLSELFEGESTDGIKI

SEQ ID NO: 8001 - protein, 615 aa, Zea mays
  VARIANT 64: note = Ancestral polymorphism is S, Derived polymorphism is C
  VARIANT 108..615: note = Derived polymorphism lacks residues 108 to 615
MALTDATAFPYGLRVLVVDDDPTWLKILEKMLRKCSYEVTTCGLASVAIQILRERRNKFDIVISDVNMPDMDGFKLLELIGLEMDLPVISQYSIPTHVFLQVPFFNIYYQNTKLLQSVSTVMSIDGETSRVMKGVQHGACDYLLKPVRMKELRNIWQHVYRKKMHEVKEIEGNDSYDDLQMFRNGVEGFDERDLFMRADSDTMRKRKDVNKDHADQDSSDGATVKKARVVWSVDLHQKFVNAVNQIGFDKVGPKKILDLMNVPGLTRENVASHLQKYRLYLSRLQKQNEERIMGAARQDFNQKGPSDHLNLRSSFQEQPGNLSNGCQHSSQKVEAQTNILDPHLDDTKTSMPLKVPDKNGISASDAVDPHNITTASPLSGVFSFERMPVNQDRKLSETMILECESWSGSVPPKQFMQYPKHNHERCDLLGDYSCLPKPDLEHPIAPGHLYAPPPVISMSYNVEKDVRDFSDVKPDLLGCMKSLSPALTCTVESVSAQLSDSVVTSTNSDRKFSSVEGLSSIKDCDFDQERNGAILFTSEEASILCGTDFTCLPEDLSGYQLQGVSFGNKGLNSIDLYQCNDTMLIPGLQNNWYDDDVEFSSETVEFPLLDGGLFA

SEQ ID NO: 8002 - protein, 222 aa, Zea mays
  VARIANT 151: note = Ancestral polymorphism is T, Derived polymorphism is I
  VARIANT 82: note = Ancestral polymorphism is A, Derived polymorphism is V
MAQNLDGLRLDSVEGVDEDGFGGFTAAHDEVLHHHVLRSNRSWSGETMSGPRMGTQPDGSHLLGRSKEITHMVGGLEKAYLAAKSLLQAAKICNNMAMAISMLGVSEAFALGQNLGIKATTVTDIFNCSSARCWSRDHDGKVIPEEVATTTVYLKDTIGKEAVQEIIINLSKNRDWFIHDTYMFLQCCICPIFLYFSKCSLYAHLQYSEGKILVEDIVKQMS

SEQ ID NO: 8003 - protein, 161 aa, Zea mays
  VARIANT 37: note = Ancestral polymorphism is F, Derived polymorphism is L
  VARIANT 36: note = Ancestral polymorphism is R, Derived polymorphism is C
MAAALGAVLRRLHTAAAQPPRLTKFALHPPKFVSLRFPDDQRFLLPHIRRSCLPQVEIEFADGSSFHLSAEFLRVYSPAADSKIRSVGGEKVIFGRRHVGIMSAESVGNYGVRILFDDLHKTGIFTWDYLHHLGSNKFSLMRNYIRTLRKHGLSRDPQRRK

SEQ ID NO: 8004 - protein, 590 aa, Zea mays
  VARIANT 364..590: note = Derived polymorphism lacks residues 364 to 590
  VARIANT 347: note = Ancestral polymorphism is R, Derived polymorphism is W
MEMEAVESHGGAGRRTPKRDRGISWACVFILALYMASLALKPSGCGLCTACTRTCIHGGDGGTRPDITPASNCFQFIAYFAVSTNLVNYLKDRLHQGSKAAANGVTNWMGTSAITPLVAAFLADAFLGRYWTIALFLVISVLAYVVLTVSAAAALESAAFYAGLYLLALGGALQPVLSSFGADQFDEEERGRQSSFFNWFYLSINVGSLVGGTVLVWVQSSVSWGLGYGIPALFSALAVAAFLAGTATYRRHQPPAGSPLTRVAQVVVAACRKCGVQVPEDASTLHECEDVGGMSAIQGSRRLAHTDQFRFLDKAASVEPSDDKSRPASAWRLCTVTQVEELKCVLRLLPVWASGIVFAAAYTQMTTTFVLQGDTLDPYVGGFRVPAAVLSVFDTLSVMLWVPLYDRLVVPLARRATGHDRGFTQLARMGVGLVVLTAAMLAAGALEVARRRVIARHDMYDTNTGAGGDGEYLPLSIFWQVPQYVVVGASEVFTFIGQMEFFYDQAPDAMRSLCSGLSMTSFALGNYVSSALVTVVARATARGGRDGWIPDDINRAHLDNFFWLLAMLCAGNFGVYLLIARWYTYKKTVD

SEQ ID NO: 8005 - protein, 390 aa, Zea mays
  VARIANT 341: note = Ancestral polymorphism is S, Derived polymorphism is I
  VARIANT 296: note = Ancestral polymorphism is P, Derived polymorphism is S
  VARIANT 180: note = Ancestral polymorphism is T, Derived polymorphism is I
MSVTSLLAQPIPSLFAPSPAPSRARRNRTSRRRFLAATKLTMDGTSFDLTEHEGSNLSPFLLKLFNEWDDRKTRGLFHHDISSCETKVLPGVHNFVATLIEGRDQKKRPTEFTMNQVLQPFVSEKFNFTKVSPLEVIFRFNDTEKDSAQYFDGVPDTVSASSSAILINVSPIGYCHVLLTPKIQDCLPQRIDQESFLIAMYVAREARTPFFRVGYNSLGGFATINHLHFQAYYLKVQYPVEKAITEKLKTLGNSVSIFHLVDYPVNGFVFEGGASLEDLSDVVSKVCIFLQENNRPFNVLISESGKRIFLLPQCYAEKQLLGKASQEFLDMRINPAIWELSGHLVLKRRKDYEEASEANICRFLVEAALSETEFQELNLCVLDFLTSSLG

SEQ ID NO: 8006 - protein, 483 aa, Zea mays
  VARIANT 31: note = Ancestral polymorphism is I, Derived polymorphism is T
  VARIANT 43: note = Ancestral polymorphism is C, Derived polymorphism is R
  VARIANT 80..483: note = Derived polymorphism lacks residues 80 to 483
  VARIANT 117..483: note = Derived polymorphism lacks residues 117 to 483
MLCFTRRTALLCSAPLPCSALPLDFVILLPIVPVYQSLKQYLCRAISKGSVAPHFIAESSHQKDFFLCFCYTLLSLPTGSVTDSSLAYVAKKKSSGTDSGEENMSKKDLALHQAIDQITSAFGKGAIMWLGRSQGHRDVPVVSTGSLDLDMALGTGGLPKGRVVEVYGPEASGKTTLALHVIAEAQKNGGYCAFVDAEHALDPALAESIGVDTNNLLLSQPDCAEQALSLVDTLIRSGSVDVVVVDSVAALVPKTELDGEMGDAHIALQARLMSQALRKLSHSLSLSQTILLFINQIRAKVATFGFGGPTEVTSGGNALKFYASVRLNIRRIGLVKKGEETIGSQIAVKIVKNKHAPPFKTAQFELEFGKGICRSSELFELGLKHKLIRKSGGSYYSFNGKAFNGKSNLKSYLTENKSVANDLEMELKRLMGTDASKEQEAGDSSQSDFPEESVTPEASSEEDLGAIIEVVQQEENSHCVKSW

SEQ ID NO: 8007 - protein, 855 aa, Zea mays
  VARIANT 71: note = Ancestral polymorphism is R, Derived polymorphism is T
  VARIANT 630: note = Ancestral polymorphism is D, Derived polymorphism is Y
MAHAKSIPEPADIMFFFFFFISGHKTSQMLLTGCIGALVRCWSLGSSQRWKQWRPKKVLFWLMMPRYHLYTEYLHAGICRAFHPSVSKLSAIFPFIEASRPRSKPGIQALCSLHVALDKAKGLLQHCADCSRLYLAITSETVLLKFEKSRSQLQESLRRTESIVTEDIGCKIVEIVGELEEIVFTLDRSEKEAGDELIKLLQRNNKTNGSSDSGELEVFHMSALKLGITSSRAALTERRALKKLIEKARSDEDKRKELVVSYLYNLMRKYSKFFRSETGDDTDSQGSSPCSPTVLGMDDMYGPYNNGRAFSRQLSSIQSFNSRFGSFNSRLGSFNCRRGGGPRSENMSIPPEELRCPISLQLMYDPVIISSGQTYERICIEKWFNDGHSTCPKTQQQLAHLSLTPNYCVKALIASWCEQNDFPVPDGPPGTFDVNWRLALSDTEAAGCVSVESFDCANAKSVKVVPMENVRKEEPANSESGTLDDGSCNDFDLNEGYGNLLLLLHERSNMNKQCRLVEQIRYLLKDDEEARIQLGSNGFAEALVEFLRNAVNDGNEKAQEVGAMALFNLAVNNNRNKGLLLSAGVTDLLEQMISNPRLSGPATALYLNISCLPDAKAVIGSSQAVPFLVDRLYSQDGSDTRGSSCKHDALYTLYNLSSHQASVPALLAAGIVDALHCLVTESPGSEEGLGWTEKALAVLISLAATQAGRKEIMSTPGLVSTLAMLLDTGESTEQEQAVSCLLVMCGADDKCIAPVLQEGVVPSLVSISAAGTGRGREKAQKLLKLFREQRQRDTPPPQQQQQQLLQSQLAEGGNGGGGAIVCHRESKPLCKSKSRKLGRTLSSLWKNRGFSLYQC

SEQ ID NO: 8008 - protein, 168 aa, Zea mays
  VARIANT 8: note = Ancestral polymorphism is P, Derived polymorphism is T
  VARIANT 74: note = Ancestral polymorphism is E, Derived polymorphism is D
  VARIANT 152: note = Ancestral polymorphism is V, Derived polymorphism is L
MSDRELRPLRSIRITGDGRCLFRSVAYGACLRRGKHAPSDSAQKELADELRAKVADEFVKRRGDTEWFLEGSFESYVRQMRKPHAWGGEPELFMCSHVLRMPITVYMYTGSSDGPRIIAEYGQEYGKDDPVRVLYDGYGHYDALQPSLARCVGHRGLRCLSFFYRTAA

SEQ ID NO: 8009 - protein, 74 aa, Zea mays
  VARIANT 69: note = Ancestral polymorphism is P, Derived polymorphism is S
  VARIANT 47: note = Ancestral polymorphism is G, Derived polymorphism is R
  VARIANT 21: note = Ancestral polymorphism is M, Derived polymorphism is R
  VARIANT 18: note = Ancestral polymorphism is S, Derived polymorphism is L
  VARIANT 13..74: note = Derived polymorphism lacks residues 13 to 74
  VARIANT 9: note = Ancestral polymorphism is A, Derived polymorphism is G
MAASAAFGAKASQTMSLSKAMLDQQRMDDVNNKGEPELYQDAVLSSGSYCWWGLLIQGDVGLQEEKAQPGAQEI

SEQ ID NO: 8010 - protein, 188 aa, Zea mays
  VARIANT 72..188: note = Derived polymorphism lacks residues 72 to 188
  VARIANT 41..188: note = Derived polymorphism lacks residues 41 to 188
MLFHKIVMAEFKIGRLDGQPPRVRNVPIAVTPEGFWCCPSQAALHKTTKSPNQQGRPRGGASPAPSKASSVQRVPTISLEKRAQSTPTRSRTNSDEQVCPPANVVAAPDPSKAVPAPAPEKRPKQPKISVGFGQLGTSGLKVVLHGMEGVAVKMIVHKSILAENSTFLPIESRGSLRCHALKCQIVRM

SEQ ID NO: 8011 - protein, 269 aa, Zea mays
  VARIANT 253: note = Ancestral polymorphism is S, Derived polymorphism is N
  VARIANT 216: note = Ancestral polymorphism is E, Derived polymorphism is G
  VARIANT 206: note = Ancestral polymorphism is R, Derived polymorphism is I
  VARIANT 126: note = Ancestral polymorphism is P, Derived polymorphism is S
  VARIANT 98: note = Ancestral polymorphism is D, Derived polymorphism is N
  VARIANT 61..269: note = Derived polymorphism lacks residues 61 to 269
  VARIANT 59..269: note = Derived polymorphism lacks residues 59 to 269
  VARIANT 48..269: note = Derived polymorphism lacks residues 48 to 269
MTSLVYPPYLPPASLPQSHLALLPSRRRPLYLRPPSLPPRPPALPTRYPPPLIPFDYARPQSVASTGVASPTVADVPTVAPLPASTALRLASASSIVDASGSSSPASPIRSSSVDISTVAPLLASPSWRLVSAPSAVNASGSSSLASAHSGTSSPAPMPRALLVSRSEYMLLFWLPLDNVIGCAANWCRVIPSSSLPLCDLAVDFRLIYLLKLYNEDFEDAFLKATIKYYSKKAQAWIMVDTCTEYMVKAGQSVWAVQLASLLVFGFGS

SEQ ID NO: 8012 - protein, 428 aa, Zea mays
  VARIANT 6: note = Ancestral polymorphism is T, Derived polymorphism is R
  VARIANT 20: note = Ancestral polymorphism is M, Derived polymorphism is V
  VARIANT 96: note = Ancestral polymorphism is A, Derived polymorphism is G
  VARIANT 133: note = Ancestral polymorphism is L, Derived polymorphism is R
  VARIANT 139: note = Ancestral polymorphism is G, Derived polymorphism is V
  VARIANT 157: note = Ancestral polymorphism is S, Derived polymorphism is F
MKMSTRGQPAEGHLWLVFTMLFVTSAVRSVGASSFAPPPSVSVSSPAYDPVIKVVGKVYCYRCFDEAHPDESHGKKHLQGAMVKVTCQADDQALVAFGYTRSNGKYSVVLKGLPISSSSSSNYGAADSCKVELHGAPGGSDCNVPIELNLSGLSVYSRSSEEVVFKANQIMAFASKNAFGCSSKPQTQSSSPVHPYYSSPPLIPHQYPSPPVPAATHRSPPPLPLPLPLPYQYSAPPPAAPAANQLPSPAYQYISPPPYQQQQSMLPNSYQTPPPPQGTESPVLQPRKYLPPPYYYYNSPPAPQHHQHSYVPPPPLAYQYPPPPLIHKSPLLPSSSPAAPYHYNSPPTYQYPPPPYSYQPSPPPAGLYSPPLLPPNAPEHLHPNVPHAKSPQPPLHTPPPPNGAVPSPSPTTPPLRYYTSPPPTDQLS

SEQ ID NO: 8013 - protein, 452 aa, Zea mays
  VARIANT 136: note = Ancestral polymorphism is D, Derived polymorphism is Y
MASGATLSWVKTPFDTRRFHDLSNLSFRCRNPFGSIQPWWLQTDQDSSLIKVRVAADYSDSMPDSKYTRDRGYHPLEEVKERPKKKDLLLTDIETARTVVEANSKGLLVFPARVHNEPHGHVSWSEFQYVVDEYGDIFFEVPDSENILEDDTANNPVTVLIGMDGPIIGESSVAISDFSDYMDGENFMDVPDEHHTKIDTEITDILIEWGMPATMRAIHPIYFAKCLTKAIHNNNGEKMDSPSNGLSIVGYLRPAFIEEESYLRSMFHGDNGGYSSDWKVNETDEYNRETRPVSGTNRLIDDDKSRFDFNHAETRTDSMIYKLEIMTIELFSMYGKQFKIDPQDFQDSEPDILANSASSIIERIKENSDQCAAALRSLCRRKKGLTVEEASLIGVDSLGIDVRAFSGLEVKTVRFSFNAQALSERSAEKKIRRMLFPRYQRKNVKASTEDES

SEQ ID NO: 8014 - protein, 84 aa, Zea mays
  VARIANT 2..84: note = Derived polymorphism lacks residues 2 to 84
  VARIANT 23: note = Ancestral polymorphism is C, Derived polymorphism is S
MQVRQRLRRVSIAPQFLPRNQICLCVCRCKMYPDMVEQVTTTTTTQTLIMGVAPSTGGFEAAAGAENGGCKCGASCTCDPCTCK

SEQ ID NO: 8015 - protein, 410 aa, Zea mays
  VARIANT 129: note = Ancestral polymorphism is G, Derived polymorphism is V
  VARIANT 139..410: note = Derived polymorphism lacks residues 139 to 410
  VARIANT 191: note = Ancestral polymorphism is E, Derived polymorphism is K
  VARIANT 219: note = Ancestral polymorphism is W, Derived polymorphism is S
MRPPPTALRLPPPPDLPSRIRDEATNDELSSADAATTTRAPRTVEVAMWRRCCCNCQVDESDQHENGHVKATINNIDGAIMGLKDSTTGKVEPQDAAPQIDIPVLSLDELIEKTDDFGSTALIGEGSYGRVYYAILDNGTKMAVKKLDSTENEPTAEFLTQVSLVSRLKHENFVDMLGYCMERNLRIVAYEFATMGSLHDVLHGRKGVQGAQPGLALDWMQRVQIAVDAAKGLEYLHEKVQPSIVHRDIRSSNILLFEDFKAKIADFNLSNQAPDMAARLHSTRVLGTFGYHAPEYAMTGQLTQKSDVYSFGVVLLELLTGRKPVDHTMPRGQQSLVTWATPRLTEDKVKQCVDPRLMGEYPAKGLAKLAAVAALCVQYEAEFRPNMSIVVKALSPLLVTKQTPSPVVDS

SEQ ID NO: 8016 - protein, 149 aa, Zea mays
  VARIANT 37: note = Ancestral polymorphism is Q, Derived polymorphism is R
MAAVSSTSTAASYFSPQPQLPISTADPAASKSRLMRQPRRSSSFVMVEASSASGSDGGVARTKSLTEDDLEELKGCLDLGFGFAYSEIPELCGTLPALELCYSMTRRFLDEQKAPGQDEELEPASPPLPNWRISGPGKNHFSLLSFRNW

SEQ ID NO: 8017 - protein, 616 aa, Zea mays
  VARIANT 461..616: note = Derived polymorphism lacks residues 461 to 616
MAAAVAVLRAALRRGRPAAASLLHRLPNPSARSLPPPPPLGRALRPLSRLGFSAGFGHSSSTEDFGFGYSPATEDSAAAAKPKTKTKARKHPMKQSRFDFTKVDAALLPTVILVGRPNVGKSALFNRFIRRREALVYNTPGDHVTRDIREGVAKLGDLRFRVLDSAGLETAATSGSILARTADMTGNVLARSQFAIFLIDVRDGLQPLDLEVGQWLRKHASGIHTLVAMNKSESLDEHGFLTAAAGEAHKLGFGDPVAISAETGLGMAELYEILRPLFEEYMFQLRNNDLNQDDPISEVETEAHDGDESKLPLQLAIVGRPNVGKSTLLNTLLQEQRVLVGPEAGLTRDSIRAQFQFDSRTVYLVDTAGWMERSGKEKGPASLSVVQSRKNLMRAHIVALVLDAEKIAKSKSSMNHPEIVIARQAIEEGRGLVVIVNKMDLLRDNQTLFNKVMDAVPREIQTVIPQVTGIPAVFVSALEGRGRIAVMRQVIDTYEKWCLRLSTSRLNRWLRKVMSRHSWKDSATQPKVKYFTQVKARPPTFVAFMSGKTQLSDTDTRFLTKSLKEDFDIGGIPIRIIQRSVPRKAYAKRNNTRNTGPRVVRMKTDKRTAVSDPALS

SEQ ID NO: 8018 - protein, 480 aa, Zea mays
  VARIANT 29..480: note = Derived polymorphism lacks residues 29 to 480
MGSTGREPEVTRADFPDGFVFGVATSAYQIEGARREGGKGDSIWDVFTDDKEHVLDRSNGEIAVDHYHRYKEDIELMASLGFSAYRFSISWARIFPDGLGGNVNDQGVAFYNDLINFMISKGIEPYATLYHWDLPNNLQKTLGGWISDKIVEYFALYAEACFANFGDRVKHWITINEPLQTAINGYGIGIFAPGGCQGETARCYLAAHHQILAHAAAVDVYRRKFKVAQGGEVGLVVDCEWAEPFSENVEDQIAAQRRLDFQLGWYLDPIYFGDYPESMRQRLGSDLPTFSEKDKEFMRNKIDFVGVNHYTSRLIAHLQNPNDVYFYQVQQMERIEKWNSGEKIGERAASEWLFIVPWGLHKSLNYIAKKYNNPAIYVTENGMDEEDDQSATLDQVLNDTTRVGYFKGYLNSVAQAIKDGADVRGYFAWSFLDNFEWAMGYTKRFGIVYVDYKNGLSRHPKASALWFSRLLRGEAGTGTS

SEQ ID NO: 8019 - protein, 598 aa, Zea mays
  VARIANT 391..598: note = Derived polymorphism lacks residues 391 to 598
  VARIANT 312..598: note = Derived polymorphism lacks residues 312 to 598
MMWRSRARALLLLRSTITRPPPPPPQPYPTRTLTRVPPPRFLSSSPDPIPDSSSAAAADPFPEAFSSPTKASQDAAEAGEDNLSSMWEEAGHADDIFASPGSADAVADDEEVARVCAAVESTPEDEIASTLADMTVDFNEPLLAAVLLAAEQCSCKKLISLFNYAAKNNPASKSLSNLEVLVSKLADSAEIDKADAYLLWDSIKEIGSVSGSVSTPLLNEMIAIFWKVEKSKAALEVFSKFDEFGCTPDSDSYYLVIEAARKKSLFRSACEVCEKMIGSACFPNGEKVGRILIYLCEGKKVKMAHSLYLAVKEKKIPVPKLALDFLVGALARNDETIGTALELLEEYQGESLKHAGKSFATVVHALCRLNKMEDANNLLMRMVQLEEYKGESLKNAGKTFATVIHGLCRKKKLEDAKALLMRMVNVGPAPGNAVFNFVITALSKQGEMEDAKGLMRMMESQGISPDIYTYSVLMSGYAKGGMIDEAHDLLREAKKIHPKLNRVAYHILIRGYCKMEDFEKANECLKEMKKDGLQPNVDEYDKLIQSLCLKAMDWRRAEKLLEEMEDSGLCLRGISRSLITAVKELEGEEMQSKASQEA

SEQ ID NO: 8020 - protein, 199 aa, Zea mays
  VARIANT 41..199: note = Derived polymorphism lacks residues 41 to 199
  VARIANT 30: note = Ancestral polymorphism is R, Derived polymorphism is H
MATTPPGFTGNLKKALAGLRRISLDGLRWRVFDAKGQVLGRLASQIAVVLQGKDKPTYAPHVENGDMCIVLNAKDISVTGRKMTDKIYYWHTGYVGHLKERRLKDQMEKDPTEVIRKAVLRMLPRNKLRDDRDRKLRIFSGNEHPFHDRPLEPFVMPPRQVREMRPRARRAMIRAQKKQQANRAKEEEDAKNAAAEVTA

SEQ ID NO: 8021 - protein, 353 aa, Zea mays
  VARIANT 79: note = Ancestral polymorphism is D, Derived polymorphism is N
  VARIANT 172: note = Ancestral polymorphism is P, Derived polymorphism is L
  VARIANT 174: note = Ancestral polymorphism is L, Derived polymorphism is W
METRRPRRGWNKRFVLPLALLCLAVLLPGALLPPSASASSSSPAAGGGSRKRRWVGFDYYVLALQWPGTICRETSNCCDTNGCCRYRLAYHSLSSGSRFVSPLKSISFFTHLDAALDELYTILHWMNCIRYCTGCTVYDTALNASFMTYEFVRFKNDLRILMLMPILEKYWPSLYCGSSSTCFGGRGPFWVHEDEYDYFSTALYLYSKYNVTKALRKARIRPTSGRKYAVGHIVAVIEYAFGAMPSLVCKNGSVQELRLCFHKDYQPRDCTLEAGSAPNGRSYCPRYITFPSYKPSGEFLFSITAVWWPILRRGSTTNPMARFRATCVRLTLSSVQDSRFCGPLPSRVCIKYQ

SEQ ID NO: 8022 - protein, 357 aa, Zea mays
  VARIANT 19: note = Ancestral polymorphism is S, Derived polymorphism is L
  VARIANT 27: note = Ancestral polymorphism is A, Derived polymorphism is T
  VARIANT 64: note = Ancestral polymorphism is G, Derived polymorphism is S
  VARIANT 84: note = Ancestral polymorphism is H, Derived polymorphism is Y
  VARIANT 87: note = Ancestral polymorphism is L, Derived polymorphism is P
  VARIANT 148: note = Ancestral polymorphism is R, Derived polymorphism is W
  VARIANT 151: note = Ancestral polymorphism is A, Derived polymorphism is T
  VARIANT 177: note = Ancestral polymorphism is W, Derived polymorphism is R
  VARIANT 208: note = Ancestral polymorphism is S, Derived polymorphism is P
  VARIANT 241: note = Ancestral polymorphism is G, Derived polymorphism is E
MTMATKAACVLAVWVLVASGLSDLGSARAPLGSKPQREFDYFALSLQWPGTICASTRHCCATNGCCRYVLRAVPRRRPVAPFPYLILPSKRRELAARPVDQFSAIRFRFGRCETSRPFFFVSPVLPRVQLGASPDVHDPRAMAGLRRRDLAVVLPPHPIRDGQDVSDNCMTGIPLTWSFIFQRNMEPALPLWFRMNYSISPLPLTSTSSITLRMVLRKWCLVPTQSENQHGALCFLYHKFESLGLQEMLSSGWIQVSNGKEYALSDVIDTIKHAFGGSPQIVCKRGSIEELRLCFDKELKPRDCLTTSLANGSVSKSKHCPRYITLPTYDPLVLANSTVEIMTQFDEFEVPAALYTA

SEQ ID NO: 8023 - protein, 231 aa, Zea mays
  VARIANT 160: note = Ancestral polymorphism is S, Derived polymorphism is L
  VARIANT 135: note = Ancestral polymorphism is R, Derived polymorphism is W
  VARIANT 57: note = Ancestral polymorphism is A, Derived polymorphism is E
  VARIANT 55: note = Ancestral polymorphism is R, Derived polymorphism is W
  VARIANT 6: note = Ancestral polymorphism is A, Derived polymorphism is V
MTLAKAYVILAKEHDNLQLAWELSSQIRNCQRLLSEGVVSGRAITKDEAHPIISRLALLIYKAQDSHYDLSTTIVTLKNHALALEERAKAAIVQSAEFGQLAAESFPKNLHCLTVKLTEEWLRNPKHRSRSEENRNSTRLVDNNNLYHFCIFSDNVLATSVVVNSTVSNANHPQQLVFHVVTDRIHFGAMSTLFLINDFKGCTVEVRCIDEFSWLNASSSPLVRQLSEVET

SEQ ID NO: 8024 - protein, 137 aa, Zea mays
  VARIANT 99: note = Ancestral polymorphism is G, Derived polymorphism is R
  VARIANT 109: note = Ancestral polymorphism is E, Derived polymorphism is K
MDGITQAVENLKKEWGQAVSQLDENITAIESCGKTGKGIEEANSLPRLNGSAQDALQLLKSLQFQLDLLAQQLPTFDEVQSGQATLKSWDEQYKKTKAGMTSVAESITESLRRSRQMMVQEVERSASTLATFGIHFH

SEQ ID NO: 8025 - protein, 499 aa, Zea mays
  VARIANT 31..499: note = Derived polymorphism lacks residues 31 to 499
  VARIANT 312: note = Ancestral polymorphism is A, Derived polymorphism is V
  VARIANT 315: note = Ancestral polymorphism is Q, Derived polymorphism is L
  VARIANT 363: note = Ancestral polymorphism is S, Derived polymorphism is L
  VARIANT 404: note = Ancestral polymorphism is A, Derived polymorphism is G
MLSHLLPRHHHRRLLQILSRAAAAPDVDLHQRLCSSSAASSTSLSIWWRKKEMGKEGLMAVALLKRLAALPPEPARLLLYCVVAAGFSRGPGAEAPSRGSRPSLLPAQGPHAGGRASRRRGPGKQAVQQAGAAQAAGQASSATSRRMGPGATRDQQPASSAVAARQSMIAAAEANRSANLGSNPRHLCFAPPSSFVLPADLIPAGRRPSHDAWPYLYFSSRGTSPSRDACSLVPSPSSFTKSRSVPDCKCQMLSRLLPRHHHRRLLQTLSRAAAAAPDVDLHQRLCSSSAASSPSLSIWRRKKEMGKEGLMVVAQLKRLAALPPAGGHPRLEQFMRSHVSRLLRTDLLAVLAELLRQDHVSLSMKIYGVVRKEIWYRPDMYFYRDMLYMLARNKKINETRQVWADLKSEDVLFDQHTYGDIVRAFCDADLIDLAMEIYDDMRSSPDPPLSLPFRVILKGLVPYPELREKIKQDFLELFPDMIVYDPPDTLSDIDEEFKF

SEQ ID NO: 8026 - protein, 512 aa, Zea mays
  VARIANT 295..512: note = Derived polymorphism lacks residues 295 to 512
  VARIANT 154..512: note = Derived polymorphism lacks residues 154 to 512
MVQLFLQVPAECGSVNTVVVEGRRSLFHNVESIIKSLTKSAGRYEARLWLCATVSLVHSLSDCGQRDLFLDLLERKNSRRDVAARLLRMIFDKKPRMVGSILARKGHILEDFFRGNPNRIMQWFGHFAVTGESTHRKGAKALSQFAFVNRDRCWEELEWKGKHGQSPAVVATKPHYFRDLDVLETVENFLEYVPDFWSSDELANSIKDGEILQIDEEYFVDQFLYLMYEENSKDAWHVVEDFLMDEQFSSLCQHLLIHLDEERLLGFLNSLGKLINPTMQCKELTFPCCWLEVLLSGHYDHISLDDLVFLNCVIAKGRQLWRLMNDEEQHEEWGQMEELLKGGNHLTDADHFALMKELVETELPGVLKWVGIQSWIIFCELSKECKSGDSCESFFSHNKIEFHKADDYSLVRNYGFSISHMPDIDVEDLTRSSHKRRKRNRRKRHRYESDEDKFDELLELGSSDGKNGVESQRGSWRLSTDGFSASWDIMHSGIAERCMRSRTTLFSWDAEG

SEQ ID NO: 8027 - protein, 142 aa, Zea mays
  VARIANT 127: note = Ancestral polymorphism is V, Derived polymorphism is G
  VARIANT 116: note = Ancestral polymorphism is R, Derived polymorphism is W
  VARIANT 102: note = Ancestral polymorphism is V, Derived polymorphism is A
  VARIANT 78: note = Ancestral polymorphism is E, Derived polymorphism is G
  VARIANT 71: note = Ancestral polymorphism is G, Derived polymorphism is S
  VARIANT 68: note = Ancestral polymorphism is G, Derived polymorphism is R
  VARIANT 64: note = Ancestral polymorphism is H, Derived polymorphism is P
  VARIANT 52: note = Ancestral polymorphism is D, Derived polymorphism is G
  VARIANT 29: note = Ancestral polymorphism is S, Derived polymorphism is R
  VARIANT 25: note = Ancestral polymorphism is G, Derived polymorphism is V
  VARIANT 15: note = Ancestral polymorphism is P, Derived polymorphism is L
  VARIANT 1: note = Ancestral polymorphism is M, Derived polymorphism is T
MGKRVHFSARTIITPDPNINIDELGVPWSIALNLTYPDTVTPYIILRVNSNDFRLKELVEYGPHPPPGKIGAKYIIREDGQMLDLRYVKKSSDQHLELGYKVERHLNDGDFVLFNRQPSLQKMSIMVFSMAFGRRKRIYYSQ

SEQ ID NO: 8028 - protein, 302 aa, Zea mays
  VARIANT 189..302: note = Derived polymorphism lacks residues 189 to 302
  VARIANT 93: note = Ancestral polymorphism is L, Derived polymorphism is Q
MGGFVKTHKTNAYFKRFQVKFKRRRAGKTDYRARIRLINQDKNKYNTPKYRFVVRFTNKDITAQIISASIAGDMVLASAYSHELPRYGLEVGLTNYAAAYCTGLLLARRVLKTRGLDKEYEGNVEATGEDFSVEPADERRPFRALLDVGLIRTTTGNRVFGALKGALDGGLDIPHSEKRFAGFKKDDKQLDADIHRKYIYGGHVADYMRNLAEEEPEKYQSHFSEYIKKGIEADDMEALYKKVHAAIRADPSVVKSTKQPPKEHKRYNPKKLTYEQRKASLIERLNQLNSSGGADDDDEDDE

SEQ ID NO: 8029 - protein, 162 aa, Zea mays
  VARIANT 19: note = Ancestral polymorphism is L, Derived polymorphism is M
  VARIANT 80: note = Ancestral polymorphism is A, Derived polymorphism is T
MAAKSHTRKAFLLCNYVLLGASSSCIFLTLSLRLLPSPCGLLLLFLHALTAVFSAAGCSGSFTAPATPAQWHNAHTAGAALTAIFQGAIALLAFTRTSDFLAELQSYVRDEDGAVILKMVGGLGTAIFVLEWAALALAFSLRLDEDDDDDDLQAKNWQSYHV

SEQ ID NO: 8030 - protein, 256 aa, Zea mays
  VARIANT 25: note = Ancestral polymorphism is R, Derived polymorphism is C
  VARIANT 26: note = Ancestral polymorphism is P, Derived polymorphism is S
MASAATATLPKVQLRPRCNSYFQVRPVLALPLPSRKFSSSVALLIRSNMPSTLRLLVSAGGRRTFLPVSAVGSGQGSSVTEADRKSDLSLENVKTSVVSRDGEKINVRVQLPGKATQKVFDEALTFLARDAPPVPGFRKSKGGKTSNNQLSRDCAVSVLQIPSSILLQMLGKSRVTKFVLQEILSITIEEFVKKENLKVKPEIQTTQSEGEMESAFAPGSAFGFNVVLQLETPDSDDPEEKPGSDDDLQEESGSSE

SEQ ID NO: 8031 - protein, 203 aa, Zea mays
  VARIANT 111: note = Ancestral polymorphism is I, Derived polymorphism is F
  VARIANT 113: note = Ancestral polymorphism is F, Derived polymorphism is L
  VARIANT 175: note = Ancestral polymorphism is G, Derived polymorphism is W
  VARIANT 182: note = Ancestral polymorphism is C, Derived polymorphism is R
MARTEKLTSDGCSGGEVQVEVELGMGVDGKGIIECRICQEEGEEAAMDSPCACAGTLKFAHRKCIQRWCNKKGNITCEICNQVYSPNYVIPPPKCCSDEMDMNLRYSEWVIFFFLVNRQNWVGRIDPHDSHFLAIAIAEQQLLQAEFDDCVSANSSGATCCRSIALIVRNSSVCGILSSLLCNSSFLLCFAASETETGVGRLT

SEQ ID NO: 8032 - protein, 177 aa, Zea mays
  VARIANT 120: note = Ancestral polymorphism is G, Derived polymorphism is S
MDRSYLPVAAAAVALVLVCCSGLCRGERLGARECEDLGFTGLALCSDCNALSEFVKDQELVEDCHKCCTEDSDDSISKLTFSGAIIEVCMRKLVFYPEVVGFLEEDKDDFPYVETRYSYGSPPKLIMLDNKGEQKETIRQVLLNSRVNLQLSDLHSYTCITANSIRTAWLNLFHILS

SEQ ID NO: 8033 - protein, 284 aa, Zea mays
  VARIANT 49: note = Ancestral polymorphism is S, Derived polymorphism is L
  VARIANT 173: note = Ancestral polymorphism is E, Derived polymorphism is V
  VARIANT 243: note = Ancestral polymorphism is D, Derived polymorphism is Y
MAAGRELVVSFGEMLIDFVPTVAGVSLAEAPAFLKAPGGAPANVAIAVSRLGGGAAFVGKLGDDEFGRMLAAILRDNGVDDGGVVFDSGARTALAFVTLRADGEREFMFYRNPSADMLLTADELNVELIKRAAVFHYGSISLIAEPCRTAHLRAMEIAKEAGALLSYDPNLREALWPSREEARTQILSIWDQADIVKVSEVELEFLTGIDSVEDDVVMKLWRPTMKLLLVTLGDQGCKYYARDFHGAVPSFKVQQVDTTGAGDAFVGALLQRIVKDPSSLQASA

SEQ ID NO: 8034 - protein, 264 aa, Zea mays
  VARIANT 1: note = Ancestral polymorphism is M, Derived polymorphism is I
  VARIANT 38: note = Ancestral polymorphism is N, Derived polymorphism is S
  VARIANT 130: note = Ancestral polymorphism is R, Derived polymorphism is K
  VARIANT 192: note = Ancestral polymorphism is R, Derived polymorphism is K
MLNAKFNDIATNLGLDLYLVHLRASIDKVNELVYDAISNDQELIPVFGALVMHLCTGFGPEALPSHCTSTARRGTMSTCWRAATEGVRYMQQSDIPYYLNHVELYFVANISDCLLDLSRLIFFKLLLTTRRRLDSTVIQSRTLLIEPKPQEPTKHQYDWDVATTFAFLQKYGPTGEFEINVECNHATLSGHRKAAIMNWRLHGLMGCLEISMQTLVILKLVCWDTDQFMTDIAEATLVMSSVVKNGGLAPGGFNFDAKLSVPFV

SEQ ID NO: 8035 - protein, 298 aa, Zea mays
  VARIANT 129: note = Ancestral polymorphism is P, Derived polymorphism is S
  VARIANT 65..298: note = Derived polymorphism lacks residues 65 to 298
MLHGSPTSAAANPAAPQTARSTPAAANPARLRPPQTLPHRKPPRPQTHRTKSAPDALQTPQTKPRVLVPKEGLAMVNGTAVDSGLASTVLFEANILAILAEVLSAVFCEVMNGKPEYIDHLTHKLKHHPRHIEAAAIMEHILEGNSFMKLAKKLGELDPLTKPKQDQIVDECSNSKRHWLDCDLLCKTYCFHLELEFCMGTKMVYKHLATLYFVFVFDSFENELAMLDLVQVFVETLDRCFKNVCELDIIFNFNKVPYVHMILPFLSFYNRIVCLSRMQGFYPAENSIYDSSIACCMF

SEQ ID NO: 8036 - protein, 139 aa, Zea mays
  VARIANT 116: note = Ancestral polymorphism is S, Derived polymorphism is I
  VARIANT 112: note = Ancestral polymorphism is L, Derived polymorphism is P
  VARIANT 111: note = Ancestral polymorphism is V, Derived polymorphism is A
  VARIANT 108: note = Ancestral polymorphism is A, Derived polymorphism is V
  VARIANT 105: note = Ancestral polymorphism is S, Derived polymorphism is F
  VARIANT 104: note = Ancestral polymorphism is R, Derived polymorphism is Q
  VARIANT 81: note = Ancestral polymorphism is V, Derived polymorphism is M
  VARIANT 73: note = Ancestral polymorphism is S, Derived polymorphism is L
  VARIANT 68: note = Ancestral polymorphism is V, Derived polymorphism is L
  VARIANT 66: note = Ancestral polymorphism is Y, Derived polymorphism is H
  VARIANT 65: note = Ancestral polymorphism is K, Derived polymorphism is M
  VARIANT 61: note = Ancestral polymorphism is C, Derived polymorphism is F
  VARIANT 55: note = Ancestral polymorphism is K, Derived polymorphism is M
  VARIANT 54: note = Ancestral polymorphism is G, Derived polymorphism is R
  VARIANT 52: note = Ancestral polymorphism is N, Derived polymorphism is D
  VARIANT 47: note = Ancestral polymorphism is L, Derived polymorphism is R
  VARIANT 45: note = Ancestral polymorphism is E, Derived polymorphism is Q
  VARIANT 43: note = Ancestral polymorphism is C, Derived polymorphism is R
  VARIANT 34: note = Ancestral polymorphism is R, Derived polymorphism is C
  VARIANT 30: note = Ancestral polymorphism is S, Derived polymorphism is F
  VARIANT 27: note = Ancestral polymorphism is H, Derived polymorphism is Y
  VARIANT 22: note = Ancestral polymorphism is S, Derived polymorphism is P
  VARIANT 18: note = Ancestral polymorphism is N, Derived polymorphism is D
  VARIANT 15: note = Ancestral polymorphism is G, Derived polymorphism is R
  VARIANT 1: note = Ancestral polymorphism is M, Derived polymorphism is L
MVEETTSMIEAAYAGEDDVARSRALSHDKSELFRRFERLVQVRRELLEGKCDLGKFVDEVCLILKYVVIQCFSDQDQTDTVSSDTEDFDGAKPSSVVTADVSERSFWATYVPVFQSLVDAKILRMNFLIDLLSYEDNSC

SEQ ID NO: 8037 - protein, 437 aa, Zea mays
  VARIANT 293..437: note = Derived polymorphism lacks residues 293 to 437
  VARIANT 291..437: note = Derived polymorphism lacks residues 291 to 437
  VARIANT 278: note = Ancestral polymorphism is E, Derived polymorphism is K
  VARIANT 257: note = Ancestral polymorphism is A, Derived polymorphism is T
  VARIANT 233: note = Ancestral polymorphism is V, Derived polymorphism is A
  VARIANT 206: note = Ancestral polymorphism is E, Derived polymorphism is D
  VARIANT 203: note = Ancestral polymorphism is D, Derived polymorphism is N
  VARIANT 184: note = Ancestral polymorphism is H, Derived polymorphism is Y
  VARIANT 162: note = Ancestral polymorphism is R, Derived polymorphism is G
  VARIANT 152: note = Ancestral polymorphism is R, Derived polymorphism is C
MECVELLDSPDLFFLDGGDAHATDFSLENHLESSSSAGAKNKAAPGHSHIHSHSHSRRAQLHRSNAPVPPPLPGTSYYGARRKAKAACRRVPEGVLDSWDRLFLEGYQSDLRVSTDGGAEISSHSCVLGVKSPVLRAMLEEARLRDGFRCIRVSGAPSEAVRVFIRFLYSSRFEQEQMKEHALHLLVLSHVFSVPSLKTVCVDQLERGFLATDNVVDMLQLARLCDAPRLALACARMVIGDFKTISLTDGWKVMRRTNPSMEQELLESLVEADTRRQERAKRMEEKKVYLQLYEAMEALVHICRDGCRTIGPRDQALKGSLAAACKFRACKGIELLVRHFSACGVRVPGGCANCRRMWQLLELHSRMCFLPDTCKVPLCRHFKEKMRNLGRKEETKWNLLVCKVLERGGTMGFMPGRRKNFINPKASWVLPRGSSCI

SEQ ID NO: 8038 - protein, 188 aa, Zea mays
  VARIANT 45: note = Ancestral polymorphism is G, Derived polymorphism is V
  VARIANT 109..188: note = Derived polymorphism lacks residues 109 to 188
MGRPSRGRQRIEIRRIEEGGRLQVTFSKRKSGLQKKAAELSLLCGSPVAVIVFSPGRKVFALGSPSVDHVLRRHAPPIPSEGEEDGLLPALQDGDVMSSSAIADRAEVENIVRRTEETKARSVAEKARMDAVGKAVRQAAAKAGRRFWWEADSGVLGDAELPGFAKALRRLRPQGQPAAPFGLAVGFC

SEQ ID NO: 8039 - protein, 514 aa, Zea mays
  VARIANT 297..514: note = Derived polymorphism lacks residues 297 to 514
  VARIANT 151..514: note = Derived polymorphism lacks residues 151 to 514
MHGPYPTAAAAAASSSDDMAANGMKVALHRQVSGGSMKQNAELRRQASLESPRTGRATSRFLFGRQSSMDPNRRRGRSQSPVRAPEDLGVPDNLDATMQLLFFACQGDALGIEGLLRSGVDVNSINLDGRTALHIAACEGHRDVVRVLISWKANIDARDRWGSTAVADAKFYGHSRVYDLLKFHGAKVPRTKRTPMMVSAPAEIPEYELNPGEVQFRRGCDVTPGVYHIAKWNGTKVSVKILDRDGCSDQEAANSFRHELTVLEKVRHPNVVQFVGAVTQSIPMMIVSELHEEKDLSVCIQKKGKLKPQKVLRYGLDIARGMTYLHQCKPDPIIHCDLKPKHIFLDSGGQLKIAGFGVTRMSKVGTDKVRLIYHGALVDSFSYHTAPELYRNDAFDSSVDSYSFGFILYEMVEGSVRAPEDSGHSIRFEGLRPSLKGRLKGYPPDFKALVEECWHPQAMARPTFSEIIIRLDKIYAHFDKHGSWKDSLKLWSVSRRLKRIVKRRSVRSRIHNEP

SEQ ID NO: 8040 - protein, 245 aa, Zea mays
  VARIANT 226..245: note = Derived polymorphism lacks residues 226 to 245
  VARIANT 198: note = Ancestral polymorphism is T, Derived polymorphism is I
  VARIANT 168: note = Ancestral polymorphism is T, Derived polymorphism is I
  VARIANT 162: note = Ancestral polymorphism is A, Derived polymorphism is S
  VARIANT 109: note = Ancestral polymorphism is A, Derived polymorphism is G
  VARIANT 83..245: note = Derived polymorphism lacks residues 83 to 245
MLQGLSGCNDIGVDRANFDLIFPAFSVLDDEAVMRKQLHEAREQLVRQRYELGRQPANTKLSSNKTVRRVCVRGGNTKWRALRLDTGNYSWGSEALTRKTRILDVVYNASRTQTLVKSAIVQVDAAPFKQWYLTHYGVDIGRKKKVHVAKRDDTENAPFFVSKLAIKILPCVILFKKGIVVDRLVGIQDLKSKDDFLTRALEHILILKTKGIIDEKKKDDDDDDEESEAKNRRVRSSAAEDSDTD

SEQ ID NO: 8041 - protein, 259 aa, Zea mays
  VARIANT 159: note = Ancestral polymorphism is S, Derived polymorphism is R
  VARIANT 181..259: note = Derived polymorphism lacks residues 181 to 259
  VARIANT 188: note = Ancestral polymorphism is V, Derived polymorphism is F
  VARIANT 230..259: note = Derived polymorphism lacks residues 230 to 259
MGRKFFVGGNWKCNGTTDQVEKIVKTLNEGQVPPSDVVEVVVSPPYVFLPVVKSQLRQEFHVAAQNCWVKKGGAFTGEVSAEMLVNLGVPWVILGHSERRALLGESNEFVGDKVAYALSQGLKVIACVGETLEQREAGSTMDVVAAQTKAIAEKIKDWSNVVVAYEPVWAIGTGKVATPAQAQEVSFFLEVHASLRDWLKTNASPEVAESTRIIYGGSVTAANCKELAAQPDVDGFLVGGASLKPEFIDIINAATVKSA

SEQ ID NO: 8042 - protein, 463 aa, Zea mays
  VARIANT 76..463: note = Derived polymorphism lacks residues 76 to 463
MVTWTTTSSLPDNQPRAEPTGSPQLTVAPQPSCTNVPWDVGGLQGSNWNPRRGPSLPQSRCPPVPTRSAHARTPTYPLRLHKILLDPHRKVPAEELGGRKAKPTCSRAGGDSGMERERQAVARNRKVVLRGYIDRAPREEDMELVDGGAVELRVPEGGGGPAVLVKNLYLSCDPYMRGRMRDFRNSYIPPFKPGSPIEGFGVGRVVDSTHPGFSAGDVVSGMTGWEDYSLITKPEQLRKIQQSDIPLSYHLGLLGMPGFTAYVGFYEICSPKKGEFVFVSAASGAVGQIVGQLAKLHGCYVVGSAGTDQKVELLKEKFGFDAAFNYKEEPDLTAALKRHFPEGIDIYFENVGGPMLDAVLLNMRVHGRIAVCGMVSQHGVTAPAGIHNLFSLISKRIEMKGFIQSDYVHLFPQFVDDITRHYRDGKIVYVEDMSVGLESGPASFVGLFSGKNVGKQVVCVSRD

SEQ ID NO: 8043 - protein, 401 aa, Zea mays
  VARIANT 235..401: note = Derived polymorphism lacks residues 235 to 401
MAMPKPVLSLLVHLHAAVLFLPAPAGGAVYNVLRYGARPDGVTDAAGPFLRAWADACRSPLPAAVYVPPGRYLVRSATFTGPCHTRAVTFAVAGTVVAPAAYGARGSSGRWITFENMDGLVVAGGGTLDGRGRALWACRQRGQRDCPTPTSTLTIANSKDVVVAGLRSVDSELFHVVVLQCHGVTVRGVTVEAPADSPNTDGIHLHMSTHVSVYDARISTGDDCISIGPGNSHLWIERVACGPGHGISIGSLGKQQGTEVEAVQNVTVKTTWFTGTMNGLRIKTWGGSKRGFVTGVTFADSTMSGVDNPIIIDQNYCPTSSGCPGAGRSSSIRISDVRYVGIRGSSATPVAVNFDCSRSYPCSGISLQDVALTYQNRAAAKSYCRNVQGTALGLVLPPSCL

SEQ ID NO: 8044 - protein, 148 aa, Zea mays
  VARIANT 44: note = Ancestral polymorphism is D, Derived polymorphism is G
  VARIANT 45: note = Ancestral polymorphism is L, Derived polymorphism is P
  VARIANT 65..148: note = Derived polymorphism lacks residues 65 to 148
  VARIANT 70: note = Ancestral polymorphism is R, Derived polymorphism is W
MDLALLTQTQGTEVALGMWTQVMLKTLGNNLYVTVLSPRVTDQGPKKHFSTEGEVIDASIVYDPWTREPRGFGFVTMAATKEADHCIKYLDCSVLQGQVIIVEKNILLFCLHHRESEIASHSLHIHKVLLECDDVQADALIVDRLASL

SEQ ID NO: 8045 - protein, 958 aa, Zea mays
  VARIANT 859..958: note = Derived polymorphism lacks residues 859 to 958
  VARIANT 855..958: note = Derived polymorphism lacks residues 855 to 958
MKISELSPEYRQPPPPPQSALLTDLNRVVADVEALDASDSSSPEKLAADLRCLLTNLASAASSSSSGLNGAFRLKVWNLAFRLWNACVDRANHFAARGAEAAVAETEIRQAAPELLLVAGLPEGVPNAAAKAASLFHRTGLFWLDLGRADLASACFEKATPLVCAADTEEDRDILLDLNLARARAASSEGKQALAVALLSRSKPLAAASSVGVKALAEGYLLLGKAALATKSPDPAIDASSLLTEALDLCERAAASPCCTTPTSPRSSPATPNLQVIKDQCLRCLAAERLQANDYEGTLRCIMVSRASPGLGKEHSSIAFMALRACLSSGKLLEAERELDRLMANAEAPEFVCVSAAELYVASVGLDAALKVLVALAARCRASASAVAVRVLKTVVQGAGGEAGHARAIAELVSDERVVALFNGPANAHERGTMHALLWTCGTVHFHAKNYEISADLIERSMLYVSRDEESRSRRANCFRVLCLCHMALRHLDRAQEFIIEAEKVEPSIHCAFLKFKILLQKKEEEDAIKLMKAMMGYVDFNPQFLILSIHEAIGCKSFCVAVALLTFLLGLYSAGKPMPMSEATVLRNLITLLLREPGSEAEILKYSRRAKLRMGELGLEAFFGKETVGLRELNWFAVSSWNMALKVLKEDKYDYCSEFFELAAEFFSSGNGEDGANLLLICKSLIMSVSSMLLADDLNKSQLSDSDLKRGIEMLRRAGKLLPLTLSSALVTSDQLENNLPFLHTFSFYQLLSRLDTNAHPQQLQLAKNFAASKACTPGHLLILGDMASKGNQPNLEAAEFLLKASISTALASHSPNYGVISAALRKLVCLAGLHDFSGSMSDAAYDVFRQAYQIVVGLKDGEYPFEEGRWLSITAWNKSYLPVRLGQHSVARKWMKMGLDLARHFDRMKLYISGMEECFENFRKLTGKEPDECSQQDGEPSTGMSGTGSMSQPVLV

SEQ ID NO: 8046 - protein, 288 aa, Zea mays
  VARIANT 15..288: note = Derived polymorphism lacks residues 15 to 288
MNTTELSSTSMSMHQHHHVKNSGSNATSHNQDAIISGSHAAPSAPAIKLRLFHSASDGHPDAAASRDVPAEAPAPAAPEKLRLSDLEWICNLGAGGLASVCKARHCRTGEVFAFAVKISFDQDPLVLENEAEVLKIAARATHVIDFYALLREPGYNAALVLEYMDTGSLGSLLRRRRRRGLRIPEAAVAEVAMQCVEGLLQLHYRGVAHLDVKPDNILANSRGEIKMGDFNISRVLYVGSGELLEVPITGGTKMYFSPERFAPNARAGPIGAMKADVWGLGVTIVELF

SEQ ID NO: 8047 - protein, 319 aa, Zea mays
  VARIANT 153: note = Ancestral polymorphism is H, Derived polymorphism is Q
  VARIANT 268..319: note = Derived polymorphism lacks residues 268 to 319
MAIPMLPHEICRRAKMTASVLAAVPAPAAPEKLRLSDLDWICNLGAGGLASVCKARHCRTGAVFAVKISFDQDPLVVEKEAEVLKIAAGATHVIDFYALLREPGYKAALVLEYMDAGSLGSLLRRRRRGGLRIPEAAVAEVAMQCVQGLLQLHYRGIAHLDVKPDNILANSRGEIKFSDFNISRVVGSGEVPITGGTKKYFSPERFAPKARAGPIGAMKADVWGLGVTVLELFMGRLSLVPGVKNPSTEELKQAICDGETPSVPEDTEASAELRAFLAACLEKNPARRPFPVELLEHPFLARRDVEASRRALLEILAAA

SEQ ID NO: 8048 - protein, 236 aa, Zea mays
  VARIANT 158: note = Ancestral polymorphism is G, Derived polymorphism is W
  VARIANT 127: note = Ancestral polymorphism is A, Derived polymorphism is D
MTASVLAAVPAPAAPEKLRLSDLDWICNLGAGGLASVCKARHCRTGAVFAVKISFDQDPLVIEKEAEVLKIAAGATHVIDFYALLREPGYKAALVLEYMDAGSLGSLLRRRRRGGLRIPEAAVAEVAMQCVQGLLQLHYRGIAHLDVKPDNILANSRGEIKFSDFNISRVVGSGEVPITGGSGTKKYFSPERFAPKARAGPIGAMKADVWGLGVTVLELFMGRLSLVPGVKNPSIY

SEQ ID NO: 8049 - protein, 236 aa, Zea mays
  VARIANT 22..236: note = Derived polymorphism lacks residues 22 to 236
  VARIANT 40: note = Ancestral polymorphism is G, Derived polymorphism is S
  VARIANT 60: note = Ancestral polymorphism is A, Derived polymorphism is D
  VARIANT 107: note = Ancestral polymorphism is G, Derived polymorphism is S
  VARIANT 123: note = Ancestral polymorphism is P, Derived polymorphism is Q
  VARIANT 124: note = Ancestral polymorphism is D, Derived polymorphism is Y
  VARIANT 172: note = Ancestral polymorphism is V, Derived polymorphism is A
MTASVPEASEKLRLSDLDWICELGAGGIASVCKAHHCRTSAVFAIKISFDQDPLVVEKEAEPGGKAALVLEYMDAGSLGSLLRRRRRGGLRIPEAAVAEVAFQCVRGLLQLHYNGVAHLDVKQDNILANSRGEIKMSDFNLSRVLRGPSGEAGSSLCWAVGAMKADVWGIGVTILELFLGRLSLVPGVEKPSAEELKKAICDGEPPSVPEDEEASAELRAFLAACLQKKPARRAMV

SEQ ID NO: 8050 - protein, 310 aa, Zea mays
  VARIANT 19: note = Ancestral polymorphism is T, Derived polymorphism is A
  VARIANT 40..310: note = Derived polymorphism lacks residues 40 to 310
MKRIEYTLGNLHTPYSSVTIKKTRHDTQTLKEFLMAELRELREMDKDGSSERSRPDHGDVKMLKFRPKVPRQKQKPKQQDPKPIDEDVMKILRTRQVAAKSAPNTEDECSPQKTLSTPPSADVVCLSPAQLGVQKQNQLPLQIPRSFPVPVNSGLVYEEESSDDDDDNDSDNVGLLETQPDSIESEALTCPAEELDLLQEGSKERMFFFQFPNSLPLPKRSSSAGKEVMEGSNLQQLPQGYLGKMLVYKSGKIKMKLGDIIFDVNPGVESRMLQRAVALNTRDKHCCLLGEIENRHVIVTPNVDSLLNDK

SEQ ID NO: 8051 - protein, 325 aa, Zea mays
  VARIANT 196..325: note = Derived polymorphism lacks residues 196 to 325
  VARIANT 206: note = Ancestral polymorphism is Y, Derived polymorphism is C
MAIPMLLPHEMCRRARMTASVPAAVPAPAAPEKLRLSDLDWICDLGAGGLASVCKARHCRTGAVFAIKISFDQDPLVVEKEAEVLKIAAGATHVIDFYALLREPGGKAALVLEYMDAGSLGSLLRRRRRGGLRIPEAAVAEVAFQCVRGLLQLHYNGVAHLDVKPDNILANSRGEIKMSEFNLSRVLRGPSGEPLQVPITGGTKMYYSPERFAPKACAGPIGAMKADVWGIGVTILELFLGRLSLVPGVEKPSAEELKKAIFYGEPPSVPEDEEASAELRAFLAACLQKKPAQRAMAVQLLAQPFIARRDVEASKRALLEILAAA

SEQ ID NO: 8052 - protein, 270 aa, Zea mays
  VARIANT 52: note = Ancestral polymorphism is A, Derived polymorphism is V
  VARIANT 58..270: note = Derived polymorphism lacks residues 58 to 270
  VARIANT 61: note = Ancestral polymorphism is S, Derived polymorphism is P
  VARIANT 64: note = Ancestral polymorphism is D, Derived polymorphism is E
  VARIANT 69: note = Ancestral polymorphism is W, Derived polymorphism is L
  VARIANT 76: note = Ancestral polymorphism is H, Derived polymorphism is R
  VARIANT 86..270: note = Derived polymorphism lacks residues 86 to 270
MKQEKLIMMKNKVMIMMLNFRLHYTSLERNMNSENELVHVFGSETQTLQCVVKRLLAQCVSSNERERNWSIFVFIRTKLRNILGYEKLHELVFVNYNIRLRIQCASCMPGPSEFDPALALMDLSLHRHNRAIHDWMERGRSNVDPTLDEDSSYSDTPVPIKLFTSIAQKYGDIEDIHGWADTTVGDAHLGKRKRKLGPSESKVKKLNLMTRKKRLTLKKAVAKMMVTTIPMETKEMTVMVATGMVEVMLEHMMLGVAMVEHMTLEHMVLR

SEQ ID NO: 8053 - protein, 117 aa, Zea mays
  VARIANT 53: note = Ancestral polymorphism is W, Derived polymorphism is S
MEGLIPFIYKAIKERRARSYSYYYSRCNSTGSSRGRLGARVEDSSWDLQQKQWESAAGGKAPAGAAAEREIAQAHRRHRSLDELAGEVGASPGWRRRHPGAPLRARSVRIFSCIGGV

SEQ ID NO: 8054 - protein, 94 aa, Zea mays
  VARIANT 33: note = Ancestral polymorphism is V, Derived polymorphism is L
MHGAVEQQKQHRGRRPQGTVPPPPAGYFTAELLLAFVFVAVSLAFLPLVLPPLSPPPFLLLLVPVGLLAVLLALAFVPLDAHSHLVVVGSGSSR

SEQ ID NO: 8055 - protein, 493 aa, Zea mays
  VARIANT 100: note = Ancestral polymorphism is G, Derived polymorphism is D
MKLDVNALRYLAKDDFRVLTAVEMGMRNHEIVPVELIDRIARLKHGGTYKVLRNLLRNKLVHHGATKYDGYRLTYLGYDFLAIKTLVNRGVFASVGRQIGVGKESDIFEVATDDGTVLAMKLHRLGRTSFRAVKSKRDYLRHRRSFNWLYLSRLAALKEFAFMKALGDHGFPVPTAVDCNRHCVIMSLVQGYPLVQVKKLQNPDDVFDSILGLIVRLAEHGLIHCDFNEFNIMIDDDEKITVIDFPQMVSVSHRNAQMFFDRDIECIYKFFNKRFNLRSVKNEEQAGSENDDEGNSRPSFLSVEKGAGSLDKELAASGFTRKEKVDMDKVVFRLSSQVPFFWQTFLQYIEEVVEGHDSSSDDDNDEDSSDEPDCDLTPSDSDAPGTFSEEHGTSCSGENRLEIPPSDGNGVVMAPLESGIKTFSMEDDDNDDGSSEDADEEEDAELTKQLNKQRRKAIAAAHGRRRPTSSRNAYKDKGKGTMNSKMQRQACNW

SEQ ID NO: 8056 - protein, 724 aa, Zea mays
  VARIANT 421..724: note = Derived polymorphism lacks residues 421 to 724
  VARIANT 428..724: note = Derived polymorphism lacks residues 428 to 724
MHELTNIWEKHPLFNPKDSTKNGCSSEQESYLLNPRAPGMDLDMDGYVDPYEEAAAEGDSDDPDEDDSDAESDYEEKSFGLLKSGKHRVRNPDGTFRCPFCLGKKKQGYKIKDLLQHADGIGVSSKHRRHGRERANHRAFARFVRTDPSFAEDLVGITGIQGAITTTPANENYSANGNGKAKANVDTAGSSSVAAKVGPPQEVERFAWPWACVLAAGAGFNAEDFVGRVALFSSVEVVPLFVDEMEVTETFAIVRFTNDWSGFNDALTIENYFSVNKLGKKEFQMRDSGLGSVEGDGEGDVKVYGWVARAEDYDATTVVGRFLRKHTVLQTIDEVSKTELEKSGEMVAILASQIEEKNRYLQDLETKKNATELSISRLEEDNRKLHEAYNEEMRNLHRRARENALRIFQENENLRIDLENKRRELNLRAKELEKMSAENANDRKTLDDQKQKTKYDNSELELASIEQQRADADVLKLLADQEREKEDVLARMLQLEKELHEKQQLELEVERLNGTLQVMKHLEGDDDGGDIHEKMEKLSERFEREKKRLEDLSGDLVTKERESNDELQQARKELIKGLEEELNGRTAVGIKRMGELDEKPFLNACKRKYGNNEYQVKAAELVTNWQEELKNPSWYPFKMIHVDGEDKEILVDDDTKLKFLWIEFGDDVCNAVKTALMEINEYNPSGRYVVPELWNFRKGRKATMKEVLKYLFSQMDTTTKRRRG

SEQ ID NO: 8057 - protein, 253 aa, Zea mays
  VARIANT 146..253: note = Derived polymorphism lacks residues 146 to 253
MARALLLLRVAVARYPPLPASPALLQPLLRRHAPSQYRSQLRFLSSLSSSSVSTSSDAPSDGGGGRDGEEDGAKSGGRVDYLGMSDEELMEQCDMGTFKASGPGGQHRNKRESAVRLKHLPTGIIAQAVEDRSQHKNRASALSRLRTLIALKVRRPINLEDYTPPVELLQILPLKSSVRGKDVGPQIGPNNSKFSPGMQALLDLLFAVEGSVSDAAKILGLSTGALSRLILSDDSLRTAANELRASKGLKPLR

SEQ ID NO: 8058 - protein, 298 aa, Zea mays
  VARIANT 49: note = Ancestral polymorphism is R, Derived polymorphism is K
  VARIANT 36: note = Ancestral polymorphism is T, Derived polymorphism is M
  VARIANT 4: note = Ancestral polymorphism is R, Derived polymorphism is H
MELHLCLRLHVRLTPAAKPPPAPAVLPVPASRRLRMGGSYGVALRRHTRRSNRAIHTSLADGEQGVAVDAVKERSVSVILLSGGQGKRMGASMPKQYLPLLGLPIALHSLKTFCQLKEVKEVVVVCDPDYIDVFEGSIKNLQLPLKFARPGKERQDSVFNGLQEIDGDSELVCVHDSARPLVSSEDVKKVLEDAAVHGAAVLGVPVKATIKEANSDSFVIKTLDRKTLWEMQTPQVMKPNLLKDGFELVKRDNHEVTDDVSIVEYLKHPVYITEGSYTNIKVTTPEDLLLAERLMNEK

SEQ ID NO: 8059 - protein, 532 aa, Zea mays
  VARIANT 143: note = Ancestral polymorphism is T, Derived polymorphism is A
MAPAVGLKRSATQTITLPPPDTRLAVRDVMRSTIPSQPAVAPASTERQAPAAALQGFLCLEEVDGRRWSYVVDGGAAKGRSRGGAVPAGAAVRAVPLQSPLPPAEEIMAFIRSYVVPEGFPDSVTPSYVPYMTWRALKVYCRTYIQQSAFTAILKNRPKFNVLFTIQHFFGGAMGVFTTRTLLSSVGVSQSKVTPGAIAINWILKDGAGRVGKMLFARQGKKFDYDLKQLRFSSDLLLEIGAGIELTTAAFPQFFLPMACVANVVKNVAAVTSTSTRTPIYKAYARGENIGDVTAKGESVGNIADLLGTGLSIFISKRNPSLVTSFAFLSCGYLLSSYQEVRSVVLNTLNRARFTVAVDSFIKTGHIPSLKEGNSQETIFNPPWRHEPVAIGSRFGEAFQEPASFLAIRPLFEDERYMVTYNPTKDKVYALLKDQAKSDDIIKAAFHAHVLLHFINASHARRLKQKQKQANPDRSEYLYSRNMDFLAHIAESCKIVSSSYGTFKKKAREQGWIMSESLLNPGKARLCAAKPQ

SEQ ID NO: 8060 - protein, 299 aa, Zea mays
  VARIANT 176: note = Ancestral polymorphism is R, Derived polymorphism is W
MSAADSLTSGRGRRAEPPLPRLKRVRVYFVDADATDTDSSGNEDERGKRRVREVIHIDVESASALTRSAQPLVLPKKRPLPSQAAAAALVRRRSSGAGFRRRFPGVRLRPWGKYAAEIRDPHQRKRLWLGTFDTAEEAAAAYDDAALRLKGSRHVVTGFPAEAPPPWPRLGLRPRREVPKEAAEGAAEEDGEALASAPVPAAAPASLDSQAVDGTALVCPFSSPISVLRHAADEAPAAPALPAFEFLYSGLGELGDLGSATAPSKAVAAEFDCLPWWEGEDFVTVTGLTASAGAAVSVI

SEQ ID NO: 8061 - protein, 502 aa, Zea mays
  VARIANT 16: note = Ancestral polymorphism is T, Derived polymorphism is A
MISVPAFPKTPVYREALKLGVILLSPSFPSQVATASPPFPPPHHLQHEAARADVPPDTENPAPRARIRRAATQVPAGRAPAPPAAGRAMPRRGETAVVPIDVASAGGGRGDERPKRERHRSHGPGRHGPHRSRPPPPPPPAFRPFRRWFPFLVPLFIVANIVLFVLTMYVNDCPAHARATGAAIGGSVGESATAQGCWLAPELGRFAFQSFKENPLIGPSSATLLEMGALETSKVTKDHEGWRLITCIWLHAGVVHILANMLSLLMIGIRLEKEFGFIRIGTLYVISGVGGSLLSSLFMVSNISVGASGALFGLLGSMLSELITNWTIYENKFAALLTLVMIILINLAVGILPHVDNFAHLGGFMSGFCLGFVLLMRPQFGYINQKNSPLGFPMGVTKRKFKTYQVILLVISTMILVSGFTIGLVLLFQGFNASEHCSWCHYMSCVPTSKWSCNAPNNYCMSSQLGNQLNLTCESTGKTASYVLSDPNNSEAIKNLCVGLCS

SEQ ID NO: 8062 - protein, 178 aa, Zea mays
  VARIANT 33: note = Ancestral polymorphism is S, Derived polymorphism is L
  VARIANT 24: note = Ancestral polymorphism is R, Derived polymorphism is W
MRRAEPVGEQADAERRMSGYKGVRRRRWGKWVSEIRVPGSRERLWLGSYATPEAAAVAHDTAVYFLRGGGGAGDVAALNFPERAAAAYGAGGRLSPRSVQRVASDAGMAADAQLVAAREDTRALRAGIGGGASARPRDRDAGDACAGRAHNASLHSTGAGREQPVSGEISVDDMDILL

SEQ ID NO: 8063 - protein, 177 aa, Zea mays
  VARIANT 33: note = Ancestral polymorphism is T, Derived polymorphism is I
  VARIANT 40: note = Ancestral polymorphism is P, Derived polymorphism is R
  VARIANT 43: note = Ancestral polymorphism is R, Derived polymorphism is H
  VARIANT 49: note = Ancestral polymorphism is C, Derived polymorphism is F
  VARIANT 61: note = Ancestral polymorphism is A, Derived polymorphism is V
  VARIANT 89: note = Ancestral polymorphism is A, Derived polymorphism is T
  VARIANT 90: note = Ancestral polymorphism is E, Derived polymorphism is K
  VARIANT 97: note = Ancestral polymorphism is R, Derived polymorphism is K
  VARIANT 105: note = Ancestral polymorphism is T, Derived polymorphism is M
  VARIANT 111: note = Ancestral polymorphism is A, Derived polymorphism is V
  VARIANT 112: note = Ancestral polymorphism is R, Derived polymorphism is C
  VARIANT 135: note = Ancestral polymorphism is K, Derived polymorphism is M
  VARIANT 136: note = Ancestral polymorphism is P, Derived polymorphism is S
  VARIANT 140: note = Ancestral polymorphism is L, Derived polymorphism is Q
  VARIANT 142: note = Ancestral polymorphism is S, Derived polymorphism is L
  VARIANT 157: note = Ancestral polymorphism is L, Derived polymorphism is Q
  VARIANT 159: note = Ancestral polymorphism is D, Derived polymorphism is E
  VARIANT 168: note = Ancestral polymorphism is G, Derived polymorphism is D
MRYPVSKVLLEKEASRFAEEHGIGLVTVCPGLTVGAAPAPTARTSVPNCLSLLSGDEAAFAVLDAIESATGCLPLVHVDDVCRAELFAAEEGAAARRYVCCSLNTTVAELARFLADKYPQYGVKTNLFSGERLEKPRVCLSSAKLVKEGFEFRYRTLDDICDDMAEYGKALGILPDL

SEQ ID NO: 8064 - protein, 423 aa, Zea mays
  VARIANT 371: note = Ancestral polymorphism is H, Derived polymorphism is Y
  VARIANT 312: note = Ancestral polymorphism is S, Derived polymorphism is P
MSAAARAPPPPRALYAPSRRVPFGAVILSAPRPGARVRAARPREGNVHNHCLLTSSSLNSSSLLCPPCNCAQMALADTRIAYQPEVDKHAGVLAYELVQGNLVQWNSFMDKSIPDPPTAVLLHGILGSRKNWGSFAKRLAQEFPMWQFLLVDLRCHGDSTSIKKSGPHTVASTALDVLKLVCSFLRQLFMSSLFGFSFFSIFIFINRTRSVACLKMNSICVQLALSMVEQAAKPLARPVRVWVLDATPGKVRAGGDGEDHPAELIEFLRRMPEQVSSKQEVVDALVKGQFSMDVARWVATNLRRTSPLGQRPSSSFSWTFDLNGISEMYKSYEDTNLWRIVENVPRGVHINFLKAERSLHRWALEDLQRIYTAEELAADEGGGVEMHVLEDAGHWVHADNPDGLFRILSSTFRIETTIRGMQD

SEQ ID NO: 8065 - protein, 396 aa, Zea mays
  VARIANT 39: note = Ancestral polymorphism is R, Derived polymorphism is W
MPLTRVAADAFGVLTIALFALFAALGLFCIFQSVYFRCRIRRGPSFLPLGYFNGPWVTRIALILITIWWGVGEIVRLSFLKKKLFSSLTWQRNICDVYILSNLGFAEPGIFFAFAFLLHGSLQKRELGTLNQRWNWKTMAYLLVFCIPVFSVQAILVFVGPRFVREENHDLGRRKIAKYFIRTYTPVGDTSVCTYPLFGTLFLGLVDAFLMSYVSYVGLRVLSLVINKSLRRRVYLLMLSVLCFLPIRVLLLGFSVLLKPGHVAFEGIIFLSFLMMLSCTTVGILLLVYYPVADSLALRDIGQRDIAEMVPYDDYYYEGTSLVANQSFREIERNSDTSTKPGSISFRTMIREDQLQQDGTDEIGFSSRSGVHIGSPSGSSPSAAVPMLPLKEIPRY

SEQ ID NO: 8066 - protein, 152 aa, Zea mays
  VARIANT 77: note = Ancestral polymorphism is P, Derived polymorphism is R
  VARIANT 130: note = Ancestral polymorphism is V, Derived polymorphism is M
  VARIANT 131: note = Ancestral polymorphism is W, Derived polymorphism is C
MNIDQDECDHSRQVAMTRINEAEVIDLTSDDEEDPRTVQHKPEGKVMHDPTPWAMDGILQPEQRQPAHAAMNGIVPPEQHKPARAATNGVSPWTLQWHYIDPQGDTRGPFSLVHLLHWKRGGFFDEGFRVWRTGQTSEQAILLRDALLHLHL

SEQ ID NO: 8067 - protein, 925 aa, Zea mays
  VARIANT 37..925: note = Derived polymorphism lacks residues 37 to 925
MERLVLACGGEAVNSVDDLTERCLGWAGLVYDHVLGEEKYTFVENVKNPHSCTILIKGPNDHTIAQTKDAVRDGLRSVKNTIEDGAAVLGGWELDLVRKVRKPRTRARTARSEVGIGSSSRCFRSMEESVPMSVISSISNFRTLSTSSVVETELVKRYCRKINEILGLLKLVLDEVIPQISLDDRMLEGLAATINDAIKLVGSWDLMMSKIYFVMLVESLITKMQNYVLEVCQVVNSEVTPPETNRISVYLEKIKQFQCDKIMGIIKEASRDIAGKFTPKSETLTKIQVSLSLSTNQELLMEAVALAKIRTRVDAEDSSELDGINHISELVNHMLEKHVEEKQMHSINGVPIPADFCCPLSLELMSDPVIVASGQTYERVFIRKWLDLGYNVCPKTRQTLGHSNLIPNYTVKQLIENWSEVHGVVLPDPVKLLSLNFSVSLKPINGRTSDKSPFSENSSRENKFGSPDHISSDDSCHPNLLHENFDSDDQISKASSSEDTDDSETGPPKLLVASTEANKLMCNASIDGSDAIKQSRKDGFHASDVEPRLQRNSISGDIGTSASSSSNHLEVVEKDKEEQVSSNSIASETTRNGRTVTCSKPNFQPRLGGVRSRNHLVWQQRSDKAVSLDSRSDFAIVDNKVRKLIEDLKNERTDPERAAIGELLVLSRHNMESRISIANHGAIPFLVNLLYSADPSMQENAVTVILNLSLDDNNKITIASADAIKPLIHVLETGNPEARANSAATLFSLSVNEENKAKIGRSGAIKPLVDLLRDGSAQGKKDAATALFNLSIFHENKARVVEAGAVKPLVELMDPAAGMVDKAVAVLAILATVQEGRNGIAQAGGIPVLVEVVELGSARAKENAAAALLQLCTNNSRFCSLVLQEGAMPPLVALSQSGTARAREKAQVLLSYFRNQRQVGKVTRR

SEQ ID NO: 8068 - protein, 295 aa, Zea mays
  VARIANT 62: note = Ancestral polymorphism is G, Derived polymorphism is D
MSGAGPDLQLPPGFRFHPTDEELVMHYLCRRCAGLPIAVPIIAEIDLYKFDPWQLPRMALYGEKEWYFFSPRDRKYPNGSRPNRAAGAGYWKATGADKPVGTPKPLAIKKALVFYAGKAPKGEKTNWIMHEYRLADVDRSARKKNSLRLDDWVLCRIYNKKGGGLEKAAAPAAGGDHKPVFATAAVSSPPEQKPFVAAAGGLPPAFPELAAYYDRPSDSMPRLHADYSSCSEQVLSPEQLACDREVQSQPKISEWERTFASDPVNPAGSMLDPVVGHAGGDPLLQDILMYWGKPF

SEQ ID NO: 8069 - protein, 97 aa, Zea mays
  VARIANT 5..97: note = Derived polymorphism lacks residues 5 to 97
  VARIANT 33: note = Ancestral polymorphism is V, Derived polymorphism is I
  VARIANT 42: note = Ancestral polymorphism is G, Derived polymorphism is E
  VARIANT 56: note = Ancestral polymorphism is A, Derived polymorphism is S
  VARIANT 62: note = Ancestral polymorphism is A, Derived polymorphism is V
  VARIANT 71: note = Ancestral polymorphism is W, Derived polymorphism is C
  VARIANT 74: note = Ancestral polymorphism is N, Derived polymorphism is H
  VARIANT 80: note = Ancestral polymorphism is S, Derived polymorphism is P
  VARIANT 85: note = Ancestral polymorphism is A, Derived polymorphism is V
MTPFWIDGSKVGVYGKPAIEDFEADDAHCKRVISKSYVNGMGIDWSKVRNVMDMRAVYGGFAAALWDKKVWVMHIVPIDSADTLAIIYERGLFGYVP

SEQ ID NO: 8070 - protein, 252 aa, Zea mays
  VARIANT 120: note = Ancestral polymorphism is G, Derived polymorphism is E
  VARIANT 127: note = Ancestral polymorphism is R, Derived polymorphism is C
  VARIANT 136: note = Ancestral polymorphism is G, Derived polymorphism is R
  VARIANT 139: note = Ancestral polymorphism is L, Derived polymorphism is P
  VARIANT 146: note = Ancestral polymorphism is A, Derived polymorphism is T
  VARIANT 162: note = Ancestral polymorphism is G, Derived polymorphism is C
  VARIANT 171: note = Ancestral polymorphism is V, Derived polymorphism is A
MAPVLPAAPSSKPDPSHGPPSYPRRRRCCLGFLRLTPNLAAAARAGGLELPVLPSSTTPGKWFPFLPLPRIPHPPLPLLREPRISVLAPDIGLLQAFRSAARTLGESRAVDMEFLCVFAGKHVWSVRVDLHILDNGGNPIDAANITALAALSTFWRPECTVGGDNGQQVTVHDPEVRDPLPLTIHHMPIAVTFAYFGEGNIVVLDPTYKEEAVMGERMTAIVNSNGDVCAIQKAGGEGLMSSVTMQCLRIAS

SEQ ID NO: 8071 - protein, 894 aa, Zea mays
  VARIANT 132: note = Ancestral polymorphism is D, Derived polymorphism is E
MPAPSAVASAVERLQAAAQDAAKSSSRSAGAFSEQAQQALVSRTAGVLLPIPIYDLNCASDDLITVLHGFSSLPASLPLRLHEQYQLKQTVFILELQMCNKIWRPRQCRSMAINVRKPELSVSYTLFIMYMDYVSRISRLQKCDGLFLCQHVQSQDDEPVQGLRSRKEAHLLSIGAEHLKYLPLLAACFLQLLSELACFLSAAVRAPTKPNPAHPKYLPLPRRFTVTPLLAFRRLRPMSTSASPHTSILHLPHRPFVFRRPRLSRLRCFASLAPASSGASPANDDHLIQMLCAHGRLAQATALLQGLPAPTQRTYESLLLAAARARDTALAAAVHRRLEADPVFRSDPFLSTRLIEAYAALSALPAARQVFDEAPVKNIFVWNAMLKALALADHGEEALTCLADMGRLGVPVDSYSYAHGLKACIAASASHLPASARVREMHAHAIRRGYGLHTHVATTLIDCYAKLGIVSYAERVFTSMPDRNLVSWSAMIGCYAKNERPGDAIQIFQEMMASDADLVPNSITIVSVLHACAGVNALGQGKVLHAYILRRGFDLLVSVLNALMAMYMKCGCLETGRYIFNWIGRRRNVVSWNSLISGYGMHGFGRESLQVFEEMIEEGISPNIITFVSVLGACSHVGLVEQGKKLFESMVEYNVTPRAEHYACMVDLLGRAGRLDEAVELIQSMRIQPSPQVWGSLLGACRIHGHVEYAEMACSHLFDLEPRNAGNYVLLADIYARAKLQNQVDVLKELLEEHALEKVPGCSWIEVKKKLYSFVSVDNKNPQVEELQALIGEFVTQMKNEGYVPDTRSVLYDIEEEEKERILLGHSEKLAVAFGLIKTGSGEAIRITKNLRLCEDCHSVTKFISKFTDREIVVRDVNRFHHFRNGVCSCRDYW

SEQ ID NO: 8072 - protein, 191 aa, Zea mays
  VARIANT 69: note = Ancestral polymorphism is A, Derived polymorphism is V
  VARIANT 61: note = Ancestral polymorphism is M, Derived polymorphism is I
  VARIANT 15: note = Ancestral polymorphism is K, Derived polymorphism is N
MAAKREISSTLRNLKFMQRGAAAQKAEEKAEVEVQEEEVVMAPSGGFASSAQVVRKCIVIMEGNPHPGAIKGRMSFQNFNPSIDKLNEEARGDQQTESASPSNCDQDNANSSRGNEVPASRCRDFGIPSSESISLNELKRKEPDLDMETPASYKEPKTNVGGRSSSQSNGRGSHKSNKREKLDFNHLRPKK

SEQ ID NO: 8073 - protein, 259 aa, Zea mays
  VARIANT 53: note = Ancestral polymorphism is E, Derived polymorphism is V
MQCSNLLLLHLNFAVIMPLSALDRLGGLNIEYPMLFQIKHPSTERATHCGVLEFVADEGFIHMPSWLMAHLGVPENEIVLVRSTSLPKATFMKLQPHTKDFLHVPNPKELLEHNFGKFPCVTAGETIAVTEGERRYYLDVLEACPAGAVCSIDTDCAVDFAPPLDYVEAPPFVASQGSDEPPQPARFSGTGRRMDGKPVEMPTPSPAAESVVAPGVPKRMVRFGAPSASAAASGVSKAKEGGGKEQEKRFTGTRYSLKD

SEQ ID NO: 8074 - protein, 126 aa, Zea mays
  VARIANT 30: note = Ancestral polymorphism is P, Derived polymorphism is L
  VARIANT 31: note = Ancestral polymorphism is S, Derived polymorphism is L
  VARIANT 37: note = Ancestral polymorphism is P, Derived polymorphism is L
  VARIANT 38: note = Ancestral polymorphism is P, Derived polymorphism is L
  VARIANT 58..126: note = Derived polymorphism lacks residues 58 to 126
  VARIANT 63: note = Ancestral polymorphism is T, Derived polymorphism is K
MQARAGFMVPKLNMPFSTAAGADNSVPEVPSLYLTIPPGLSPATLLESPVFVSNSMDQGSPTTGTLFMFGSTNDNDPIRFGGGPPLVGDGPNAFPFKPLDLKSSHYTAEAMKLTYFFFGSFESITG

SEQ ID NO: 8075 - protein, 391 aa, Zea mays
  VARIANT 26: note = Ancestral polymorphism is P, Derived polymorphism is L
MSEIMKLKRGISTKPGDHLVQNGKRPIFFKHGQQHPCHEWEEQQRYWPSPRAPPASPTESPRTPGGSQKKAVLGKVKSKAKKWMHMLHHKKKPAPPEEMMWTPRAGPGPSAAQDSMPSREERHAAEHRGTGTGTPRKPQQHAPSCSSSDPERASEVFLEASPRQNSPVPSPTAHRQQQQPQPYFKVSSRFESEMKEANEMLMESKKLRVNTTKPKTKTVTFAPPAVEREQPGPGGERSGWKKDCRRELPGAAASQALRDAFAAVRQTVLEMVARIQEAVALVDGRRHVVERLVSLGRYLVMKLEPGQDDTLLSEAITDAVLDLFDAWSESVERPLVRRAKEISSWFLQEGREDTPPPVPPSTRPCAAEGKTMCRPELILSAEHCYWISDGL

SEQ ID NO: 8076 - protein, 796 aa, Zea mays
  VARIANT 208: note = Ancestral polymorphism is M, Derived polymorphism is T
MEDPVAVPSSSLTDPAAAAAARVPGAVAAAPGVTSAPSALAPTQPPATAAAVSEAATPCQRQLFTVELRPGETTIVSWKKLLKEAGHTAAAPPVAVEPAFAAHAGPSGPAHPAENDPKDPTQPNRFNAVIEKIERLYMGKHSSDEEDLNDVPDDDQYDTEDSFIDDAELDEYFEVDNLKTKHDGYFVNKGKLEQITIDRIGLVQCDEMIYINVVLFCSEPGTAANVAPKKRRRKDASSSYLESNHLGPIDYFDIGDVPEKSSARGTVQTGKQLVSSNVSSYGQYHEDNRVVKNKISGPGGAPKRKSSEFSGDAAARAKIIKDVSHAPLELRDMEKHKAAALPVDYAHKSKISETFDYAYPAYRDKGTSGQLDFQQRKISRENQGPSNRTYRKEKHGTNEYPGIAMATAVYSTQTMHPVVGREGSGTKPKGTRLERAIRDLQKIVAEYRPPTIDINEVDPNGQVAVKRRLPPEIKQKLAKVARLSANNGKIQEHELMNRLMGIVGHLVQRRTLKRNMKEMVESGISAKLEKADRFQRVKLEINEMIKERMATKSKVNEQDGSADDFQVANDERRALKTKYTMDTALEDKMCDLYDMYVEGMDEDKGPQSRKLYVELAELWPHGCMDNVGIKDAIYRSKERRRLLYSQQKVRSEERMKRKRLAATAKLPDGLAVAMQSGVAPQVAQPPITNPITYHTADYGQNPGLKYFDRARETSSSAIPDDGNRIAGEVKKKKRKPEYDPVDTQANLPRAPMPHGSEKQKPSKPADEASAGSLPSMATTQTVLGLPSVLGHNQQPS

SEQ ID NO: 8077 - protein, 218 aa, Zea mays
  VARIANT 174: note = Ancestral polymorphism is V, Derived polymorphism is I
  VARIANT 155: note = Ancestral polymorphism is Q, Derived polymorphism is P
  VARIANT 55..218: note = Derived polymorphism lacks residues 55 to 218
  VARIANT 50..218: note = Derived polymorphism lacks residues 50 to 218
MPVRVVDTATPSSQPSPGQEANTGHPSPPRCSLLSAGRSFAGTQNVSSLQKDEAWKVNVRIHGCDLEQGYLCGTMEALNVPLADTPVVTFWEGEIVDAKNYTFFTGKWEASPEDDIRHWSKFPSFMPLLSQIETDGGKSLDFSNYPYIFMRWKEQYFVNVGVDCGLTIAGFYYVCFSCSDGSISGFYYDPNSSPFQKLELKCTNEKSSGFTFSSYELQ

SEQ ID NO: 8078 - protein, 225 aa, Zea mays
  VARIANT 18: note = Ancestral polymorphism is Q, Derived polymorphism is L
  VARIANT 27: note = Ancestral polymorphism is G, Derived polymorphism is E
MGRGKIEIKRIENSTNRQVTFSKRRNGILKKAREISVLCDAEVGVVVFSSAGKLYDYCSPKTSLSKILEKYQTNSGKILWGEKHKSLSAEIDRIKKENDTMQIELRHLKGEDLNSLQPKDLIMIEEALDNGLTNLNEKLVTNPPSQSISMRLTLQMEHWERRVTNTKMMEDENKLLAFKLHQQDIALSGSMRELELGYHPDRDLAAQMPITFRVQPSHPNLQENN

SEQ ID NO: 8079 - protein, 142 aa, Zea mays
  VARIANT 45..142: note = Derived polymorphism lacks residues 45 to 142
  VARIANT 74: note = Ancestral polymorphism is S, Derived polymorphism is N
MWSAATAAAARAVSVSPVPAPSLLSGRRGGSRGGRGSVSVRSTVWDFVGGDLPSLGRQPVARWYFPPEVDYRLSLLHPDAKGLVVWIIEAKVLSKAELQFLAMLPDIRPKVRVIAECGNWRSFVWKPLKQIAGLEPDPDAEE

SEQ ID NO: 8080 - protein, 386 aa, Zea mays
  VARIANT 14..386: note = Derived polymorphism lacks residues 14 to 386
MATEASTSAAGGIWVEGMSADNIKGLVLALSSSFFIGASFIVKKKGLKKAGASGVRAGVGGYSYLYEPLWWAGMITMIVGEVANFAAYAFAPAILVTPLGALSIIISAALADIMLKEKLHIFGILGCVLCVVGSTTIVLHAPQERTIESVAEVWDLATEPAFLSYAAIVLAATFVLIYYFIPRYGQTHIMVYIGVCSLVGSLSVMSVKALGIALKLTFSGMNQLIYPQTWLFTIVVVACIVTQMNYLNKALDTFNTAVVSPIYYTMFTSLTILASVIMFKVTFVFYFCLPYFLRRVQKILFFRYLHQDWDRQNPTQIVTEMCGFVTILSGTFLLHKTKDMVDGLPPTLPVRIPKHEDDGAEGIPLRSAEGIPLRSPRATESFRSTL

SEQ ID NO: 8081 - protein, 327 aa, Zea mays
  VARIANT 7: note = Ancestral polymorphism is G, Derived polymorphism is D
  VARIANT 96..327: note = Derived polymorphism lacks residues 96 to 327
  VARIANT 129: note = Ancestral polymorphism is D, Derived polymorphism is G
  VARIANT 277..327: note = Derived polymorphism lacks residues 277 to 327
MDNNFTGIVPGSLYSCNGLIALRLSSNGFHRQLSGDRQAQVAQVLKSVPSLTTLLIGVNFRGEAMPKDETNDGYRSLQVLSLADCSLSGEIPRWVSGLENLRELFLSSNRLTGPIPAWVSGLSLLFVLDVSNNSLAGEIPTALAGLPMLRSETTVGDHGGSSSQATFPFPVYMAASLQYHRANYCPKLLNLGDNRLTGAVPPEIGRLKGLTQLNLSLNSLRGEVSQAVGNLMNLEVLDLSSNRLTGEILRALESLRFLSYFNVSNNDLDEPVPVGGQFCTFPSSSFAGNPGMEAAAGAGADPALGATRERGWHRNWTVGMDAIGRSG

SEQ ID NO: 8082 - protein, 220 aa, Zea mays
  VARIANT 129: note = Ancestral polymorphism is G, Derived polymorphism is D
  VARIANT 180: note = Ancestral polymorphism is S, Derived polymorphism is G
  VARIANT 181: note = Ancestral polymorphism is A, Derived polymorphism is G
MARDLTIANTAGPDAHQAVAFRSTGDRTVLDGVELLGHQDTLYAHAMRQFYTRCRVAGTVDFVFGNSAAVLHDTALVVLPRQLRPEKGENDAVTAQGRTDPAQPTGIVLSRCSVNGSEEYMALYRERPGVHHVYLGRPWKEYSRTVYVGCTLAEIVQPQGWMPWNGDFALQTLYYGEYDSAGPGSAAGRRVAWSSQVPKVHVDAYSVASFIQGHEWIPRV

SEQ ID NO: 8083 - protein, 611 aa, Zea mays
  VARIANT 202..611: note = Derived polymorphism lacks residues 202 to 611
  VARIANT 159..611: note = Derived polymorphism lacks residues 159 to 611
MLLRHRHHLLSRPRRSFPLAALGCVAMSTSSSPSSSTSTSAAADYHCRTKHSPTAGYARGPGRLDWANQPNPFLRFSPAPPLPLPNPPPLAPVPYPALFHSPPPPPQPLTLDSLSALLFHSLALSAWKSAGLSTWSLRVNPSSGNLHPTEAHLVFPHPREVDRLAIAHYAPRDHLLEARATAPIRDCSAILSAPGMAILALSSVFWREAWKYGERALRYCNHDVGHALAAVALAAATLGWDARLLDGLSDEDLGRLVGVEKGSPAAVPEGLLNKVVKGKARWVERQHPDCAVLLFPVGSEPEVDYGRISEELKVFDGLEWVGKANALSNDHVVWDVIYRTAEQVKKHGPAPGERFFVMPWQKSPALSKGLYKELTVQEVVRQRRSAVDMDGVHVMGRDTFYQMLMHCLPSGEVGSGERQGEQSALPFRVLPWEAEVHAALFVHRVSGLHRGIYFLVRNEEHFDALQRAMRQDFEWVQPEGCPDGLPLYRLMKGDCQKFAMQISCFQEIASHGCFSLGMIARFEPVLHEKGEWMYPRLFWETGILGQVLYLEAHAIGISATGIGCYFDDTVHEALGLKGLDFQSMYHFTVGAPVLDKRIMSLPAYPGPGIDA

SEQ ID NO: 8084 - protein, 638 aa, Zea mays
  VARIANT 338: note = Ancestral polymorphism is D, Derived polymorphism is V
  VARIANT 237: note = Ancestral polymorphism is R, Derived polymorphism is I
MQFFGCVFHGIQRIWRVSEDTAKRRTQKSKSFKEVEKFDVFVLEKSSGCKFRSLQLLLFAIMSAAFLTLLYTPSVYEHQLQSSSRLVNGWIWDKRSSDPRYISSASIQWEDVYKSMQNLNVGEQKLSVGLLNFNRTEFSAWTHMLPESDFSVIRLEHANESITWQTLYPEWIDEEEETEIPSCPSLPDPSFSRATHFDVVAVKLPCTRVAGWSRDVARLHLQLSAAKLAAATARGNRGIHVLFVTDCFPIPNLFSCKDLVKREGNAWMYKPDVKALKEKLRLPVGSCELAVPLNAKARLYTVDRRREAYATILHSASEYVCGAITAAQSIRQAGSTRDLVILVDDTISDHHRKGLESAGWKVRIIQRIRNPKAERDAYNEWNYSKFRLWQLTDYDKVIFIDADLLILRNIDFLFAMPEITATGNNATLFNSGVMVIEPSNCTFQLLMEHINEITSYNGGDQGYLNEIFTWWHRIPKHMNFLKHFWEGDEDEVKAKKTRLFGANPPILYVLHYLGRKPWLCFRDYDCNWNVEILREFATDVAHARWWKVHNKMPKKLQSYCLLRSRLKAGLEWERRQAEKANFTDGHWKRNITDPRLKTCFEKFCFWESMLWHWGENKNNSTQSSAVPATPAATSLSSS

SEQ ID NO: 8085 - protein, 307 aa, Zea mays
  VARIANT 228: note = Ancestral polymorphism is F, Derived polymorphism is C
  VARIANT 230..307: note = Derived polymorphism lacks residues 230 to 307
MASQGERRSIVHDTSNHARACDLVPITNQGHRQRIMHEPSTSTMSFTMPTSNLGVPIHDVPSHINANLARQYRPPRNIGVPVQCTFFSDEYVAALKASYPMRSNHGTPDYTCQMCGALFWYGERTRGNVRNRAIQYYNCCKGGKVYLPPYEERPEPLKSLARFDSDARTKKFIANIRQYNCLFAFTSMGANIDNAVNDGSGPPLFKICGQVHHRIGSLLPQEGSTPQFLQLYIYDTVNEVENRLRCLNPTKESIQNIDPLIVQELIKMLDEHNPFAKKFRMARDRLSDYEDEDFIIRIVGAREGDPV

SEQ ID NO: 8086 - protein, 213 aa, Zea mays
  VARIANT 106: note = Ancestral polymorphism is A, Derived polymorphism is P
  VARIANT 95: note = Ancestral polymorphism is P, Derived polymorphism is A
  VARIANT 58: note = Ancestral polymorphism is A, Derived polymorphism is V
  VARIANT 54: note = Ancestral polymorphism is D, Derived polymorphism is G
  VARIANT 15: note = Ancestral polymorphism is S, Derived polymorphism is R
MKHLREIGEERRTRSLLKRRLMMRLRKDGYDASLCRSSWVATAEHPGGDYEYIDVVVAGEHGGGAASSSSTSSSSSRIVVDIDFSSQFQLARPAPWYAQLWARLPPVFVGPRARLRKAVSLLCEAAQRSLRESGLHVPPWRRSGYMQAKWLPGGTSEVVAAAAQRSVAIARGAGGGTRRPGAGAGAGGLSMALLSSSGAEANGCQGQAGSMWA

SEQ ID NO: 8087 - protein, 510 aa, Zea mays
  VARIANT 359: note = Ancestral polymorphism is A, Derived polymorphism is S
  VARIANT 272: note = Ancestral polymorphism is N, Derived polymorphism is D
  VARIANT 32..510: note = Derived polymorphism lacks residues 32 to 510
  VARIANT 22..510: note = Derived polymorphism lacks residues 22 to 510
MVRLLGKGYFYGSKRSVMIVWQLAEISLYMFQSCLMKIGKGRKKMRNKQRKSSALGSDAGCGSSLSCIVWSLVGFGLVCFIFLKHQADSGQTHVYFSPLHATRELEDIEEDHFRLPPPHKVNPRAVKRRGPRKQPKVIDDYLEESSAVHALFFPDQMTAVDPTKGGNDSMYFYPGRVWLDTDGNTIQAHGGGIMYDHKTARFYWYGENKDGPTYQARPKGTQRVDIIGVSCYSSKDLWSWTHEGIVLRGEPSNVIHDLYKSKVLERPKVIYNDRTEKYIMWMHIDDANYTKASVGVAVSSSPTGPFTYLYSFRPHGCESRDMTVFKDDDGMAYLFYSSRDNTELHVSPLTEDYLQITAAMKRILIRRHREAPAVFKHQGTYYMITSGCSGWAPNRALAHAAESIMGPWETLGNPCVGGNRFYRLTTFLSQSTFVLPLPGLSGAFIFMADRWSPSNLRDSRYVWLPLFVGGLADEPLDYSFGFPLWSRVSIYWHKKWRLPEDWKIANTANT

SEQ ID NO: 8088 - protein, 206 aa, Zea mays
  VARIANT 112: note = Ancestral polymorphism is G, Derived polymorphism is E
  VARIANT 94: note = Ancestral polymorphism is D, Derived polymorphism is N
  VARIANT 65: note = Ancestral polymorphism is R, Derived polymorphism is W
  VARIANT 22: note = Ancestral polymorphism is L, Derived polymorphism is V
MAATTSAASARGLLLCVLVAFLHRLQFQIPPVAVAAATPKNKTESRDGHGKTLSFTLYQHETINRTGYIVVDGVAGAGVSQTTTPFGTIYVFRDDLTVRADRDSRVAGVAEGTSITTSLDGLQSMSLAKITVHHRGHRGSVSVLGGTYNTKPSDYPVVGGTGDFAYALGYVRSSPVDLRGRTVTYKMELHLYWPPYAHYAPVPRKA

SEQ ID NO: 8089 - protein, 319 aa, Zea mays
  VARIANT 215: note = Ancestral polymorphism is I, Derived polymorphism is T
MGQSQGRAGRAKPETRHATREGEQQRRRGDIARPGPEATAEEGQQRRPPRVPATMDTFFLSHGSPTLSIDDSIPARHFFKSWVPAKVAGDQPPRAILVVSGHWETATPAVNVIRGSNDTIYDFYGFPKPMYQLKYPAPGAPDLALRTVELLEQAGFGPVKQDHSRGLDHGAWVPLMLMYPDASIPVCQLSVQTDRDGTYHYNLGKALAPLREEGTLIIGSGSATHNLRKISPSDAPVPQWAAEFDTWLKDSLLNGRYEDVKRYEEKAPHARVAHPWPDHFYPLHVALGAAGDGAKAEQIHQCWSNGTLSYASYRFTTNT

SEQ ID NO: 8090 - protein, 1001 aa, Zea mays
  VARIANT 524..1001: note = Derived polymorphism lacks residues 524 to 1001
MALSCLQQRLATRDQPEPAAWTKASSALTFLCSWPVSLINSDWPDAWDAAAFFFGSLCAFLDSVRVAFAKPFRASKSLPLDRDILLGIRGYLKDPQNYLHNWDESHSPCQFYGVTCDHNSGDVIGISLSNISLSGTISSSFSLLGQLRTLELGANSISGTVPAALADCTNLQVLNLSMNSLTGELPDLSALVNLRVLDLSTNSFNGAFPTWVSKLPGLTELGLGENSFDEGDVPESIGDLKNLTWLFLGQCNLRGEIPASVFDLVSLGTLDFSRNQITGVFPKAISKLRNLWKIELYQNNLTGEIPQELATLTLLSEFDVSRNQLTGMLPKEIGSLKKLRIFHIYHNNFFGELPEELGNLQFLESFSTYENQFSGKFPANLGRFSPLNTIDISENYFSGEFPRFLCQNNKLQFLLALTNNFSGEFPASYSSCKTLQRFRISQNQFSGSIPAGLWGLPNAVIIDVADNAFSGGIFSDIGFSVTLNQLYVQNNYFIGELPVELGRLTLLQKLVASNNRLSGQIPRQIGRLKQLTYLHLEHNALEGPIPQNSLTGDIPDTLVSLVSLNSLNISHNMISGGIPEGLQSLKLSDIDFSQNELSGPVPPQLLMIAGDYAFSENAGLCVADTSEGWKQSITNLKPCQWSDNRDNLSRRRLLVLVTVVSLVVLLFGLACLSYENYRLEELNRKGDTESGSDTDLKWALETFHPPELDPEEISNLDGESLIGCGGTGKVYRLELSKGRGTVAVKELWKRDDAKVLNAEINTLGKIRHRNILKLNAFLTGASNFLVYEYVVNGNLYDAIRREFKAGHPELDWDKRCRIAVGVAKAIMYLHHDCSPAIIHRDIKSTNILLDEKYEAKLADFGIAKMVEGSTLSCFAGTHDYMAPELAYSLNATEKSDVYNFGVVLLELLTGHSPTDQQFGGEKDIVSWVSFHLAEKDPAAVLDPKVSNDASDHNHMMKALHIAILCTTQLPSERPTMREIVKMLTDIDPSSTARRAKNKTDK

SEQ ID NO: 8091 - protein, 1066 aa, Zea mays
  VARIANT 191..1066: note = Derived polymorphism lacks residues 191 to 1066
  VARIANT 169..1066: note = Derived polymorphism lacks residues 169 to 1066
MILRTPPQRKRRAGSGAGDDADLGLVKSVGVASATGRSPVSDRRLALYDRPTALALADAPGEPFDDMVCTYHCRQMVKSEFMVALDTAEKQVQEYQTKLVALEDQLSKSEDERMQFLDKLNYVEQELAATKGRESALQERLLKELGEYQERYRGQVQLNKEIDSRISAESSVSSAKALIKDLEGDLHRLSESSEREKKTLKKELSYVKEDLSLSASKNNAELEKTILRAENYESEAKLLNEQLTNLKKQLDECLSEKNEMELKLLNSSALPNQHAPTEEQKLIKLLQEELRNYEKEVHEAKRLKSSHMNVELLKEKLLEEQGRRERAELELSKLQEIGARAHKLELELASCTALLSNIPDVSSYADIPQKIADLQKQALTYLNEVGEVTSRLKELEVALEYADLSKQQAEGEAALAKERAASATREVKRLELMLTAISEERDKLRKEHATESDQSGMEKTIRELESIIHELKELISHKDTELNIMNERLNLETRKVKSLEREGDQLRSQVALLESKLGHGDYSASSTKVLRMMNTLGVDNEAKQTIEVLQAELKKTKERLQAVEELKGQTDPGTVVDANIAEKLAQLKNQIATLEKREERYKAVFAERISVFRKACCSLFGYKIVMNDQQQSNGIPVTRFILQSVYAQSDDEKLEFDYESGSTNIVVNDYTSQQEIARQALAERQPQLEKKPPRGGRAPLSGKAVAALCVTSFVVGLLLSGNVSLMSASAAAAASSSYSSRDSVSGCDNKRCAYSLARTSSLASNPTMNNLWSETRREPAPQGYPERGVEDSSSNTIAGQGGVHPGDGDGRGAREERGGVASGRSPPQKAFVVVGINTAFTSRKRRDSLRDTWVPRGHKLRKLEREKGVVIRFVIGHSGTPGGGALDRALDAEEAESRDFLRLDHAEGYHELSSKTRSYFTTAVATWDADFYVKVDDDIHLNLGMLTSRLAKHRTRRRLYEVWACPVTERSEVPRARVLEVRPILHRFANEDVSLGAWLIVLEVEHVDDRSMCCATPPDCEWKKRAGNVCVASFDGSCSGVCKSADRMMRHIHCGEGDGAVWNAAT

SEQ ID NO: 8092 - protein, 184 aa, Zea mays
  VARIANT 88: note = Ancestral polymorphism is I, Derived polymorphism is M
  VARIANT 167: note = Ancestral polymorphism is R, Derived polymorphism is H
  VARIANT 173: note = Ancestral polymorphism is G, Derived polymorphism is S
MAPGALTRLLRVASTPRMARPFAAKSRASRRPQDPELPTGDENDFAGSEVAAPTESIDKPLAEVLKELGKRVPDSLVKTRVEDNGFTMKYIPWHIVNKILNIHAPAWSGEVRNIVYSSDGKSVSVVYRVTLHGIDAEIYREATGTASVDDTIYGDPVQKAESMAFRRACARLGLGLHLYHEDMS

SEQ ID NO: 8093 - protein, 169 aa, Zea mays
  VARIANT 86: note = Ancestral polymorphism is H, Derived polymorphism is R
  VARIANT 64: note = Ancestral polymorphism is A, Derived polymorphism is S
MARNPGRTVFIGNLDEKVSERVLYEILIQAGHVVGLHVPSNKESNSRKGYAFAEYETEDIAQYAVRLFSGLVRINGKTLKFVIAGHDKPSSNDNKSVLLNHVPSSNGNNPVMPKLNPIPLPKPTQIMRCSDMPVSHIPAYPVVNGRIGGYGFSSTPYPNGFHPQGEILS

SEQ ID NO: 8094 - protein, 316 aa, Zea mays
  VARIANT 8: note = Ancestral polymorphism is P, Derived polymorphism is L
  VARIANT 9: note = Ancestral polymorphism is G, Derived polymorphism is R
  VARIANT 40: note = Ancestral polymorphism is M, Derived polymorphism is K
  VARIANT 52: note = Ancestral polymorphism is T, Derived polymorphism is I
  VARIANT 78..316: note = Derived polymorphism lacks residues 78 to 316
  VARIANT 88: note = Ancestral polymorphism is A, Derived polymorphism is T
  VARIANT 128..316: note = Derived polymorphism lacks residues 128 to 316
MLGTMENPGVMVLAMNDLFSKGIVAAGLTQISVYSTDEVMELLQKVNKDRTTEPTRETRPHRVLMRYCRSLDGVNIKRLRKLSLIDLAGSERALATDQRTQRSIEGANINSSLLAFNNCINALVEGKKHIPYRNSKLTQLLKDSLGGACNTVMITNISPSNLSFGETQNTLHWADRAKEIKTKTQQTTVNEEVLDQPDSETMLVLELQKENRVLREQLAKQQQKLLTAEAQLLASKTSPQRSPAPPSHVSTPGSTQRKIRRSILAAGGGNYFSTLDSKRHAADNAQVRELQRKASTLESEIEKMKRAPTAAKAEGQ

SEQ ID NO: 8095 - protein, 587 aa, Zea mays
  VARIANT 82..587: note = Derived polymorphism lacks residues 82 to 587
MTDSFRILGEEDVGARTCPKLRPVSVLMELVTCGSLSVKDHGNAGVVQTCKPRFPNLRFLPSPLISRTMMMGELDCLSENPKLMGIKQKVLIVQGKIVPARGPNDFGWDPVFQSDCFEQTYDEMPKLVKNEISHRGKALALGVVILVQYNIAKYKVEGVSKKRRDIRGGGGSQPSSSRTDRGLSVDFKEPKVAEFDDLEEDKFLNVVVKHCSLSPLPAYEPAFDWENERSLIFGQRVPESIPAISNSGLKITIKVLSLSFQAGLVEPFSGTISLYNRDRREKLSEDFYFHILPTDMQDAATKEGGVTPSVYSRKDPVHLAEKEKQKLQVWSRIMPCKESFAWAMIPLFEGNHAGGLSDAAYPSSPLATSLPGSTSQDSIVDPILKLTLDGKVNHYSSGSSVIVEISNLNKVKESYIVDSLQDPKRKVHKPVKGVLRLEVEKLHGGHNDVDNTSEGGSMANDLNDAGDINNGRSNRSCFDGIHSFMNSIAIAQKDAHHNGIISNAENGDNRRCTFLLQFEAFDFRMLTRSEPFSQLFHCLYVYPLTVSLSRKRNLFVRVELRKDDSDIRKPPLEVIVGHSVLPLSTHI

SEQ ID NO: 8096 - protein, 358 aa, Zea mays
  VARIANT 33: note = Ancestral polymorphism is R, Derived polymorphism is L
  VARIANT 300: note = Ancestral polymorphism is A, Derived polymorphism is V
  VARIANT 324: note = Ancestral polymorphism is R, Derived polymorphism is T
MDGEMDEDALTEILARLPCRSLARFQCVSTSWRRIISSDYLRRRLPLITSGVLYHDDTCRGGADGGRRQQVYTYACASGGGATATATATAEAPDMGFFPRHDTSTIIDGCNGLLLYYASRPTAAFHVVNPTTRRWAELPAPRARTLLSVLAFDPCASPRYRVVCFTGWLPRGATLEVFDSERGAWTDHEVDFGLDTDAMSATMHYSGGALHVLAYSGHVVRVDLDTMASAATELPAPVSCRARAGHCRGRLRFASSDGARLRIWELRDATGGEWALKHEIGVADVVPGAASQPITFLFMAFHPEREVVYLWSPWKLLAFDMVQRRVEEEWAFGSEKEGTHLIQVWLFPFSRHLASALA

SEQ ID NO: 8097 - protein, 188 aa, Zea mays
  VARIANT 67: note = Ancestral polymorphism is A, Derived polymorphism is V
MPLLRLRLASPRSGLPAALDGSAVSVHFRRMSVFASTRPVTAALGAAAFEEVLTLRSPVYFSRGAKAVVKYEPHAFAVSVAASTLDLGKHEVDLTRLLPLSFEDLEDGGDSGFGKWSTSFRLSGPVRGARLNRAAQGRGSGGAAARLDGTGSVSASADAFARAEQGREGSPRGAAQLEVCQAGAFFCC

SEQ ID NO: 8098 - protein, 348 aa, Zea mays
  VARIANT 44: note = Ancestral polymorphism is R, Derived polymorphism is H
  VARIANT 74: note = Ancestral polymorphism is F, Derived polymorphism is L
  VARIANT 111: note = Ancestral polymorphism is D, Derived polymorphism is V
  VARIANT 143: note = Ancestral polymorphism is A, Derived polymorphism is T
  VARIANT 158..348: note = Derived polymorphism lacks residues 158 to 348
  VARIANT 167: note = Ancestral polymorphism is S, Derived polymorphism is L
MSGKFITLSMVAMAYHRSTTRVVRANTIYLGTIRYASVHAHLGRTGSRRDDLESLAYTLIFLIRGRLPWQGYQFLEIVTNMKFDEEPNYTKLISLFDGLIEAPASRQIRIDRALKVGQKHGRLVADLEEDEQPKKKVRLGSPAAQWILVYDARRPMKQRYHYNVADSRLRQHIEKGNDDELYISSVASSANLWALIMDAGTGFCSQVYELSPVFLHKDWIMEQWEKSYYITAIAGSSNESSLVVMSKGTPYTQQSYKVSESFPYKWINKKWKEGFHVTSMATAGNRWGVVMSRNSGFSTQVVELDFLYPSEGIYRRWESGYRITSMAATNDQVAFILSMPKRKPMDET

SEQ ID NO: 8099 - protein, 654 aa, Zea mays
  VARIANT 492..654: note = Derived polymorphism lacks residues 492 to 654
  VARIANT 420..654: note = Derived polymorphism lacks residues 420 to 654
  VARIANT 216..654: note = Derived polymorphism lacks residues 216 to 654
  VARIANT 112..654: note = Derived polymorphism lacks residues 112 to 654
  VARIANT 29..654: note = Derived polymorphism lacks residues 29 to 654
MKPSLSKKKGKKKKKSSLPAAAPAPPPAEGAADTEACPPLPGTITLTAATAAAAVVSETESSSSGEASTCPSACFTASSSGTASSHSFSALSSSASTASSSAAGEERRDLTWLLDAFASATFDQIDSAYREAGGDPFVAAGILSSTQDTHPPQPPQPAPQPPPPPDLSPRSGSGGRKAGRRPKRVAVAATGMVADVIGKEYTRPAANSVVSMPNAWKGRDGESDGSGSGGRKDSVEEAEQFLCSMLGDNSELGMGVVRDVLGQYGYDVEKALDALLDISGVSSVENMETNHQSARRNDTCHLDMFSGNGLSVENLTAGNRRSLRQLTDEISNTGLQSELGHEFLWGEPQISDYEGCQIEVQVSSEPIPPIRYAEAVKEAPRSSTLPSRSTVMKAGPQQVLDSLFKIPETRTYEPSSMDWKKVVKKLQTINYTAASNNHERPKDGGGYRELRGVAARHYDKMKEYYQKAAFAYSKGDRSYASYLAEEGKHYRELGRIEDEKASRNIFEARNKHITNTVTIDLHGQHVQHAMNLLKIHMMICICIPCEYHTRFGAVVSASALIHATQLSVFYLMLYCAFFVRYREGKNKALGLNNVLVVELLKCKWWQVIELAEKEHIEWREENSGTVALRLGGPREYRFLEHESDSDLVGNFNID

SEQ ID NO: 8100 - protein, 400 aa, Zea mays
  VARIANT 274..400: note = Derived polymorphism lacks residues 274 to 400
  VARIANT 131..400: note = Derived polymorphism lacks residues 131 to 400
  VARIANT 62: note = Ancestral polymorphism is D, Derived polymorphism is N
  VARIANT 54: note = Ancestral polymorphism is N, Derived polymorphism is I
  VARIANT 51: note = Ancestral polymorphism is A, Derived polymorphism is S
  VARIANT 45: note = Ancestral polymorphism is P, Derived polymorphism is S
MASIHNCSPPRPAPPERHPASPPPPMGNPPELYHKILNIPKDTSPHEIRAAYKNLVKKWHPDKHPPSSRPEAEARFKAISEAYEVSDETASPTLPCRAVRASLINCALRLGVLPCPHDSVPSLAQALLDQQENRGVFELCNDGRAGERTRGAFGGAGGGGGGGLGAGVGARMERTRSDGFCTRSAPGTPAREFKKVYSSGDPGGRRAFAEFSSSIVRKAPPLERKLECTLEELCRGCKKEVSFTRDVVTKNGSTVKKEVTQTVVVKPGWRKGKQVVLEGMGDERPGCLPGDAILTVSEKRHPAFKRVGDDLVLKAEVPLVGALTGWSFSFRLLGGRKVSCSFQDEVVRPGYEKVIAGEGMPVPGQKGARGDLRVKLDVVFPKELTPEQRAGLAEILRGSC

SEQ ID NO: 8101 - protein, 266 aa, Zea mays
  VARIANT 240: note = Ancestral polymorphism is P, Derived polymorphism is L
MSRRSLNPSRRVADGGLPTVGGLFHPKSRSPPVLTIALVVLGVILLVAYFNSGSGRLKILGVTVTSRESVTRSEGSCTSEVMRVLPYLKKAYGNAMQKVLHVGPDSCTVVSNLLKEGKVEAWGVEPYDLEDTDSTCKSLVRKGFVRMSDIKFPLPYRPDSFNLVVVSDALDYLTPRYLNKTLPDLARVSTDGLVIFAGNPGQQKAKVSELPKFGRPAKLRSSSWWTRYFVQTGLTENEGPLKKFEDATSKNKYKPGCQIFHLSSPR

SEQ ID NO: 8102 - protein, 866 aa, Zea mays
  VARIANT 345..866: note = Derived polymorphism lacks residues 345 to 866
MAAAAASFSALPFLLLLLLVPSLDGASNVTYDHRSLIISGRRRLVISTSIHYPRSVPEMWPKLVAEAKDGGADCIETYVFWNGHEIAPGQYYFEDRFDLVRFVKVVRDAGLLLILRIGPYVAAEWNYGGVPVWLHYVPGTVFRTNNEPFKNHVKSFTTYIVDMMKKEQLFASQGGNIILAQIENEYGDYYEQAYGAGGKPYAMWAASMALAQNTGVPWIMCQESDAPDPVINSCNGFYCDGFQPNSPTKPKIWTENWPGWFQTFGESNPHRPPEDVAFAVARFFEKGGSVQNYYVKVDKFSAILLKYHGGTNFGRTTGGPFITTSYDYDAPIDEYGLALFLSTSEISKVGTSEGSSQIYKIADIYSDQSGGCVAFLANIDSANDKVVTFRNRQYDLPAWSVSILPDCRNVVFNTAKVQSQTSMVTMVPESLQASKPERWSIFRERTGIWGKNDFVRNGFVDHINTTKDSTDYLWYTTRLVYFSLFFFERSTSASFIFSVDGSYSSKGSHAVLNIDSNGHGVHAFLNNVLIGSAYGNGSQSRFSVKLPINLRTGKNELALLSMTVGLQVNYALYKNAGFAYEWIGAGFTNVNISGVRTGTIDLSSNNWAYKIGLEGEYYNLFKPDQTNNQRWIPQSEPPKNQPLTWYKVNVDVPQGDDPVGIDMQSMGKGLAWLNGNAIGRYWPRTSSINDRCTPSCNYRGTFIPDKCRTGCGQPTQRWYHIPRSWFHPSGNILVVFEEKGGDPTKITFSRRAVTSVCSFVSEHFPSIDLESWDESAMTEGTPPAKAQLFCPEGKSISSVKFASLGNPSGTCRSYQMGRCHHPNSLSVVEKACLNTNSCTVSLTDESFGKDLCPGVTKTLAIEADCS

SEQ ID NO: 8103 - protein, 185 aa, Zea mays
  VARIANT 35: note = Ancestral polymorphism is E, Derived polymorphism is G
  VARIANT 71: note = Ancestral polymorphism is Y, Derived polymorphism is D
  VARIANT 82: note = Ancestral polymorphism is G, Derived polymorphism is R
  VARIANT 115: note = Ancestral polymorphism is I, Derived polymorphism is S
MEGLLPFLYRAILHLASGGQSPTGNPFFRNDSPPESPLAAHYYVRLAAGADVPAFLSSAARGYYDRGLTHDLVMQQSWKDFGQRCYFLKYLTSNESVPDNFPFEIIDEEGISVVSLRRDYKYEKIEVTVSMANLVGGPEFGDEDGEADGESAAKDDEEAEDSKHFSRPGPKLEFTIHNLSSGDHH

SEQ ID NO: 8104 - protein, 113 aa, Zea mays
  VARIANT 32: note = Ancestral polymorphism is G, Derived polymorphism is E
  VARIANT 75: note = Ancestral polymorphism is A, Derived polymorphism is S
  VARIANT 110: note = Ancestral polymorphism is T, Derived polymorphism is I
MQDNEPLMRALSKLINLNSPDLVLFVGEALVGNDAVDQLTKFNQKLADLSAVPTARLIDGILLTKFDTIDDKVGAALSMVYISGAPVMFVGCGQSYTDLKKLNVKSIVKTLLK

SEQ ID NO: 8105 - protein, 702 aa, Zea mays
  VARIANT 329: note = Ancestral polymorphism is S, Derived polymorphism is L
MTGAGVATVAMVVVAALAAAGRGAGGERGNTTAGRGEVTYDGRALILDGARRMLFSGDMHYPRSTPEMWPDLIAKAKKGGLDVIQTYVFWNAHEPVQGQFNFEGRYDLVKFIREIHAQGLYVSLRIGPFVESEWKYGGLPFWLRGIPNITFRSDNEPFKRHMQKFVTKIVNLMKDERLFYPQGGPIIISQIENEYKLVEAAFHSKGSSYVHWAAAMAVNLQTGVPWMMCKQDDAPDPIYHGGTNFGRVASSYVTTSYYDGAPLDEYGLIWQPTWAHLRELHAAVKQSAETLLWGAYSNHSFGQQQEGHVFATDSGCVAFLVNFDMHKVSTIQFGEGVFQLAPKSISILSQCRDLIFETGKINAQHGLRTAQVVQPLNHAHRWKLFKEPIPAVPSKISHVKNQLCEHLSTTKDETDYLWYLSMYNSRRNENGDLVLNVEAHAHILHAFINNDYVGSVHGSHDKPGNIVLNVSISLREGQNSISLLCVMVGSPVGLYGETNKIYTSEGSSHAEWTAFSKSIHLPLIWYKTTFDAPWGNDPVTLNLTSMGKGEVWINGQSIGRYHIPRYFLKTGENLLVLMEETGGDPLQITVNTMSITRIYGTVSEFSTPSLLSRENHPAVHLRCEKGKHITDIEFASFGNPVQDCRGSGQSCQGSCHAEISEFVVKNACLGRRKCVLPVWANKFGGDPCPRIEKSLSVAAICG

SEQ ID NO: 8106 - protein, 155 aa, Zea mays
  VARIANT 12: note = Ancestral polymorphism is L, Derived polymorphism is P
  VARIANT 24: note = Ancestral polymorphism is W, Derived polymorphism is R
  VARIANT 32: note = Ancestral polymorphism is K, Derived polymorphism is E
  VARIANT 35: note = Ancestral polymorphism is R, Derived polymorphism is T
  VARIANT 40: note = Ancestral polymorphism is A, Derived polymorphism is G
  VARIANT 71: note = Ancestral polymorphism is F, Derived polymorphism is S
  VARIANT 105: note = Ancestral polymorphism is D, Derived polymorphism is V
MKLMRPYLHQFLKAAYSKYDIMIRSATSLKIEVETRFFTASLLVSFGLSSLSSLYYNEKNTIMFDDLRRNFVMNPQNGLVIKPFRKRHNDHELVKLAHYLLSIGDLEDLSKLDHGKQYVPETRKGNYIRMKLKRGTPNGGMQMFTQKAHTITLYP

SEQ ID NO: 8107 - protein, 231 aa, Zea mays
  VARIANT 176: note = Ancestral polymorphism is P, Derived polymorphism is S
  VARIANT 133: note = Ancestral polymorphism is T, Derived polymorphism is M
  VARIANT 51: note = Ancestral polymorphism is A, Derived polymorphism is S
  VARIANT 44: note = Ancestral polymorphism is R, Derived polymorphism is W
MASSAGNRFLRQLSASNGDEAVCGGLQMDQQEYGGAGVGRRGSRRWSKKRAAAAAAARGYGAGSGNGVKQPASAAGKRVMVVVDESSGANHAMMWALTHVADKGDFLTLLHVLPRSGSGRGEEASSLANSLGTLCKASRPEVEVEALVIQGPKLGTVLSQVKKLEASVLVLSQCRPSPCWLSCFLRSSGEEFVEQCINQAECLTLAVRKQSKGVGGYLISTRWQKNFWLLA

SEQ ID NO: 8108 - protein, 235 aa, Zea mays
  VARIANT 148..235: note = Derived polymorphism lacks residues 148 to 235
  VARIANT 158..235: note = Derived polymorphism lacks residues 158 to 235
MMSGVVPSSLHVLLRAERALRDRDVGEVHIPLSELLSGAPDGPVPAKFVAYQVRKISSGKPQGVLNLSYKLGEVANGYAPAPPPTKADAYPPPYGAYPPAGGKADAAYPPSSGYPPTAGKPGKGGEPVTAYPSAGPSTAAPYAARLPQYGGYGYPPQQAAGYGYPSPPPQQVGYGYGYPPPQAAGYGILGFGGSTVSLFAQVEIMMSCLEIHNALLSIDYGAVISSNRSTVCRVQ

SEQ ID NO: 8109 - protein, 315 aa, Zea mays
  VARIANT 224: note = Ancestral polymorphism is D, Derived polymorphism is G
MNAFFTSLARGLDDLGRAGGLSSLSALLRAAALLRGLHSQLTLMVGQLHLPPGGRWLDEYMDETARLWDACLALKLGLASVERYCAAASCAAAALDDWLQDPSPLSTRQVMRAISVSRREAMAAEEENRALADARIAPLSLHLDERLLLRATDARLAGFNGFRGLLYALHNASSLLLLILASGAVSCAAAAGGPCAGADDAGSDGFTASIAMLQQRLAEEAESDGPGAAPGIRMCEFRCARAAVEAAREEVERAAAAGRKCEGGGGGSAVKDKVEELKAWLDVLRTGTDSLVCQLDDFLDDIVEGRKELSDLCSH

SEQ ID NO: 8110 - protein, 352 aa, Zea mays
  VARIANT 37: note = Ancestral polymorphism is R, Derived polymorphism is G
  VARIANT 63: note = Ancestral polymorphism is K, Derived polymorphism is E
  VARIANT 132: note = Ancestral polymorphism is R, Derived polymorphism is Q
MLPLPTVGVGAVAASPATAAGVAAPIRFRPLRLVASRASTTPSSPSTSSSAISSASPAGHSREHLSGRDGSPSKTSKPRVFFLDVNPLCFRGSQRSLGAFARWLALFFAHVSIRDPVVAVLDGDGGNEYRRRLLPSYKAHRARGVGTGADTRVVDVLRQCNVAVVRVDGYEADDVVATLTEQVLQKGYRVAIASPDKDFKQLISDDVQLVVPIPEIGRWSFYTLRHYVAQYKCDPTADLSLRCFMGDEADGVPGIQHLVPGFGRKTAVKLLQKHGSLENLLNTAAIRTVGRGYAQDALTKHADYLRKNYQVLSLKRDVNVQFDDSWLSPRNTCSDANVLADFLLKLSGQGRS

SEQ ID NO: 8111 - protein, 262 aa, Zea mays
  VARIANT 80: note = Ancestral polymorphism is K, Derived polymorphism is N
MGRSPCCEKAHTNKGAWTKEEDQRLIAYIRAHGEGSWRSLPKAAGLLRCGKSCRLRWMNYLRPDLKRGNFTGDDDELIIKLHALLGNKWSLIAGQLPGRTDNEIKNYWNTHIKRKLLSRGIDPQTHRPLSGGAGSALTTTSSTAGFPSPAPASRPTPTPPPAVVVPPNAIFARPAPSEDGHSSSGASTDAPRCPDLNLDLDLSVGPPPKTPAATPASQQRRRTTICLCYHLGVRGGEACSCETASSLAGFRFLRPLEEGQYI

SEQ ID NO: 8112 - protein, 514 aa, Zea mays
  VARIANT 137: note = Ancestral polymorphism is Q, Derived polymorphism is L
MHKLLPRAASFLDAAAAAAAAPLLLSFPRMPTLRLSGSPFVAMRPGGNPSRIRAPPWLHCDAGWRRGLCSAEAARRGGDTEEMEKDGGGRSAPERKQKCRNDALVGRGELLTIPGVGPRNLRKLVDKGFDDVAQLKQLYRDKFFGKSNEKMIEFLQNSVGIIHKNHAESITLFIKESVDEELKGTDTSKLPKNRRLTFCIEGNISVGKTTFLQRIANETIELRDLVEIVPEPIAKWQDVGPEHFNVLDAFYAEPQRYAYTFQNYVFVTRVMQEKESACGIKPLRLMERSVFSDRMVFVRAVHEANWMNEMEISIYDSWFDPVVSSLPGLVPDGFIYLRASPDTCHKRMMVRKRSEEAGVTLDYLRGLHEKHESWLLPSKGGGSGVLSISQLPVHMEGSLHADIRDRVFYLEGDHMHSSIQKVPALILDCEHDIDFNKDIEAKRQYARQVAEFFDFVKKKKESLTAESETADGDKSINKQIVLPHGGGLWVPGSSPLPESALKSFDFRRTMSSST

SEQ ID NO: 8113 - protein, 239 aa, Zea mays
  VARIANT 18: note = Ancestral polymorphism is N, Derived polymorphism is K
  VARIANT 144..239: note = Derived polymorphism lacks residues 144 to 239
  VARIANT 159..239: note = Derived polymorphism lacks residues 159 to 239
  VARIANT 201..239: note = Derived polymorphism lacks residues 201 to 239
MTLDATEAGGGGDLFAANLMGSLLTVASSEFIGVSFIVKKKGLGCHRHPSRYLLISPPSLPEAVVLPVLLVVTLVLVGEIANFIAYMIESAILVTPLGALNIIVSVVLAHFTLNEKLHRVMSIKVVGIAIKLTLEGINQAGYFQTWVFAVVSTTCIVIQLVYLNKALDTFNTSVVSPIYYAMFTTLTILASAIMLKDWSGQRASNIAFEICGFLTVLAYTVVLHSTREPDQTVSAVRDL

SEQ ID NO: 8114 - protein, 413 aa, Zea mays
  VARIANT 97: note = Ancestral polymorphism is R, Derived polymorphism is W
  VARIANT 104..413: note = Derived polymorphism lacks residues 104 to 413
  VARIANT 168: note = Ancestral polymorphism is A, Derived polymorphism is V
  VARIANT 201: note = Ancestral polymorphism is V, Derived polymorphism is M
  VARIANT 204: note = Ancestral polymorphism is P, Derived polymorphism is L
  VARIANT 208..413: note = Derived polymorphism lacks residues 208 to 413
  VARIANT 224: note = Ancestral polymorphism is Y, Derived polymorphism is C
  VARIANT 261: note = Ancestral polymorphism is P, Derived polymorphism is T
  VARIANT 281: note = Ancestral polymorphism is S, Derived polymorphism is F
  VARIANT 325: note = Ancestral polymorphism is G, Derived polymorphism is W
  VARIANT 359: note = Ancestral polymorphism is S, Derived polymorphism is F
MISGAAGSSLSIEQAILGLTEALMIVLNDKENLSALGKHKNENHSGGSESTEHILQMLRQLPTKNISDKISHDEITDDSISNVNNSFADRKALHVKRTKKWLEETTSNVDKLLCATFPHLAIHSSEKVRKAVVSGVKGLLSSCSSTLKRTKMLLLECLCVLACDDAAAVSEAAQDALDHLFNQGHNLVTENEISDTFTRFVPLPVLKQLKLMMACDNKVLTVLYIISRLVERLPQVVLGSEETTALSHARMLLALTFYAGTQFLINHLHRSPVSSLSLGCFRHFLHRYMVIAARFFDCLGLCIGHSSQFSGSMDKLIVSKPLSIGYLYSVAELKSGAYSKDTTNISLHATSTSAASKISVIHDNALPNALLSTIEYELPHVPPWFFHAGSQKFYGVLARIIRLVGLSTMSGTL

SEQ ID NO: 8115 - protein, 264 aa, Zea mays
  VARIANT 146: note = Ancestral polymorphism is G, Derived polymorphism is R
  VARIANT 121: note = Ancestral polymorphism is H, Derived polymorphism is D
  VARIANT 89: note = Ancestral polymorphism is R, Derived polymorphism is H
MQSAPTVSYRTAAVVSPPFLSSRPSLYIRTCRIVDRSWPRARVASLPPYPRLPTPPARGTAKKMLTLRSSDYEEFEVEEAVMMKSEIIRFMIEDDCANNVIPLPNVNSKTLALVIEYCNKHVHAAAKPADDDSDAAETTSASSAGGGGEVDLKKWDAEFVKVATATLFDLIMAANYLDIKGLQDLTCRAVVDMIQGKSPEEIRKTFNIKNDLTKEEEEAIRSENSWAFERYPNKKCNLSLEIMFLLNFRTFKSEVILSSAHKRM

SEQ ID NO: 8116 - protein, 189 aa, Zea mays
  VARIANT 167..189: note = Derived polymorphism lacks residues 167 to 189
  VARIANT 166: note = Ancestral polymorphism is G, Derived polymorphism is D
  VARIANT 158: note = Ancestral polymorphism is V, Derived polymorphism is M
  VARIANT 151: note = Ancestral polymorphism is F, Derived polymorphism is Y
  VARIANT 148: note = Ancestral polymorphism is E, Derived polymorphism is K
  VARIANT 143: note = Ancestral polymorphism is R, Derived polymorphism is S
  VARIANT 139: note = Ancestral polymorphism is P, Derived polymorphism is S
  VARIANT 128..189: note = Derived polymorphism lacks residues 128 to 189
  VARIANT 101: note = Ancestral polymorphism is T, Derived polymorphism is M
  VARIANT 59: note = Ancestral polymorphism is R, Derived polymorphism is C
  VARIANT 56: note = Ancestral polymorphism is P, Derived polymorphism is L
  VARIANT 55: note = Ancestral polymorphism is G, Derived polymorphism is R
  VARIANT 52: note = Ancestral polymorphism is S, Derived polymorphism is L
  VARIANT 48: note = Ancestral polymorphism is G, Derived polymorphism is S
  VARIANT 38: note = Ancestral polymorphism is C, Derived polymorphism is Y
MSLRFGSFPVVVGSSVEVAEVLLKTQDLAYLDRPRMACGKHTMYNYSGMLWSHYGPYWRQLRKLWVTELLSVRQLRLTERVRAEEVCAMLRDLHPATSTSTTGAQGAPTHGDAQRDLAHGAGQEVRGRGGAGPGAAATPEEFRWMIEEIFFLNGALHVGDMVSWLGWLDAHREDYGKFKGFFDKTSSQL

SEQ ID NO: 8117 - protein, 92 aa, Zea mays
  VARIANT 8: note = Ancestral polymorphism is F, Derived polymorphism is S
  VARIANT 9..92: note = Derived polymorphism lacks residues 9 to 92
  VARIANT 51: note = Ancestral polymorphism is S, Derived polymorphism is P
MYCNSSCFYYFLIQIVASKTKIYMVLQLVNGGELFDRITHNVTKELMKYHSQTLGYVIGGTNMRSDANHLIEGINILIATLDRLLDHLQNTG

SEQ ID NO: 8118 - protein, 455 aa, Zea mays
  VARIANT 277: note = Ancestral polymorphism is R, Derived polymorphism is I
  VARIANT 67: note = Ancestral polymorphism is S, Derived polymorphism is P
MAIVREEAVDTSISPRVSALRPSKTMAITDQAMALRQAGVPVIGLAAGEPDFDTPPAIAEIFSKNVSCYQIGLFQAGMDAIRNGYTRYTPNAGTLELRKAICTKLQEENGVSYLPDEVLVSNGAKQCITQAVLAVCSPGDEVTTFSCYTVVHQTSTADAILESIYVLIPAPYWVSYPEMARLADATPVILPTNISENFLLRPELLTDKINEKSRLLILCSPSNPTGSVYPKELLEKIADIVKKHPRLLVLSDEIYEHIIYQPAKHTSFASLPGMWERTLTVNGFSKAFAMTGWRLGYLAAPKHFVAACGKIQSQFTSGASSISQKAGVAALNLGYAGGEAVSTMVKAFQERRDYLVKNFKELPGVKISEPQGAFYLFIDFSAYYGSEVEGFGTIKNSESLCIFLLEKAQVALVPGDAFGDDKCIRISYAASLTTLQTAMSKLKEAVALLKPCVAA

SEQ ID NO: 8119 - protein, 155 aa, Zea mays
  VARIANT 68: note = Ancestral polymorphism is A, Derived polymorphism is V
  VARIANT 66: note = Ancestral polymorphism is L, Derived polymorphism is M
  VARIANT 63: note = Ancestral polymorphism is K, Derived polymorphism is N
  VARIANT 61: note = Ancestral polymorphism is L, Derived polymorphism is V
  VARIANT 59: note = Ancestral polymorphism is T, Derived polymorphism is I
  VARIANT 48: note = Ancestral polymorphism is T, Derived polymorphism is I
  VARIANT 44: note = Ancestral polymorphism is A, Derived polymorphism is V
  VARIANT 42: note = Ancestral polymorphism is I, Derived polymorphism is S
  VARIANT 38..155: note = Derived polymorphism lacks residues 38 to 155
MVTASSFTAIFFRSAFVACFAEVKAFFVRGAVVGDVSLLSKILAALATGVIAIVVANPTDLVNVRLQVDGKANTVKRSYSRALNVYAIIIRHVTLTIMGNERPLELLAKAYAINSFDIDPQNPSDVVFTLEWESVGVLPCGEKKDNFYYRGTSEF

SEQ ID NO: 8120 - protein, 165 aa, Zea mays
  VARIANT 112: note = Ancestral polymorphism is G, Derived polymorphism is S
  VARIANT 75: note = Ancestral polymorphism is P, Derived polymorphism is A
  VARIANT 74: note = Ancestral polymorphism is R, Derived polymorphism is C
  VARIANT 71: note = Ancestral polymorphism is N, Derived polymorphism is S
  VARIANT 53: note = Ancestral polymorphism is S, Derived polymorphism is N
  VARIANT 51: note = Ancestral polymorphism is S, Derived polymorphism is I
MKKAIEEERFEDAAKYRDELKILAPHSLLKCSSDATTLGIRVQVRSVYIESRSQPLKGQFFFAYRIRITNSSQRPVQLLKRHWIVTDGNGRTENIWGVGVVGEQPVIFPKTGFEYSSACPLSTPNGRMEGDFEMKHIDKAGSSTFNVAFAPFSLSILGDDNDVLL

SEQ ID NO: 8121 - protein, 307 aa, Zea mays
  VARIANT 198..307: note = Derived polymorphism lacks residues 198 to 307
  VARIANT 146..307: note = Derived polymorphism lacks residues 146 to 307
  VARIANT 135: note = Ancestral polymorphism is I, Derived polymorphism is K
MQSSSMKREISEAHDTIRFGINAGVKADLAPPHPNEIQKSFLRSKLVGEEKRITGNIYDTFILMFLCFLFAAYTNLEFEHTTDLFCCKCGMAWLGLQLRVLVVRDPCAVCRADARLSSQHFHHCNVQPKHRSHIIHDHLWLRRCHQHKGVQRAGSPEHRQRQEGAHCVAGAVPDAGGGVPAAPGPRPRPLGAPLHHQRGRGQRLRLHDAAAHRLRRAGLHAGVLCGVARGYGWQHLAAWTNLVAFYVIGLPLAILLGFTLAFQTKGLWMGQICSLLCQNCVLFFITLRTNWQELDLTIFNKDNDFVC

SEQ ID NO: 8122 - protein, 249 aa, Zea mays
  VARIANT 14..249: note = Derived polymorphism lacks residues 14 to 249
  VARIANT 37: note = Ancestral polymorphism is K, Derived polymorphism is E
  VARIANT 61: note = Ancestral polymorphism is R, Derived polymorphism is C
  VARIANT 71: note = Ancestral polymorphism is P, Derived polymorphism is L
  VARIANT 120: note = Ancestral polymorphism is A, Derived polymorphism is V
  VARIANT 150..249: note = Derived polymorphism lacks residues 150 to 249
  VARIANT 169..249: note = Derived polymorphism lacks residues 169 to 249
MVCHRLCPPRRAARCDTVCRDGVLTVTVEKLPPPEPKKPKTIEVPPCPLFRTYFNLFLRRRARCLLNVVDPYVTIDISEPGGEVRYSRYGPVSDNDNTYEEVKAYLSGAARSQDACELRAEGAREGNSLVVSMRDGQDVADEFRGVPLWWSSVVAAEREEVAWERSRLLRSVLGRRRGGSQRRMRRRWYEASATPSRRPTTAIGEGEFWRQERDAGSLRVTAWADPESETRRGRGQGADATRLFCCWIE

SEQ ID NO: 8123 - protein, 955 aa, Zea mays
  VARIANT 532..955: note = Derived polymorphism lacks residues 532 to 955
MAESDGGSEAQSPSPDPRSGDGANPDPRPPRPQLTKSRTISGSVAASILAADRVAGGGGGSGGGGLRDSILVRRSSTAPLPPYTASAAGASSAPRRLTVAVDDPSYAAPNGGVLDRDWCYPSFLGPHASRPRPPRQQQTATTTERRSANPTVPVPPRVAVSQREEEKSLASVVKRPALLEERRTPPPTLPPPRAPRFDLSPYLSLLLVITIASSTLAVWQWIKVMGLQEKIRSCSEANAGDRDGTEKVSWIDRDHGSAFFGSRRWNLAQSSTIFALAIPLFLFKYIDLLRRRQTNSMRGRSGEEEVPLKKRIAYKVDVFFSGHPYAKLLALLLATIILIALGGIALYVVSGSGFLEALWLSWTFVADSGNHADQIGLGPRIVSVSISSGGMLVFATMLGLVSDAISEKVDSWRKGKSEVIEINHILILGWSDKLGSLLKQLAIANKSIGGGVVVVLAERDKEEMEMDIAKLEFDFMGTSVICRSGSPLILADLKKVSVSKARAIIVLASDENADQSDARALRVVLSLTGVKEGLRGHVVVEMSDLDNEPLVKLVGGELIETVVAHDVIGRLMIQCALQPGLAQIWEDILGFENAEFYIKQWPELDGMRFGDVLISFPDAVPCGVKVASKSGKILMNPDDGYVLREGDEVLVIAEDDDTYAPAPLPEVNKGFLPNIPTPPKYPEKILFCGWRRDIHDMIMVLEAFLAPGSELWMFNEVPEKEREIKLTDGGLDIGGLINIKLVHKEGNAVIRRHLESLPLETFDSILILADESVEDSIVHSDSRSLATLLLIRDIQSKRLPSKELKSPHRYNGFSHSAWIREMQHASDKSIIISEILDSRTRNLVSVSKISDYVLSNELVSMALAMVAEDKQINRVLEELFAEEGNEMCIRSAEFYLYEQEELSFFDIMVRARERDEIVIGYRLANTDQAIINPEYKSQIRKWSLDDVFVVISKGD

SEQ ID NO: 8124 - protein, 392 aa, Zea mays
  VARIANT 18: note = Ancestral polymorphism is A, Derived polymorphism is E
MDKYEAVRDIGSGNFGVARLMRNRETRELVAVKCIERGHRIDENVYREIINHRSLRHPNIIRFKEVILTPTHLMIVMEFAAGGELFDRICDRGRFSEDEARYFFQQLICGVSYCHYMQICHRDLKLENVLLDGSPAPRLKICDFGYSKSSVLHSRPKSAVGTPAYIAPEVLSRREYDGKVNLSPLDSFMNCMFSCFYYTFAVYSWYLFMQLADVWSCGVTLYVMLVGAYPFEDPDDPKNIRNTIQQIMQVQYKIPDHVHISTECQQLIARIFVANPMRRITMKEIKSHPWFLKNLPRELTETAQGMYYRRDNRVPSYSDQTSEEIMKIVQDARTMPKSSRSGYGWSSEYSDEEEEKEEEHRPEEHEEEEDEYDRRVKEVHASGELRMDALHI

SEQ ID NO: 8125 - protein, 90 aa, Zea mays
  VARIANT 30: note = Ancestral polymorphism is T, Derived polymorphism is I
  VARIANT 21: note = Ancestral polymorphism is Q, Derived polymorphism is R
MQPSYIHRSTLLKFMLYILLRALAFVEQATEQQILIIGIKVVDLLAPYQRGENIGLFDGTQEWVKLCSSWSWLIMLLGHMVGIVHSFLLN

SEQ ID NO: 8126 - protein, 272 aa, Zea mays
  VARIANT 230..272: note = Derived polymorphism lacks residues 230 to 272
  VARIANT 114: note = Ancestral polymorphism is L, Derived polymorphism is P
  VARIANT 103: note = Ancestral polymorphism is R, Derived polymorphism is C
MAAQSMLMSTSVNGGRALPSLQAVRPAPYPRLPLPSSSSSSAGYRHSKSVSVKTLALFGKSKVKTAPAKKAAAPKPKPKVEDGIFGTSGGIGFTKENELFVGRVAMLGFAASLLGEAITGKGILAQLNLETGIPIYEAEPLLLFFILFTLLGAIGALGDRGRFVDEEVTGLDKAVIQPGKGFRGALGLSEGGPLFGFTKSNELFVGRMAQLGVAFSIIGEIITGKGALAQLNIETGVPINEIEPLVIFNVLFFFIAAINPGNGRFIIGEEEE

SEQ ID NO: 8127 - protein, 258 aa, Zea mays
  VARIANT 196: note = Ancestral polymorphism is S, Derived polymorphism is F
  VARIANT 98: note = Ancestral polymorphism is A, Derived polymorphism is T
  VARIANT 85: note = Ancestral polymorphism is R, Derived polymorphism is W
  VARIANT 76..258: note = Derived polymorphism lacks residues 76 to 258
  VARIANT 43: note = Ancestral polymorphism is A, Derived polymorphism is D
  VARIANT 37: note = Ancestral polymorphism is D, Derived polymorphism is N
  VARIANT 30: note = Ancestral polymorphism is V, Derived polymorphism is I
  VARIANT 24: note = Ancestral polymorphism is S, Derived polymorphism is F
  VARIANT 17..258: note = Derived polymorphism lacks residues 17 to 258
  VARIANT 14: note = Ancestral polymorphism is G, Derived polymorphism is E
  VARIANT 8: note = Ancestral polymorphism is P, Derived polymorphism is L
  VARIANT 7: note = Ancestral polymorphism is A, Derived polymorphism is V
MELLTKVLVVDCSGKMQKQRQRGSVLVSLVVGTGQVNVPCCGAAEGLASHAPTAEGVTQGRLPPGVRRVRDQQGRREVQGRLLPRLHRLPPRHRPPGAVIIDTVSLKSWSTIYFLQMGKLNRHILLSNITINIGKGAPVPKCPILGESWKEVKHDNIVTWLPFWNDPVNQKDLKYVFLVTSSSLKGQSAREKYEKFRKLKVVEIFDVEVDDKVRVGQGLSPRRLDEVPRPTVSGQWPCYAPHWKIALRIGIGYAGGWL

SEQ ID NO: 8128 - protein, 570 aa, Zea mays
  VARIANT 33: note = Ancestral polymorphism is A, Derived polymorphism is S
  VARIANT 78: note = Ancestral polymorphism is F, Derived polymorphism is L
  VARIANT 104: note = Ancestral polymorphism is I, Derived polymorphism is T
  VARIANT 114: note = Ancestral polymorphism is S, Derived polymorphism is T
  VARIANT 150: note = Ancestral polymorphism is V, Derived polymorphism is F
  VARIANT 210: note = Ancestral polymorphism is N, Derived polymorphism is D
  VARIANT 301: note = Ancestral polymorphism is I, Derived polymorphism is T
MPDSPELVVRALGKRLAQPRLGKDALIKLLKQAESALSEFSQSSSLQDPLHALSKSLVQTTLLNHKDKDVKLLVSVCLIEVMRVLAPDPPFSDEILKEIFKLFISIFADLAETSSPFLTRRMKILENVAALRCSMIMLNIGCEDLILDMVKIFFSTVKWLFGKILDPITAVKCVGMHGLQKSVHQAMLSMMTQILNEKVTQSLVDVILRNLVKDDKGASHKLAFNIIENCADKLEPIIHSFLSSCIFNKDMPVTELRRLYHKIILEIFQCAPQILFAVIPSLTHELLSDQVDIRLEAVHLIGRLLALSNLQFGQENKMVFIEFLRRFSDKSAEVRIAAIDAAKACYMDVSRDEAQHILSSLEGRLLDFDEKVRIRAVHTVCDLAKSNLSSSAKLILHAAERLRDKKLFLYNASPKHAFQASVRKNVMHKLLELYRDYCEKCSKGTATVNTHYEQIPAKLIVLCFDNDIESFRPQNMELIFAEELFPFSLSPKERATHWIAFFSYFKPEHIKALNIIFSQKRRLQLEMQTYLSLRARKPACAVGGIIRRNAEENPCGIQKDGNILSRYFQS

SEQ ID NO: 8129 - protein, 417 aa, Zea mays
  VARIANT 38: note = Ancestral polymorphism is P, Derived polymorphism is H
  VARIANT 196..417: note = Derived polymorphism lacks residues 196 to 417
MILRIRSRDGTDRISVPDSASATVADLQRLIESHLTVPVPLQRISLDPALLLPNPSAAVPLLADPAAPLASLRLANGAFIYLAYPPDARSARPTPPKVLSAAGSFGKKMTMDDLIARQIRVTRQENALCAAASFDRDAANAFQLYVAEYLAFAVKRAGFLYGRIDAETKEVLVDFIYEPPQQGFEDVVHLMRDPDEEARVDTIAEGLGMRRVGLVFTQAVGRRASKTGEYTMSNREVVQAAQLQAEGGTPEWVTAIVKLEVGDDGTGDVHFEAFQMSEICVKLFKDGVLETEVQDADDPRLSKMRKEVVAGGKDTMKVDNDFFLVPVKISDHQGPLSVGFPIENRGSPVGMSALRSHLERMKHLTFVRRISDFHLLLKLATFLDAKSDMPTIAACVKTQSRMPEGYQFLIESFASQG

SEQ ID NO: 8130 - protein, 148 aa, Zea mays
  VARIANT 1: note = Ancestral polymorphism is M, Derived polymorphism is V
  VARIANT 15: note = Ancestral polymorphism is P, Derived polymorphism is S
  VARIANT 62: note = Ancestral polymorphism is K, Derived polymorphism is E
  VARIANT 71: note = Ancestral polymorphism is A, Derived polymorphism is V
  VARIANT 81: note = Ancestral polymorphism is T, Derived polymorphism is A
  VARIANT 86..148: note = Derived polymorphism lacks residues 86 to 148
  VARIANT 90: note = Ancestral polymorphism is T, Derived polymorphism is A
  VARIANT 132..148: note = Derived polymorphism lacks residues 132 to 148
  VARIANT 136..148: note = Derived polymorphism lacks residues 136 to 148
MMEEGATAAASRSRPTPFLTKMHQMMLMGNFADADRHRHPEAYDFEDLESMVEEIARAFKTKIMFIYVDTAEENLAKPFLTLYGLESEKAYWSTAYYITCITLSLVEQWATEKKSMESCKLIFTQAKQYAKEYDAQAECFYEKIIWMG

SEQ ID NO: 8131 - protein, 677 aa, Zea mays
  VARIANT 5..677: note = Derived polymorphism lacks residues 5 to 677
  VARIANT 51..677: note = Derived polymorphism lacks residues 51 to 677
MLQLQPPGFLPIPRRRVTARGRRARPVIAFNSQWKIPDVDTDAVRERVRSWMSLARGAIADAGRAAREGGRHKEEPEGGKKKQRKEVTVEEQAFVAVPEVTVEPRVPQGWLSLDAVVSIEQFARLNGLTGRQVQRIFESLAPEHLHNDARSLVEYSCFRYLAKDNSDFHPNLKAIGLSGTKKPMRLDLTNQNSRAEKTKVGPFGSKLFDSAVSVSSGSMSDEWTLEFVDFSGEMRRDVWLAFISEIISVYRFIREYGPGGDDPAIHNVYGAYKGKKRAVSSAANSIARLQSLQFIRRLYEDPAKLVQFSYLSNAPFGDVVLQTLAVNFWGGPLTTKARSANHRSTQWHRSSEDPSSGRTHVYDIDGSVYLRKWMTSPSWTSSHSANFWRNSSVKYGIILSKSLVVADKNLVEKAMVDCKEKSKVVERTQATIVAATIEGIPSNIDLFKELMLPFAIVAENFKKLQRWENPRSTFCFLLLVHTVIFRNMLSYVFPFTLMTMALSMLAVKGLKEQGRLGRSFGKVTIRDQSPSNTIQKILALKEAMASVENYLQNLNVSLLKIRTILLAGQPEVTTQVAFVLLASSAVLLVFPFKYVLAFFTCDLFTRELEFRRETVRAFMNFVKERWESIHAAPVVVLPYEGAESSPKTLPAEVSGQAEPQNVQRGSGYVSSKNGISS

SEQ ID NO: 8132 - protein, 260 aa, Zea mays
  VARIANT 59: note = Ancestral polymorphism is P, Derived polymorphism is L
  VARIANT 68: note = Ancestral polymorphism is G, Derived polymorphism is A
  VARIANT 90: note = Ancestral polymorphism is C, Derived polymorphism is S
MAQPQQRVYQAWKGDNVLLLLLTTAARDPGIVPRASHPPEDIHYDNLSLTDTPGILQFPCVKEVIVNGMPVKVKYCETCMVFRPPRCSHCSICNNCVERFDHHCPWVGQCIGKRNCRYFFLFVVSSSLLCIYLFVISALYIKFLMDGDYPTVWKALKHSPASLALMIYCFISLWFVGGLTGFHTYLISTNQTTYENFRYRSDGRLNVYDQGCLSNFQEVVCAKIEPSKHKFRAHIQEEVRGPLANRAGETEEEQVGGPRA

SEQ ID NO: 8133 - protein, 166 aa, Zea mays
  VARIANT 14: note = Ancestral polymorphism is P, Derived polymorphism is S
  VARIANT 17: note = Ancestral polymorphism is A, Derived polymorphism is T
  VARIANT 21: note = Ancestral polymorphism is S, Derived polymorphism is F
  VARIANT 28..166: note = Derived polymorphism lacks residues 28 to 166
  VARIANT 31: note = Ancestral polymorphism is K, Derived polymorphism is R
  VARIANT 35: note = Ancestral polymorphism is G, Derived polymorphism is S
  VARIANT 84: note = Ancestral polymorphism is K, Derived polymorphism is Q
  VARIANT 97: note = Ancestral polymorphism is A, Derived polymorphism is V
  VARIANT 116: note = Ancestral polymorphism is S, Derived polymorphism is L
  VARIANT 138: note = Ancestral polymorphism is A, Derived polymorphism is T
MLSDKYVLVVVQVPVLAVMDSIDHSRLQVNRQRPGFDEATGAFEIHLAGTCYVHFGSHLVYYERTITGKLSKGAISDLSGVQAQKLFLWVYVTGMVALPDQGTIEFQSGFISESLSASMFDEVPTCGSSVGAQLRGATGVIGELGLLPVAQFLSGTAPFVYETTAL

SEQ ID NO: 8134 - protein, 260 aa, Zea mays
  VARIANT 40: note = Ancestral polymorphism is N, Derived polymorphism is K
MASSRVMPSSSPSHTASDLARLAQAASRPGGGGSGLGSMNVEELLRGIYSDMPTPAPPASEPERPRSPAPAPEVATRRTAEEVWKEITGGGGSGEPVPPVAAQAAVPAGGGGAGGPEMTLEDFLAREEGAVKEDGVRVSGPSAPAMGFLGGAEGVGVPGGGGGRGRKRQLMDPVDRAAMQRQKRMIKNRESAARSRERKQAYIAELESLVTHLEEENAELLREQEERHQKRLKELLERVTPVILRKKPSGDLRRTNSMQW

SEQ ID NO: 8135 - protein, 391 aa, Zea mays
  VARIANT 242: note = Ancestral polymorphism is S, Derived polymorphism is G
  VARIANT 194: note = Ancestral polymorphism is C, Derived polymorphism is F
  VARIANT 156: note = Ancestral polymorphism is L, Derived polymorphism is S
  VARIANT 129: note = Ancestral polymorphism is S, Derived polymorphism is L
  VARIANT 96: note = Ancestral polymorphism is S, Derived polymorphism is I
  VARIANT 83: note = Ancestral polymorphism is K, Derived polymorphism is N
  VARIANT 68: note = Ancestral polymorphism is R, Derived polymorphism is S
MRSTVLVARSLQKASVPPALLSDPTPGSLQPTRLAAHVSQWRRLLVLCLPRLWLPRLQDRVDFSSLWRWKIRLDASVMLSKGKESLLIPDNAQVISSSVVDRCPHRSEIQSVALAEGEDDCLILGTVDSYGHLIVSRLDIVADGHPIQYHLVIVVLGKAVGLGYALAQCSNPCDLIWFSKRTNMCTEYTNPYRCSFQVAVARQLCKTIDIYDQDIHVRSLRTLWYPSSFSFVQYSPHVNESSSLLATAEGSQLSIWDLRMNNNGGCVHRITGSVGDIIYSTCSSPSGLIASGGTDRAVTIYDPRRWSALSRWVGCSKFEITGLAFSSVDESFIYVQGVDYEITCGHWKQSERAFSFRGDSNWLGFSKCANNDVIAGWCESGSIFIADARQL

SEQ ID NO: 8136 - protein, 446 aa, Zea mays
  VARIANT 242..446: note = Derived polymorphism lacks residues 242 to 446
  VARIANT 245..446: note = Derived polymorphism lacks residues 245 to 446
  VARIANT 261: note = Ancestral polymorphism is G, Derived polymorphism is R
  VARIANT 296..446: note = Derived polymorphism lacks residues 296 to 446
  VARIANT 300: note = Ancestral polymorphism is L, Derived polymorphism is Q
  VARIANT 306: note = Ancestral polymorphism is G, Derived polymorphism is R
  VARIANT 307: note = Ancestral polymorphism is R, Derived polymorphism is W
  VARIANT 312: note = Ancestral polymorphism is P, Derived polymorphism is L
  VARIANT 327: note = Ancestral polymorphism is N, Derived polymorphism is Y
  VARIANT 383: note = Ancestral polymorphism is T, Derived polymorphism is M
MVADMKENGGAVLAAGEKAPQVVVKRGEPTLVPPAEATPTGGQYYLSNLDQNIAVIVQTVYCYKPSGGGGDVAAALRGALARVLVHYYPLAGRLGVSPEMKLTVELTGEGAVFVEADAACELATVGDLTKPDPAALGQLVYSVPGAKHILEMPPMTAQVTRFKCGGFALGLAMNHCMFDGIGAMEFVNSWAETARGVAELTVPPFLDRGVLKARDPPVHTFPHHEFAEIPDVSDTAALYGAQELQYRSFCFDPDRLERVRGLALADGALGRCTTFEALSGLVWRARTKALGLAPGQRTKLLFAVDGRRRFVPPLPRGYFGNGIVLTNALATAGELLSAPVSRAAGLVQEAVRMVTDDYMRSAVDYFEATRARPSLASTLLITTWSRLEFHGADFGWGEPVMSGPVTLPEKEVILFLAHGKERKSINVLLGLPATAMDAFQELVDEI

SEQ ID NO: 8137 - protein, 480 aa, Zea mays
  VARIANT 189..480: note = Derived polymorphism lacks residues 189 to 480
  VARIANT 113: note = Ancestral polymorphism is K, Derived polymorphism is N
MSFRSIVRDVRDGFGSLSRRSFEVTLASIYGLTGHHKGKTQSSSHVLDDSPSIIRESRWANLPPELIRDIIRRLEADESTWPARKHVVCFAAVCRTWREMCKEIVLSPEFCGKLTFPVSLKQPGPRDGNTMVQCFIKRNKSKSTYHLYLCLSNVVTSESGKFLLSAKRHRKTTCTEYTISMDSGNISRSKRTYIGKIRSNFLGTRFLIYDTQPPYNGAVVPPAGRTSRRFNSTKVSPKLPSVSYNIAQVSYELNVLGTRGPRRMRCIMHSIPASSVEPGGTVPGQPEQIVPRALEDSFRSTASFSQSFRSTASFSKSIMDSSMDFNSARFSDIAGSSARFTGVPGSSARFAGVPGSSARFSGIAGARLDNDEESETKERPLVLRNKPPRWHEQLQCWCLNFRGRVTIASVKNFQLIAAATPPPAGAPTPSQPAPSDPDKVILQFGKVARDMFTMDYRYPLSAFQAFAICLSSFDTKLACE

SEQ ID NO: 8138 - protein, 133 aa, Zea mays
  VARIANT 65: note = Ancestral polymorphism is A, Derived polymorphism is D
  VARIANT 112: note = Ancestral polymorphism is P, Derived polymorphism is L
MAAAEEEIAVKEPLDLIRLSLDERIYVKLRSDRELRGKLHVARSSLFHIPQTSLMWKEASIIESAPLAAYDQHLNMILGDVEEVVTTVEIDDETYEEIVRDNLCRPRNALSPFFLSEVMVSYWFLHPFVRHEV

SEQ ID NO: 8139 - protein, 95 aa, Zea mays
  VARIANT 13: note = Ancestral polymorphism is T, Derived polymorphism is A
MGVTKEDVEAAITSALSPSNLVVTDTSGGCGASYEIEVVSEKFEGKRLLERHRMVNTALASHMAEIHAVSIKKALTPAQAQPQAQPEPAADKPQA

SEQ ID NO: 8140 - protein, 289 aa, Zea mays
  VARIANT 268: note = Ancestral polymorphism is I, Derived polymorphism is F
  VARIANT 262: note = Ancestral polymorphism is Y, Derived polymorphism is H
  VARIANT 258..289: note = Derived polymorphism lacks residues 258 to 289
MAVCWAVKMGPVSDSSSHVGCDRIQQKSRRGKGRLLYIPSRLQSASIYPAVSGRRVRVDLSVEGMKITALLVLKPSTSGAGSSSSGGQSGPEAVVLANATDVSHFGYFQRSAAREFIVFVARTVAQRTQPGQRQSVQHEEYKVHSHNRNGLCAVAFMDDHYPVRSAFSLLNQVLDEYQKAFGDSWKSATADGTQQWAFLTDALARFQDPAEADKLMKIQRDLDETKIILHKTIDSVLARGERLDSLVEKSSDLSAASQVILYLLCRMIFYAVNMFYKQAKKTNQCCTIL

SEQ ID NO: 8141 - protein, 136 aa, Zea mays
  VARIANT 70: note = Ancestral polymorphism is R, Derived polymorphism is S
MARTKQTARKSTGGKAPRKQLATKAARKSAPATGGVKKPHRFRPGTVALREIRKYQKSTELLIRKLPFQRLVREIAQDFKTDLRFQSSAVAALQEASEAYLVGLFEDTNLCAIHAKRVTIMPKDIQLARRIRVERA

SEQ ID NO: 8142 - protein, 376 aa, Zea mays
  VARIANT 136: note = Ancestral polymorphism is A, Derived polymorphism is S
  VARIANT 53: note = Ancestral polymorphism is A, Derived polymorphism is S
MAEEDVQPLVCDNGTGMVKAGFAGDDAPRAVFPSIVGRPRHTGVMVGMGQKDAYVGDEAQSKRGILTLKYPIEHGIVGNWDDMEKIWHHTFYNELRVAPEEHPILLTEAPLNPKANREKMTQIMFETFSCPAMYVSIQAVLSLYASGRTTGIVLDSGDGVSHTVPIYEGYTLPHAIIRLDLAGRDLTDNLMKILTERGYSFTTTAEREIVRDIKEKLAYVALDYEQELETARTSSTVEKSYELPDGQVITIGAERFRCPEVLFQPSFIGMESPGIHEATYNSIMKCDVDIRKDLYGNVVLSGGSTMFPGIGDRMSKEITALAPSSMKVKVVAPPERKYSVWIGGSILASLSTFQQMWISKEEYDESGPGIVHMKCF

SEQ ID NO: 8143 - protein, 107 aa, Zea mays
  VARIANT 15: note = Ancestral polymorphism is G, Derived polymorphism is R
  VARIANT 16..107: note = Derived polymorphism lacks residues 16 to 107
  VARIANT 44: note = Ancestral polymorphism is A, Derived polymorphism is D
  VARIANT 77: note = Ancestral polymorphism is A, Derived polymorphism is V
MEDASYPSEQLLISGEKETQDQIYFIKQIESLGNACGTIALLHAVGNASSKVNLVENSCLDLFFKSTATMDDPHERAVCLEKDDTMARAHLLAANDGATEVLVYLHM

SEQ ID NO: 8144 - protein, 181 aa, Zea mays
  VARIANT 53: note = Ancestral polymorphism is P, Derived polymorphism is H
  VARIANT 130: note = Ancestral polymorphism is R, Derived polymorphism is W
  VARIANT 150: note = Ancestral polymorphism is A, Derived polymorphism is T
MQICVSDDVVAVQRSPAIQRSPYCFLTCSSSCTVELPHHGSALKEQISSTKIPARLKSGSGLCSACENFTSEAVTYLGKEQTQDRIMEFLHDACSQSFSFEQKCVELMDSYATLLFAKITEIRPEAFCKRYGLCRDTTLLSGVGSDSTSARFEIIQILVKECNKIEGHVQQVGFLALPLSL

SEQ ID NO: 8145 - protein, 224 aa, Zea mays
  VARIANT 50: note = Ancestral polymorphism is T, Derived polymorphism is M
  VARIANT 10: note = Ancestral polymorphism is K, Derived polymorphism is Q
MSVEQLHARKLLSHAAAAAAASSAGPPATEAQVPAAHAHAAAPFSSLNTMVITALSLLLCGLVVVLAVHAVVRCAFRVTRRVCYGQDEESPGGGGGGGADASAAAASFSCQAGPRRKRGPRTGLPPWILYSREVELTGCGAAECAICLTEFVRGDRVRALPHCNHGFHVRCIDRWLAARQTCPTCRRAPFAAKPSLSLPDSAEAPESVQLQARVESGAGQHETQ

SEQ ID NO: 8146 - protein, 249 aa, Zea mays
  VARIANT 198: note = Ancestral polymorphism is G, Derived polymorphism is C
  VARIANT 180: note = Ancestral polymorphism is E, Derived polymorphism is G
  VARIANT 175: note = Ancestral polymorphism is L, Derived polymorphism is F
  VARIANT 171: note = Ancestral polymorphism is A, Derived polymorphism is V
  VARIANT 110: note = Ancestral polymorphism is P, Derived polymorphism is S
  VARIANT 89: note = Ancestral polymorphism is A, Derived polymorphism is V
  VARIANT 73: note = Ancestral polymorphism is E, Derived polymorphism is D
  VARIANT 52: note = Ancestral polymorphism is L, Derived polymorphism is V
  VARIANT 46: note = Ancestral polymorphism is T, Derived polymorphism is A
  VARIANT 4: note = Ancestral polymorphism is P, Derived polymorphism is L
MEAPVPAPATMNLGARNKTKIVDAGALEPLLGYLRSSDPNLQEYATAALLTLSTSSTTKPVIGASGAIPLLVEVLKGGNPQAKNDVVMALYNLSTIADNLQAILSAQPIPPLIELLKGGKRSSKTADKCCALLESLLAFDQCRVALTSEEGGVLAVVEVLEEGSLQGREHAVGALLTMCESDRSRYRDLILNEGAIPGLLELTVHCRAPEGAPNVLVLSSFITTSLLDPDRRRRRLDRRQRWRVTSVMH

SEQ ID NO: 8147 - protein, 408 aa, Zea mays
  VARIANT 55: note = Ancestral polymorphism is V, Derived polymorphism is D
  VARIANT 64: note = Ancestral polymorphism is P, Derived polymorphism is L
  VARIANT 105: note = Ancestral polymorphism is V, Derived polymorphism is A
  VARIANT 118: note = Ancestral polymorphism is V, Derived polymorphism is L
  VARIANT 136: note = Ancestral polymorphism is A, Derived polymorphism is T
  VARIANT 147: note = Ancestral polymorphism is A, Derived polymorphism is S
  VARIANT 149: note = Ancestral polymorphism is S, Derived polymorphism is C
  VARIANT 237: note = Ancestral polymorphism is R, Derived polymorphism is G
  VARIANT 263: note = Ancestral polymorphism is R, Derived polymorphism is L
MASAPGEVPSHFLCPISLQLMREPVTLPTGISYDRAAISRWLATPAPAGGRTCPVTRVPLPPQPQLTPNHTLRRLIHAWLASLSPEAEVNEDVAALRGPVPGAEVVVALLSDAAGAQVEALKRLRELVAECEDSRAVLESQDGVFDALSRVVSSADACSTAREEAVGLLASLRIPEPELAGVVARHSNLGDALTAVLRSSNLKSRANAALLVRSLSEAAWPAWVIGLSQELLAEVVRVVRDRVSTQATKAALHALAALCPYGLTRVKIVGVGAVPAIVDLLLDDPERRVNELALVALDRLCTCAEGRAELVAHAAGLAVVGKKALRVSETASERAVRVLRSVARHAATPAVLQEMVESGVVAKLCAALWSQQCGLRTKQKAHEVLKLHSRTWRSSPCLSPKFLGLYPS

SEQ ID NO: 8148 - protein, 476 aa, Zea mays
  VARIANT 120..476: note = Derived polymorphism lacks residues 120 to 476
  VARIANT 102: note = Ancestral polymorphism is F, Derived polymorphism is I
  VARIANT 20: note = Ancestral polymorphism is G, Derived polymorphism is S
MDARSSSSMHVVMLPWLAFGHILPFTELAKRIARQGHRVTLFSTPRNTRRLIRIPPELAGNIRVVDITLPRVERLPEDSEASIDLPSDDLRPYLRVAYDAAFADKLSAILQEPVPERPDWVVIDYAAYWAPAAAARHGVPCAFLSLFGAAALSFYGPPEGLMGRGKYARTKPEDLTVVPDYVPFPTTVAYRGLEAREFFTPVLAPDESGVSEGYRFGKCIEQSQLVGIRSSAEFEPEWLQVVSGLYQKPVIPVGLFPPPPPTQDIGSHKAALQWLDGQAPRSVVYAAFGSEAKLTSAQLQAIALGLEASGLPFLWAFRQPTDANEGKSGLPEGFEERINGRGLVCRGWVPQARFLAHESVGGFLTHAGWNSIIEGLARGVRLVLLPLMFDQGLNARHLTEKKISVEVPRDEEDGSFAPKDIAAALRRVLVDEECEVFGDKAKELAKLFGNDEMNDQCVRDFLKCMSEYSRQRQVAL

SEQ ID NO: 8149 - protein, 956 aa, Zea mays
  VARIANT 3: note = Ancestral polymorphism is A, Derived polymorphism is D
  VARIANT 14..956: note = Derived polymorphism lacks residues 14 to 956
  VARIANT 127..956: note = Derived polymorphism lacks residues 127 to 956
MDARSSMHVVMLPWLAFGHILPFTELAKRIARQGHRVTLFSTPRNTRRLIRIPPELAEHIRVVDIALPRVERLPEDAEASIDLPSDDLRPHLHVAYDAAFAGKLSEILQEPYPGKPDWVVIDYAAHWAPAAAARHGVPCAFLSLFSAAVVVFYGPAEGLMGRGRYARVKPEQLTVVPDYVPFPTTVAYRGLEARESFTLVLAPDESGMSDGYRFGKCIAESQLVGIRSSAEFEPEWLQVVGGLYQKPVIPVGLFPPPPTQDIGGHKAALQWLDGQPRRSVVYAAFGSEAKLTSAQLQAIALGLEASGLPFLWAFRQPVDANEGESGLPEGFEERIDGRGLVCRGWVPQTRFLAHESVGGFLTHAGWNSIIEGLARGVRLVLLPLVFDQGLNARHLTEKKISVEVPRDDEDGSFAPKDIAAALRKVLVEEGCEVFGDKAEVLAVLFGNDEMNDQCVRDFLKCMLEYSRQHQDSKPIPFTELSPSAMGDANGGSMHVVMLPWLAFGHILPFTELAKRIARQGHRVTLFSTPRNTRRLIRIPPELAGHIRVVDIALPRVERLPEDCEASIDLPSDDLRPYLRVAYDTAFADKLSAILKEPGPERPDWVLIDYAAYWAPAAAAKHGVPCAFLSLFGAATLSFYGPPEGLMGRGKYARTKPEDLTVVPDYVPFPTTVAHRSFEARELFKPGLVPDDSGVSEGHRFGVSIGESQIVGIRSRTELESEWLQVLGKLYKKPVIPIGLFPPPPTQDIAGHEATLRWLDRQAQGSVVYAAFGSEAKLTSAQLQTIALGLEASGLPFLWAFRPPADAAPGQGTGGLPEGFEERVNDRGLVCRGWVPQPRLLAHESVGGFLTHAGWNSIAEGLSRGVTMVLLPLMFDQGLNARLLVDKKIGIEVERDEDDGTFAPKDIADALRTAMAENQDGTRVKELAEVFGNDEANDQCLRDFLRYLSEYIRQHQG

SEQ ID NO: 8150 - protein, 99 aa, Zea mays
  VARIANT 84: note = Ancestral polymorphism is E, Derived polymorphism is K
  VARIANT 74: note = Ancestral polymorphism is G, Derived polymorphism is S
  VARIANT 60: note = Ancestral polymorphism is V, Derived polymorphism is D
  VARIANT 59: note = Ancestral polymorphism is A, Derived polymorphism is T
  VARIANT 47: note = Ancestral polymorphism is S, Derived polymorphism is L
  VARIANT 28: note = Ancestral polymorphism is P, Derived polymorphism is L
  VARIANT 1: note = Ancestral polymorphism is T, Derived polymorphism is M
MAGGVYDVNLVMRLVRVFVASEEDTDAPSERMWKVGRLVDKYLDEISQDQGLKVSKFLAVAESLPDSARDCYDSVYRVLDIYLEKIVQGGNEFVWSGFI

SEQ ID NO: 8151 - protein, 234 aa, Zea mays
  VARIANT 76: note = Ancestral polymorphism is R, Derived polymorphism is W
  VARIANT 79: note = Ancestral polymorphism is Q, Derived polymorphism is L
  VARIANT 116: note = Ancestral polymorphism is P, Derived polymorphism is L
  VARIANT 217: note = Ancestral polymorphism is A, Derived polymorphism is V
MNHHPQEGVVYGYTEVTYLASTGPPPPYHPPPPLPPPPPPPPRRPSPFRIIVRVFIGVCVFIGVLALLIWLIYRPRTIQVAVATATLARFDLNTTSIFTPPVLSYNLTVMLSVSNPNRRVSVYYDQLQAAGLYQEERFGRAALPVSFQGTRRADAVPALLVGDTPMGFGDSGVAAFGEDRRAGVFPVDLWVEGVVRYKFGELMTTTASTLTIKCHLALKLMQASGWVECTVSDS

SEQ ID NO: 8152 - protein, 232 aa, Zea mays
  VARIANT 29: note = Ancestral polymorphism is P, Derived polymorphism is S
MASHEHKIDQPYYGRPPIPPEAPAAGVRPLARRDASYALLCHAFRALTLALIAVGVVALVLWLVYQPSSLKAYVDSAQLTRFDLDNSGTQTHQLRYNLTVGVSIRNPNRKQAVLYRRLDAVALYGGERLGYVDFPRARQERRSTMEVRPSFRGQAALAGAGAAAALFGREKGEGFFSINVKLHTRVRLKVAVVDSAEYRPDVDCYVRVPDPGNATAVALGFTPTQCHVDDFS

SEQ ID NO: 8153 - protein, 127 aa, Zea mays
  VARIANT 19: note = Ancestral polymorphism is R, Derived polymorphism is C
  VARIANT 59..127: note = Derived polymorphism lacks residues 59 to 127
  VARIANT 62..127: note = Derived polymorphism lacks residues 62 to 127
  VARIANT 78..127: note = Derived polymorphism lacks residues 78 to 127
MEKGAGTRRWRLVERGSDRLAFINSQTRSLSCDPIPDSPCRPEFEGSAENEFIERNQLQKSEPNNDLVPGFQHPNTRQGVKARTLSYDDLVPGIQRADGRQEMKASTLSYEDELFRKFKMGSSVPEI

SEQ ID NO: 8154 - protein, 188 aa, Zea mays
  VARIANT 59: note = Ancestral polymorphism is R, Derived polymorphism is L
  VARIANT 49: note = Ancestral polymorphism is V, Derived polymorphism is I
MDFHHGCHNSSIHAAAAPPARPWSKEENKMFESALVMWPEHTPERWALVAAQLHGRTPREAWEHYEALVADIALIERGGVDVPACWNDDNQVRGGCEGGTGNSRRAGADRAHREGRRPGKPWSEEEHRLFLQGLEKYGRGDWRNISRFTVRTRTPAQVASHAQKYFNRQLNPASRNSKRKSIHDITTP

SEQ ID NO: 8155 - protein, 292 aa, Zea mays
  VARIANT 125: note = Ancestral polymorphism is R, Derived polymorphism is H
  VARIANT 111: note = Ancestral polymorphism is R, Derived polymorphism is C
  VARIANT 94: note = Ancestral polymorphism is G, Derived polymorphism is R
  VARIANT 69: note = Ancestral polymorphism is E, Derived polymorphism is G
  VARIANT 58: note = Ancestral polymorphism is L, Derived polymorphism is Q
MAVGLPPGYRFYPTEEELICFYLRNKLDNLRDDIERVIPVVDVYSVDPCQLPGIHELLCDGGAGAGEGEPWFYFCPRQEREARGGRPSRTTPSGYWKAAGTPGAVYSADRRAIGVKKTMVFYYGRAPSGTKTKWKMNEYRAFQFETPGPGLGLAAAGVAADGSSSSSAHHAADGPAPPPNVGPQLRGEFSLCRLYTKSGSLRQFDRRPLAATGGVVVPGEDPAGPFTAVAASPPDDDDGSGSSMQQQQQQLTGGGANNDPYGDGVVTEREDAHDPFGDDVAMLDALLYWPGD

SEQ ID NO: 8156 - protein, 211 aa, Zea mays
  VARIANT 66: note = Ancestral polymorphism is H, Derived polymorphism is Y
MDRMRHRNSVSSERFLGSFARSAAAGEQSASTAFELDEDDLFSAGSGSPEPPQPLRRPLILSSVRHANPSPVPRLRRPPEGILDALPERRRSPPQSSSSTSSSPASPAAAPPRMIPAVPRPAPAPAPYVPQSLPVNVPAARLRKPPVVMVMGEAEDEYEEMLPPHEMLARARARESPMTTFSMLEGAGRTLKGRDLRQVRNAVWRKTGFLD

SEQ ID NO: 8157 - protein, 468 aa, Zea mays
  VARIANT 17..468: note = Derived polymorphism lacks residues 17 to 468
MPSGGRRRRGTGLGFAWRTEDRMSGRRNGCGGSGEPDPAEKRSSSSSSKAVEADCSPAAAERAKEPRKRSELTEFLCRMRSMVELARAVACASERSSSQSQRSAAAGAPFLSISVTDPVKMGTGVQSYISYRVITKTNLPEFEGPEKIVIRRYSDFEWLHDRLAERYKGIFIPPLPEKNAVEKFRFSKEFIELRRQALDLFVNRIASHPELKQSDVLRTFLQADEEIMDRARSYETGIFKKPADFIQMFKDVQSKVSDVVLGKEKPVEESTPEYEKLKNYIFELENHLAEAQKQAYRLVKRHRELGQSLADFGKAIKHLGACEGDLMEKVFSEVGSKSEMLSIKLQREADNLLFNFEEPLKDYVRAVQSIKATMLDRANAFRQHFDLDQERKYKELNLYLKADSEEATKKFEHIVRLMNEELARFQEQKTADIGLAFHEFAKGQAKLAKDIADAWRSVLPKLEACSTS

SEQ ID NO: 8158 - protein, 359 aa, Zea mays
  VARIANT 235: note = Ancestral polymorphism is S, Derived polymorphism is R
  VARIANT 239: note = Ancestral polymorphism is S, Derived polymorphism is L
  VARIANT 245..359: note = Derived polymorphism lacks residues 245 to 359
MAASLRASSSLRSRLLSFSSGCSLCPWRLLLSSPVHSDAPHQTETLAFDEIQLSPEKPATATAFVLHGLLGSGRNWRSFSRALVSELRNRSPSDEWRMVLVDLRNHGRSAGIKGLGPPHNISTAAKDLADLVKARGWPWPDVVVGHSMGGKVALDFAESCSRGVYGDSANLPKQLWVLDSVPGQVETENSDGEVEQVLQTLASLPSSLPSRKYYLVPSLAELLRATRWVVDHMLSLGFSKSLSEWIGSNLKKDNDHVTWAFNLQAAIDMFSSYRERDYWSVLEHPPKDLEIAIVQAEHSDRWVPDDVQRLKALAGRESKPDVGKVSLHVLPNSGHWVHVDNPKGLLEIMVPNFLSAVQN

SEQ ID NO: 8159 - protein, 250 aa, Zea mays
  VARIANT 46: note = Ancestral polymorphism is S, Derived polymorphism is L
  VARIANT 51: note = Ancestral polymorphism is K, Derived polymorphism is Q
  VARIANT 57..250: note = Derived polymorphism lacks residues 57 to 250
  VARIANT 77..250: note = Derived polymorphism lacks residues 77 to 250
  VARIANT 81: note = Ancestral polymorphism is G, Derived polymorphism is C
  VARIANT 91: note = Ancestral polymorphism is A, Derived polymorphism is T
  VARIANT 111: note = Ancestral polymorphism is T, Derived polymorphism is A
  VARIANT 157: note = Ancestral polymorphism is R, Derived polymorphism is Q
MAAATAVFHWAGDAHYAHLLLHHAQQLFDFANTYRGRYDAALQGELVGVNKIHVKPQFFDVGKDCNWARGIRRTEIQLADGKNCELHRCWTDILDAISKAQHLIYITGWLTILVRDDSNSVDLLTKEGLLTTHDVEIAKGEQEIMNEVLPAESRSSRFGVAMDLADIWPCYESKPSDAQGYAIKGIPNLRNTCYRSAVLQCLLMLGKLLERILPSTWLAIQGCSRTGIAIQGYYHQFSYFIHKLFSVELV

SEQ ID NO: 8160 - protein, 414 aa, Zea mays
  VARIANT 13: note = Ancestral polymorphism is G, Derived polymorphism is R
  VARIANT 12: note = Ancestral polymorphism is K, Derived polymorphism is M
  VARIANT 10: note = Ancestral polymorphism is V, Derived polymorphism is A
MLPSSFIVRADKGTLFLLLYIPVANNERLACVNLAVSAQQKFGINYGQIANNLPDPTQVATLLRSMNVNKVKLYDADPRVLTAFANTGVEFIIAVGNENLQTMAGSPAAARQWVAANVRPYIPATRITCVTVGNEVFSGNDTATMASLLPAMKAVHAALADLGLGGQATVSSAHSVNVLAASFPPSSGAFREDLAEYMKPILDFHAQTGSPFLINAYPFFAYKASPGSVSLPYVLFEPNPGVRDPSTGLSYDNMLYAQIDAVYAAMKAMGHTDVGVRISETGWPSRGDEDETGATVQNAAAYNGNLMQRVAMSQGTPLKPNVPVDVYVFALFNENMKPGPTSERNYGLFYPNGSPVYALSAGSGGGSGPGGSLNPYYTSMFSSSSRSAVSATFLTERVMLLLLLQATVILRHYC

SEQ ID NO: 8161 - protein, 301 aa, Zea mays
  VARIANT 49: note = Ancestral polymorphism is F, Derived polymorphism is L
  VARIANT 26: note = Ancestral polymorphism is A, Derived polymorphism is T
  VARIANT 19: note = Ancestral polymorphism is A, Derived polymorphism is S
MALAMATVLMALGGVAATARAGGGIAIYWGQNGNEGTLAQTCATGNYRFVNVAFLPTFGRGQTPALNLAGHCDPASGGCTGVGADVKACQRMGVKVLLSIGGGVGSYGLSSRADARSVAAYLWDNYLGGGGSESRPLGDAVLDGVDFDIESGGGMYWDDLARFLKSYSRRGRGRARRPVYLSAAPQCPFPDASLGTALATGLFDYVWVQFYNNPPCQYSASAGVGSLAQAWAQWTSIRAGRVFLGLPAAPQAAGSGFVPASDLVAQVLPVVKNSTKYGGIMLWSRYYDGLTGYSDAVKSYV

SEQ ID NO: 8162 - protein, 299 aa, Zea mays
  VARIANT 242: note = Ancestral polymorphism is L, Derived polymorphism is R
  VARIANT 239: note = Ancestral polymorphism is Q, Derived polymorphism is R
  VARIANT 202: note = Ancestral polymorphism is L, Derived polymorphism is Q
  VARIANT 190: note = Ancestral polymorphism is P, Derived polymorphism is Q
  VARIANT 92: note = Ancestral polymorphism is R, Derived polymorphism is L
MAVARPLAPFQLIAVLSLALLVTSHAGGIAVYWGQNTGEVTLSATCASRRYQFVILAFVSQFGEGRAPRLDLSGHCDDASSGGCSGLSDDIRSCQRRGVKVLLSIGGGEGRYGLSSPADARLVAAYLWNTFLGGTSSSRPLGDAVLDGIDFDIELGRAKFWDNLARDLKDMGKDGDKAVLLSAAPQCPFPDQWDGAAINTGLFDYVWVQFYNNPECQFSSGRNAFLDAWKQWESVPAGQIFLGLPASKDAAGTGFVPAGQLTSQVLPLIKGSPKYGGVMLWSKFYDDRTGYSSAIKSHV

SEQ ID NO: 8163 - protein, 294 aa, Zea mays
  VARIANT 17: note = Ancestral polymorphism is V, Derived polymorphism is M
  VARIANT 3: note = Ancestral polymorphism is N, Derived polymorphism is K
MANRALAPFLLVTTLLVSLLATCHGGGIAVYWGQNDGEASLSETCASGNYKFVILAFVYKFGKGQTPQLDLASHCDPSSGGCTGLSKDIRSCQNSGIKVLLSIGGGDGSYGLSSEGDARDVAAYLWNNYLGGTSSSRPLGDAVLDGIDFDIELGGAKYWDSLARDLKNKGGKGVLLSAAPQCPFPDEWDGGAINTGLFDYVWVQFYNNPPCQVNAGRGAFMDAWKQWESVPAGQIFLGLPASKDAAGTGFVPADDLNSNVLPLIRGSPKYGGVMLWSKYYDDRAGYSDAIKSHV

SEQ ID NO: 8164 - protein, 307 aa, Zea mays
  VARIANT 180..307: note = Derived polymorphism lacks residues 180 to 307
  VARIANT 87: note = Ancestral polymorphism is S, Derived polymorphism is L
  VARIANT 44: note = Ancestral polymorphism is N, Derived polymorphism is Y
  VARIANT 10: note = Ancestral polymorphism is G, Derived polymorphism is A
MTAKNQNMAARELTRLHLQLVAIVLVAILATCHAGSIAVYWGQNDGESSLSDTCASGNYKFVVIAFVYKFGKGQTPELNLAGHCDPSSGGCKCLSKDIRSCQRRGVKVLLSIGGADGSYGLASERDAREVAEYLWNNYLGGNSSSRPLGDAVLDGVDFDIERGGAKYWDVLARELKDMGKEKDGNAVLLSAAPQCPFPDEWDDGAIKTGLFDFVWVQFYNNPPCQVSAGPRAFLHAWKRWQSVPAGQIFLGLPASKSAAGTGFVPAGKLTSQVLPLIRRSRKYGGVMLWAKFYDDHTGYSDAIKRHV

SEQ ID NO: 8165 - protein, 254 aa, Zea mays
  VARIANT 231: note = Ancestral polymorphism is P, Derived polymorphism is L
  VARIANT 184: note = Ancestral polymorphism is E, Derived polymorphism is D
  VARIANT 182: note = Ancestral polymorphism is G, Derived polymorphism is D
  VARIANT 114: note = Ancestral polymorphism is A, Derived polymorphism is S
  VARIANT 107: note = Ancestral polymorphism is H, Derived polymorphism is D
  VARIANT 106: note = Ancestral polymorphism is Y, Derived polymorphism is H
MSKLQSDSLRDAIASITNDSREKQRKFVETIELQIGLKNYDPQKDKRFSGSVKLPHIPRPKMKVCMLGDAQHVEEAERIGIDNMDVEALKKMNKNKKLVKKLAKKYHAFLASEAIIKQIPRLLGPGLNKAGKDLFLFCTLGKFPTLVTHQESLESKVNETKATVKFQLKKVLCMGVAVGNCGMDEKQIFQNVQMSVNFLVSLLKKNWQNVCEMLVPEEHYGKGVPAVLNFPIRLRISRRLECLDTCHFPYHPFF

SEQ ID NO: 8166 - protein, 324 aa, Zea mays
  VARIANT 199: note = Ancestral polymorphism is E, Derived polymorphism is G
  VARIANT 257: note = Ancestral polymorphism is P, Derived polymorphism is L
  VARIANT 308: note = Ancestral polymorphism is T, Derived polymorphism is I
MPFARRYALRAARLYPTSPRAPVVATAANVLLADASSHHAALLLPEPDDPDASPLSVSELCRHFKSLIKSLRVGLDATTAAAYPSVAAAAEEALDRATKAYEALTAPAPGTFWTACAGCRLLHEFERKLYRELRSCLDLTGPRDYSSPEEMVQRLTSASTVLRRVLDNPALQDCQENNGFGDMMDEDVISNISIFLEIELSFCDPRRIADLLMCLALRLLLQPSWVRQVGPSDPQRFSFILVGNKIDSDGGSKQMVLEKKAREWCASKGDIPYFETSAKEDHNVDTAFLCIARLALEHEHDQDIYFKTVAEQVPDTEQTSRCAC

SEQ ID NO: 8167 - protein, 419 aa, Zea mays
  VARIANT 27: note = Ancestral polymorphism is A, Derived polymorphism is V
  VARIANT 71: note = Ancestral polymorphism is M, Derived polymorphism is I
  VARIANT 75: note = Ancestral polymorphism is C, Derived polymorphism is R
MELLPVEVVGNILSHLGVARDVMIASAVCRKWRDACRRHLRLLSFNSNDFPRDMTTRQLEIVITQTIFQTMGLQRLSIHIDNTHEFSAAPVIAWLMYTRETLRSLSYNVRTIPNVSILEKCGRQKLEVLDLELDHNTITGVEPSYQRFTCLKSLSLRHVSILALDLSLLVAACPRIESLALDVLEVVTSELQSTMELTSHTLKSLFAKSVGVDKIILDADNLEVLHLNALNLDLFELNGKGTLKHFKIDDVSVTHLDIGDNTDHLEAVDVSNFTIVWPKFYSMISRASNLRMLRFWGVVFDDEDEIVDSETIAVSFPLLRHLSLSYELRDGLLHYSLQGSSLLENVSVLELGWTVISEHFGPWVFGMIGRCPNLKKLVIHGVLSETKTREDRQMLASFTSFIVCVMRKYVHVDVQFEYE

SEQ ID NO: 8168 - protein, 354 aa, Zea mays
  VARIANT 337..354: note = Derived polymorphism lacks residues 337 to 354
  VARIANT 315: note = Ancestral polymorphism is G, Derived polymorphism is A
  VARIANT 260: note = Ancestral polymorphism is V, Derived polymorphism is M
  VARIANT 252: note = Ancestral polymorphism is A, Derived polymorphism is T
MVKTEEHYSLPSARKIYGYQSNYLWKIFHHVSKVSFPHNLHLHNQVLQNNEQPTHLPGQQHRWTPNTNNIDGHLTVFDNVSVQNNKARATDLDARSSGRQGGEGDAGCGDSFIEQRPREDRREKAAVVGEGEGDAGCGDNFIEQRPREDKREKAAVVGDSLARMGERSSGRRGGRGRDDVGRSGSVGGRWPHEDGREKTLVVRAPVLLTPASQWFMDLTASSIPHGASPHAVAAFHNMLIRADANAKAACRASEALDAIVSCLVDLDLCSLTSSLRHIERLVDVVGLLTRALGSCLDSVLPLVVSVVVNGLCKSGLVDDACRLLNDMPRNGVKLNVLWYNLMLDCYDIVALATS
